(19) United States
(12) Patent Application Publication
(10) Pub. No.: US 2026/0176620 A1
(43) Pub. Date: Jun. 25, 2026

(54) RNA AGENTS TARGETING BCL11A AND RELATED METHODS

(71) Applicant: Marrow Therapeutics, Inc., Watertown, MA (US)

(72) Inventors: Romesh Ramsunder SUBRAMANIAN, Framingham, MA (US); Timothy Everett WEEDEN, Sturbridge, MA (US); Duncan Parley BROWN, Berkeley, CA (US); James Anthony MCSWIGGEN, Arvada, CO (US); Kathrin Stefani GERAUER, Prichsenstadt (DE); Jochen DECKERT, Bayreuth (DE)

(21) Appl. No.: 19/349,289

(22) Filed: Oct. 3, 2025

Related U.S. Application Data
(60) Provisional application No. 63/703,718, filed on Oct. 4, 2024.
(60) Provisional application No. 63/746,950, filed on Jan. 18, 2025.

(51) Int. Cl. C12N 15/11; A61K 31/713; C12N 15/113; C12N 15/63

(52) U.S. Cl. CPC C12N 15/111; A61K 31/713; C12N 15/113; C12N 15/1137; C12N 15/63; C12N 2310/14; C12N 2310/315; C12N 2310/3521

(57) ABSTRACT

Provided herein are, inter alia, agents (e.g., dsRNA agents comprising a sense strand and an antisense strand; RNAi agents, ssRNAs, ASOs) comprising a sense strand and an antisense strand targeting BCL11A (e.g., hBCL11A); and methods of manufacturing and pharmaceutical compositions comprising the same. Further provided herein are methods of utilizing the agents (e.g., dsRNA agents comprising a sense strand and an antisense strand; RNAi agents, ssRNAs, ASOs) including, e.g., methods of inhibiting or decreasing BCL11A expression (e.g., mRNA expression), methods of treating BCL11A associated diseases.

### RELATED APPLICATIONS

[0001] This application claims priority to U.S. Ser. No. 63/703,718, filed Oct. 4, 2024; and U.S. Ser. No. 63/746,950, filed Jan. 18, 2025, the entire contents of each of which is incorporated herein by reference.

### SEQUENCE LISTING

[0002] The instant application contains a Sequence Listing which has been submitted electronically in XML format and is hereby incorporated by reference in its entirety. Said XML copy, created on Feb. 19, 2026, is named 66504_27US01_SL.xml and is 24,543,232 bytes in size.

### 1. FIELD

[0003] This disclosure relates to RNA agents (e.g., double stranded RNA (dsRNA) agents comprising a sense strand and an antisense strand; RNAi agents, single stranded RNAs (ssRNAs), antisense oligonucleotides (ASOs), etc.) targeting BCL11 transcription factor A (BCL11A). The disclosure further relates to pharmaceutical compositions comprising the same; and methods of utilizing the same, including, e.g., methods of treating BCL11A associated diseases.

### 2. BACKGROUND

[0004] Transcription factor B-cell lymphoma/leukemia 11A (BCL11A) gene encodes a zinc-finger protein. BCL11A, e.g., associates with the SWI/SNF complex, that regulates gene expression via chromatin remodeling. BCL11A is highly expressed in several hematopoietic lineages, and plays a role in the switch from γ- to β-globin expression during the fetal to adult erythropoiesis transition.

### 3. SUMMARY

[0005] Provided herein are, inter alia, agents (e.g., RNA agents, RNAi agents, dsRNA agents, siRNA agents, ssRNA agents, antisense oligonucleotides, etc.) comprising a sense strand and an antisense strand targeting BCL11A (e.g., hBCL11A); and methods of manufacturing and pharmaceutical compositions comprising the same. Further provided herein are methods of utilizing the agents (e.g., RNA agents, RNAi agents, dsRNA agents, siRNA agents, ssRNA agents, antisense oligonucleotides, etc.) including, e.g., methods of inhibiting or decreasing BCL11A expression (e.g., mRNA expression), methods of treating BCL11A associated diseases.

[0006] Accordingly, in one aspect, provided herein dsRNA agents for inhibiting expression of BCL11A (e.g., hBCL11A), wherein the dsRNA agent comprises a sense strand and an antisense strand forming a double stranded region, wherein the nucleotide sequence of the antisense strand differs by no more than 5 (e.g., 0, 1, 2, 3, 4, or 5) nucleotides from the nucleotide sequence of any one of the antisense strands set forth in any one of Tables 2-5 or set forth in any one of SEQ ID NOS: 4-1576 (e.g., any one of SEQ ID NOS: 4-19 or 772-787).

[0007] In some embodiments, the nucleotide sequence of the sense strand differs by no more than 5 (e.g., 0, 1, 2, 3, 4, or 5) nucleotides from the nucleotide sequence of the corresponding sense strand set forth in Tables 2-5 or the corresponding sense strand set forth in one of SEQ ID NOS: 1577-3166 (e.g., any one of SEQ ID NOS: 1577-1592 or 2346-2361).

[0008] In some embodiments, the nucleotide sequence of the antisense strand differs by no more than 3 (e.g., 0, 1, 2, or 3) nucleotides from the nucleotide sequence of any one of the antisense strands set forth in any one of Tables 2-5 or set forth in any one of SEQ ID NOS: 4-1576 (e.g., any one of SEQ ID NOS: 4-19 or 772-787); and the nucleotide sequence of the sense strand differs by no more than 3 (e.g., 0, 1, 2, or 3) nucleotides from the nucleotide sequence of the corresponding sense strand set forth in any one of Tables 2-5 or the corresponding sense strand set forth in one of SEQ ID NOS: 1577-3166 (e.g., any one of SEQ ID NOS: 1577-1592 or 2346-2361).

[0009] In some embodiments, the nucleotide sequence of the antisense strand comprises the nucleotide sequence of any one of the antisense strands set forth in any one of Tables 2-5 or set forth in any one of SEQ ID NOS: 4-1576 (e.g., any one of SEQ ID NOS: 4-19 or 772-787); and the nucleotide sequence of the sense strand comprises the nucleotide sequence of the corresponding sense strand set forth in any one of Tables 2-5 or the corresponding sense strand set forth in one of SEQ ID NOS: 1577-3166 (e.g., any one of SEQ ID NOS: 1577-1592 or 2346-2361).

[0010] In some embodiments, (a) the nucleotide sequence of the antisense strand differs by no more than 5 (e.g., 0, 1, 2, 3, 4, or 5) nucleotides from the nucleotide sequence set forth in SEQ ID NO: 4; and the nucleotide sequence of the sense strand differs by no more than 5 (e.g., 0, 1, 2, 3, 4, or 5) nucleotides from the nucleotide sequence set forth in SEQ ID NO: 1577; (b) the nucleotide sequence of the antisense strand differs by no more than 5 (e.g., 0, 1, 2, 3, 4, or 5) nucleotides from the nucleotide sequence set forth in SEQ ID NO: 5; and the nucleotide sequence of the sense strand differs by no more than 5 (e.g., 0, 1, 2, 3, 4, or 5) nucleotides from the nucleotide sequence set forth in SEQ ID NO: 1578; (c) the nucleotide sequence of the antisense strand differs by no more than 5 (e.g., 0, 1, 2, 3, 4, or 5) nucleotides from the nucleotide sequence set forth in SEQ ID NO: 6; and the nucleotide sequence of the sense strand differs by no more than 5 (e.g., 0, 1, 2, 3, 4, or 5) nucleotides from the nucleotide sequence set forth in SEQ ID NO: 1579; (d) the nucleotide sequence of the antisense strand differs by no more than 5 (e.g., 0, 1, 2, 3, 4, or 5) nucleotides from the nucleotide sequence set forth in SEQ ID NO: 7; and the nucleotide sequence of the sense strand differs by no more than 5 (e.g., 0, 1, 2, 3, 4, or 5) nucleotides from the nucleotide sequence set forth in SEQ ID NO: 1580; (e) the nucleotide sequence of the antisense strand differs by no more than 5 (e.g., 0, 1, 2, 3, 4, or 5) nucleotides from the nucleotide sequence set forth in SEQ ID NO: 8; and the nucleotide sequence of the sense strand differs by no more than 5 (e.g., 0, 1, 2, 3, 4, or 5) nucleotides from the nucleotide sequence set forth in SEQ ID NO: 1581; (f) the nucleotide sequence of the antisense strand differs by no more than 5 (e.g., 0, 1, 2, 3, 4, or 5) nucleotides from the nucleotide sequence set forth in SEQ ID NO: 9; and the nucleotide sequence of the sense strand differs by no more than 5 (e.g., 0, 1, 2, 3, 4, or 5) nucleotides from the nucleotide sequence set forth in SEQ ID NO: 1582; (g) the nucleotide sequence of the antisense strand differs by no more than 5 (e.g., 0, 1, 2, 3, 4, or 5) nucleotides from the nucleotide sequence set forth in SEQ ID NO: 10; and the nucleotide sequence of the sense strand differs by no more than 5 (e.g., 0, 1, 2, 3, 4, or 5) nucleotides from the nucleotide sequence set forth in SEQ ID NO: 1583; (h) the nucleotide sequence of the antisense strand differs by no more than 5 (e.g., 0, 1, 2, 3, 4, or 5) nucleotides from the nucleotide sequence set forth in SEQ ID NO: 11; and the nucleotide sequence of the sense strand differs by no more than 5 (e.g., 0, 1, 2, 3, 4, or 5) nucleotides from the nucleotide sequence set forth in SEQ ID NO: 1584; (i) the nucleotide sequence of the antisense strand differs by no more than 5 (e.g., 0, 1, 2, 3, 4, or 5) nucleotides from the nucleotide sequence set forth in SEQ ID NO: 12; and the nucleotide sequence of the sense strand differs by no more than 5 (e.g., 0, 1, 2, 3, 4, or 5) nucleotides from the nucleotide sequence set forth in SEQ ID NO: 1585; (j) the nucleotide sequence of the antisense strand differs by no more than 5 (e.g., 0, 1, 2, 3, 4, or 5) nucleotides from the nucleotide sequence set forth in SEQ ID NO: 13; and the nucleotide sequence of the sense strand differs by no more than 5 (e.g., 0, 1, 2, 3, 4, or 5) nucleotides from the nucleotide sequence set forth in SEQ ID NO: 1586; (k) the nucleotide sequence of the antisense strand differs by no more than 5 (e.g., 0, 1, 2, 3, 4, or 5) nucleotides from the nucleotide sequence set forth in SEQ ID NO: 14; and the nucleotide sequence of the sense strand differs by no more than 5 (e.g., 0, 1, 2, 3, 4, or 5) nucleotides from the nucleotide sequence set forth in SEQ ID NO: 1587; (l) the nucleotide sequence of the antisense strand differs by no more than 5 (e.g., 0, 1, 2, 3, 4, or 5) nucleotides from the nucleotide sequence set forth in SEQ ID NO: 15; and the nucleotide sequence of the sense strand differs by no more than 5 (e.g., 0, 1, 2, 3, 4, or 5) nucleotides from the nucleotide sequence set forth in SEQ ID NO: 1588; (m) the nucleotide sequence of the antisense strand differs by no more than 5 (e.g., 0, 1, 2, 3, 4, or 5) nucleotides from the nucleotide sequence set forth in SEQ ID NO: 16; and the nucleotide sequence of the sense strand differs by no more than 5 (e.g., 0, 1, 2, 3, 4, or 5) nucleotides from the nucleotide sequence set forth in SEQ ID NO: 1589; (n) the nucleotide sequence of the antisense strand differs by no more than 5 (e.g., 0, 1, 2, 3, 4, or 5) nucleotides from the nucleotide sequence set forth in SEQ ID NO: 17; and the nucleotide sequence of the sense strand differs by no more than 5 (e.g., 0, 1, 2, 3, 4, or 5) nucleotides from the nucleotide sequence set forth in SEQ ID NO: 1590; (o) the nucleotide sequence of the antisense strand differs by no more than 5 (e.g., 0, 1, 2, 3, 4, or 5) nucleotides from the nucleotide sequence set forth in SEQ ID NO: 18; and the nucleotide sequence of the sense strand differs by no more than 5 (e.g., 0, 1, 2, 3, 4, or 5) nucleotides from the nucleotide sequence set forth in SEQ ID NO: 1591; or (p) the nucleotide sequence of the antisense strand differs by no more than 5 (e.g., 0, 1, 2, 3, 4, or 5) nucleotides from the nucleotide sequence set forth in SEQ ID NO: 19; and the nucleotide sequence of the sense strand differs by no more than 5 (e.g., 0, 1, 2, 3, 4, or 5) nucleotides from the nucleotide sequence set forth in SEQ ID NO: 1592.

[0011] In some embodiments, (a) the nucleotide sequence of the antisense strand comprises the nucleotide sequence set forth in SEQ ID NO: 4; and the nucleotide sequence of the sense strand comprises the nucleotide sequence set forth in SEQ ID NO: 1577; (b) the nucleotide sequence of the antisense strand comprises the nucleotide sequence set forth in SEQ ID NO: 5; and the nucleotide sequence of the sense strand comprises the nucleotide sequence set forth in SEQ ID NO: 1578; (c) the nucleotide sequence of the antisense strand comprises the nucleotide sequence set forth in SEQ ID NO: 6; and the nucleotide sequence of the sense strand comprises the nucleotide sequence set forth in SEQ ID NO: 1579; (d) the nucleotide sequence of the antisense strand comprises the nucleotide sequence set forth in SEQ ID NO: 7; and the nucleotide sequence of the sense strand comprises the nucleotide sequence set forth in SEQ ID NO: 1580; (e) the nucleotide sequence of the antisense strand comprises the nucleotide sequence set forth in SEQ ID NO: 8; and the nucleotide sequence of the sense strand comprises the nucleotide sequence set forth in SEQ ID NO: 1581; (f) the nucleotide sequence of the antisense strand comprises the nucleotide sequence set forth in SEQ ID NO: 9; and the nucleotide sequence of the sense strand comprises the nucleotide sequence set forth in SEQ ID NO: 1582; (g) the nucleotide sequence of the antisense strand comprises the nucleotide sequence set forth in SEQ ID NO: 10; and the nucleotide sequence of the sense strand comprises the nucleotide sequence set forth in SEQ ID NO: 1583; (h) the nucleotide sequence of the antisense strand comprises the nucleotide sequence set forth in SEQ ID NO: 11; and the nucleotide sequence of the sense strand comprises the nucleotide sequence set forth in SEQ ID NO: 1584; (i) the nucleotide sequence of the antisense strand comprises the nucleotide sequence set forth in SEQ ID NO: 12; and the nucleotide sequence of the sense strand comprises the nucleotide sequence set forth in SEQ ID NO: 1585; (j) the nucleotide sequence of the antisense strand comprises the nucleotide sequence set forth in SEQ ID NO: 13; and the nucleotide sequence of the sense strand comprises the nucleotide sequence set forth in SEQ ID NO: 1586; (k) the nucleotide sequence of the antisense strand comprises the nucleotide sequence set forth in SEQ ID NO: 14; and the nucleotide sequence of the sense strand comprises the nucleotide sequence set forth in SEQ ID NO: 1587; (l) the nucleotide sequence of the antisense strand comprises the nucleotide sequence set forth in SEQ ID NO: 15; and the nucleotide sequence of the sense strand comprises the nucleotide sequence set forth in SEQ ID NO: 1588; (m) the nucleotide sequence of the antisense strand comprises the nucleotide sequence set forth in SEQ ID NO: 16; and the nucleotide sequence of the sense strand comprises the nucleotide sequence set forth in SEQ ID NO: 1589; (n) the nucleotide sequence of the antisense strand comprises the nucleotide sequence set forth in SEQ ID NO: 17; and the nucleotide sequence of the sense strand comprises the nucleotide sequence set forth in SEQ ID NO: 1590; (o) the nucleotide sequence of the antisense strand comprises the nucleotide sequence set forth in SEQ ID NO: 18; and the nucleotide sequence of the sense strand comprises the nucleotide sequence set forth in SEQ ID NO: 1591; or (p) the nucleotide sequence of the antisense strand comprises the nucleotide sequence set forth in SEQ ID NO: 19; and the nucleotide sequence of the sense strand comprises the nucleotide sequence set forth in SEQ ID NO: 1592.

[0012] In some embodiments, (a) the nucleotide sequence of the antisense strand differs by no more than 5 (e.g., 0, 1, 2, 3, 4, or 5) nucleotides from the nucleotide sequence set forth in SEQ ID NO: 772; and the nucleotide sequence of the sense strand differs by no more than 5 (e.g., 0, 1, 2, 3, 4, or 5) nucleotides from the nucleotide sequence set forth in SEQ ID NO: 2346; (b) the nucleotide sequence of the antisense strand differs by no more than 5 (e.g., 0, 1, 2, 3, 4, or 5) nucleotides from the nucleotide sequence set forth in SEQ ID NO: 773; and the nucleotide sequence of the sense strand differs by no more than 5 (e.g., 0, 1, 2, 3, 4, or 5) nucleotides from the nucleotide sequence set forth in SEQ ID NO: 2347; (c) the nucleotide sequence of the antisense strand differs by no more than 5 (e.g., 0, 1, 2, 3, 4, or 5) nucleotides from the nucleotide sequence set forth in SEQ ID NO: 774; and the nucleotide sequence of the sense strand differs by no more than 5 (e.g., 0, 1, 2, 3, 4, or 5) nucleotides from the nucleotide sequence set forth in SEQ ID NO: 2348; (d) the nucleotide sequence of the antisense strand differs by no more than 5 (e.g., 0, 1, 2, 3, 4, or 5) nucleotides from the nucleotide sequence set forth in SEQ ID NO: 775; and the nucleotide sequence of the sense strand differs by no more than 5 (e.g., 0, 1, 2, 3, 4, or 5) nucleotides from the nucleotide sequence set forth in SEQ ID NO: 2349; (e) the nucleotide sequence of the antisense strand differs by no more than 5 (e.g., 0, 1, 2, 3, 4, or 5) nucleotides from the nucleotide sequence set forth in SEQ ID NO: 776; and the nucleotide sequence of the sense strand differs by no more than 5 (e.g., 0, 1, 2, 3, 4, or 5) nucleotides from the nucleotide sequence set forth in SEQ ID NO: 2350; (f) the nucleotide sequence of the antisense strand differs by no more than 5 (e.g., 0, 1, 2, 3, 4, or 5) nucleotides from the nucleotide sequence set forth in SEQ ID NO: 777; and the nucleotide sequence of the sense strand differs by no more than 5 (e.g., 0, 1, 2, 3, 4, or 5) nucleotides from the nucleotide sequence set forth in SEQ ID NO: 2351; (g) the nucleotide sequence of the antisense strand differs by no more than 5 (e.g., 0, 1, 2, 3, 4, or 5) nucleotides from the nucleotide sequence set forth in SEQ ID NO: 778; and the nucleotide sequence of the sense strand differs by no more than 5 (e.g., 0, 1, 2, 3, 4, or 5) nucleotides from the nucleotide sequence set forth in SEQ ID NO: 2352; (h) the nucleotide sequence of the antisense strand differs by no more than 5 (e.g., 0, 1, 2, 3, 4, or 5) nucleotides from the nucleotide sequence set forth in SEQ ID NO: 779; and the nucleotide sequence of the sense strand differs by no more than 5 (e.g., 0, 1, 2, 3, 4, or 5) nucleotides from the nucleotide sequence set forth in SEQ ID NO: 2353; (i) the nucleotide sequence of the antisense strand differs by no more than 5 (e.g., 0, 1, 2, 3, 4, or 5) nucleotides from the nucleotide sequence set forth in SEQ ID NO: 780; and the nucleotide sequence of the sense strand differs by no more than 5 (e.g., 0, 1, 2, 3, 4, or 5) nucleotides from the nucleotide sequence set forth in SEQ ID NO: 2354; (j) the nucleotide sequence of the antisense strand differs by no more than 5 (e.g., 0, 1, 2, 3, 4, or 5) nucleotides from the nucleotide sequence set forth in SEQ ID NO: 781; and the nucleotide sequence of the sense strand differs by no more than 5 (e.g., 0, 1, 2, 3, 4, or 5) nucleotides from the nucleotide sequence set forth in SEQ ID NO: 2355; (k) the nucleotide sequence of the antisense strand differs by no more than 5 (e.g., 0, 1, 2, 3, 4, or 5) nucleotides from the nucleotide sequence set forth in SEQ ID NO: 782; and the nucleotide sequence of the sense strand differs by no more than 5 (e.g., 0, 1, 2, 3, 4, or 5) nucleotides from the nucleotide sequence set forth in SEQ ID NO: 2356; (l) the nucleotide sequence of the antisense strand differs by no more than 5 (e.g., 0, 1, 2, 3, 4, or 5) nucleotides from the nucleotide sequence set forth in SEQ ID NO: 783; and the nucleotide sequence of the sense strand differs by no more than 5 (e.g., 0, 1, 2, 3, 4, or 5) nucleotides from the nucleotide sequence set forth in SEQ ID NO: 2357; (m) the nucleotide sequence of the antisense strand differs by no more than 5 (e.g., 0, 1, 2, 3, 4, or 5) nucleotides from the nucleotide sequence set forth in SEQ ID NO: 784; and the nucleotide sequence of the sense strand differs by no more than 5 (e.g., 0, 1, 2, 3, 4, or 5) nucleotides from the nucleotide sequence set forth in SEQ ID NO: 2358; (n) the nucleotide sequence of the antisense strand differs by no more than 5 (e.g., 0, 1, 2, 3, 4, or 5) nucleotides from the nucleotide sequence set forth in SEQ ID NO: 785; and the nucleotide sequence of the sense strand differs by no more than 5 (e.g., 0, 1, 2, 3, 4, or 5) nucleotides from the nucleotide sequence set forth in SEQ ID NO: 2359; (o) the nucleotide sequence of the antisense strand differs by no more than 5 (e.g., 0, 1, 2, 3, 4, or 5) nucleotides from the nucleotide sequence set forth in SEQ ID NO: 786; and the nucleotide sequence of the sense strand differs by no more than 5 (e.g., 0, 1, 2, 3, 4, or 5) nucleotides from the nucleotide sequence set forth in SEQ ID NO: 2360; or (p) the nucleotide sequence of the antisense strand differs by no more than 5 (e.g., 0, 1, 2, 3, 4, or 5) nucleotides from the nucleotide sequence set forth in SEQ ID NO: 787; and the nucleotide sequence of the sense strand differs by no more than 5 (e.g., 0, 1, 2, 3, 4, or 5) nucleotides from the nucleotide sequence set forth in SEQ ID NO: 2361.

[0013] In some embodiments, (a) the nucleotide sequence of the antisense strand comprises the nucleotide sequence set forth in SEQ ID NO: 772; and the nucleotide sequence of the sense strand comprises the nucleotide sequence set forth in SEQ ID NO: 2346; (b) the nucleotide sequence of the antisense strand comprises the nucleotide sequence set forth in SEQ ID NO: 773; and the nucleotide sequence of the sense strand comprises the nucleotide sequence set forth in SEQ ID NO: 2347; (c) the nucleotide sequence of the antisense strand comprises the nucleotide sequence set forth in SEQ ID NO: 774; and the nucleotide sequence of the sense strand comprises the nucleotide sequence set forth in SEQ ID NO: 2348; (d) the nucleotide sequence of the antisense strand comprises the nucleotide sequence set forth in SEQ ID NO: 775; and the nucleotide sequence of the sense strand comprises the nucleotide sequence set forth in SEQ ID NO: 2349; (e) the nucleotide sequence of the antisense strand comprises the nucleotide sequence set forth in SEQ ID NO: 776; and the nucleotide sequence of the sense strand comprises the nucleotide sequence set forth in SEQ ID NO: 2350; (f) the nucleotide sequence of the antisense strand comprises the nucleotide sequence set forth in SEQ ID NO: 777; and the nucleotide sequence of the sense strand comprises the nucleotide sequence set forth in SEQ ID NO: 2351; (g) the nucleotide sequence of the antisense strand comprises the nucleotide sequence set forth in SEQ ID NO: 778; and the nucleotide sequence of the sense strand comprises the nucleotide sequence set forth in SEQ ID NO: 2352; (h) the nucleotide sequence of the antisense strand comprises the nucleotide sequence set forth in SEQ ID NO: 779; and the nucleotide sequence of the sense strand comprises the nucleotide sequence set forth in SEQ ID NO: 2353; (i) the nucleotide sequence of the antisense strand comprises the nucleotide sequence set forth in SEQ ID NO: 780; and the nucleotide sequence of the sense strand comprises the nucleotide sequence set forth in SEQ ID NO: 2354; (j) the nucleotide sequence of the antisense strand comprises the nucleotide sequence set forth in SEQ ID NO: 781; and the nucleotide sequence of the sense strand comprises the nucleotide sequence set forth in SEQ ID NO: 2355; (k) the nucleotide sequence of the antisense strand comprises the nucleotide sequence set forth in SEQ ID NO: 782; and the nucleotide sequence of the sense strand comprises the nucleotide sequence set forth in SEQ ID NO: 2356; (l) the nucleotide sequence of the antisense strand comprises the nucleotide sequence set forth in SEQ ID NO: 783; and the nucleotide sequence of the sense strand comprises the nucleotide sequence set forth in SEQ ID NO: 2357; (m) the nucleotide sequence of the antisense strand comprises the nucleotide sequence set forth in SEQ ID NO: 784; and the nucleotide sequence of the sense strand comprises the nucleotide sequence set forth in SEQ ID NO: 2358; (n) the nucleotide sequence of the antisense strand comprises the nucleotide sequence set forth in SEQ ID NO: 785; and the nucleotide sequence of the sense strand comprises the nucleotide sequence set forth in SEQ ID NO: 2359; (o) the nucleotide sequence of the antisense strand comprises the nucleotide sequence set forth in SEQ ID NO: 786; and the nucleotide sequence of the sense strand comprises the nucleotide sequence set forth in SEQ ID NO: 2360; or (p) the nucleotide sequence of the antisense strand comprises the nucleotide sequence set forth in SEQ ID NO: 787; and the nucleotide sequence of the sense strand comprises the nucleotide sequence set forth in SEQ ID NO: 2361.

[0014] In one aspect, provided herein are dsRNA agents for inhibiting expression of BCL11A (e.g., hBCL11A), wherein the dsRNA agent comprises a sense strand and an antisense strand forming a double stranded region, and wherein the nucleotide sequence of the antisense strand differs by no more than 5 (e.g., 0, 1, 2, 3, 4, or 5) nucleotides from the nucleotide sequence of any one of the antisense strands of any one of dsRNA agents 1-1590 (e.g., one of dsRNA agents 1-16 or 770-785) set forth in Tables 2-5; and the nucleotide sequence of the sense strand differs by no more than 5 (e.g., 0, 1, 2, 3, 4, or 5) nucleotides from the nucleotide sequence of the sense strand of the corresponding dsRNA agent set forth in Tables 2-5.

[0015] In some embodiments, the nucleotide sequence of the antisense strand differs by no more than 3 (e.g., 0, 1, 2, or 3) nucleotides from the nucleotide sequence of any one of the antisense strands of any one of dsRNA agents 1-1590 (e.g., one of dsRNA agents 1-16 or 770-785) set forth in Tables 2-5; and the nucleotide sequence of the sense strand differs by no more than 3 (e.g., 0, 1, 2, or 3) nucleotides from the nucleotide sequence of the sense strand of the corresponding dsRNA agent set forth in Tables 2-5.

[0016] In some embodiments, the nucleotide sequence of the antisense strand differs by no more than 3 (e.g., 0, 1, 2, or 3) nucleotides from the nucleotide sequence of any one of the antisense strands of any one of dsRNA agents 1-16 or 770-785 set forth in Tables 2-5; and the nucleotide sequence of the sense strand differs by no more than 3 (e.g., 0, 1, 2, or 3) nucleotides from the nucleotide sequence of the sense strand of the corresponding dsRNA agent set forth in Tables 2-5.

[0017] In some embodiments, (a) the nucleotide sequence of the antisense strand differs by no more than 5 (e.g., 0, 1, 2, 3, 4, or 5) nucleotides from the nucleotide sequence of the antisense strand of dsRNA agent 1; and the nucleotide sequence of the sense strand differs by no more than 5 (e.g., 0, 1, 2, 3, 4, or 5) nucleotides from the nucleotide sequence of dsRNA agent 1; (b) the nucleotide sequence of the antisense strand differs by no more than 5 (e.g., 0, 1, 2, 3, 4, or 5) nucleotides from the nucleotide sequence of the antisense strand of dsRNA agent 2; and the nucleotide sequence of the sense strand differs by no more than 5 (e.g., 0, 1, 2, 3, 4, or 5) nucleotides from the nucleotide sequence of dsRNA agent 2; (c) the nucleotide sequence of the antisense strand differs by no more than 5 (e.g., 0, 1, 2, 3, 4, or 5) nucleotides from the nucleotide sequence of the antisense strand of dsRNA agent 3; and the nucleotide sequence of the sense strand differs by no more than 5 (e.g., 0, 1, 2, 3, 4, or 5) nucleotides from the nucleotide sequence of dsRNA agent 3; (d) the nucleotide sequence of the antisense strand differs by no more than 5 (e.g., 0, 1, 2, 3, 4, or 5) nucleotides from the nucleotide sequence of the antisense strand of dsRNA agent 4; and the nucleotide sequence of the sense strand differs by no more than 5 (e.g., 0, 1, 2, 3, 4, or 5) nucleotides from the nucleotide sequence of dsRNA agent 4; (e) the nucleotide sequence of the antisense strand differs by no more than 5 (e.g., 0, 1, 2, 3, 4, or 5) nucleotides from the nucleotide sequence of the antisense strand of dsRNA agent 5; and the nucleotide sequence of the sense strand differs by no more than 5 (e.g., 0, 1, 2, 3, 4, or 5) nucleotides from the nucleotide sequence of dsRNA agent 5; (f) the nucleotide sequence of the antisense strand differs by no more than 5 (e.g., 0, 1, 2, 3, 4, or 5) nucleotides from the nucleotide sequence of the antisense strand of dsRNA agent 6; and the nucleotide sequence of the sense strand differs by no more than 5 (e.g., 0, 1, 2, 3, 4, or 5) nucleotides from the nucleotide sequence of dsRNA agent 6; (g) the nucleotide sequence of the antisense strand differs by no more than 5 (e.g., 0, 1, 2, 3, 4, or 5) nucleotides from the nucleotide sequence of the antisense strand of dsRNA agent 7; and the nucleotide sequence of the sense strand differs by no more than 5 (e.g., 0, 1, 2, 3, 4, or 5) nucleotides from the nucleotide sequence of dsRNA agent 7; (h) the nucleotide sequence of the antisense strand differs by no more than 5 (e.g., 0, 1, 2, 3, 4, or 5) nucleotides from the nucleotide sequence of the antisense strand of dsRNA agent 8; and the nucleotide sequence of the sense strand differs by no more than 5 (e.g., 0, 1, 2, 3, 4, or 5) nucleotides from the nucleotide sequence of dsRNA agent 8; (i) the nucleotide sequence of the antisense strand differs by no more than 5 (e.g., 0, 1, 2, 3, 4, or 5) nucleotides from the nucleotide sequence of the antisense strand of dsRNA agent 9; and the nucleotide sequence of the sense strand differs by no more than 5 (e.g., 0, 1, 2, 3, 4, or 5) nucleotides from the nucleotide sequence of dsRNA agent 9; (j) the nucleotide sequence of the antisense strand differs by no more than 5 (e.g., 0, 1, 2, 3, 4, or 5) nucleotides from the nucleotide sequence of the antisense strand of dsRNA agent 10; and the nucleotide sequence of the sense strand differs by no more than 5 (e.g., 0, 1, 2, 3, 4, or 5) nucleotides from the nucleotide sequence of dsRNA agent 10; (k) the nucleotide sequence of the antisense strand differs by no more than 5 (e.g., 0, 1, 2, 3, 4, or 5) nucleotides from the nucleotide sequence of the antisense strand of dsRNA agent 11; and the nucleotide sequence of the sense strand differs by no more than 5 (e.g., 0, 1, 2, 3, 4, or 5) nucleotides from the nucleotide sequence of dsRNA agent 11; (l) the nucleotide sequence of the antisense strand differs by no more than 5 (e.g., 0, 1, 2, 3, 4, or 5) nucleotides from the nucleotide sequence of the antisense strand of dsRNA agent 12; and the nucleotide sequence of the sense strand differs by no more than 5 (e.g., 0, 1, 2, 3, 4, or 5) nucleotides from the nucleotide sequence of dsRNA agent 12; (m) the nucleotide sequence of the antisense strand differs by no more than 5 (e.g., 0, 1, 2, 3, 4, or 5) nucleotides from the nucleotide sequence of the antisense strand of dsRNA agent 13; and the nucleotide sequence of the sense strand differs by no more than 5 (e.g., 0, 1, 2, 3, 4, or 5) nucleotides from the nucleotide sequence of dsRNA agent 13; (n) the nucleotide sequence of the antisense strand differs by no more than 5 (e.g., 0, 1, 2, 3, 4, or 5) nucleotides from the nucleotide sequence of the antisense strand of dsRNA agent 14; and the nucleotide sequence of the sense strand differs by no more than 5 (e.g., 0, 1, 2, 3, 4, or 5) nucleotides from the nucleotide sequence of dsRNA agent 14; (o) the nucleotide sequence of the antisense strand differs by no more than 5 (e.g., 0, 1, 2, 3, 4, or 5) nucleotides from the nucleotide sequence of the antisense strand of dsRNA agent 15; and the nucleotide sequence of the sense strand differs by no more than 5 (e.g., 0, 1, 2, 3, 4, or 5) nucleotides from the nucleotide sequence of dsRNA agent 15; or (p) the nucleotide sequence of the antisense strand differs by no more than 5 (e.g., 0, 1, 2, 3, 4, or 5) nucleotides from the nucleotide sequence of the antisense strand of dsRNA agent 16; and the nucleotide sequence of the sense strand differs by no more than 5 (e.g., 0, 1, 2, 3, 4, or 5) nucleotides from the nucleotide sequence of dsRNA agent 16.

[0018] In some embodiments, (a) the nucleotide sequence of the antisense strand comprises the nucleotide sequence of the antisense strand of dsRNA agent 1; and the nucleotide sequence of the sense strand comprises of the sense strand of dsRNA agent 1; (b) the nucleotide sequence of the antisense strand comprises the nucleotide sequence of the antisense strand of dsRNA agent 2; and the nucleotide sequence of the sense strand comprises of the sense strand of dsRNA agent 2; (c) the nucleotide sequence of the antisense strand comprises the nucleotide sequence of the antisense strand of dsRNA agent 3; and the nucleotide sequence of the sense strand comprises of the sense strand of dsRNA agent 3; (d) the nucleotide sequence of the antisense strand comprises the nucleotide sequence of the antisense strand of dsRNA agent 4; and the nucleotide sequence of the sense strand comprises of the sense strand of dsRNA agent 4; (e) the nucleotide sequence of the antisense strand comprises the nucleotide sequence of the antisense strand of dsRNA agent 5; and the nucleotide sequence of the sense strand comprises of the sense strand of dsRNA agent 5; (f) the nucleotide sequence of the antisense strand comprises the nucleotide sequence of the antisense strand of dsRNA agent 6; and the nucleotide sequence of the sense strand comprises of the sense strand of dsRNA agent 6; (g) the nucleotide sequence of the antisense strand comprises the nucleotide sequence of the antisense strand of dsRNA agent 7; and the nucleotide sequence of the sense strand comprises of the sense strand of dsRNA agent 7; (h) the nucleotide sequence of the antisense strand comprises the nucleotide sequence of the antisense strand of dsRNA agent 8; and the nucleotide sequence of the sense strand comprises of the sense strand of dsRNA agent 8; (i) the nucleotide sequence of the antisense strand comprises the nucleotide sequence of the antisense strand of dsRNA agent 9; and the nucleotide sequence of the sense strand comprises of the sense strand of dsRNA agent 9; (j) the nucleotide sequence of the antisense strand comprises the nucleotide sequence of the antisense strand of dsRNA agent 10; and the nucleotide sequence of the sense strand comprises of the sense strand of dsRNA agent 10; (k) the nucleotide sequence of the antisense strand comprises the nucleotide sequence of the antisense strand of dsRNA agent 11; and the nucleotide sequence of the sense strand comprises of the sense strand of dsRNA agent 11; (l) the nucleotide sequence of the antisense strand comprises the nucleotide sequence of the antisense strand of dsRNA agent 12; and the nucleotide sequence of the sense strand comprises of the sense strand of dsRNA agent 12; (m) the nucleotide sequence of the antisense strand comprises the nucleotide sequence of the antisense strand of dsRNA agent 13; and the nucleotide sequence of the sense strand comprises of the sense strand of dsRNA agent 13; (n) the nucleotide sequence of the antisense strand comprises the nucleotide sequence of the antisense strand of dsRNA agent 14; and the nucleotide sequence of the sense strand comprises of the sense strand of dsRNA agent 14; (o) the nucleotide sequence of the antisense strand comprises the nucleotide sequence of the antisense strand of dsRNA agent 15; and the nucleotide sequence of the sense strand comprises of the sense strand of dsRNA agent 15; or (p) the nucleotide sequence of the antisense strand comprises the nucleotide sequence of the antisense strand of dsRNA agent 16; and the nucleotide sequence of the sense strand comprises of the sense strand of dsRNA agent 16.

[0019] In some embodiments, (a) the nucleotide sequence of the antisense strand differs by no more than 5 (e.g., 0, 1, 2, 3, 4, or 5) nucleotides from the nucleotide sequence of the antisense strand of dsRNA agent 770; and the nucleotide sequence of the sense strand differs by no more than 5 (e.g., 0, 1, 2, 3, 4, or 5) nucleotides from the nucleotide sequence of dsRNA agent 770; (b) the nucleotide sequence of the antisense strand differs by no more than 5 (e.g., 0, 1, 2, 3, 4, or 5) nucleotides from the nucleotide sequence of the antisense strand of dsRNA agent 771; and the nucleotide sequence of the sense strand differs by no more than 5 (e.g., 0, 1, 2, 3, 4, or 5) nucleotides from the nucleotide sequence of dsRNA agent 771; (c) the nucleotide sequence of the antisense strand differs by no more than 5 (e.g., 0, 1, 2, 3, 4, or 5) nucleotides from the nucleotide sequence of the antisense strand of dsRNA agent 772; and the nucleotide sequence of the sense strand differs by no more than 5 (e.g., 0, 1, 2, 3, 4, or 5) nucleotides from the nucleotide sequence of dsRNA agent 772; (d) the nucleotide sequence of the antisense strand differs by no more than 5 (e.g., 0, 1, 2, 3, 4, or 5) nucleotides from the nucleotide sequence of the antisense strand of dsRNA agent 773; and the nucleotide sequence of the sense strand differs by no more than 5 (e.g., 0, 1, 2, 3, 4, or 5) nucleotides from the nucleotide sequence of dsRNA agent 773; (e) the nucleotide sequence of the antisense strand differs by no more than 5 (e.g., 0, 1, 2, 3, 4, or 5) nucleotides from the nucleotide sequence of the antisense strand of dsRNA agent 774; and the nucleotide sequence of the sense strand differs by no more than 5 (e.g., 0, 1, 2, 3, 4, or 5) nucleotides from the nucleotide sequence of dsRNA agent 774; (f) the nucleotide sequence of the antisense strand differs by no more than 5 (e.g., 0, 1, 2, 3, 4, or 5) nucleotides from the nucleotide sequence of the antisense strand of dsRNA agent 775; and the nucleotide sequence of the sense strand differs by no more than 5 (e.g., 0, 1, 2, 3, 4, or 5) nucleotides from the nucleotide sequence of dsRNA agent 775; (g) the nucleotide sequence of the antisense strand differs by no more than 5 (e.g., 0, 1, 2, 3, 4, or 5) nucleotides from the nucleotide sequence of the antisense strand of dsRNA agent 776; and the nucleotide sequence of the sense strand differs by no more than 5 (e.g., 0, 1, 2, 3, 4, or 5) nucleotides from the nucleotide sequence of dsRNA agent 776; (h) the nucleotide sequence of the antisense strand differs by no more than 5 (e.g., 0, 1, 2, 3, 4, or 5) nucleotides from the nucleotide sequence of the antisense strand of dsRNA agent 777; and the nucleotide sequence of the sense strand differs by no more than 5 (e.g., 0, 1, 2, 3, 4, or 5) nucleotides from the nucleotide sequence of dsRNA agent 778; (i) the nucleotide sequence of the antisense strand differs by no more than 5 (e.g., 0, 1, 2, 3, 4, or 5) nucleotides from the nucleotide sequence of the antisense strand of dsRNA agent 779; and the nucleotide sequence of the sense strand differs by no more than 5 (e.g., 0, 1, 2, 3, 4, or 5) nucleotides from the nucleotide sequence of dsRNA agent 779; (j) the nucleotide sequence of the antisense strand differs by no more than 5 (e.g., 0, 1, 2, 3, 4, or 5) nucleotides from the nucleotide sequence of the antisense strand of dsRNA agent 780; and the nucleotide sequence of the sense strand differs by no more than 5 (e.g., 0, 1, 2, 3, 4, or 5) nucleotides from the nucleotide sequence of dsRNA agent 780; (k) the nucleotide sequence of the antisense strand differs by no more than 5 (e.g., 0, 1, 2, 3, 4, or 5) nucleotides from the nucleotide sequence of the antisense strand of dsRNA agent 781; and the nucleotide sequence of the sense strand differs by no more than 5 (e.g., 0, 1, 2, 3, 4, or 5) nucleotides from the nucleotide sequence of dsRNA agent 781; (l) the nucleotide sequence of the antisense strand differs by no more than 5 (e.g., 0, 1, 2, 3, 4, or 5) nucleotides from the nucleotide sequence of the antisense strand of dsRNA agent 782; and the nucleotide sequence of the sense strand differs by no more than 5 (e.g., 0, 1, 2, 3, 4, or 5) nucleotides from the nucleotide sequence of dsRNA agent 782; (m) the nucleotide sequence of the antisense strand differs by no more than 5 (e.g., 0, 1, 2, 3, 4, or 5) nucleotides from the nucleotide sequence of the antisense strand of dsRNA agent 783; and the nucleotide sequence of the sense strand differs by no more than 5 (e.g., 0, 1, 2, 3, 4, or 5) nucleotides from the nucleotide sequence of dsRNA agent 783; (n) the nucleotide sequence of the antisense strand differs by no more than 5 (e.g., 0, 1, 2, 3, 4, or 5) nucleotides from the nucleotide sequence of the antisense strand of dsRNA agent 14; and the nucleotide sequence of the sense strand differs by no more than 5 (e.g., 0, 1, 2, 3, 4, or 5) nucleotides from the nucleotide sequence of dsRNA agent 14; (o) the nucleotide sequence of the antisense strand differs by no more than 5 (e.g., 0, 1, 2, 3, 4, or 5) nucleotides from the nucleotide sequence of the antisense strand of dsRNA agent 784; and the nucleotide sequence of the sense strand differs by no more than 5 (e.g., 0, 1, 2, 3, 4, or 5) nucleotides from the nucleotide sequence of dsRNA agent 784; or (p) the nucleotide sequence of the antisense strand differs by no more than 5 (e.g., 0, 1, 2, 3, 4, or 5) nucleotides from the nucleotide sequence of the antisense strand of dsRNA agent 785; and the nucleotide sequence of the sense strand differs by no more than 5 (e.g., 0, 1, 2, 3, 4, or 5) nucleotides from the nucleotide sequence of dsRNA agent 785.

[0020] In some embodiments, (a) the nucleotide sequence of the antisense strand comprises the nucleotide sequence of the antisense strand of dsRNA agent 770; and the nucleotide sequence of the sense strand comprises of the sense strand of dsRNA agent 770; (b) the nucleotide sequence of the antisense strand comprises the nucleotide sequence of the antisense strand of dsRNA agent 771; and the nucleotide sequence of the sense strand comprises of the sense strand of dsRNA agent 771; (c) the nucleotide sequence of the antisense strand comprises the nucleotide sequence of the antisense strand of dsRNA agent 772; and the nucleotide sequence of the sense strand comprises of the sense strand of dsRNA agent 772; (d) the nucleotide sequence of the antisense strand comprises the nucleotide sequence of the antisense strand of dsRNA agent 773; and the nucleotide sequence of the sense strand comprises of the sense strand of dsRNA agent 773; (e) the nucleotide sequence of the antisense strand comprises the nucleotide sequence of the antisense strand of dsRNA agent 774; and the nucleotide sequence of the sense strand comprises of the sense strand of dsRNA agent 774; (f) the nucleotide sequence of the antisense strand comprises the nucleotide sequence of the antisense strand of dsRNA agent 775; and the nucleotide sequence of the sense strand comprises of the sense strand of dsRNA agent 775; (g) the nucleotide sequence of the antisense strand comprises the nucleotide sequence of the antisense strand of dsRNA agent 776; and the nucleotide sequence of the sense strand comprises of the sense strand of dsRNA agent 776; (h) the nucleotide sequence of the antisense strand comprises the nucleotide sequence of the antisense strand of dsRNA agent 777; and the nucleotide sequence of the sense strand comprises of the sense strand of dsRNA agent 777; (i) the nucleotide sequence of the antisense strand comprises the nucleotide sequence of the antisense strand of dsRNA agent 778; and the nucleotide sequence of the sense strand comprises of the sense strand of dsRNA agent 778; (j) the nucleotide sequence of the antisense strand comprises the nucleotide sequence of the antisense strand of dsRNA agent 779; and the nucleotide sequence of the sense strand comprises of the sense strand of dsRNA agent 779; (k) the nucleotide sequence of the antisense strand comprises the nucleotide sequence of the antisense strand of dsRNA agent 780; and the nucleotide sequence of the sense strand comprises of the sense strand of dsRNA agent 780; (l) the nucleotide sequence of the antisense strand comprises the nucleotide sequence of the antisense strand of dsRNA agent 781; and the nucleotide sequence of the sense strand comprises of the sense strand of dsRNA agent 781; (m) the nucleotide sequence of the antisense strand comprises the nucleotide sequence of the antisense strand of dsRNA agent 782; and the nucleotide sequence of the sense strand comprises of the sense strand of dsRNA agent 782; (n) the nucleotide sequence of the antisense strand comprises the nucleotide sequence of the antisense strand of dsRNA agent 783; and the nucleotide sequence of the sense strand comprises of the sense strand of dsRNA agent 783; (o) the nucleotide sequence of the antisense strand comprises the nucleotide sequence of the antisense strand of dsRNA agent 784; and the nucleotide sequence of the sense strand comprises of the sense strand of dsRNA agent 784; or (p) the nucleotide sequence of the antisense strand comprises the nucleotide sequence of the antisense strand of dsRNA agent 785; and the nucleotide sequence of the sense strand comprises of the sense strand of dsRNA agent 785.

[0021] In one aspect, provided herein are dsRNA agents for inhibiting expression of BCL11 transcription factor A (BCL11A) (e.g., human BCL11A (hBCL11A)), wherein the dsRNA agent comprises a sense strand and an antisense strand forming a double stranded region, wherein the antisense strand comprises at least 15 (e.g., 16, 17, 18, 19, 20, 21, 22, or 23) contiguous nucleotides of and differing by no more than 5 (e.g., 0, 1, 2, 3, 4, or 5) nucleotides from the nucleotide sequence of any one of the antisense strands set forth in any one of Tables 2-5 (e.g., Table 3 or 5) or set forth in any one of SEQ ID NOS: 4-1576 (e.g., any one of SEQ ID NOS: 4-19 or 772-787).

[0022] In some embodiments, the sense strand comprises at least 15 (e.g., 16, 17, 18, 19, 20, 21) contiguous nucleotides of and differing by no more than 5 (e.g., 0, 1, 2, 3, 4, or 5) nucleotides from any sense strand set forth in any one of Tables 2-5 (e.g., Table 3 or 5) or set forth in any one of SEQ ID NOS: 1577-3166 (e.g., any one of SEQ ID NOS: 1577-1592 or 2346-2361).

[0023] In some embodiments, the sense strand comprises at least 15 (e.g., 16, 17, 18, 19, 20, 21) contiguous nucleotides of and differing by no more than 5 (e.g., 0, 1, 2, 3, 4, or 5) nucleotides from the corresponding sense strand set forth in any one of Tables 2-5 (e.g., Table 3 or 5) or the corresponding sense strand set forth in one of SEQ ID NOS: 1577-3166.

[0024] In some embodiments, (a) the nucleotide sequence of the antisense strand comprises at least 15 (e.g., 16, 17, 18, 19, 20, 21, 22, or 23) contiguous nucleotides of and differing by no more than 5 (e.g., 0, 1, 2, 3, 4, or 5) nucleotides from the nucleotide sequence of set forth in SEQ ID NO: 4; and the nucleotide sequence of the sense strand comprises at least 15 (e.g., 16, 17, 18, 19, 20, 21) contiguous nucleotides of and differing by no more than 5 (e.g., 0, 1, 2, 3, 4, or 5) nucleotides from the nucleotide sequence set forth in SEQ ID NO: 1577; (b) the nucleotide sequence of the antisense strand comprises at least 15 (e.g., 16, 17, 18, 19, 20, 21, 22, or 23) contiguous nucleotides of and differing by no more than 5 (e.g., 0, 1, 2, 3, 4, or 5) nucleotides from the nucleotide sequence of set forth in SEQ ID NO: 5; and the nucleotide sequence of the sense strand comprises at least 15 (e.g., 16, 17, 18, 19, 20, 21) contiguous nucleotides of and differing by no more than 5 (e.g., 0, 1, 2, 3, 4, or 5) nucleotides from the nucleotide sequence set forth in SEQ ID NO: 1578; (c) the nucleotide sequence of the antisense strand comprises at least 15 (e.g., 16, 17, 18, 19, 20, 21, 22, or 23) contiguous nucleotides of and differing by no more than 5 (e.g., 0, 1, 2, 3, 4, or 5) nucleotides from the nucleotide sequence of set forth in SEQ ID NO: 6; and the nucleotide sequence of the sense strand comprises at least 15 (e.g., 16, 17, 18, 19, 20, 21) contiguous nucleotides of and differing by no more than 5 (e.g., 0, 1, 2, 3, 4, or 5) nucleotides from the nucleotide sequence set forth in SEQ ID NO: 1579; (d) the nucleotide sequence of the antisense strand comprises at least 15 (e.g., 16, 17, 18, 19, 20, 21, 22, or 23) contiguous nucleotides of and differing by no more than 5 (e.g., 0, 1, 2, 3, 4, or 5) nucleotides from the nucleotide sequence of set forth in SEQ ID NO: 7; and the nucleotide sequence of the sense strand comprises at least 15 (e.g., 16, 17, 18, 19, 20, 21) contiguous nucleotides of and differing by no more than 5 (e.g., 0, 1, 2, 3, 4, or 5) nucleotides from the nucleotide sequence set forth in SEQ ID NO: 1580; (e) the nucleotide sequence of the antisense strand comprises at least 15 (e.g., 16, 17, 18, 19, 20, 21, 22, or 23) contiguous nucleotides of and differing by no more than 5 (e.g., 0, 1, 2, 3, 4, or 5) nucleotides from the nucleotide sequence of set forth in SEQ ID NO: 8; and the nucleotide sequence of the sense strand comprises at least 15 (e.g., 16, 17, 18, 19, 20, 21) contiguous nucleotides of and differing by no more than 5 (e.g., 0, 1, 2, 3, 4, or 5) nucleotides from the nucleotide sequence set forth in SEQ ID NO: 1581; (f) the nucleotide sequence of the antisense strand comprises at least 15 (e.g., 16, 17, 18, 19, 20, 21, 22, or 23) contiguous nucleotides of and differing by no more than 5 (e.g., 0, 1, 2, 3, 4, or 5) nucleotides from the nucleotide sequence of set forth in SEQ ID NO: 9; and the nucleotide sequence of the sense strand comprises at least 15 (e.g., 16, 17, 18, 19, 20, 21) contiguous nucleotides of and differing by no more than 5 (e.g., 0, 1, 2, 3, 4, or 5) nucleotides from the nucleotide sequence set forth in SEQ ID NO: 1582; (g) the nucleotide sequence of the antisense strand comprises at least 15 (e.g., 16, 17, 18, 19, 20, 21, 22, or 23) contiguous nucleotides of and differing by no more than 5 (e.g., 0, 1, 2, 3, 4, or 5) nucleotides from the nucleotide sequence of set forth in SEQ ID NO: 10; and the nucleotide sequence of the sense strand comprises at least 15 (e.g., 16, 17, 18, 19, 20, 21) contiguous nucleotides of and differing by no more than 5 (e.g., 0, 1, 2, 3, 4, or 5) nucleotides from the nucleotide sequence set forth in SEQ ID NO: 1583; (h) the nucleotide sequence of the antisense strand comprises at least 15 (e.g., 16, 17, 18, 19, 20, 21, 22, or 23) contiguous nucleotides of and differing by no more than 5 (e.g., 0, 1, 2, 3, 4, or 5) nucleotides from the nucleotide sequence of set forth in SEQ ID NO: 11; and the nucleotide sequence of the sense strand comprises at least 15 (e.g., 16, 17, 18, 19, 20, 21) contiguous nucleotides of and differing by no more than 5 (e.g., 0, 1, 2, 3, 4, or 5) nucleotides from the nucleotide sequence set forth in SEQ ID NO: 1584; (i) the nucleotide sequence of the antisense strand comprises at least 15 (e.g., 16, 17, 18, 19, 20, 21, 22, or 23) contiguous nucleotides of and differing by no more than 5 (e.g., 0, 1, 2, 3, 4, or 5) nucleotides from the nucleotide sequence of set forth in SEQ ID NO: 12; and the nucleotide sequence of the sense strand comprises at least 15 (e.g., 16, 17, 18, 19, 20, 21) contiguous nucleotides of and differing by no more than 5 (e.g., 0, 1, 2, 3, 4, or 5) nucleotides from the nucleotide sequence set forth in SEQ ID NO: 1585; (j) the nucleotide sequence of the antisense strand comprises at least 15 (e.g., 16, 17, 18, 19, 20, 21, 22, or 23) contiguous nucleotides of and differing by no more than 5 (e.g., 0, 1, 2, 3, 4, or 5) nucleotides from the nucleotide sequence of set forth in SEQ ID NO: 13; and the nucleotide sequence of the sense strand comprises at least 15 (e.g., 16, 17, 18, 19, 20, 21) contiguous nucleotides of and differing by no more than 5 (e.g., 0, 1, 2, 3, 4, or 5) nucleotides from the nucleotide sequence set forth in SEQ ID NO: 1586; (k) the nucleotide sequence of the antisense strand comprises at least 15 (e.g., 16, 17, 18, 19, 20, 21, 22, or 23) contiguous nucleotides of and differing by no more than 5 (e.g., 0, 1, 2, 3, 4, or 5) nucleotides from the nucleotide sequence of set forth in SEQ ID NO: 14; and the nucleotide sequence of the sense strand comprises at least 15 (e.g., 16, 17, 18, 19, 20, 21) contiguous nucleotides of and differing by no more than 5 (e.g., 0, 1, 2, 3, 4, or 5) nucleotides from the nucleotide sequence set forth in SEQ ID NO: 1587; (l) the nucleotide sequence of the antisense strand comprises at least 15 (e.g., 16, 17, 18, 19, 20, 21, 22, or 23) contiguous nucleotides of and differing by no more than 5 (e.g., 0, 1, 2, 3, 4, or 5) nucleotides from the nucleotide sequence of set forth in SEQ ID NO: 15; and the nucleotide sequence of the sense strand comprises at least 15 (e.g., 16, 17, 18, 19, 20, 21) contiguous nucleotides of and differing by no more than 5 (e.g., 0, 1, 2, 3, 4, or 5) nucleotides from the nucleotide sequence set forth in SEQ ID NO: 1588; (m) the nucleotide sequence of the antisense strand comprises at least 15 (e.g., 16, 17, 18, 19, 20, 21, 22, or 23) contiguous nucleotides of and differing by no more than 5 (e.g., 0, 1, 2, 3, 4, or 5) nucleotides from the nucleotide sequence of set forth in SEQ ID NO: 16; and the nucleotide sequence of the sense strand comprises at least 15 (e.g., 16, 17, 18, 19, 20, 21) contiguous nucleotides of and differing by no more than 5 (e.g., 0, 1, 2, 3, 4, or 5) nucleotides from the nucleotide sequence set forth in SEQ ID NO: 1589; (n) the nucleotide sequence of the antisense strand comprises at least 15 (e.g., 16, 17, 18, 19, 20, 21, 22, or 23) contiguous nucleotides of and differing by no more than 5 (e.g., 0, 1, 2, 3, 4, or 5) nucleotides from the nucleotide sequence of set forth in SEQ ID NO: 17; and the nucleotide sequence of the sense strand comprises at least 15 (e.g., 16, 17, 18, 19, 20, 21) contiguous nucleotides of and differing by no more than 5 (e.g., 0, 1, 2, 3, 4, or 5) nucleotides from the nucleotide sequence set forth in SEQ ID NO: 1590; (o) the nucleotide sequence of the antisense strand comprises at least 15 (e.g., 16, 17, 18, 19, 20, 21, 22, or 23) contiguous nucleotides of and differing by no more than 5 (e.g., 0, 1, 2, 3, 4, or 5) nucleotides from the nucleotide sequence of set forth in SEQ ID NO: 18; and the nucleotide sequence of the sense strand comprises at least 15 (e.g., 16, 17, 18, 19, 20, 21) contiguous nucleotides of and differing by no more than 5 (e.g., 0, 1, 2, 3, 4, or 5) nucleotides from the nucleotide sequence set forth in SEQ ID NO: 1591; or (p) the nucleotide sequence of the antisense strand comprises at least 15 (e.g., 16, 17, 18, 19, 20, 21, 22, or 23) contiguous nucleotides of and differing by no more than 5 (e.g., 0, 1, 2, 3, 4, or 5) nucleotides from the nucleotide sequence of set forth in SEQ ID NO: 19; and the nucleotide sequence of the sense strand comprises at least 15 (e.g., 16, 17, 18, 19, 20, 21) contiguous nucleotides of and differing by no more than 5 (e.g., 0, 1, 2, 3, 4, or 5) nucleotides from the nucleotide sequence set forth in SEQ ID NO: 1592.

[0025] In some embodiments, (a) the nucleotide sequence of the antisense strand comprises at least 15 (e.g., 16, 17, 18, 19, 20, 21, 22, or 23) contiguous nucleotides of and differing by no more than 5 (e.g., 0, 1, 2, 3, 4, or 5) nucleotides from the nucleotide sequence of set forth in SEQ ID NO: 772; and the nucleotide sequence of the sense strand comprises at least 15 (e.g., 16, 17, 18, 19, 20, 21) contiguous nucleotides of and differing by no more than 5 (e.g., 0, 1, 2, 3, 4, or 5) nucleotides from the nucleotide sequence set forth in SEQ ID NO: 2346; (b) the nucleotide sequence of the antisense strand comprises at least 15 (e.g., 16, 17, 18, 19, 20, 21, 22, or 23) contiguous nucleotides of and differing by no more than 5 (e.g., 0, 1, 2, 3, 4, or 5) nucleotides from the nucleotide sequence of set forth in SEQ ID NO: 773; and the nucleotide sequence of the sense strand comprises at least 15 (e.g., 16, 17, 18, 19, 20, 21) contiguous nucleotides of and differing by no more than 5 (e.g., 0, 1, 2, 3, 4, or 5) nucleotides from the nucleotide sequence set forth in SEQ ID NO: 2347; (c) the nucleotide sequence of the antisense strand comprises at least 15 (e.g., 16, 17, 18, 19, 20, 21, 22, or 23) contiguous nucleotides of and differing by no more than 5 (e.g., 0, 1, 2, 3, 4, or 5) nucleotides from the nucleotide sequence of set forth in SEQ ID NO: 774; and the nucleotide sequence of the sense strand comprises at least 15 (e.g., 16, 17, 18, 19, 20, 21) contiguous nucleotides of and differing by no more than 5 (e.g., 0, 1, 2, 3, 4, or 5) nucleotides from the nucleotide sequence set forth in SEQ ID NO: 2348; (d) the nucleotide sequence of the antisense strand comprises at least 15 (e.g., 16, 17, 18, 19, 20, 21, 22, or 23) contiguous nucleotides of and differing by no more than 5 (e.g., 0, 1, 2, 3, 4, or 5) nucleotides from the nucleotide sequence of set forth in SEQ ID NO: 775; and the nucleotide sequence of the sense strand comprises at least 15 (e.g., 16, 17, 18, 19, 20, 21) contiguous nucleotides of and differing by no more than 5 (e.g., 0, 1, 2, 3, 4, or 5) nucleotides from the nucleotide sequence set forth in SEQ ID NO: 2349; (e) the nucleotide sequence of the antisense strand comprises at least 15 (e.g., 16, 17, 18, 19, 20, 21, 22, or 23) contiguous nucleotides of and differing by no more than 5 (e.g., 0, 1, 2, 3, 4, or 5) nucleotides from the nucleotide sequence of set forth in SEQ ID NO: 776; and the nucleotide sequence of the sense strand comprises at least 15 (e.g., 16, 17, 18, 19, 20, 21) contiguous nucleotides of and differing by no more than 5 (e.g., 0, 1, 2, 3, 4, or 5) nucleotides from the nucleotide sequence set forth in SEQ ID NO: 2350; (f) the nucleotide sequence of the antisense strand comprises at least 15 (e.g., 16, 17, 18, 19, 20, 21, 22, or 23) contiguous nucleotides of and differing by no more than 5 (e.g., 0, 1, 2, 3, 4, or 5) nucleotides from the nucleotide sequence of set forth in SEQ ID NO: 777; and the nucleotide sequence of the sense strand comprises at least 15 (e.g., 16, 17, 18, 19, 20, 21) contiguous nucleotides of and differing by no more than 5 (e.g., 0, 1, 2, 3, 4, or 5) nucleotides from the nucleotide sequence set forth in SEQ ID NO: 2351; (g) the nucleotide sequence of the antisense strand comprises at least 15 (e.g., 16, 17, 18, 19, 20, 21, 22, or 23) contiguous nucleotides of and differing by no more than 5 (e.g., 0, 1, 2, 3, 4, or 5) nucleotides from the nucleotide sequence of set forth in SEQ ID NO: 778; and the nucleotide sequence of the sense strand comprises at least 15 (e.g., 16, 17, 18, 19, 20, 21) contiguous nucleotides of and differing by no more than 5 (e.g., 0, 1, 2, 3, 4, or 5) nucleotides from the nucleotide sequence set forth in SEQ ID NO: 2352; (h) the nucleotide sequence of the antisense strand comprises at least 15 (e.g., 16, 17, 18, 19, 20, 21, 22, or 23) contiguous nucleotides of and differing by no more than 5 (e.g., 0, 1, 2, 3, 4, or 5) nucleotides from the nucleotide sequence of set forth in SEQ ID NO: 779; and the nucleotide sequence of the sense strand comprises at least 15 (e.g., 16, 17, 18, 19, 20, 21) contiguous nucleotides of and differing by no more than 5 (e.g., 0, 1, 2, 3, 4, or 5) nucleotides from the nucleotide sequence set forth in SEQ ID NO: 2353; (i) the nucleotide sequence of the antisense strand comprises at least 15 (e.g., 16, 17, 18, 19, 20, 21, 22, or 23) contiguous nucleotides of and differing by no more than 5 (e.g., 0, 1, 2, 3, 4, or 5) nucleotides from the nucleotide sequence of set forth in SEQ ID NO: 780; and the nucleotide sequence of the sense strand comprises at least 15 (e.g., 16, 17, 18, 19, 20, 21) contiguous nucleotides of and differing by no more than 5 (e.g., 0, 1, 2, 3, 4, or 5) nucleotides from the nucleotide sequence set forth in SEQ ID NO: 2354; (j) the nucleotide sequence of the antisense strand comprises at least 15 (e.g., 16, 17, 18, 19, 20, 21, 22, or 23) contiguous nucleotides of and differing by no more than 5 (e.g., 0, 1, 2, 3, 4, or 5) nucleotides from the nucleotide sequence of set forth in SEQ ID NO: 781; and the nucleotide sequence of the sense strand comprises at least 15 (e.g., 16, 17, 18, 19, 20, 21) contiguous nucleotides of and differing by no more than 5 (e.g., 0, 1, 2, 3, 4, or 5) nucleotides from the nucleotide sequence set forth in SEQ ID NO: 2355; (k) the nucleotide sequence of the antisense strand comprises at least 15 (e.g., 16, 17, 18, 19, 20, 21, 22, or 23) contiguous nucleotides of and differing by no more than 5 (e.g., 0, 1, 2, 3, 4, or 5) nucleotides from the nucleotide sequence of set forth in SEQ ID NO: 782; and the nucleotide sequence of the sense strand comprises at least 15 (e.g., 16, 17, 18, 19, 20, 21) contiguous nucleotides of and differing by no more than 5 (e.g., 0, 1, 2, 3, 4, or 5) nucleotides from the nucleotide sequence set forth in SEQ ID NO: 2356; (l) the nucleotide sequence of the antisense strand comprises at least 15 (e.g., 16, 17, 18, 19, 20, 21, 22, or 23) contiguous nucleotides of and differing by no more than 5 (e.g., 0, 1, 2, 3, 4, or 5) nucleotides from the nucleotide sequence of set forth in SEQ ID NO: 783; and the nucleotide sequence of the sense strand comprises at least 15 (e.g., 16, 17, 18, 19, 20, 21) contiguous nucleotides of and differing by no more than 5 (e.g., 0, 1, 2, 3, 4, or 5) nucleotides from the nucleotide sequence set forth in SEQ ID NO: 2357; (m) the nucleotide sequence of the antisense strand comprises at least 15 (e.g., 16, 17, 18, 19, 20, 21, 22, or 23) contiguous nucleotides of and differing by no more than 5 (e.g., 0, 1, 2, 3, 4, or 5) nucleotides from the nucleotide sequence of set forth in SEQ ID NO: 784; and the nucleotide sequence of the sense strand comprises at least 15 (e.g., 16, 17, 18, 19, 20, 21) contiguous nucleotides of and differing by no more than 5 (e.g., 0, 1, 2, 3, 4, or 5) nucleotides from the nucleotide sequence set forth in SEQ ID NO: 2358; (n) the nucleotide sequence of the antisense strand comprises at least 15 (e.g., 16, 17, 18, 19, 20, 21, 22, or 23) contiguous nucleotides of and differing by no more than 5 (e.g., 0, 1, 2, 3, 4, or 5) nucleotides from the nucleotide sequence of set forth in SEQ ID NO: 785; and the nucleotide sequence of the sense strand comprises at least 15 (e.g., 16, 17, 18, 19, 20, 21) contiguous nucleotides of and differing by no more than 5 (e.g., 0, 1, 2, 3, 4, or 5) nucleotides from the nucleotide sequence set forth in SEQ ID NO: 2359; (o) the nucleotide sequence of the antisense strand comprises at least 15 (e.g., 16, 17, 18, 19, 20, 21, 22, or 23) contiguous nucleotides of and differing by no more than 5 (e.g., 0, 1, 2, 3, 4, or 5) nucleotides from the nucleotide sequence of set forth in SEQ ID NO: 786; and the nucleotide sequence of the sense strand comprises at least 15 (e.g., 16, 17, 18, 19, 20, 21) contiguous nucleotides of and differing by no more than 5 (e.g., 0, 1, 2, 3, 4, or 5) nucleotides from the nucleotide sequence set forth in SEQ ID NO: 2360; or (p) the nucleotide sequence of the antisense strand comprises at least 15 (e.g., 16, 17, 18, 19, 20, 21, 22, or 23) contiguous nucleotides of and differing by no more than 5 (e.g., 0, 1, 2, 3, 4, or 5) nucleotides from the nucleotide sequence of set forth in SEQ ID NO: 787; and the nucleotide sequence of the sense strand comprises at least 15 (e.g., 16, 17, 18, 19, 20, 21) contiguous nucleotides of and differing by no more than 5 (e.g., 0, 1, 2, 3, 4, or 5) nucleotides from the nucleotide sequence set forth in SEQ ID NO: 2361.

[0026] In one aspect, provided herein are dsRNA agents for inhibiting expression of BCL11A (e.g., hBCL11A), wherein the dsRNA agent comprises a sense strand and an antisense strand forming a double stranded region, and wherein the antisense strand comprises at least 15 (e.g., 16, 17, 18, 19, 20, 21, 22, or 23) contiguous nucleotides of and differing by no more than 5 (e.g., 0, 1, 2, 3, 4, or 5) nucleotides from the nucleotide sequence of the antisense strands of any one of dsRNA agents 1-1590 (e.g., one of dsRNA agents 1-16 or 770-785) set forth in any one of Tables 2-5 (e.g., Table 3 or 5); and wherein the sense strand comprises at least 15 (e.g., 16, 17, 18, 19, 20, 21, 22, or 23) contiguous nucleotides of and differing by no more than 5 (e.g., 0, 1, 2, 3, 4, or 5) nucleotides from the nucleotide sequence of the sense strand of the corresponding dsRNA agent set forth in any one of Tables 2-5 (e.g., Table 3 or 5).

[0027] In some embodiments, the nucleotide sequence of the sense strand comprises at least 15 (e.g., 16, 17, 18, 19, 20, 21) contiguous nucleotides of and differing by no more than 5 (e.g., 0, 1, 2, 3, 4, or 5) nucleotides from the nucleotide sequence of the corresponding sense strand of the dsRNA agent.

[0028] In some embodiments, the nucleotide sequence of the antisense strand comprises at least 15 (e.g., 16, 17, 18, 19, 20, 21, 22, or 23) contiguous nucleotides of and differing by no more than 3 (e.g., 0, 1, 2, or 3) nucleotides from the nucleotide sequence of any one of the antisense strand of any one of dsRNA agents 129, 135, 169, 170, 409, 479, 480, 481, or 482; and wherein the nucleotide sequence of the sense strand comprises at least 15 (e.g., 16, 17, 18, 19, 20, 21) contiguous nucleotides of and differing by no more than 3 (e.g., 0, 1, 2, or 3) nucleotides from the nucleotide sequence of the corresponding sense strand of the dsRNA agent.

[0029] In some embodiments, the nucleotide sequence of the antisense strand comprises at least 21 (e.g., 21, 22, or 23) contiguous nucleotides of the nucleotide sequence of any one of the antisense strands of any one of dsRNA agents 1-16 or 770-785; and wherein the nucleotide sequence of the sense strand comprises at least 18 (e.g., 18, 19, 20, 21) contiguous nucleotides of the nucleotide sequence of the corresponding sense strand of the dsRNA agent.

[0030] In some embodiments, (a) the nucleotide sequence of the antisense strand comprises at least 15 (e.g., 16, 17, 18, 19, 20, 21, 22, or 23) contiguous nucleotides of and differing by no more than 5 (e.g., 0, 1, 2, 3, 4, or 5) nucleotides from the nucleotide sequence of the antisense strand of dsRNA agent 1; and the nucleotide sequence of the sense strand comprises at least 15 (e.g., 16, 17, 18, 19, 20, 21) contiguous nucleotides of and differing by no more than 5 (e.g., 0, 1, 2, 3, 4, or 5) nucleotides from the nucleotide sequence of the sense strand of dsRNA agent 1; (b) the nucleotide sequence of the antisense strand comprises at least 15 (e.g., 16, 17, 18, 19, 20, 21, 22, or 23) contiguous nucleotides of and differing by no more than 5 (e.g., 0, 1, 2, 3, 4, or 5) nucleotides from the nucleotide sequence of the antisense strand of dsRNA agent 2; and the nucleotide sequence of the sense strand comprises at least 15 (e.g., 16, 17, 18, 19, 20, 21) contiguous nucleotides of and differing by no more than 5 (e.g., 0, 1, 2, 3, 4, or 5) nucleotides from the nucleotide sequence of the sense strand of dsRNA agent 2; (c) the nucleotide sequence of the antisense strand comprises at least 15 (e.g., 16, 17, 18, 19, 20, 21, 22, or 23) contiguous nucleotides of and differing by no more than 5 (e.g., 0, 1, 2, 3, 4, or 5) nucleotides from the nucleotide sequence of the antisense strand of dsRNA agent 3; and the nucleotide sequence of the sense strand comprises at least 15 (e.g., 16, 17, 18, 19, 20, 21) contiguous nucleotides of and differing by no more than 5 (e.g., 0, 1, 2, 3, 4, or 5) nucleotides from the nucleotide sequence of the sense strand of dsRNA agent 3; (d) the nucleotide sequence of the antisense strand comprises at least 15 (e.g., 16, 17, 18, 19, 20, 21, 22, or 23) contiguous nucleotides of and differing by no more than 5 (e.g., 0, 1, 2, 3, 4, or 5) nucleotides from the nucleotide sequence of the antisense strand of dsRNA agent 4; and the nucleotide sequence of the sense strand comprises at least 15 (e.g., 16, 17, 18, 19, 20, 21) contiguous nucleotides of and differing by no more than 5 (e.g., 0, 1, 2, 3, 4, or 5) nucleotides from the nucleotide sequence of the sense strand of dsRNA agent 4; (e) the nucleotide sequence of the antisense strand comprises at least 15 (e.g., 16, 17, 18, 19, 20, 21, 22, or 23) contiguous nucleotides of and differing by no more than 5 (e.g., 0, 1, 2, 3, 4, or 5) nucleotides from the nucleotide sequence of the antisense strand of dsRNA agent 5; and the nucleotide sequence of the sense strand comprises at least 15 (e.g., 16, 17, 18, 19, 20, 21) contiguous nucleotides of and differing by no more than 5 (e.g., 0, 1, 2, 3, 4, or 5) nucleotides from the nucleotide sequence of the sense strand of dsRNA agent 5; (f) the nucleotide sequence of the antisense strand comprises at least 15 (e.g., 16, 17, 18, 19, 20, 21, 22, or 23) contiguous nucleotides of and differing by no more than 5 (e.g., 0, 1, 2, 3, 4, or 5) nucleotides from the nucleotide sequence of the antisense strand of dsRNA agent 6; and the nucleotide sequence of the sense strand comprises at least 15 (e.g., 16, 17, 18, 19, 20, 21) contiguous nucleotides of and differing by no more than 5 (e.g., 0, 1, 2, 3, 4, or 5) nucleotides from the nucleotide sequence of the sense strand of dsRNA agent 6; (g) the nucleotide sequence of the antisense strand comprises at least 15 (e.g., 16, 17, 18, 19, 20, 21, 22, or 23) contiguous nucleotides of and differing by no more than 5 (e.g., 0, 1, 2, 3, 4, or 5) nucleotides from the nucleotide sequence of the antisense strand of dsRNA agent 7; and the nucleotide sequence of the sense strand comprises at least 15 (e.g., 16, 17, 18, 19, 20, 21) contiguous nucleotides of and differing by no more than 5 (e.g., 0, 1, 2, 3, 4, or 5) nucleotides from the nucleotide sequence of the sense strand of dsRNA agent 7; (h) the nucleotide sequence of the antisense strand comprises at least 15 (e.g., 16, 17, 18, 19, 20, 21, 22, or 23) contiguous nucleotides of and differing by no more than 5 (e.g., 0, 1, 2, 3, 4, or 5) nucleotides from the nucleotide sequence of the antisense strand of dsRNA agent 8; and the nucleotide sequence of the sense strand comprises at least 15 (e.g., 16, 17, 18, 19, 20, 21) contiguous nucleotides of and differing by no more than 5 (e.g., 0, 1, 2, 3, 4, or 5) nucleotides from the nucleotide sequence of the sense strand of dsRNA agent 8; (i) the nucleotide sequence of the antisense strand comprises at least 15 (e.g., 16, 17, 18, 19, 20, 21, 22, or 23) contiguous nucleotides of and differing by no more than 5 (e.g., 0, 1, 2, 3, 4, or 5) nucleotides from the nucleotide sequence of the antisense strand of dsRNA agent 9; and the nucleotide sequence of the sense strand comprises at least 15 (e.g., 16, 17, 18, 19, 20, 21) contiguous nucleotides of and differing by no more than 5 (e.g., 0, 1, 2, 3, 4, or 5) nucleotides from the nucleotide sequence of the sense strand of dsRNA agent 9; (j) the nucleotide sequence of the antisense strand comprises at least 15 (e.g., 16, 17, 18, 19, 20, 21, 22, or 23) contiguous nucleotides of and differing by no more than 5 (e.g., 0, 1, 2, 3, 4, or 5) nucleotides from the nucleotide sequence of the antisense strand of dsRNA agent 10; and the nucleotide sequence of the sense strand comprises at least 15 (e.g., 16, 17, 18, 19, 20, 21) contiguous nucleotides of and differing by no more than 5 (e.g., 0, 1, 2, 3, 4, or 5) nucleotides from the nucleotide sequence of the sense strand of dsRNA agent 10; (k) the nucleotide sequence of the antisense strand comprises at least 15 (e.g., 16, 17, 18, 19, 20, 21, 22, or 23) contiguous nucleotides of and differing by no more than 5 (e.g., 0, 1, 2, 3, 4, or 5) nucleotides from the nucleotide sequence of the antisense strand of dsRNA agent 11; and the nucleotide sequence of the sense strand comprises at least 15 (e.g., 16, 17, 18, 19, 20, 21) contiguous nucleotides of and differing by no more than 5 (e.g., 0, 1, 2, 3, 4, or 5) nucleotides from the nucleotide sequence of the sense strand of dsRNA agent 11; (l) the nucleotide sequence of the antisense strand comprises at least 15 (e.g., 16, 17, 18, 19, 20, 21, 22, or 23) contiguous nucleotides of and differing by no more than 5 (e.g., 0, 1, 2, 3, 4, or 5) nucleotides from the nucleotide sequence of the antisense strand of dsRNA agent 12; and the nucleotide sequence of the sense strand comprises at least 15 (e.g., 16, 17, 18, 19, 20, 21) contiguous nucleotides of and differing by no more than 5 (e.g., 0, 1, 2, 3, 4, or 5) nucleotides from the nucleotide sequence of the sense strand of dsRNA agent 12; (m) the nucleotide sequence of the antisense strand comprises at least 15 (e.g., 16, 17, 18, 19, 20, 21, 22, or 23) contiguous nucleotides of and differing by no more than 5 (e.g., 0, 1, 2, 3, 4, or 5) nucleotides from the nucleotide sequence of the antisense strand of dsRNA agent 13; and the nucleotide sequence of the sense strand comprises at least 15 (e.g., 16, 17, 18, 19, 20, 21) contiguous nucleotides of and differing by no more than 5 (e.g., 0, 1, 2, 3, 4, or 5) nucleotides from the nucleotide sequence of the sense strand of dsRNA agent 13; (n) the nucleotide sequence of the antisense strand comprises at least 15 (e.g., 16, 17, 18, 19, 20, 21, 22, or 23) contiguous nucleotides of and differing by no more than 5 (e.g., 0, 1, 2, 3, 4, or 5) nucleotides from the nucleotide sequence of the antisense strand of dsRNA agent 14; and the nucleotide sequence of the sense strand comprises at least 15 (e.g., 16, 17, 18, 19, 20, 21) contiguous nucleotides of and differing by no more than 5 (e.g., 0, 1, 2, 3, 4, or 5) nucleotides from the nucleotide sequence of the sense strand of dsRNA agent 14; (o) the nucleotide sequence of the antisense strand comprises at least 15 (e.g., 16, 17, 18, 19, 20, 21, 22, or 23) contiguous nucleotides of and differing by no more than 5 (e.g., 0, 1, 2, 3, 4, or 5) nucleotides from the nucleotide sequence of the antisense strand of dsRNA agent 15; and the nucleotide sequence of the sense strand comprises at least 15 (e.g., 16, 17, 18, 19, 20, 21) contiguous nucleotides of and differing by no more than 5 (e.g., 0, 1, 2, 3, 4, or 5) nucleotides from the nucleotide sequence of the sense strand of dsRNA agent 15; or (p) the nucleotide sequence of the antisense strand comprises at least 15 (e.g., 16, 17, 18, 19, 20, 21, 22, or 23) contiguous nucleotides of and differing by no more than 5 (e.g., 0, 1, 2, 3, 4, or 5) nucleotides from the nucleotide sequence of the antisense strand of dsRNA agent 16; and the nucleotide sequence of the sense strand comprises at least 15 (e.g., 16, 17, 18, 19, 20, 21) contiguous nucleotides of and differing by no more than 5 (e.g., 0, 1, 2, 3, 4, or 5) nucleotides from the nucleotide sequence of the sense strand of dsRNA agent 16.

[0031] In some embodiments, (a) the nucleotide sequence of the antisense strand comprises at least 15 (e.g., 16, 17, 18, 19, 20, 21, 22, or 23) contiguous nucleotides of and differing by no more than 5 (e.g., 0, 1, 2, 3, 4, or 5) nucleotides from the nucleotide sequence of the antisense strand of dsRNA agent 770; and the nucleotide sequence of the sense strand comprises at least 15 (e.g., 16, 17, 18, 19, 20, 21) contiguous nucleotides of and differing by no more than 5 (e.g., 0, 1, 2, 3, 4, or 5) nucleotides from the nucleotide sequence of the sense strand of dsRNA agent 770; (b) the nucleotide sequence of the antisense strand comprises at least 15 (e.g., 16, 17, 18, 19, 20, 21, 22, or 23) contiguous nucleotides of and differing by no more than 5 (e.g., 0, 1, 2, 3, 4, or 5) nucleotides from the nucleotide sequence of the antisense strand of dsRNA agent 771; and the nucleotide sequence of the sense strand comprises at least 15 (e.g., 16, 17, 18, 19, 20, 21) contiguous nucleotides of and differing by no more than 5 (e.g., 0, 1, 2, 3, 4, or 5) nucleotides from the nucleotide sequence of the sense strand of dsRNA agent 771; (c) the nucleotide sequence of the antisense strand comprises at least 15 (e.g., 16, 17, 18, 19, 20, 21, 22, or 23) contiguous nucleotides of and differing by no more than 5 (e.g., 0, 1, 2, 3, 4, or 5) nucleotides from the nucleotide sequence of the antisense strand of dsRNA agent 772; and the nucleotide sequence of the sense strand comprises at least 15 (e.g., 16, 17, 18, 19, 20, 21) contiguous nucleotides of and differing by no more than 5 (e.g., 0, 1, 2, 3, 4, or 5) nucleotides from the nucleotide sequence of the sense strand of dsRNA agent 772; (d) the nucleotide sequence of the antisense strand comprises at least 15 (e.g., 16, 17, 18, 19, 20, 21, 22, or 23) contiguous nucleotides of and differing by no more than 5 (e.g., 0, 1, 2, 3, 4, or 5) nucleotides from the nucleotide sequence of the antisense strand of dsRNA agent 773; and the nucleotide sequence of the sense strand comprises at least 15 (e.g., 16, 17, 18, 19, 20, 21) contiguous nucleotides of and differing by no more than 5 (e.g., 0, 1, 2, 3, 4, or 5) nucleotides from the nucleotide sequence of the sense strand of dsRNA agent 773; (e) the nucleotide sequence of the antisense strand comprises at least 15 (e.g., 16, 17, 18, 19, 20, 21, 22, or 23) contiguous nucleotides of and differing by no more than 5 (e.g., 0, 1, 2, 3, 4, or 5) nucleotides from the nucleotide sequence of the antisense strand of dsRNA agent 774; and the nucleotide sequence of the sense strand comprises at least 15 (e.g., 16, 17, 18, 19, 20, 21) contiguous nucleotides of and differing by no more than 5 (e.g., 0, 1, 2, 3, 4, or 5) nucleotides from the nucleotide sequence of the sense strand of dsRNA agent 774; (f) the nucleotide sequence of the antisense strand comprises at least 15 (e.g., 16, 17, 18, 19, 20, 21, 22, or 23) contiguous nucleotides of and differing by no more than 5 (e.g., 0, 1, 2, 3, 4, or 5) nucleotides from the nucleotide sequence of the antisense strand of dsRNA agent 775; and the nucleotide sequence of the sense strand comprises at least 15 (e.g., 16, 17, 18, 19, 20, 21) contiguous nucleotides of and differing by no more than 5 (e.g., 0, 1, 2, 3, 4, or 5) nucleotides from the nucleotide sequence of the sense strand of dsRNA agent 775; (g) the nucleotide sequence of the antisense strand comprises at least 15 (e.g., 16, 17, 18, 19, 20, 21, 22, or 23) contiguous nucleotides of and differing by no more than 5 (e.g., 0, 1, 2, 3, 4, or 5) nucleotides from the nucleotide sequence of the antisense strand of dsRNA agent 776; and the nucleotide sequence of the sense strand comprises at least 15 (e.g., 16, 17, 18, 19, 20, 21) contiguous nucleotides of and differing by no more than 5 (e.g., 0, 1, 2, 3, 4, or 5) nucleotides from the nucleotide sequence of the sense strand of dsRNA agent 776; (h) the nucleotide sequence of the antisense strand comprises at least 15 (e.g., 16, 17, 18, 19, 20, 21, 22, or 23) contiguous nucleotides of and differing by no more than 5 (e.g., 0, 1, 2, 3, 4, or 5) nucleotides from the nucleotide sequence of the antisense strand of dsRNA agent 777; and the nucleotide sequence of the sense strand comprises at least 15 (e.g., 16, 17, 18, 19, 20, 21) contiguous nucleotides of and differing by no more than 5 (e.g., 0, 1, 2, 3, 4, or 5) nucleotides from the nucleotide sequence of the sense strand of dsRNA agent 777; (i) the nucleotide sequence of the antisense strand comprises at least 15 (e.g., 16, 17, 18, 19, 20, 21, 22, or 23) contiguous nucleotides of and differing by no more than 5 (e.g., 0, 1, 2, 3, 4, or 5) nucleotides from the nucleotide sequence of the antisense strand of dsRNA agent 778; and the nucleotide sequence of the sense strand comprises at least 15 (e.g., 16, 17, 18, 19, 20, 21) contiguous nucleotides of and differing by no more than 5 (e.g., 0, 1, 2, 3, 4, or 5) nucleotides from the nucleotide sequence of the sense strand of dsRNA agent 778; (j) the nucleotide sequence of the antisense strand comprises at least 15 (e.g., 16, 17, 18, 19, 20, 21, 22, or 23) contiguous nucleotides of and differing by no more than 5 (e.g., 0, 1, 2, 3, 4, or 5) nucleotides from the nucleotide sequence of the antisense strand of dsRNA agent 779; and the nucleotide sequence of the sense strand comprises at least 15 (e.g., 16, 17, 18, 19, 20, 21) contiguous nucleotides of and differing by no more than 5 (e.g., 0, 1, 2, 3, 4, or 5) nucleotides from the nucleotide sequence of the sense strand of dsRNA agent 779; (k) the nucleotide sequence of the antisense strand comprises at least 15 (e.g., 16, 17, 18, 19, 20, 21, 22, or 23) contiguous nucleotides of and differing by no more than 5 (e.g., 0, 1, 2, 3, 4, or 5) nucleotides from the nucleotide sequence of the antisense strand of dsRNA agent 780; and the nucleotide sequence of the sense strand comprises at least 15 (e.g., 16, 17, 18, 19, 20, 21) contiguous nucleotides of and differing by no more than 5 (e.g., 0, 1, 2, 3, 4, or 5) nucleotides from the nucleotide sequence of the sense strand of dsRNA agent 780; (l) the nucleotide sequence of the antisense strand comprises at least 15 (e.g., 16, 17, 18, 19, 20, 21, 22, or 23) contiguous nucleotides of and differing by no more than 5 (e.g., 0, 1, 2, 3, 4, or 5) nucleotides from the nucleotide sequence of the antisense strand of dsRNA agent 781; and the nucleotide sequence of the sense strand comprises at least 15 (e.g., 16, 17, 18, 19, 20, 21) contiguous nucleotides of and differing by no more than 5 (e.g., 0, 1, 2, 3, 4, or 5) nucleotides from the nucleotide sequence of the sense strand of dsRNA agent 781; (m) the nucleotide sequence of the antisense strand comprises at least 15 (e.g., 16, 17, 18, 19, 20, 21, 22, or 23) contiguous nucleotides of and differing by no more than 5 (e.g., 0, 1, 2, 3, 4, or 5) nucleotides from the nucleotide sequence of the antisense strand of dsRNA agent 782; and the nucleotide sequence of the sense strand comprises at least 15 (e.g., 16, 17, 18, 19, 20, 21) contiguous nucleotides of and differing by no more than 5 (e.g., 0, 1, 2, 3, 4, or 5) nucleotides from the nucleotide sequence of the sense strand of dsRNA agent 782; (n) the nucleotide sequence of the antisense strand comprises at least 15 (e.g., 16, 17, 18, 19, 20, 21, 22, or 23) contiguous nucleotides of and differing by no more than 5 (e.g., 0, 1, 2, 3, 4, or 5) nucleotides from the nucleotide sequence of the antisense strand of dsRNA agent 783; and the nucleotide sequence of the sense strand comprises at least 15 (e.g., 16, 17, 18, 19, 20, 21) contiguous nucleotides of and differing by no more than 5 (e.g., 0, 1, 2, 3, 4, or 5) nucleotides from the nucleotide sequence of the sense strand of dsRNA agent 783; (o) the nucleotide sequence of the antisense strand comprises at least 15 (e.g., 16, 17, 18, 19, 20, 21, 22, or 23) contiguous nucleotides of and differing by no more than 5 (e.g., 0, 1, 2, 3, 4, or 5) nucleotides from the nucleotide sequence of the antisense strand of dsRNA agent 784; and the nucleotide sequence of the sense strand comprises at least 15 (e.g., 16, 17, 18, 19, 20, 21) contiguous nucleotides of and differing by no more than 5 (e.g., 0, 1, 2, 3, 4, or 5) nucleotides from the nucleotide sequence of the sense strand of dsRNA agent 784; or (p) the nucleotide sequence of the antisense strand comprises at least 15 (e.g., 16, 17, 18, 19, 20, 21, 22, or 23) contiguous nucleotides of and differing by no more than 5 (e.g., 0, 1, 2, 3, 4, or 5) nucleotides from the nucleotide sequence of the antisense strand of dsRNA agent 785; and the nucleotide sequence of the sense strand comprises at least 15 (e.g., 16, 17, 18, 19, 20, 21) contiguous nucleotides of and differing by no more than 5 (e.g., 0, 1, 2, 3, 4, or 5) nucleotides from the nucleotide sequence of the sense strand of dsRNA agent 785.

[0032] In one aspect, provided herein are double stranded ribonucleic acid (dsRNA) agents for inhibiting expression of BCL11 transcription factor A (BCL11A) (e.g., human BCL11A (hBCL11A)), wherein the dsRNA agent comprises a sense strand and an antisense strand forming a double stranded region, wherein the antisense strand comprises at least 15 (e.g., 16, 17, 18, 19, 20, 21, 22, or 23) contiguous nucleotides of and differing by no more than 3 (e.g., 0, 1, 2, or 3) nucleotides from the nucleotide sequence of any one of the antisense strands set forth in any one of Tables 2-5 (e.g., Table 3 or 5) or set forth in any one of SEQ ID NOS: 4-1576 (e.g., any one of SEQ ID NOS: 4-19 or 772-787).

[0033] In some embodiments, the sense strand comprises at least 15 (e.g., 16, 17, 18, 19, 20, 21) contiguous nucleotides of and differing by no more than 3 (e.g., 0, 1, 2, or 3) nucleotides from any sense strand set forth in any one of Tables 2-5 (e.g., Table 3 or 5) or set forth in any one of SEQ ID NOS: 1577-3166 (e.g., any one of SEQ ID NOS: 1577-1592 or 2346-2361).

[0034] In some embodiments, the sense strand comprises at least 15 (e.g., 16, 17, 18, 19, 20, 21) contiguous nucleotides of and differing by no more than 3 (e.g., 0, 1, 2, or 3) nucleotides from the corresponding sense strand set forth in any one of Tables 2-5 (e.g., Table 3 or 5) or the corresponding sense strand set forth in one of SEQ ID NOS: 1577-3166.

[0035] In one aspect, provided herein are dsRNA agents for inhibiting expression of BCL11A (e.g., hBCL11A), wherein the dsRNA agent comprises a sense strand and an antisense strand forming a double stranded region, and wherein the antisense strand comprises at least 15 (e.g., 16, 17, 18, 19, 20, 21, 22, or 23) contiguous nucleotides of and differing by no more than 3 (e.g., 0, 1, 2, or 3) nucleotides from the nucleotide sequence of the antisense strands of any one of dsRNA agents 1-1590 (e.g., one of dsRNA agents 1-16 or 770-785) set forth in any one of Tables 2-5 (e.g., Table 3 or 5); and wherein the sense strand comprises at least 15 (e.g., 16, 17, 18, 19, 20, 21, 22, or 23) contiguous nucleotides of and differing by no more than 3 (e.g., 0, 1, 2, or 3) nucleotides from the nucleotide sequence of the sense strand of the corresponding dsRNA agent set forth in any one of Tables 2-5 (e.g., Table 3 or 5).

[0036] It should be understood that each of the following embodiments is applicable to each and any of the foregoing aspects as if recited directed after each aspect.

[0037] In some embodiments, the sense strand comprises at least 15 (e.g., 16, 17, 18, 19, 20, 21) contiguous nucleotides of and differing by no more than 3 (e.g., 0, 1, 2, or 3) nucleotides from any sense strand set forth in any one of Tables 2-5 (e.g., Table 3 or 5) or set forth in any one of SEQ ID NOS: 1577-3166 (e.g., any one of SEQ ID NOS: 1577-1592 or 2346-2361).

[0038] In some embodiments, the sense strand comprises at least 15 (e.g., 16, 17, 18, 19, 20, 21) contiguous nucleotides of and differing by no more than 3 (e.g., 0, 1, 2, or 3) nucleotides from the corresponding sense strand set forth in any one of Tables 2-5 (e.g., Table 3 or 5) or the corresponding sense strand set forth in one of SEQ ID NOS: 1577-3166.

[0039] In some embodiments, the sense strand comprises at least one modified nucleotide and/or the antisense strand comprises at least one modified nucleotide.

[0040] In some embodiments, the sense strand comprises at least one modified nucleotide and the antisense strand comprises at least one modified nucleotide.

[0041] In some embodiments, at least 25%, 30%, 35%, 40%, 45%, 50%, 55%, 60%, 65%, 70%, 75%, 80%, 85%, 90%, 95%, or 100% of the nucleotides of the sense strand and/or antisense strand are modified.

[0042] In some embodiments, substantially all (or all) of the nucleotides in the sense strand and/or antisense strand are modified. In some embodiments, at least one of the modified nucleotides comprises a modified sugar (e.g., ribose moiety). In some embodiments, at least one of the modified nucleotides comprises a modified nucleobase. In some embodiments, at least one of the modified nucleotides comprises a modified sugar (e.g., ribose moiety) and a modified nucleobase. In some embodiments, the sense strand comprises at least one modified internucleoside linkage and/or the antisense strand comprises at least one modified internucleoside linkage. In some embodiments, the sense strand comprises at least one modified internucleoside linkage and the antisense strand comprises at least one modified internucleoside linkage.

[0043] In some embodiments, each of the antisense strand and the sense strand are not more than 30, 29, 28, 27, 26, 25, 24, 23, 22, 21, 20, 19, 18, 17, 16, or 15 nucleotides in length. In some embodiments, the antisense strand comprises from about 15-30, 16-30, 17-30, 18-30, 19-30 20-30, 21-30, 22-30, 23-30, 24-30, 25-30, 36-30, 27-30, 28-30-, 29-30, 19-20, 19-21, 19-22, 19-23, 19-24, or 19-25 nucleotides; and/or the sense strand comprises from about 15-30, 16-30, 17-30, 18-30, 19-30 20-30, 21-30, 22-30, 23-30, 24-30, 25-30, 36-30, 27-30, 28-30-, 29-30, 19-20, 19-21, 19-22, 19-23, 19-24, or 19-25 nucleotides. In some embodiments, antisense strand comprises from about 19-23 nucleotides; and/or the sense strand comprises from about 19-23 nucleotides. In some embodiments, antisense strand consists of 23 nucleotides; and the sense strand consists of 21 nucleotides. In some embodiments, antisense strand comprises or consists of about 23 nucleotides; and/or the sense strand comprises or consists of about 21 nucleotides.

[0044] In some embodiments, the sense strand and/or the antisense strand comprises a 3′ and/or 5′ overhang of 1, 2, or 3 nucleotides. In some embodiments, the antisense strand comprises a 3′ overhang of 1, 2, or 3 nucleotides (e.g., 2 nucleotides).

[0045] In some embodiments, the double stranded region is from about 19-30, 19-29, 19-28, 19-27, 19-26, 19-25, 19-24, 19-23, 19-22, 19-20, 19-21, 23-30, 23-29, 23-28, 23-27, 23-26, 23-25, 23-24, 21-30, 21-29, 21-28, 21-27, 21-26, 21-25, 21-24, 21-23, or 21-22 nucleotide pairs in length. In some embodiments, the double stranded region is from about 19-23 or 19-21 nucleotide pairs in length. In some embodiments, the double stranded region is about 21 nucleotide pairs in length.

[0046] In some embodiments, the sense strand and the antisense strand are part of a single nucleic acid molecule (e.g., wherein a hairpin loop is between the sense strand and the antisense strand of the single nucleic acid molecule. In some embodiments, the sense strand and the antisense strand are separate nucleic acid molecules (i.e., connected only through the double stranded region).

[0047] In one aspect, provided herein are antisense oligonucleotide agents for inhibiting expression of BCL11) (e.g., hBCL11A), wherein the antisense oligonucleotide comprises at least 15 (e.g., 16, 17, 18, 19, 20) contiguous nucleotides of and differing by no more than 3 (e.g., 0, 1, 2, or 3) nucleotides from the nucleotide sequence of any one of the antisense oligonucleotides set forth in Table 7 or 9 (e.g., Table 9) or set forth in any one of SEQ ID NOS: 3167-3280.

[0048] In some embodiments, the antisense oligonucleotide comprises the nucleotide sequence of any one of the antisense oligonucleotides set forth in Table 7 or 9 (e.g., Table 9) or set forth in any one of SEQ ID NOS: 3167-3280. In some embodiments, the antisense oligonucleotide consists of the nucleotide sequence of any one of the antisense oligonucleotides set forth in Table 7 or 9 (e.g., Table 9) or set forth in any one of SEQ ID NOS: 3167-3280.

[0049] In some embodiments, the antisense oligonucleotide comprises at least one modified nucleotide. In some embodiments, at least 25%, 30%, 35%, 40%, 45%, 50%, 55%, 60%, 65%, 70%, 75%, 80%, 85%, 90%, 95%, or 100% of the nucleotides of the antisense oligonucleotide are modified. In some embodiments, substantially all (or all) of the nucleotides in the antisense oligonucleotide are modified. In some embodiments, at least one of the modified nucleotides comprises a modified sugar (e.g., ribose moiety, deoxyribose moiety). In some embodiments, the antisense oligonucleotide comprises one or more 2′-O-methoxyethyl moiety (e.g., ribose moiety, deoxyribose moiety). In some embodiments, the antisense oligonucleotide comprises one or more locked nucleic acid (LNA). In some embodiments, at least one of the modified nucleotides comprises a modified nucleobase. In some embodiments, the antisense oligonucleotide comprises at least one modified internucleoside linkage. In some embodiments, the antisense oligonucleotide comprises one or more phosphorothioate linkage.

[0050] In some embodiments, each of the antisense oligonucleotide is not more than 30, 29, 28, 27, 26, 25, 24, 23, 22, 21, 20, 19, 18, 17, 16, or 15 nucleotides in length. In some embodiments, the antisense oligonucleotide comprises from about 10-30 (e.g., 15-29, 15-28, 15-27, 15-26, 15-25, 15-24, 15-23, 15-22, 15-21, 15-20, 15-19, 15-18, 15-17, 15-16, 16-29, 16-28, 16-27, 16-26, 16-25, 16-24, 16-23, 16-22, 16-21, 16-20, 16-19, 16-18, 16-17, 17-29, 17-28, 17-27, 17-26, 17-25, 17-24, 17-23, 17-22, 17-21, 17-20, 17-19, 17-18, 18-30, 18-29, 18-28, 18-27, 18-26, 18-25, 18-24, 18-23, 18-22, 18-21, 18-20, 19-30, 19-29, 19-28, 19-27, 19-26, 19-25, 19-24, 19-23, 19-22, 19-21, or 19-20 nucleotides. In some embodiments, the antisense oligonucleotide comprises from about 15-25, 15-14, 15-23, 15-22, 15-21, 15-20, 15-19, 15-18, 15-17, 15-16, 16-25, 16-14, 16-23, 16-22, 16-21, 16-20, 16-19, 16-18, 16-17, 17-25, 17-14, 17-23, 17-22, 17-21, 17-20, 17-19, 17-18, 18-25, 18-14, 18-23, 18-22, 18-21, 18-20, 18-19, 19-25, 19-14, 19-23, 19-22, 19-21, or 19-20 nucleotides. In some embodiments, the antisense oligonucleotide comprises from about 15-20 nucleotides. In some embodiments, the antisense oligonucleotide comprises about 15, 16, 17, 18, 19, 20, 21, 22, 23, 24, 25, 26, 27, 28, 29, or 30 nucleotides. In some embodiments, the antisense oligonucleotide comprises about 15, 16, 17, 18, 19, or 20 nucleotides. In some embodiments, the antisense oligonucleotide consists of about 15, 16, 17, 18, 19, 20, 21, 22, 23, 24, 25, 26, 27, 28, 29, or 30 nucleotides. In some embodiments, the antisense oligonucleotide consist of about 15, 16, 17, 18, 19, or 20 nucleotides.

[0051] In one aspect, provided herein are conjugates comprising (i) a dsRNA agent described herein or an antisense oligonucleotide described herein and (ii) a heterologous moiety.

[0052] In some embodiments, the heterologous moiety is a peptide, protein, carbohydrate, lipid, polymer, or small molecule.

[0053] In some embodiments, the heterologous moiety is a protein.

[0054] In some embodiments, the protein specifically binds to a moiety expressed by a hematopoietic cell (e.g., on the surface of a hematopoietic cell). In some embodiments, the protein specifically binds to a moiety expressed by an erythroid precursor cell (e.g., on the surface of an erythroid precursor cell). In some embodiments, the protein specifically binds the transferrin receptor (TFR) (e.g., human TFR (hTFR) (e.g., hTFR1)).

[0055] In some embodiments, the protein is an antibody. In some embodiments, the antibody comprises or consists of a full-length antibody, a Fab, a Fab′, a F(ab′)2, a Fab-Fc, a scFv, a scFv-Fc, a (scFv)₂-Fc, an Fv, a single domain antibody (sdAb) (e.g., a VHH), a sdAb-Fc (e.g., a VHH-Fc), a (sdAb)₂ (e.g., a (VHH)₂), or a (sdAb)₂-Fc (e.g., a (VHH)₂-Fc). In some embodiments, the antibody comprises or consists of a full-length antibody, a Fab-Fc, a scFv-Fc, a (scFv)₂-Fc, a sdAb-Fc (e.g., a VHH-Fc), or a (sdAb)₂-Fc (e.g., a (VHH)₂-Fc).

[0056] In some embodiments, the antibody is an IgG (e.g., a human IgG (hIgG)) antibody. In some embodiments, the antibody is a hIgG1, hIgG2, hIgG3, or hIgG4 antibody (e.g., a hIgG1 or hIgG4 antibody). In some embodiments, the antibody comprises an immunoglobulin (Ig) (e.g., a human Ig (hIg)) Fc region. In some embodiments, the Ig (e.g., hIg) Fc region comprises at least a portion of a hinge region, a CH2 region, and a CH3 region. In some embodiments, the Ig (e.g., hIg) Fc region comprises a hinge region, a CH2 region, and a CH3 region. In some embodiments, the Ig is a hIg. In some embodiments, the hIg is a human IgG (hIgG). In some embodiments, the hIgG is hIgG1 or hIgG4. In some embodiments, the Ig (e.g., hIg) Fc region comprises one or more amino acid substitutions relative to a reference Ig (e.g., hIg) Fc region that reduces or abolishes one or more of the following effector functions relative to the reference hIg Fc region: antibody dependent cell mediated cytotoxicity (ADCC), complement dependent cytotoxicity (CDC), and/or affinity to one or more human Fc receptor (e.g., an Fcγ receptor (e.g., FcγRI, FcγRIIa, FcγRIIc, FcγRIIIa, and/or FcγRIIIb (e.g., FcγRI, FcγIIa, and/or FcγIIIa))).

[0057] In some embodiments, the antibody does not (or does not substantially) block binding of TF (e.g., hTF) to the TFR (e.g., hTFR1).

[0058] In some embodiments, the protein is a TFR ligand (or a functional fragment or functional variant thereof).

[0059] In some embodiments, the TFR ligand comprises transferrin (TF) (e.g., human transferrin (hTF)) (or a functional fragment or functional variant thereof).

[0060] In some embodiments, the heterologous moiety is a targeting moiety.

[0061] In some embodiments, the targeting moiety specifically binds to a moiety expressed by a hematopoietic cell (e.g., on the surface of a hematopoietic cell). In some embodiments, the targeting moiety specifically binds to a moiety expressed by an erythroid precursor cell (e.g., on the surface of an erythroid precursor cell). In some embodiments, the targeting moiety specifically binds TFR (e.g., hTFR (e.g., hTFR1)).

[0062] In some embodiments, the targeting moiety is a peptide, protein, carbohydrate, lipid, polymer, or small molecule.

[0063] In some embodiments, the targeting moiety is a protein.

[0064] In some embodiments, the targeting moiety is an antibody. In some embodiments, the antibody comprises or consists of a full-length antibody, a Fab, a Fab′, a F(ab′)2, a Fab-Fc, a scFv, a scFv-Fc, a (scFv)₂-Fc, an Fv, a single domain antibody (sdAb) (e.g., a VHH), a sdAb-Fc (e.g., a VHH-Fc), a (sdAb)₂ (e.g., a (VHH)₂), or a (sdAb)₂-Fc (e.g., a (VHH)₂-Fc). In some embodiments, the antibody comprises or consists of a full-length antibody, a Fab-Fc, a scFv-Fc, a (scFv)₂-Fc, a sdAb-Fc (e.g., a VHH-Fc), or a (sdAb)₂-Fc (e.g., a (VHH)₂-Fc).

[0065] In some embodiments, the antibody is an IgG (e.g., a human IgG (hIgG)) antibody. In some embodiments, the antibody is a hIgG1, hIgG2, hIgG3, or hIgG4 antibody (e.g., a hIgG1 or hIgG4 antibody). In some embodiments, the antibody comprises an immunoglobulin (Ig) (e.g., a human Ig (hIg)) Fc region. In some embodiments, the Ig (e.g., hIg) Fc region comprises at least a portion of a hinge region, a CH2 region, and a CH3 region. In some embodiments, the Ig (e.g., hIg) Fc region comprises a hinge region, a CH2 region, and a CH3 region. In some embodiments, the Ig is a hIg. In some embodiments, the hIg is a human IgG (hIgG). In some embodiments, the hIgG is hIgG1 or hIgG4. In some embodiments, the Ig (e.g., hIg) Fc region comprises one or more amino acid substitutions relative to a reference Ig (e.g., hIg) Fc region that reduces or abolishes one or more of the following effector functions relative to the reference hIg Fc region: antibody dependent cell mediated cytotoxicity (ADCC), complement dependent cytotoxicity (CDC), and/or affinity to one or more human Fc receptor (e.g., an Fcγ receptor (e.g., FcγRI, FcγRIIa, FcγRIIc, FcγRIIIa, and/or FcγRIIIb (e.g., FcγRI, FcγIIa, and/or FcγIIIa))).

[0066] In some embodiments, the antibody does not (or does not substantially) block binding of TF (e.g., hTF) to the TFR (e.g., hTFR1).

[0067] In some embodiments, the targeting moiety is a TFR ligand (or a functional fragment or functional variant thereof).

[0068] In some embodiments, the TFR ligand comprises transferrin (TF) (e.g., human transferrin (hTF)) (or a functional fragment or functional variant thereof).

[0069] In some embodiments, the conjugate exhibits one or more of the following properties: (a) upon binding to TFR (e.g., hTFR (e.g., TFR1)) expressed on the surface of a hematopoietic cell, the conjugate does not induce death of the target cell; (b) upon binding to TFR (e.g., hTFR (e.g., TFR1)) expressed on the surface of a hematopoietic cell, the hematopoietic cell remains viable; (c) upon internalization into a hematopoietic cell, the conjugate does not induce death of the hematopoietic cell; and/or (d) upon binding to TFR (e.g., hTFR (e.g., TFR1)) expressed on the surface of a hematopoietic cell, the conjugate does not induce degradation of TFR (e.g., hTFR (e.g., TFR1)).

[0070] In some embodiments, the conjugate exhibits one or more of the following properties: (a) upon binding to TFR (e.g., hTFR (e.g., TFR1)) expressed on the surface of a hematopoietic cell, the conjugate is internalized into the hematopoietic cell; (b) upon binding to TFR (e.g., hTFR (e.g., TFR1)) expressed on the surface of a hematopoietic cell, the conjugate does not induce death of the target cell; (c) upon binding to TFR (e.g., hTFR (e.g., TFR1)) expressed on the surface of a hematopoietic cell, the hematopoietic cell remains viable; (d) upon internalization into a hematopoietic cell, the conjugate does not induce death of the hematopoietic cell; and/or (e) upon binding to TFR (e.g., hTFR (e.g., TFR1)) expressed on the surface of a hematopoietic cell, the conjugate does not induce degradation of TFR (e.g., hTFR (e.g., TFR1)).

[0071] In some embodiments, the protein (e.g., an antibody) that specifically binds to the TFR (e.g., hTFR (e.g., hTFR1)) exhibits one or more of the following properties: (a) upon binding to TFR (e.g., hTFR (e.g., TFR1)) expressed on the surface of a hematopoietic cell, the protein (e.g., an antibody) that specifically binds to the TFR (e.g., hTFR (e.g., hTFR1)) or conjugate is internalized into the hematopoietic cell; (b) upon binding to TFR (e.g., hTFR (e.g., TFR1)) expressed on the surface of a hematopoietic cell, the protein (e.g., an antibody) that specifically binds to the TFR (e.g., hTFR (e.g., hTFR1)) or conjugate does not induce death of the target cell; (c) upon binding to TFR (e.g., hTFR (e.g., TFR1)) expressed on the surface of a hematopoietic cell, the hematopoietic cell remains viable; (d) upon internalization into a hematopoietic cell, the protein (e.g., an antibody) that specifically binds to the TFR (e.g., hTFR (e.g., hTFR1)) or conjugate does not induce death of the hematopoietic cell; and/or (e) upon binding to TFR (e.g., hTFR (e.g., TFR1)) expressed on the surface of a hematopoietic cell, the protein (e.g., an antibody) that specifically binds to the TFR (e.g., hTFR (e.g., hTFR1)) or conjugate does not induce degradation of TFR (e.g., hTFR (e.g., TFR1)).

[0072] In some embodiments, the heterologous moiety is attached to the dsRNA agent or the antisense oligonucleotide via a linker. In some embodiments, the linker is cleavable.

[0073] In some embodiments, the heterologous moiety attached to the 3′ end of the sense and/or antisense strand and/or the 5′ end of the sense and/or antisense strand, and/or at an internal site of the sense and/or antisense strand. In some embodiments, the heterologous moiety attached to the 3′ end of the antisense oligonucleotide, the 5′ end of the antisense oligonucleotide, and/or at an internal site of the antisense oligonucleotide.

[0074] In one aspect, provided herein are vectors (e.g., a viral vector, a non-viral vector) encoding (i) an antisense strand, a sense strand, or both an antisense and sense strand described herein or (ii) or an antisense oligonucleotide described herein.

[0075] In one aspect, provided herein are carriers comprising a dsRNA agent described herein, an antisense oligonucleotide described herein, a conjugate described herein, or a vector described herein.

[0076] In some embodiments, the carrier comprises a nanoparticle, a polymer, a lipid-based delivery system, as dendrimer, a cationic delivery system, or a hydrogel. In some embodiments, the lipid-based delivery system is a lipid nanoparticle (LNP), liposome, lipoplex, nanoliposome, an exosome, or a micelle.

[0077] In one aspect, provided herein are cells comprising a dsRNA agent described herein, an antisense oligonucleotide described herein, a conjugate described herein, a vector described herein, or a carrier described herein.

[0078] In one aspect, provided herein are pharmaceutical compositions comprising a dsRNA agent described herein, an antisense oligonucleotide described herein, a conjugate described herein, a vector described herein, a carrier described herein, or a cell described herein, and a pharmaceutically acceptable excipient.

[0079] In one aspect, provided herein are kits comprising a dsRNA agent described herein, an antisense oligonucleotide described herein, a conjugate described herein, a vector described herein, a carrier described herein, a cell described herein, or a pharmaceutical composition described herein.

[0080] In one aspect, provided herein are methods of delivering a dsRNA, antisense oligonucleotide, conjugate, vector, carrier, or pharmaceutical composition to a cell, the method comprising introducing into a cell a dsRNA agent described herein, an antisense oligonucleotide described herein, a conjugate described herein, a vector described herein, a carrier described herein, or a pharmaceutical composition described herein, to thereby deliver the dsRNA, antisense oligonucleotide, conjugate, vector, carrier, or pharmaceutical composition into the cell.

[0081] In some embodiments, the cell is in vitro, ex vivo, or in vivo. In some embodiments, the cell is a subject (e.g., a human subject).

[0082] In one aspect, provided herein are methods of delivering a dsRNA, antisense oligonucleotide, conjugate, vector, carrier, cell, or pharmaceutical composition to a subject, the method comprising administering to the subject a dsRNA agent described herein, an antisense oligonucleotide described herein, a conjugate described herein, a vector described herein, a carrier described herein, a cell described herein, or a pharmaceutical composition described herein, to thereby deliver the dsRNA, antisense oligonucleotide, conjugate, vector, carrier, cell, or pharmaceutical composition to the subject.

[0083] In one aspect, provided herein are methods of reducing or inhibiting expression of BCL11A (e.g., hBCL11A) in a cell, the method comprising delivering into the cell a dsRNA agent described herein, an antisense oligonucleotide described herein, a conjugate described herein, a vector described herein, a carrier described herein, a cell described herein, or a pharmaceutical composition described herein, to thereby reduce or inhibit expression of BCL11A (e.g., hBCL11A) in the cell.

[0084] In one aspect, provided herein are methods of reducing or inhibiting expression of BCL11A (e.g., hBCL11A) in a cell in a subject, the method comprising administering to the subject a dsRNA agent described herein, an antisense oligonucleotide described herein, a conjugate described herein, a vector described herein, a carrier described herein, a cell described herein, or a pharmaceutical composition described herein, to thereby reduce or inhibit expression of BCL11A (e.g., hBCL11A) in the cell in the subject.

[0085] In one aspect, provided herein are methods of treating, ameliorating, or preventing a BCL11A (e.g., hBCL11A) associated disease in a subject, the method comprising administering to the subject a dsRNA agent described herein, an antisense oligonucleotide described herein, a conjugate described herein, a vector described herein, a carrier described herein, a cell described herein, or a pharmaceutical composition described herein, to thereby treat, ameliorate, or prevent the BCL11A (e.g., hBCL11A) associated disease in the subject.

[0086] In some embodiments, the BCL11A associated disease is an inherited blood disorder.

[0087] In some embodiments, the inherited blood disorder is a hemoglobinopathy. In some embodiments, the hemoglobinopathy is sickle cell disease, sickle cell trait, hemoglobin C disease, hemoglobin C trait, hemoglobin S/C disease, hemoglobin D disease, hemoglobin E disease, a thalassemia (e.g., α-thalassemia, β-thalassemia, δ-thalassemia, or γ-thalassemia), a condition associated with hemoglobin with increased oxygen affinity, a condition associated with hemoglobin with decreased oxygen affinity, unstable hemoglobin disease, or methemoglobinemia.

[0088] In some embodiments, the inherited blood disorder is an inherited bone marrow failure syndrome. In some embodiments, the inherited bone marrow failure syndrome is amegakaryocytic thrombocytopenia (Amega), diamond blackfan anemia (DBA), dyskeratosis congenita (DC), Fanconi anemia (FA), Pearson syndrome, severe congenital neutropenia (SCN), Schwachman diamond syndrome (SDS), GATA2 deficiency, cyclic neutropenia, Dubowitz syndrome, Kostmann syndrome, refractory cytopenia, thrombocytopenia absent radii (TAR), a SAMD9/SAMD9L disorder, or a MECOM-associated syndrome.

[0089] In one aspect, provided herein are methods of treating, ameliorating, or preventing an inherited blood disorder in a subject, the method comprising administering to the subject a dsRNA agent described herein, an antisense oligonucleotide described herein, a conjugate described herein, a vector described herein, a carrier described herein, a cell described herein, or a pharmaceutical composition described herein, to thereby treat, ameliorate, or prevent the inherited blood disorder in the subject.

[0090] In some embodiments, the inherited blood disorder is a hemoglobinopathy. In some embodiments, the hemoglobinopathy is sickle cell disease, sickle cell trait, hemoglobin C disease, hemoglobin C trait, hemoglobin S/C disease, hemoglobin D disease, hemoglobin E disease, a thalassemia (e.g., α-thalassemia, β-thalassemia, δ-thalassemia, or γ-thalassemia), a condition associated with hemoglobin with increased oxygen affinity, a condition associated with hemoglobin with decreased oxygen affinity, unstable hemoglobin disease, or methemoglobinemia.

[0091] In one aspect, provided herein are methods of treating, ameliorating, or preventing a hemoglobinopathy in a subject, the method comprising administering to the subject a dsRNA agent described herein, an antisense oligonucleotide described herein, a conjugate described herein, a vector described herein, a carrier described herein, a cell described herein, or a pharmaceutical composition described herein, to thereby treat, ameliorate, or prevent the hemoglobinopathy in the subject.

[0092] In some embodiments, the hemoglobinopathy is sickle cell disease, sickle cell trait, hemoglobin C disease, hemoglobin C trait, hemoglobin S/C disease, hemoglobin D disease, hemoglobin E disease, a thalassemia (e.g., α-thalassemia, β-thalassemia, δ-thalassemia, or γ-thalassemia), a condition associated with hemoglobin with increased oxygen affinity, a condition associated with hemoglobin with decreased oxygen affinity, unstable hemoglobin disease, or methemoglobinemia.

[0093] In one aspect, provided herein are methods of treating, ameliorating, or preventing an inherited bone marrow failure syndrome in a subject, the method comprising administering to the subject a dsRNA agent described herein, an antisense oligonucleotide described herein, a conjugate described herein, a vector described herein, a carrier described herein, a cell described herein, or a pharmaceutical composition described herein, to thereby treat, ameliorate, or prevent the inherited bone marrow failure syndrome in the subject.

[0094] In some embodiments, the inherited bone marrow failure syndrome is amegakaryocytic thrombocytopenia (Amega), diamond blackfan anemia (DBA), dyskeratosis congenita (DC), Fanconi anemia (FA), Pearson syndrome, severe congenital neutropenia (SCN), Schwachman diamond syndrome (SDS), GATA2 deficiency, cyclic neutropenia, Dubowitz syndrome, Kostmann syndrome, refractory cytopenia, thrombocytopenia absent radii (TAR), a SAMD9/SAMD9L disorder, or a MECOM-associated syndrome.

[0095] In one aspect, provided herein are methods of inducing expression of fetal hemoglobin in a subject, the method comprising administering to the subject a dsRNA agent described herein, an antisense oligonucleotide described herein, a conjugate described herein, a vector described herein, a carrier described herein, a cell described herein, or a pharmaceutical composition described herein, to thereby induce expression of fetal hemoglobin the subject.

[0096] In one aspect, provided herein are methods of increasing the level of fetal hemoglobin in a subject, the method comprising administering to the subject a dsRNA agent described herein, an antisense oligonucleotide described herein, a conjugate described herein, a vector described herein, a carrier described herein, a cell described herein, or a pharmaceutical composition described herein, to thereby increase the level of fetal hemoglobin the subject.

[0097] In one aspect, provided herein are methods of increasing the ratio of fetal hemoglobin to adult hemoglobin in a subject, the method comprising administering to the subject a dsRNA agent described herein, an antisense oligonucleotide described herein, a conjugate described herein, a vector described herein, a carrier described herein, a cell described herein, or a pharmaceutical composition described herein, to thereby increase the ratio of fetal hemoglobin to adult hemoglobin in the subject.

[0098] In some embodiments, the subject is a human.

### 4. DETAILED DESCRIPTION

[0099] The inventors have further discovered, inter alia, RNA agents (e.g., siRNA agents; antisense oligonucleotides) that inhibit expression of BCL11A (e.g., hBCL11A). As such, the RNA agents described herein are useful for the treatment of BCL11A mediated diseases. As such, the current disclosure provides RNA agents (e.g., dsRNAi agents comprising a sense strand and an antisense strand, siRNA agents; ssRNA agents, antisense oligonucleotides, etc.) capable of inhibiting BCL11A expression (e.g., in a cell, in a cell in a subject); and their use in, inter alia, pharmaceutical compositions, and methods of treating diseases (e.g., BCL11A mediated diseases).

TABLE OF CONTENTS

| | |
|---|---|
| 4.2 | RNAi Agents |
| 4.2.1 | Antisense Strand |
| 4.2.1.1 | Targeting Region |
| 4.2.1.2 | Overall Length |
| 4.2.1.3 | Exemplary Antisense Strands |
| 4.2.2 | Sense Strand |
| 4.2.2.1 | Antisense Strand Complementarity |
| 4.2.2.2 | Overall Length |
| 4.2.2.3 | Exemplary Sense Strands |
| 4.2.3 | dsRNA Agents |
| 4.2.3.1 | Single & Multiple Nucleic Acid Molecules |
| 4.2.3.2 | Length of Double Stranded Region |
| 4.2.3.3 | Nucleotide Overhangs & Blunt Ends |
| 4.2.3.4 | Exemplary Structural Combinations of Sense & Antisense Strands |
| 4.2.3.5 | Exemplary Antisense Strands & Sense Strands |
| 4.2.3.6 | Exemplary dsRNA Agents |
| 4.3 | Antisense Oligonucleotides |
| 4.3.1 | Targeting Region |
| 4.3.2 | Overall Length |
| 4.3.3 | Exemplary Antisense Oligonucleotides |
| 4.3.4 | Antisense Oligonucleotides |
| 4.4 | Modified Nucleic Acid Molecule Agents (e.g., dsRNA agents, ASOs) |
| 4.4.1 | Nature of Nucleotide Modifications |
| 4.4.1.1 | Modified Nucleosides |
| 4.4.1.1(i) | Sugar Modifications |
| 4.4.1.1(i)(a) | Non-Bicyclic Sugar Modifications |
| 4.4.1.1(i)(b) | Bicyclic Sugar Modifications |
| 4.4.1.1(ii) | Nucleobase Modifications |
| 4.4.1.2 | Internucleoside Linkage Modifications |
| 4.4.1.2(i) | Modified Phosphorous Containing Internucleoside Linkages |
| 4.4.1.2(ii) | Modified Non-Phosphorous Containing Internucleoside Linkages |
| 4.4.1.3 | Additional Exemplary Nucleotide Modifications |
| 4.4.2 | Extent of Modified Nucleotides |
| 4.5 | Conjugates |
| 4.5.1 | Heterologous Moieties |
| 4.5.1.1 | Targeting Moieties |
| 4.5.1.1(i) | Hematopoietic Cell Targeting Moieties |
| 4.5.4.4(i)(a) | TFR Targeting Moieties |
| 4.5.4.4(i)(b) | Ig Constant Regions |
| 4.5.2 | Linkers |
| 4.5.2.1 | Cleavable Linkers |
| 4.5.3 | Orientation |
| 4.6 | Activity of Nucleic Acis Molecule Agents & Conjugates Thereof |
| 4.7 | Methods of Making Nucleic Acid Molecule Agents & Conjugates Thereof |
| 4.8 | Methods of Making Proteins (e.g., Targeting Moieties) |
| 4.9 | Vectors |
| 4.10 | Carriers |
| 4.11 | Host Cells |
| 4.12 | Pharmaceutical Compositions |
| 4.13 | Methods of Use |
| 4.13.1 | Methods of Delivery |
| 4.13.2 | Methods of Reducing or Inhibiting BCL11A Expression |
| 4.13.3 | Methods of Inducing Expression of Fetal Hemoglobin |
| 4.13.4 | Methods of Treating, Ameliorating, or Preventing a BCL11A Associated |
| | Disease |
| 4.13.5 | Methods of Treating, Ameliorating, or Preventing an Inherited Blood |
| | Disorder |
| 4.13.6 | Methods of Treating, Ameliorating, or Preventing a Hemoglobinopathy |
| 4.13.7 | Methods of Treating, Ameliorating, or Preventing an Inherited Bone |
| | Marrow Failure Syndrome |
| 4.14 | Kits |
| 4.1 | Definitions |

[0100] The section headings used herein are for organizational purposes only and are not to be construed as limiting the subject matter described.

[0101] Unless defined otherwise, all technical and scientific terms used herein have the same meaning as is commonly understood by one of skill in the art to which the claimed subject matter belongs. It is to be understood that the foregoing general description and the following detailed description are exemplary and explanatory only and are not restrictive of any subject matter claimed.

[0102] In this application, the use of the singular includes the plural unless specifically stated otherwise. For example, as used in the specification and the appended claims, the singular forms “a,” “an,” and “the” include plural referents unless the context clearly dictates otherwise. Furthermore, use of the term “including” as well as other forms, such as “include,” “includes,” and “included,” is not limiting.

[0103] It is understood that wherever aspects are described herein with the language “comprising,” otherwise analogous aspects described in terms of “consisting of” and “consisting essentially of” are also provided.

[0104] The term “and/or” where used herein is to be taken as specific disclosure of each of the two specified features or components with or without the other. Thus, the term “and/or” as used in a phrase such as “A and/or B” herein is intended to include “A and B,” “A or B,” “A” (alone), and “B” (alone). Likewise, the term “and/or” as used in a phrase such as “A, B, and/or C” is intended to encompass each of the following aspects: A, B, and C; A, B, or C; A or C; A or B; B or C; A and C; A and B; B and C; A (alone); B (alone); and C (alone).

[0105] As described herein, any concentration range, percentage range, ratio range or integer range is to be understood to include the value of any integer within the recited range and, when appropriate, fractions thereof (such as one tenth and one hundredth of an integer), unless otherwise indicated.

[0106] The terms “about” or “comprising essentially of” refer to a value or composition that is within an acceptable error range for the particular value or composition as determined by one of ordinary skill in the art, which will depend in part on how the value or composition is measured or determined, i.e., the limitations of the measurement system. When particular values or compositions are provided in the application and claims, unless otherwise stated, the meaning of “about” or “comprising essentially of” should be assumed to be within an acceptable error range for that particular value or composition.

[0107] As used herein, the term “administering” refers to the physical introduction of an agent, e.g., a therapeutic agent (or a precursor of the therapeutic agent that is metabolized or altered within the body of the subject to produce the therapeutic agent in vivo) to a subject, using any of the various methods and delivery systems known to those skilled in the art. Administering can also be performed, for example, once, a plurality of times, and/or over one or more extended periods. Administering includes both self-administration by the subject and administration to the subject by a third party.

[0108] As used herein, the terms “agent” and “moiety” are used interchangeable herein and are used generically to describe any macro or micro molecule. Exemplary moieties include, but are not limited polypeptides, proteins, peptides, polynucleotides (e.g., DNA, RNA), small molecules, carbohydrates, lipids, synthetic polymers (e.g., polymers of PEG) (or any combinations thereof). In some embodiments, the term “moiety” is used to describe any macro or micro molecule that can be operably connected to a dsRNA agent described herein. For example, proteins (e.g., antibodies (e.g., anti-TFR antibodies)), targeting moieties, etc., that can be operable connected to a dsRNA agent described herein.

[0109] As used herein, the term “affinity” refers to the strength of the binding of one protein (e.g., an Antibody) to another protein (e.g., an Antigen). The affinity of a protein is measured by the dissociation constant Kd, defined as [Antibody]×[Antigen]/[Antibody-Antigen] where [Antibody-Antigen] is the molar concentration of the Antibody-Antigen complex, [Antibody] is the molar concentration of the unbound Antibody and [Ligand] is the molar concentration of the unbound Antigen. The affinity constant Ka is defined by 1/Kd. Standard methods of measuring affinity are known to the person of ordinary skill in the art. Exemplary methods of measuring affinity include, surface plasmon resonance (SPR) (e.g., BIAcore®-based assay), a common method known in the art (see, e.g., Wilson, Science 295:2103, 2002; Wolff et al., Cancer Res. 55:2560, 1993; and U.S. Pat. Nos. 5,283,173, 5,468,614, the full contents of each of which are incorporated by reference herein for all purposes).

[0110] As used herein, the term “antibody” or “antibodies” is used in the broadest sense and encompasses various immunoglobulin (Ig) (e.g., human Ig (hIg), murine Ig (mIg)) structures, including, but not limited to monoclonal antibodies, polyclonal antibodies, multispecific (e.g., bispecific, trispecific) antibodies, and antibody fragments so long as they exhibit the desired antigen-binding activity (i.e., antigen binding fragments or variants). The term antibody thus includes, for example, full-length antibodies; antigen-binding fragments of full-length antibodies; molecules comprising antibody CDRs, VH regions, and/or VL regions; and antibody-like scaffolds (e.g., fibronectins). Examples of antibodies include, without limitation, monoclonal antibodies, polyclonal antibodies, monospecific antibodies, multispecific antibodies, human antibodies, humanized antibodies, chimeric antibodies, camelized antibodies, intrabodies, a variable domain of a new antigen receptor beta-lactamase (VNAR fragments), affybodies, diabodies, tribodies, heteroconjugate antibodies, antibody-drug conjugates, single domain antibodies (e.g., VHH, (VHH)₂), single chain antibodies, single-chain Fvs (scFv; (scFv)₂), Fab fragments (e.g., Fab, single chain Fab (scFab), F(ab′)₂ fragments, disulfide-linked Fvs (sdFv), Fc fusions (e.g., Fab-Fc, scFv-Fc, VHH-Fc, (scFv)₂-Fc, (VHH)₂-Fc), and antigen-binding fragments of any of the above, and conjugates or fusion proteins comprising any of the above. Antibodies can be of Ig isotype (e.g., IgG, IgE, IgM, IgD, or IgA), any class (e.g., IgG₁, IgG₂, IgG₃, IgG₄, IgA₁ or IgA₂), or any subclass (e.g., IgG₂ₐ or IgG_{2b}) of Ig). In certain embodiments, antibodies described herein are IgG antibodies, or a class (e.g., human IgG₁ or IgG₄) or subclass thereof. In certain embodiments, antibodies described herein are mIgG antibodies, or a class (e.g., mIgG1 or mIgG2a) or subclass thereof. In some embodiments, the antibody is a human, humanized, or chimeric IgG₁ or IgG₄ monoclonal antibody. In some embodiments, the term antibodies refers to a monoclonal or polyclonal antibody population. Antibodies described herein can be produced by any standard methods known in the art, e.g., recombinant production in host cells, see, e.g., § 4.8; or synthetic production.

[0111] As used herein, the term “antibody-like scaffold” refers to non-Ig based antigen binding domain. Various antibody-like scaffolds are known in the art. For example, 10th type III domain of fibronectin (e.g., AdNectins®) and designed ankyrin repeat proteins (e.g., DARPins®) have been used as alternative scaffolds for antigen-binding domains, see, e.g., Gebauer and Skerra, Engineered protein scaffolds as next-generation antibody therapeutics. Curr Opin Chem Biol 13:245-255 (2009) and Stumpp et al., Darpins: A new generation of protein therapeutics. Drug Discovery Today 13: 695-701 (2008), the full contents of each of which is incorporated by reference herein for all purposes. Exemplary antibody-like scaffolds include, but are not limited to, lipocalins (see, e.g., U.S. Pat. No. 7,250,297) (e.g., Anticalin®), protein A-derived molecules such as z-domains of protein a (see, e.g., U.S. Pat. No. 5,831,012) (e.g., Affibody®), A domains of membrane receptors stabilized by disulfide bonds and Ca2+ (see, e.g., U.S. Pat. No. 7,803,907) (e.g., Avimer/Maxibody®), a serum transferrin (see, e.g., US2004023334) (e.g., Transbody®); a designed ankyrin repeat protein (see, e.g., U.S. Pat. No. 7,417,130) (e.g., DARPin®), a fibronectin (see, e.g., U.S. Pat. No. 6,818,418) (e.g., AdNectin®), a C-type lectin domain (see, e.g., US2004132094) (e.g., Tetranectin®); a human gamma-crystallin or ubiquitin (see, e.g., U.S. Pat. No. 7,838,629) (e.g., Affilin®); a kunitz type domain of human protease inhibitors (see, e.g., US2004209243), C-Type Lectins (see, e.g., US2004132094) (e.g., Tetranectins®), cysteine knots or knottins (see, e.g., U.S. Pat. No. 7,186,524) (e.g., Microbodies®), nucleic acid aptamers (see, e.g., U.S. Pat. No. 5,475,096), thioredoxin A scaffold (see, e.g., U.S. Pat. No. 6,004,746) (peptide aptamers), and 10th type III domain of fibronectin (see, e.g., U.S. Pat. No. 6,818,418) (e.g., AdNectins®), and cystine-dense peptides (see, e.g., WO2023023031). Additional exemplary antibody-like scaffolds are known in the art and for example described in Storz U. Intellectual property protection: strategies for antibody inventions. MAbs. 2011; 3(3):310-317. doi:10.4161/mabs.3.3.15530. The entire contents of each of the foregoing references is incorporated herein by reference for all purposes. Antibody like scaffolds include e.g., naturally occurring antigen binders, variant (e.g., functional variants) of naturally occurring antigen binders, fragments (e.g., functional fragments) of naturally occurring antigen binders, and synthetic antigen binders (i.e., not naturally occurring antigen binders).

[0112] As used herein, the term “antibody dependent cell mediated cytotoxicity” or “ADCC” refers to an immune mechanism leading to the lysis of antibody (or an Fc region containing protein) (e.g., an Ig Fc containing fusion protein described herein)-coated target cells by immune effector cells (e.g., NK cells). As used herein, the term “reduced ADCC” and the like refers to either a reduction in the number of target cells that are lysed in a given time, at a given concentration of antibody (or an Ig Fc region containing protein) (e.g., an Fc region containing fusion protein described herein) in the medium surrounding the target cells, by the mechanism of ADCC defined above, and/or an increase in the concentration of antibody (or an Fc region containing protein) (e.g., an Fc containing fusion protein described herein) in the medium surrounding the target cells, required to achieve the lysis of a given number of target cells in a given time, by the mechanism of ADCC defined above. The reduction in ADCC is relative to the ADCC mediated by the same antibody (or an Fc region containing protein) (e.g., an Fc containing fusion protein described herein) produced by the same type of host cells, using the same standard production, purification, formulation and storage methods (which are known to those skilled in the art), but that has not been engineered (e.g., does not comprise one or more amino acid variation, e.g., amino acid substitution, that mediates a decrease in ADCC). For example the reduction in ADCC mediated by an antibody (or an Fc region containing protein) (e.g., an Fc containing fusion protein described herein) comprising in its Fc region an amino acid substitution that reduces ADCC, is relative to the ADCC mediated by the same antibody (or an Fc region containing protein) (e.g., an Fc containing fusion protein described herein) without said amino acid substitution in the Fc region.

[0113] As used herein, the term “antisense polynucleotide” and the like refers to a polynucleotide capable of undergoing hybridization to a target nucleic acid molecule through hydrogen bonding. Examples of antisense polynucleotides include single-stranded and double-stranded polynucleotides, such as, antisense oligonucleotides (ASOs), siRNAs, shRNAs, ssRNAs. In some embodiments, the antisense polynucleotide is an RNA molecule. In some embodiments, the antisense polynucleotide is a DNA molecule. In some embodiments, the antisense polynucleotide is a DNA/RNA hybrid molecule.

[0114] “Antisense oligonucleotide” refers to an antisense polynucleotide that is a single-stranded oligonucleotide having a nucleobase sequence that permits hybridization to a corresponding segment of a target nucleic acid. In some embodiments, the antisense oligonucleotide is an RNA molecule. In some embodiments, the antisense oligonucleotide is a DNA molecule. In some embodiments, the antisense oligonucleotide is a DNA/RNA hybrid molecule.

[0115] As used herein, the term “antisense strand” refers to an antisense polynucleotide that is an RNA molecule that is part of an RNAi agent (e.g., described herein) or part of a dsRNA agent (e.g., described herein) (e.g., an siRNA agent described herein) that comprises a region of complementarity comprising a nucleotide sequence that is at least partially (e.g., substantially, fully) complementary to a target nucleic acid sequence (e.g., a target mRNA (e.g., a BCL11A mRNA), a portion of a target mRNA (e.g., a BCL11A mRNA)), such that it is capable of undergoing hybridization to a target nucleic acid molecule through hydrogen bonding.

[0116] As used herein, the term “bicyclic sugar” refers to a modified sugar (e.g., ribose) moiety comprising two rings, wherein the second ring is formed via a bridge connecting two of the atoms in the first ring thereby forming a bicyclic structure. In some embodiments, the first ring of the bicyclic sugar moiety is a furanosyl moiety. In some embodiments, the furanosyl sugar moiety is a ribosyl moiety.

[0117] As used herein, the term “bicyclic nucleoside” (“BNA”) is a nucleoside comprising a bicyclic sugar.

[0118] As used herein, the term “BCL11 Transcription Factor A” or “BCL11A” or “Transcription factor B-cell lymphoma/leukemia 11A” refers to the C2H2 type zinc-finger transcription factor that functions, inter alia, in the repression of fetal hemoglobin and the switch from fetal hemoglobin to adult hemoglobin. The mRNA sequence of a reference hBCL11A gene (isoform 1) is set forth in SEQ ID NO: 1 (NCBI Ref.: NM_022893.4). The amino acid sequence of a reference hBCL11A protein (isoform 1) is set forth in SEQ ID NO: 3 (NCBI Ref.: NP_075044.2). The term BCL11A includes naturally occurring variants of BCL11A. BCL11A gene and mRNA sequences of e.g., human, mouse, rat, non-human primate (e.g., rhesus macaque, Macaca fascicularis (cynomolgus monkey)), are readily available through publicly available databases, including, e.g., GenBank, UniProt, OMIM, and the Macaca genome project web site.

[0119] As used herein, the term “blunt end” refers to a dsRNA molecule that does not contain any unpaired nucleotides at the end (e.g., 3′ terminus, 5′ terminus) of the dsRNA molecule (i.e., no nucleotide overhang(s)). The dsRNA molecule can have, for example, a blunt end at the 3′ end, 5′ end, or both the 3′ and 5′ end of the molecule.

[0120] As used herein, the term “CDR” or “complementarity determining region” refers to the noncontiguous antigen combining sites found within the variable region of both heavy and light chain polypeptides. These particular regions have been described by Kabat et al., J. Biol. Chem. 252, 6609-6616 (1977) and Kabat et al., Sequences of protein of immunological interest. (1991), the entire contents of each of which is incorporated herein by reference for all purposes. Unless otherwise specified, the term “CDR” is a CDR as defined by Kabat et al., J. Biol. Chem. 252, 6609-6616 (1977) and Kabat et al., Sequences of protein of immunological interest. (1991). A person of ordinary skill in the art would be able to determine the CDRs as defined by another scheme, e.g., Chothia, IMGT, using ordinary methods known in the art.

[0121] The terms “CH1” and “CH1 region” are used interchangeably herein and refer to the first constant region of an immunoglobulin heavy chain. The amino acid sequence of an exemplary reference hIgG1 CH1 region is set forth in SEQ ID NO: 3461.

[0122] The terms “CH2” and “CH2 region” are used interchangeably herein and refer to the second constant region of an immunoglobulin heavy chain. The amino acid sequence of an exemplary reference hIgG1 CH2 region is set forth in SEQ ID NO: 3463.

[0123] The terms “CH3” and “CH3 region” are used interchangeably herein and refer to the third constant region of an immunoglobulin heavy chain. The amino acid sequence of an exemplary reference hIgG1 CH3 region is set forth in SEQ ID NO: 3464.

[0124] As used herein, the term “complementary” in reference to a first nucleotide sequence (e.g., a sense strand or a target mRNA) in relation to a second nucleotide sequence (e.g., an antisense strand), refers to the ability of a nucleic acid molecule comprising the first nucleotide sequence to hybridize to a nucleic acid molecule comprising the second nucleotide sequence and form a double stranded region (through base pair hydrogen bonds) under suitable in vivo or vitro conditions (e.g., under certain standard conditions, under mammalian (e.g., human) physiological conditions). A person of ordinary skill in the art would be able to select the set of conditions most appropriate for a hybridization test. Complementary sequences include, e.g., Watson-Crick base pairs. For example, complementary nucleobase pairs include adenine (A) and thymine (T); adenine (A) and uracil (U); and cytosine (C) and guanine (G). Complementary nucleobase pairs include natural and modified nucleotides, and nucleotide mimics, at least to the extent that the above hybridization requirements are fulfilled. As such, determinations of complementarity (as described herein) are independent of nucleotide chemical modifications (e.g., as described herein). For example, (C) and 5-methyl cytosine (mC) are both complementary to (G).

[0125] As used herein, the term “conjugation” refers to chemical conjugation of an agent (e.g., a nucleic acid molecule) with a moiety (e.g., carbohydrate, small molecule, polypeptide (e.g., antibody), polynucleotide, lipid, synthetic polymer (e.g., polymers of polyethylene glycol (PEG)), etc.). The moiety can be directly connected to the agent (e.g., nucleic acid molecule) or indirectly connected through a linker, e.g., as described herein. Chemical conjugation methods are well known in the art, as are commercially available conjugation reagents and kits, with detailed instructions for their use readily available from the commercial suppliers.

[0126] The terms “constant region” and “constant domain” are used interchangeably herein and refer to a carboxyl terminal portion of a light and/or heavy chain of a full-length antibody which is not directly involved in binding of an antibody to antigen, but which can exhibit various effector functions, such as interaction with an Ig Fc receptor (e.g., Fc gamma receptor). The constant region of an Ig molecule generally has a more conserved amino acid sequence relative to an Ig variable domain.

[0127] As used herein, the term “differing by no more than X nucleotides” in reference to a nucleotide sequence means that the nucleotide sequence comprises no more than X (wherein X is a specified number (e.g., 3, 2, 1, 0)) nucleotide variations (as defined herein) relative to a reference sequence. For example, the phrase “wherein the nucleotide sequence of the antisense strand differs by no more than 3 nucleotides from the nucleotide sequence of SEQ ID NO: X” means that the nucleotide sequence comprises no more than 3 nucleotide variations relative to the nucleotide sequence set forth in the cited SEQ ID NO: X.

[0128] As used herein, the term “disease” refers to any abnormal condition that impairs physiological function. The term is used broadly to encompass any disorder, illness, abnormality, pathology, sickness, condition, or syndrome in which physiological function is impaired, irrespective of the nature of the etiology. The term disease includes infection (e.g., a viral, bacterial, fungal, protozoal infection).

[0129] As used herein, the term “double stranded RNA agent” or “dsRNA agent” refers to a complex of two RNA molecules comprising a double stranded region comprising two anti-parallel and at least partially (e.g., substantially, fully) complementary nucleic acid sequences that form the double stranded region. For example, in some embodiments, the dsRNA agent comprises a sense strand and an antisense strand.

[0130] The terms “DNA” and “polydeoxyribonucleotide” are used interchangeably herein and refer to macromolecules that include multiple deoxyribonucleotides that are polymerized via phosphodiester bonds. Deoxyribonucleotides are nucleotides in which the sugar is deoxyribose.

[0131] The term “effector function” when used in reference to an Ig Fc region or a protein comprising an Ig Fc region (e.g., a full-length antibody) refers to those biological activities attributable to the Ig Fc region of a typical full-length antibody, which therefore vary with the antibody isotype. Antibody effector functions include, but are not limited to, antibody-dependent cell-mediated cytotoxicity (ADCC), antibody-dependent cellular phagocytosis (ADCP), complement dependent cytotoxicity (CDC), Fc receptor binding (e.g., FcγRI, FcγRIIa, FcγRIIc, FcγRIIIa, and/or FcγRIIIb (e.g., FcγRI, FcγIIa, and/or FcγIIIa)), and Clq binding.

[0132] As used herein, the term “erythroid precursor cell” refers to any precursor of a mature erythrocyte (i.e., a mature enucleated red blood cell). As such, erythroid precursor cells include, but are not limited to, megakaryocyte erythroid progenitor cells, proerythroblast cells, early erythroblast cells, intermediate erythroblast cells, late erythroblast cells, and reticulocytes. In some embodiments, erythroid precursor cells include megakaryocyte erythroid progenitor cells, proerythroblast cells, early erythroblast cells, intermediate erythroblast cells, and late erythroblast cells. In some embodiments, erythroid precursor cells include proerythroblast cells, early erythroblast cells, intermediate erythroblast cells, and late erythroblast cells.

[0133] As used herein, the term “erythroid precursor cell targeting agent” refers to an agent that specifically binds to an antigen expressed on an erythroid precursor cell (or a subset thereof). For example, the antigen expressed in or on the erythroid precursor cell may be a membrane protein, for example an integral membrane protein or a peripheral membrane protein. Typically, an erythroid precursor cell targeting agent specifically binds to an antigen on the erythroid precursor cell that facilitates internalization of the erythroid precursor cell targeting agent (and any associated agent (e.g., an antisense strand, sense strand, dsRNA agent, RNAi agent, ASO, ssRNA agent, etc. described herein)) into the erythroid precursor cell. In some embodiments, an erythroid precursor cell targeting agent specifically binds to an internalizing, cell surface receptor on the erythroid precursor cell and is capable of being internalized into the erythroid precursor cell through receptor mediated internalization. In some embodiments, the erythroid precursor cell targeting agent is a protein (e.g., antibody), a peptide, a nucleic acid (e.g., an aptamer), or small molecule. In some embodiments, the erythroid precursor cell targeting agent is linked to an agent (e.g., an antisense strand, sense strand, dsRNA agent, RNAi agent, ASO, ssRNA agent, etc. described herein).

[0134] As used herein, the term “EU numbering system” refers to the EU numbering convention for the constant regions of an antibody, as described in Edelman, G. M. et al., Proc. Natl. Acad. USA, 63, 78-85 (1969) and Kabat et al, Sequences of Proteins of Immunological Interest, U.S. Dept. Health and Human Services, 5th edition, 1991, the entire contents of each of which is incorporated herein by reference for all purposes.

[0135] As used herein, the term “Fab” refers to an antigen binding domain that comprises a Fab heavy chain that comprises from N- to C-terminus a VH region and a CH1 region; and a light chain comprising from N- to C-terminus a VL region and a CL region; and wherein the Fab heavy chain and the light chain associate to form an antigen binding domain.

[0136] The term “Fab-Fc” as used herein refers to an antibody that comprises a Fab operably linked to an Fc region.

[0137] As used herein, the term “Fc region” refers to the C-terminal region of a Ig (e.g., a human Ig) heavy chain that comprises from N- to C-terminus at least a CH2 region operably connected to a CH3 region. In some embodiments, the Fc region comprises an Ig hinge region or at least a portion of an Ig hinge region operably connected to the N-terminus of the CH2 region. In some embodiments, the Fc region is engineered relative to a reference Fc region (e.g., comprises one or more amino acid modification), e.g., described herein. Additional examples of proteins with engineered Fc regions can be found in Saunders 2019 (K. O. Saunders, “Conceptual Approaches to Modulating Antibody Effector Functions and Circulation Half-Life,” 2019, Frontiers in Immunology, V. 10, Art. 1296, pp. 1-20, the entire contents of which is incorporated herein by reference for all purposes).

[0138] As used herein, the terms “first” and “second” with respect to Fc regions etc., are used for convenience of distinguishing when there is more than one of each type of moiety. Use of these terms is not intended to confer a specific order or orientation in the protein unless explicitly so stated. For example, an antibody described herein (e.g., in the case of a full-length antibody) may contain two Fc regions that associate e.g., via one or more covalent (e.g., disulfide) bond.

[0139] As used herein, the term “framework region” or “FR region” refers to the amino acid residues that are part of the variable region of an antibody, but are not part of the CDRs (e.g., using the Kabat definition of CDRs).

[0140] As used herein, the term “full-length antibody” refers to an antibody having a structure substantially similar to a native antibody structure (i) a first Ig light chain comprising from N- to C-terminus a light chain variable region (VL) region and a light chain constant region (CL) region; (ii) a first Ig heavy chain comprising from N- to C-terminus a heavy chain variable region (VH) region, a CH1 region, a hinge region, a CH2 region, and a CH3 region; (iii) a second Ig heavy chain comprising from N- to C-terminus a VH region, a CH1 region, a hinge region, a CH2 region, and a CH3 region; (iv) a second Ig light chain comprising from N- to C-terminus a VL region and a VH region; wherein said first light chain and said first heavy chain associate to form a first antigen binding domain; wherein said second light chain and said second heavy chain associate to form a second antigen binding domain; and wherein said first heavy chain and said second heavy chain associate to form a dimer. In some embodiments, the two heavy chains comprise a substantially identical amino acid sequence; and the two light chains comprise a substantially identical amino acid sequence. In some embodiments, the two heavy chains comprise a substantially identical amino acid sequence except for one or more amino acid modifications that promote heterodimerization of the correct heavy chains (e.g., as described herein); and the two light chains comprise a substantially identical amino acid sequence. Antibody chains may be substantially identical but not entirely identical if they differ due to post-translational modifications, such as C-terminal cleavage of lysine residues, alternative glycosylation patterns, etc.

[0141] As used herein, the term “fully complementary” means that in a hybridized pair of a first nucleic acid molecule and a second nucleic acid molecule, 100% (all), of the bases in a contiguous sequence of the first nucleic acid molecule will hybridize with the same number of bases in a contiguous sequence of the second nucleic acid molecule. The contiguous sequence may comprise all or a part of the first and/or second nucleic acid molecule.

[0142] As used herein, the term “fully complementary” means that in a hybridized pair of a first nucleic acid molecule and a second nucleic acid molecule, 100% (all), of the bases in a contiguous sequence of the first nucleic acid molecule will hybridize with the same number of bases in a contiguous sequence of the second nucleic acid molecule. The contiguous sequence may comprise all or a part of the first and/or second nucleic acid molecule.

[0143] The term “functional variant” as used herein in reference to a protein refers to a protein that comprises at least one but no more than 20%, not more than 15%, not more than 12%, no more than 10%, no more than 8% amino acid variation (e.g., substitution, deletion, addition) compared to the amino acid sequence of a reference protein, wherein the protein retains at least one particular function of the reference protein. Not all functions of the reference protein (e.g., wild type) need be retained by the functional variant of the protein. In some instances, one or more functions are selectively reduced or eliminated. In some embodiments, the reference protein is a wild type protein.

[0144] The term “functional fragment” as used herein in reference to a protein refers to a fragment of a reference protein that retains at least one particular function. Not all functions of the reference polypeptide or protein need be retained by a functional fragment of the protein. In some instances, one or more functions are selectively reduced or eliminated. In some embodiments, the reference protein is a wild type protein.

[0145] As used herein, the term “fuse” and grammatical equivalents thereof refer to the operable connection of at least a one polypeptide derived from a first polypeptide to another polypeptide derived from a second polypeptide, wherein the first and second polypeptides are different. The term fuse encompasses both a direct connection of the at least two polypeptides through a peptide bond, and the indirect connection through a linker (e.g., a peptide linker).

[0146] As used herein, the term “fusion protein” and grammatical equivalents thereof refers to a protein that comprises at least one polypeptide derived from a first polypeptide operably connected to another polypeptide derived from a second polypeptide, wherein the first and second polypeptides are wherein the first and second polypeptides are not naturally found operably connected together. The at least two polypeptides of the fusion protein can be directly operably connected through a peptide bond; or can be indirectly operably connected through a linker (e.g., a peptide linker). Therefore, for example, the term fusion protein encompasses embodiments, wherein Polypeptide A is directly operably connected to Polypeptide B through a peptide bond (Polypeptide A-Polypeptide B), and embodiments, wherein Polypeptide A is operably connected to Polypeptide B through a peptide linker (Polypeptide A-peptide linker-Polypeptide B). In some embodiments, the first polypeptide and the second polypeptide are different.

[0147] As used herein, the term “half-life extension moiety” refers to a moiety (e.g., small molecule, polypeptide, polynucleotide, carbohydrate, lipid, synthetic polymer (e.g., polymers of PEG), etc.) that when conjugated or otherwise operably connected (e.g., fused) to a polypeptide or protein (the subject polypeptide or protein), increases the half-life of the subject polypeptide or protein in vitro when administered to a subject (e.g., a human subject). The pharmacokinetic properties of the polypeptide or protein can be evaluated utilizing in vitro models known in the art.

[0148] As used herein, the term “half-life extension polypeptide” refers to a polypeptide that when operably connected to another polypeptide (the subject polypeptide), increases the half-life of the subject polypeptide in vitro when administered to a subject (e.g., a human subject). The pharmacokinetic properties of the polypeptide or protein can be evaluated utilizing in vitro models known in the art.

[0149] As used herein, the term “heavy chain” refers to the portion of an immunoglobulin (e.g., a human Ig) that typically comprises from N- to C-terminus a heavy chain variable region (VH), a CH1 region, a hinge region, a CH2 region, and a CH3 region. The constant regions of the heavy chain (i.e., the CH1 region, the hinge region, the CH2 region, and the CH3 region) can be any distinct isotype, for example, human alpha (α), delta (δ), epsilon (ε), gamma (γ), and mu (μ), based on the amino acid sequence of the constant domain, which give rise to the hIgA, hIgD, IgE, hIgG, and hIgM classes of human antibodies, respectively, including subclasses of hIgG, e.g., hIgG₁, hIgG₂, hIgG₃, and hIgG₄. As used herein, the term “heavy chain” when used in reference to a human antibody can refer to any distinct type, e.g., alpha (α), delta (δ), epsilon (ε), gamma (γ), and mu (μ), based on the amino acid sequence of the constant domain, which give rise to human IgA, IgD, IgE, IgG, and IgM classes of antibodies, respectively, including subclasses of human IgG, e.g., IgG₁, IgG₂, IgG₃, and IgG₄.

[0150] As used herein, the term “hematopoietic cell” refers to any blood cell. As such, the term hematopoietic cell, includes, but is not limited to, hematopoietic pluripotent stem cells (HSPCs), common myeloid progenitor cells, megakaryocyte erythroid progenitor cells, erythroid progenitor cells, proerythroblast cells, early erythroblast cells, intermediate erythroblast cells, late erythroblast cells, reticulocytes, megakaryocytes, platelets, granulocyte monocyte progenitor cells, monoblasts, promonocytes, monocytes, macrophages, myeloblasts, promyelocytes, myelocytes, eosinophils, basophils, neutrophils, common lymphoid progenitor cells, pro-NK lymphoblasts, NK cells, pro-B lymphoblasts, B lymphocytes, pro-T lymphoblasts, T lymphoblasts, and plasma cells.

[0151] As used herein, the term “hematopoietic cell targeting agent” refers to an agent that specifically binds to an antigen expressed on a hematopoietic cell (or a subset thereof). For example, the antigen expressed in or on the hematopoietic cell may be a membrane protein, for example an integral membrane protein or a peripheral membrane protein. Typically, a hematopoietic cell targeting agent specifically binds to an antigen on the hematopoietic cell that facilitates internalization of the hematopoietic cell targeting agent (and any associated agent (e.g., an antisense strand, sense strand, dsRNA agent, RNAi agent, ASO, ssRNA agent, etc. described herein)) into the hematopoietic cell. In some embodiments, a hematopoietic cell targeting agent specifically binds to an internalizing, cell surface receptor on the hematopoietic cell and is capable of being internalized into the hematopoietic cell through receptor mediated internalization. In some embodiments, the hematopoietic cell targeting agent is a protein (e.g., antibody), a peptide, a nucleic acid (e.g., an aptamer), or small molecule. In some embodiments, the hematopoietic cell targeting agent is linked to an agent (e.g., an antisense strand, sense strand, dsRNA agent, RNAi agent, ASO, ssRNA agent, etc. described herein).

[0152] As used herein, the term “heterologous,” when used to describe a first element in reference to a second element means that the first element and second element do not exist in nature disposed as described. For example, a nucleic acid molecule comprising a “heterologous moiety” means a nucleic acid molecule that is joined to a moiety (e.g., carbohydrate, small molecule, polypeptide, polynucleotide, lipid, synthetic polymer (e.g., polymers of PEG), etc.) that is not joined to the nucleic acid molecule in nature.

[0153] The terms “hinge” or “hinge region” are used interchangeably herein and refer to the hinge region of an immunoglobulin heavy chain. The amino acid sequence of an exemplary reference hIgG1 hinge region is set forth in SEQ ID NO: 3462.

[0154] As used herein, the term “isolated” with reference to a polypeptide, protein, or polynucleotide refers to a polypeptide, protein, or polynucleotide that is substantially free of other cellular components with which it is associated in the natural state.

[0155] As used herein, the term “nucleotide variation,” “variant nucleotide,” or use of the term “variation” and the like in reference to a nucleotide or nucleic acid sequence refers to a nucleic acid molecule that comprises at least one substitution, addition, deletion, or inversion of one or more nucleotide compared to a reference nucleic acid molecule. As used herein, the term “variant” or “variation” with reference to a peptide or protein refers to a peptide or protein that comprises at least one substitution, addition, deletion, or inversion of an amino acid residue compared to a reference peptide or protein.

[0156] As used herein, the term “modified agent” when used in reference to a nucleic acid molecule-based agent (or any component thereof (e.g., any nucleic acid molecule thereof)) (e.g., described herein, e.g., an antisense strand, a sense strand, a dsRNA agent, RNAi agent, an antisense oligonucleotide, etc.), refers to a nucleic acid molecule based agent (or any component thereof (e.g., any nucleic acid molecule thereof)) (e.g., described herein, e.g., an antisense strand, a sense strand, a dsRNA agent, RNAi agent, an antisense oligonucleotide, etc.) that comprises one or more modified nucleotide (as defined herein).

[0157] As used herein, the term “modified nucleotide,” “nucleotide modification,” or use of the term “modification” and the like in reference to a nucleotide or nucleic acid sequence refers to a nucleotide comprising a chemical modification, e.g., a modified sugar moiety, a modified nucleobase, and/or a modified internucleoside linkage, or any combination thereof. Exemplary modifications are provided herein, see, e.g., §§ 4.4, 4.4.1. In certain embodiments of the instant disclosure, inclusion of a deoxynucleotide—which is acknowledged as a naturally occurring form of nucleotide—if present within a nucleic acid molecule-based agent or component thereof (e.g., described herein, e.g., a sense strand, an antisense strand, a dsRNA agent, ssRNA agent, an antisense oligonucleotide, etc.) is considered to constitute a modified nucleotide.

[0158] As used herein, the term “nucleotide overhang” refers to at least one unpaired nucleotide that extends from the double stranded region of a nucleic acid molecule (e.g., a dsRNA molecule (e.g., a dsRNA molecule described herein)). For example, when a 3′-end of one strand of a dsRNA extends beyond the 5′-end of the other strand, or vice versa, there is a nucleotide overhang.

[0159] As used herein, the term, “non-complementary nucleotide mismatch” refers to a nucleotide within a region of complementarity (as described herein) that is not complementary to the corresponding nucleotide in the target nucleic acid molecule.

[0160] As used herein, the term “operably connected” refers to the linkage of two moieties in a functional relationship. For example, a polypeptide is operably connected to another polypeptide when they are linked (either directly or indirectly via a peptide linker) in frame such that both polypeptides are functional (e.g., a fusion protein described herein). Or for example, a transcription regulatory polynucleotide e.g., a promoter, enhancer, or other expression control element is operably linked to a polynucleotide that encodes a protein if it affects the transcription of the polynucleotide that encodes the protein. The term “operably connected” can also refer to the conjugation of a moiety to e.g., a polynucleotide or polypeptide (e.g., the conjugation of a PEG polymer to a protein).

[0161] As used herein, “partially complementary” means that in a hybridized pair of a first nucleic acid molecule and a second nucleic acid molecule, at least 70%, but not all, of the bases in a contiguous sequence of the first nucleic acid molecule will hybridize with the same number of bases in a contiguous sequence of the second nucleic acid molecule. The contiguous sequence may comprise all or a part of a first or second nucleic acid molecule.

[0162] The determination of “percent identity” between two sequences (e.g., protein (amino acid sequences) or polynucleotide (nucleic acid sequences)) can be accomplished using a mathematical algorithm. Determinations of identity (as described herein) are independent of nucleotide chemical modifications (e.g., as described herein). For example, (mC) is identical to (C) for the purposes of determining identity. A specific, non-limiting example of a mathematical algorithm utilized for the comparison of two sequences is the algorithm of Karlin S & Altschul S F (1990) PNAS 87: 2264-2268, modified as in Karlin S & Altschul S F (1993) PNAS 90: 5873-5877, each of which is herein incorporated by reference in its entirety. Such an algorithm is incorporated into the NBLAST and XBLAST programs of Altschul S F et al., (1990) J Mol Biol 215: 403, which is herein incorporated by reference in its entirety. BLAST nucleotide searches can be performed with the NBLAST nucleotide program parameters set, e.g., for score=100, wordlength=12 to obtain nucleotide sequences homologous to a nucleic acid molecule described herein. BLAST protein searches can be performed with the XBLAST program parameters set, e.g., to score 50, wordlength=3 to obtain amino acid sequences homologous to a protein molecule described herein. To obtain gapped alignments for comparison purposes, Gapped BLAST can be utilized as described in Altschul S F et al., (1997) Nuc Acids Res 25: 3389-3402, which is herein incorporated by reference in its entirety. Alternatively, PSI BLAST can be used to perform an iterated search which detects distant relationships between molecules (Id.). When utilizing BLAST, Gapped BLAST, and PSI Blast programs, the default parameters of the respective programs (e.g., of XBLAST and NBLAST) can be used (see, e.g., National Center for Biotechnology Information (NCBI) on the worldwide web, ncbi.nlm.nih.gov). Another specific, non-limiting example of a mathematical algorithm utilized for the comparison of sequences is the algorithm of Myers and Miller, 1988, CABIOS 4:11-17, which is herein incorporated by reference in its entirety. Such an algorithm is incorporated in the ALIGN program (version 2.0) which is part of the GCG sequence alignment software package. When utilizing the ALIGN program for comparing amino acid sequences, a PAM120 weight residue table, a gap length penalty of 12, and a gap penalty of 4 can be used. The percent identity between two sequences can be determined using techniques similar to those described above, with or without allowing gaps. In calculating percent identity, typically only exact matches are counted.

[0163] As used herein, the term “pharmaceutical composition” means a composition that is suitable for administration to an animal, e.g., a human subject, and comprises a therapeutic agent and a pharmaceutically acceptable carrier or diluent. A “pharmaceutically acceptable carrier or diluent” means a substance intended for use in contact with the tissues of human beings and/or non-human animals, and without excessive toxicity, irritation, allergic response, or other problem or complication, commensurate with a reasonable therapeutic benefit/risk ratio.

[0164] The terms “nucleic acid molecule” and “polynucleotide” are used interchangeably herein and refer to a polymer of DNA or RNA. The nucleic acid molecule can be single-stranded or double-stranded; contain natural, non-natural, or altered nucleotides; and contain a natural, non-natural, or altered internucleoside linkage, such as a phosphoroamidate linkage or a phosphorothioate linkage, instead of the phosphodiester found between the nucleotides of an unmodified nucleic acid molecule. Nucleic acid molecules include, but are not limited to, all nucleic acid molecules which are obtained by any means available in the art, including, without limitation, recombinant means, e.g., the cloning of nucleic acid molecules from a recombinant library or a cell genome, using ordinary cloning technology and polymerase chain reaction, and the like, and by synthetic means. The skilled artisan will appreciate that, except where otherwise noted, nucleic acid sequences set forth in the instant application will recite thymidine (T) in a representative DNA sequence but where the sequence represents RNA (e.g., mRNA), the thymidines (Ts) would be substituted for uracils (Us). Thus, any of the RNA polynucleotides encoded by a DNA identified by a particular sequence identification number may also comprise the corresponding RNA (e.g., mRNA) sequence encoded by the DNA, where each thymidine (T) of the DNA sequence is substituted with uracil (U).

[0165] As used herein, the term “plurality” means 2 or more (e.g., 3 or more, 4 or more, 5 or more, 6 or more, 7 or more, 9 or more, or 10 or more).

[0166] As used herein, the terms “protein” and “polypeptide” refers to a polymer of at least 2 (e.g., at least 5) amino acids linked by a peptide bond. The term “polypeptide” does not denote a specific length of the polymer chain of amino acids. It is common in the art to refer to shorter polymers of amino acids (e.g., approximately 2-50 amino acids) as peptides; and to refer to longer polymers of amino acids (e.g., approximately over 50 amino acids) as polypeptides. However, the terms “peptide” and “polypeptide” and “protein” are used interchangeably herein. In some embodiments, the protein is folded into its three-dimensional structure. Where proteins are contemplated herein, it should be understood that proteins folded into their three-dimensional structure are also provided herein.

[0167] As used herein, the term “region of complementarity” refers to a portion of a first nucleic acid molecule comprising a nucleotide sequence that is at least partially complementary to the nucleotide sequence of at least a portion of a second nucleic acid molecule.

[0168] The terms “RNA” and “polyribonucleotide” are used interchangeably herein and refer to macromolecules that include multiple ribonucleotides that are polymerized via phosphodiester bonds. Ribonucleotides are nucleotides in which the sugar is ribose. RNA may contain modified nucleotides; and contain natural, non-natural, or altered internucleoside linkages, such as a phosphoroamidate linkage or a phosphorothioate linkage, instead of the phosphodiester found between the nucleotides of an unmodified nucleic acid molecule.

[0169] As used herein, the term “RNAi agent” refers to an agent that contains one or more RNA molecules which can mediate the targeted cleavage of an RNA molecule (e.g., an mRNA molecule) via an RNA-induced silencing complex (RISC) pathway. The RNAi agent, is thereby capable of e.g., modulating, e.g., inhibiting, the expression of a target gene (e.g., BCL11A) in a cell, e.g., a cell within a subject, such as a mammalian subject. In some embodiments, the RNAi agent is a dsRNA agent comprising a sense strand and an antisense strand that form a double stranded region, wherein optionally the sense strand and the antisense strand each independently comprise or consist of from about 19-23 nucleotides.

[0170] The term “scFv” or “single chain variable fragment” refers to an antibody that comprises a VH region operably connected via a peptide linker to a VL region, wherein the VH and VL regions associate to specifically bind an antigen (e.g., form an antigen binding domain). In some embodiments, the scFv comprises from N- to C-terminus an VH region, a peptide linker, and an VL region. In some embodiments, the scFv comprises from N- to C-terminus an VL region, a peptide linker, and an VH region.

[0171] The term “(scFv)₂” as used herein refers to an antibody that comprises a first and a second scFv operably connected (e.g., via a peptide linker). The first and second scFv can specifically bind the same or different antigens. In some embodiments, the first and second scFv are operably connected by a peptide linker.

[0172] The term “scFv-Fc” as used herein refers to an antibody that comprises a scFv operably linked (e.g., via a peptide linker) to an Fc domain or subunit of an Fc domain. In some embodiments, a scFv is operably connected to only a first Fc domain of a first and a second Fc domain pair. In some embodiments, a first scFv is operably connected to a first Fc domain and a second scFv is operably connected to a second Fc domain of a first and second Fc domain pair.

[0173] The term “(scFv)₂-Fc” as used herein refers to a (scFv)₂ operably linked (e.g., via a peptide linker) to an Fc domain or a subunit of an Fc domain. In some embodiments, a (scFv)₂ is operably connected to only a first Fc domain of a first and a second Fc domain pair. In some embodiments, a first (scFv)₂ is operably connected to a first Fc domain and a second (scFv)₂ is operably connected to a second Fc domain of a first and second Fc domain pair.

[0174] As used herein, the term “sense strand” refers that is an RNA molecule that is part of an RNAi agent (e.g., described herein) or part of a dsRNA agent (e.g., described herein) (e.g., an siRNA agent described herein) that comprises a region that is at least partially (e.g., substantially, fully) complementary to a region of the antisense strand (as defined herein). The sense strand is often referred to as such with reference to the orientation of the sequence of the sense strand being the same with respect to a target RNA (e.g., mRNA sequence).

[0175] As used herein, the term “single domain antibody” or “sdAb” refers to an antibody having a single monomeric variable antibody domain. A sdAb is able to specifically bind to a specific antigen. A VHH (as defined herein) is an example of a sdAb.

[0176] As used herein, the term “specifically binds” refers to preferential interaction, i.e., significantly higher binding affinity, between a first protein (e.g., an antibody) and a second protein (e.g., an antigen) relative to other amino acid sequences. Herein, when a first protein is said to “specifically bind” to a second protein, it is understood that the first protein specifically binds to an epitope of the second protein. The term “epitope” refers to the portion of the second protein that the first protein specifically recognizes. The term specifically binds includes molecules that are cross reactive with the same epitope of a different species. For example, an antibody that specifically binds human TFR may be cross reactive with TFR of another species (e.g., cynomolgus, murine, etc.), and still be considered herein to specifically bind human TFR. A protein can specifically bind more than one different protein. Specific binding can be measured, e.g., through measuring binding affinity (e.g., using standard methods known in the art and described herein (e.g., surface plasmon resonance (SPR) (e.g., BIAcore®-based assay), a common method known in the art (see, e.g., Wilson, Science 295:2103, 2002; Wolff et al., Cancer Res. 55:2560, 1993; and U.S. Pat. Nos. 5,283,173, 5,468,614, the full contents of each of which are incorporated by reference herein for all purposes).

[0177] As used herein, the term “subject” includes any animal, such as a human or other animal. In some embodiments, the subject is a vertebrate animal (e.g., mammal, bird, fish, reptile, or amphibian). In some embodiments, the subject is a human. In some embodiments, the method subject is a non-human mammal. In some embodiments, the subject is a non-human mammal is such as a non-human primate (e.g., monkeys, apes), ungulate (e.g., cattle, buffalo, sheep, goat, pig, camel, llama, alpaca, deer, horses, donkeys), carnivore (e.g., dog, cat), rodent (e.g., rat, mouse), or lagomorph (e.g., rabbit). In some embodiments, the subject is a bird, such as a member of the avian taxa Galliformes (e.g., chickens, turkeys, pheasants, quail), Anseriformes (e.g., ducks, geese), Paleaognathae (e.g., ostriches, emus), Columbiformes (e.g., pigeons, doves), or Psittaciformes (e.g., parrots).

[0178] As used herein, “substantially complementary” means that in a hybridized pair of a first nucleic acid molecule and a second nucleic acid molecule, at least 85%, but not all, of the bases in a contiguous sequence of the first nucleic acid molecule will hybridize with the same number of bases in a contiguous sequence of the second nucleic acid molecule. The contiguous sequence may comprise all or a part of a first or second nucleic acid molecule.

[0179] In some embodiments, the term “substantially all” means at least 95%, 96%, 97%, 98% or 99%, e.g., of the subject of said sentence. The term “substantially all” preferably excludes 100%. For example, in some embodiments, the term “substantially all of the nucleotides in the sense strand and/or antisense strand are modified” means that at least 95%, 96%, 97%, 98% or 99% of said nucleotides are modified. For example, in some embodiments, the term “substantially all of the nucleotides of the agent are modified” means that at least 95%, 96%, 97%, 98% or 99% of said nucleotides are modified. For example, in some embodiments, the term “substantially all of the nucleotides of the agent are unmodified” means that at least 95%, 96%, 97%, 98% or 99% of said nucleotides are unmodified. For example, in some embodiments the term “wherein the dsRNA agent is in the sodium salt form, sodium ions are present in the composition comprising the dsRNA agent as counterions for substantially all of the phosphodiester or phosphorothioate groups present in the dsRNA agent” means that wherein the dsRNA agent is in the sodium salt form, sodium ions are present in the composition comprising the dsRNA agent as counterions for at least 95%, 96%, 97%, 98% or 99% of the phosphodiester or phosphorothioate groups present in the dsRNA agent.

[0180] As used herein, the term “target nucleic acid sequence” refers to a contiguous portion of the nucleotide sequence of a nucleic acid sequence (e.g., an mRNA molecule formed during the transcription of a target gene (e.g., BCL11A)). In some embodiments, the target nucleic acid sequence is an mRNA molecule formed during the transcription of a target gene (e.g., BCL11A)). In some embodiments, the target nucleic acid molecule comprises an mRNA that is a product of RNA processing of a primary transcription product. The target portion of the sequence (e.g., mRNA) will be at least long enough to serve as a substrate for the agent described herein (e.g., RNA agents, RNAi agents, dsRNA agents (e.g., siRNA agents), ssRNA agents (e.g., antisense oligonucleotides)). For example, in some embodiments, the target portion of the sequence (e.g., mRNA) will be at least long enough to serve as a substrate for RNAi-directed cleavage at or near that portion of the nucleotide sequence of an mRNA molecule formed during the transcription of a BCL11A gene. For example, in some embodiments, the target portion of the sequence (e.g., mRNA) will be at least long enough to serve as a substrate for an antisense oligonucleotide. In one embodiment, the target sequence is within the protein coding region of BCL11A.

[0181] As used herein, the term “therapeutic agent” refers to an agent (e.g., a conjugate described herein) capable of achieving a desired therapeutic result in a subject or ex vivo (e.g., capable of treating a disease as defined herein) when administered at a therapeutically effective amount.

[0182] As used herein, the term “therapeutically effective amount” of a therapeutic agent refers to any amount of the therapeutic agent that, when used alone or in combination with another therapeutic agent, improves a disease condition, e.g., protects a subject against the onset of a disease (or infection); improves a symptom of disease or infection, e.g., decreases severity of disease or infection symptoms, decreases frequency or duration of disease or infection symptoms, increases disease or infection symptom-free periods; prevents or reduces impairment or disability due to the disease or infection; or promotes disease (or infection) regression. The ability of a therapeutic agent to improve a disease condition can be evaluated using a variety of methods known to the skilled practitioner, such as in human subjects during clinical trials, in animal model systems predictive of efficacy in humans, or by assaying the activity of the agent in in vitro assays.

[0183] As used herein, the term “transferrin” or “TF” refers to the plasma glycoprotein transferrin that functions, inter alia, in iron metabolism and the transport of iron through the blood to various tissues, such as the liver, spleen, and bone marrow. The amino acid sequence of a reference human TF (hTF) protein is set forth in SEQ ID NO: 3283 (UniProt Accession P02787).

[0184] As used herein, the term “transferrin receptor” or “TFR” refers to the transmembrane homodimeric glycoprotein that functions, inter alia, in the cellular uptake of iron from the plasma glycoprotein transferrin. The term TFR includes, where applicable, multiple isoforms and homologs. For example, human TFR (hTFR) includes homologs hTFR1 and hTFR2. The amino acid sequence of a reference hTFR1 protein is set forth in SEQ ID NO: 3281 (UniProt Accession P02786|). TFR1 is also commonly known in the art as CD71. The terms TFR1 and CD71 are used interchangeably herein. The amino acid sequence of a reference hTFR2 protein is set forth in SEQ ID NO: 3282 (UniProt Accession Q9UP52).

[0185] As used herein, the terms “treat,” treating,” “treatment,” and the like refer to reducing or ameliorating a disease and/or symptom(s) associated therewith or obtaining a desired pharmacologic and/or physiologic effect. It will be appreciated that, although not precluded, treating a disease does not require that the disease, or symptom(s) associated therewith be completely eliminated. In some embodiments, the effect is therapeutic, i.e., without limitation, the effect partially or completely reduces, diminishes, abrogates, abates, alleviates, decreases the intensity of, or cures a disease and/or adverse symptom attributable to the disease. In some embodiments, the effect is preventative, i.e., the effect protects or prevents an occurrence or reoccurrence of a disease. To this end, the presently disclosed methods comprise administering a therapeutically effective amount of a compositions as described herein.

[0186] As used herein, the term “variation” or “variant” or use the like in reference to a nucleotide or nucleic acid sequence refers to a nucleic acid molecule that comprises at least one substitution, addition, deletion, or inversion of one or more nucleotide compared to a reference nucleic acid molecule. Likewise, as used herein, the term “variation” or “variant” or use the like with reference to a peptide or protein refers to a peptide or protein that comprises at least one substitution, addition, deletion, or inversion of an amino acid residue compared to a reference peptide or protein.

[0187] A “variation that promotes heterodimerization of a first Fc region and a second Fc region” (or similar phrasing) is a manipulation of the peptide backbone or the post-translational modifications of an Fc region that reduces or prevents the association of a polypeptide comprising the Fc region with an identical polypeptide to form a homodimer. A modification promoting association as used herein particularly includes separate modifications made to each of the two Fc regions desired to associate (i.e., a first Fc region and a second Fc region), wherein the modifications are complementary to each other so as to promote association of the two Fc regions. For example, a modification promoting association may alter the structure or charge of one or both of the Fc regions so as to make their association sterically or electrostatically favorable, respectively. Thus, heterodimerization occurs between a polypeptide comprising the first Fc region and a polypeptide comprising the second Fc region, which might be non-identical in the sense that further components fused to each of the Fc regions (e.g., antigen binding domains) are not the same. In some embodiments the modification promoting association comprises an amino acid mutation in the Fc region, specifically an amino acid substitution. In a particular embodiment, the modification promoting association comprises a separate amino acid mutation, specifically one or more amino acid substitution, in each of the first Fc region and the second Fc region (e.g., described herein).

[0188] As used herein, the term “variable region” refers to a portion of an antibody, generally, a portion of a light or heavy chain, typically about the amino-terminal 110 to 120 amino acids or 110 to 125 amino acids in the mature heavy chain and about 90 to 115 amino acids in the mature light chain, which differ extensively in sequence among antibodies and are used in the binding and specificity of a particular antibody for its particular antigen. The variability in sequence is concentrated in those regions called complementarity determining regions (CDRs) while the more highly conserved regions in the variable domain are called framework regions (FR). Without wishing to be bound by any particular mechanism or theory, it is believed that the CDRs of the light and heavy chains are primarily responsible for the interaction and specificity of the antibody with antigen. In certain embodiments, the variable region is a human variable region. In certain embodiments, the variable region comprises rodent or murine CDRs and human framework regions (FRs). In particular embodiments, the variable region is a primate (e.g., non-human primate) variable region. In certain embodiments, the variable region comprises rodent or murine CDRs and primate (e.g., non-human primate) framework regions (FRs).

[0189] The terms “VL” and “VL region” are used interchangeably to refer to an immunoglobulin light chain variable region. A VL region can be incorporated into an antibody, e.g., a scFv, a Fab, a full-length antibody. For example, a scFv comprises a VL region operably connected via a peptide linker to a VH region.

[0190] The terms “VH” and “VH region” are used interchangeably to refer to an immunoglobulin heavy chain variable region. A VH region can be incorporated into an antibody, e.g., a scFv, a Fab, a full-length antibody. For example, a scFv comprises a VH region operably connected via a peptide linker to a VL region.

[0191] The term “VHH” as used herein refers to a type of single domain antibody (sdAb) that has a single monomeric heavy chain variable antibody domain (VH). Such antibodies can be found in or produced from camelid mammals (e.g., camels, llamas) which are naturally devoid of light chains or synthetically produced.

[0192] The term “(VHH)₂” as used herein refers to an antibody that comprises a first and a second VHH operably connected (e.g., via a peptide linker). The first and the second VHH can specifically bind the same or different antigens. In some embodiments, the first and second VHH are operably connected by a peptide linker.

[0193] The term “VHH-Fc” as used herein refers to an antibody that comprises a VHH operably linked (e.g., via a peptide linker) to an Fc domain or a subunit of an Fc domain. In some embodiments, a VHH is operably connected to only a first Fc domain of a first and a second Fc domain pair. In some embodiments, a first VHH is operably connected to a first Fc domain and a second VHH is operably connected to a second Fc domain of a first Fc and a second Fc pair.

[0194] The term “(VHH)₂-Fc” as used herein refers to (VHH)₂ operably linked (e.g., via a peptide linker) to an Fc domain or a subunit of an Fc domain. In some embodiments, a (VHH)₂ is operably connected to only a first Fc domain of a first and a second Fc domain pair. In some embodiments, a first (VHH)₂ is operably connected to a first Fc domain and a second (VHH)₂ is operably connected to a second Fc domain of a first Fc and a second Fc pair.

### 4.2 RNAi Agents

[0195] Provided herein are, inter alia, agents (e.g., RNAi agents, dsRNA agents), useful in, inter alia, inhibiting expression of BCL11 transcription factor A (BCL11A) (e.g., human BCL11A (hBCL11A)) (e.g., within a cell, e.g., within a cell in a subject, e.g., a mammalian subject, e.g., a human subject) (e.g., through the degradation of BCL11A (e.g., hBCL11A) mRNA).

[0196] BCL11A is a transcription factor that e.g., represses transcription of a range of genes involved in e.g., cell proliferation and differentiation. BCL11A has several isoforms, including, BCL11A-XL, BCL11A-L, BCL11A-S, and BCL11A-XS. See, e.g., Seigfried, F. A.; Britsch, S. The Role of Bcl11 Transcription Factors in Neurodevelopmental Disorders. Biology 2024, 13, 126. https://doi.org/10.3390/biology13020126. It should be understood that the agents described herein (e.g., dsRNA agents and antisense oligonucleotides) can target any one of or any combination of or all of the isoforms of BCL11A.

[0197] The mRNA sequence of a reference hBCL11A (isoform 1) gene is set forth in SEQ ID NO: 1 (NCBI Ref.: NM_022893.4). The reverse complement sequence of the hBCL11A mRNA (isoform 1) is set forth in SEQ ID NO: 2. The amino acid sequence of a reference hBCL11A (isoform 1) protein is set forth in SEQ ID NO: 3 (NCBI Ref.: NP_075044.2). See Table 1, herein.

TABLE 1
The mRNA and Amino Acid Sequence of a Reference hBCL11A Protein.

| | | SEQ ID |
|---|---|---|
| Description | Amino Acid Sequence | NO |
| hBCL11A | GUCUCUGUCCAUCCAGACUCCUGACGUUCAAGUUCGCAGGGACGUCAC | 1 |
| mRNA | GUCCGCACUUGAACUUGCAGCUCAGGGGGGCUUUUGCCAUUUUUUUCA | |
| Transcript | UCUCUCUCUCUCUCUCUCCCUCUAUCUCUCUUCUCUCUCUCUCCCUCU | |
| Variant 1 | UUUUUUUUUUUUUUUUUUUUUUUUUUUUGCUUAAAAAAAAGCCAUGAC | |
| NCBI Ref.: | GGCUCUCCCACAAUUCAUCUUCCCUGCGCCAUCUUUGUAUUAUUUCUA | |
| NM_022893.4 | AUUUAUUUUGGAUGUCAAAAGGCACUGAUGAAGAUAUUUUCUCUGGAG | |
| | CGCCCGCCGCCGCCGCCGCCGCCGCCGCCGCCCGCCCCGCAGCCCACC | |
| | UCUCCUUCUUUCUAACCCGGCUCUCCCGAUGUGAACCGAGCCGUCGUC | |
| | AUGUCUCGCCGCAAGCAAGGCAAACCCCAGCACUUAAGCAAACGGGAA | |
| | UUCUCGCCCGAGCCUCUUGAAGCCAUUCUUACAGAUGAUGAACCAGAC | |
| | CACGGCCCGUUGGGAGCUCCAGAAGGGGAUCAUGACCUCCUCACCUGU | |
| | GGGCAGUGCCAGAUGAACUUCCCAUUGGGGGACAUUCUUAUUUUUAUC | |
| | GAGCACAAACGGAAACAAUGCAAUGGCAGCCUCUGCUUAGAAAAAGCU | |
| | GUGGAUAAGCCACCUUCCCCUUCACCAAUCGAGAUGAAAAAAGCAUCC | |
| | AAUCCCGUGGAGGUUGGCAUCCAGGUCACGCCAGAGGAUGACGAUUGU | |
| | UUAUCAACGUCAUCUAGAGGAAUUUGCCCCAAACAGGAACACAUAGCA | |
| | GAUAAACUUCUGCACUGGAGGGGCCUCUCCUCCCCUCGUUCUGCACAU | |
| | GGAGCUCUAAUCCCCACGCCUGGGAUGAGUGCAGAAUAUGCCCCGCAG | |
| | GGUAUUUGUAAAGAUGAGCCCAGCAGCUACACAUGUACAACUUGCAAA | |
| | CAGCCAUUCACCAGUGCAUGGUUUCUCUUGCAACACGCACAGAACACU | |
| | CAUGGAUUAAGAAUCUACUUAGAAAGCGAACACGGAAGUCCCCUGACC | |
| | CCGCGGGUUGGUAUCCCUUCAGGACUAGGUGCAGAAUGUCCUUCCCAG | |
| | CCACCUCUCCAUGGGAUUCAUAUUGCAGACAAUAACCCCUUUAACCUG | |
| | CUAAGAAUACCAGGAUCAGUAUCGAGAGAGGCUUCCGGCCUGGCAGAA | |
| | GGGCGCUUUCCACCCACUCCCCCCCUGUUUAGUCCACCACCGAGACAU | |
| | CACUUGGACCCCCACCGCAUAGAGCGCCUGGGGGCGGAAGAGAUGGCC | |
| | CUGGCCACCCAUCACCCGAGUGCCUUUGACAGGGUGCUGCGGUUGAAU | |
| | CCAAUGGCUAUGGAGCCUCCCGCCAUGGAUUUCUCUAGGAGACUUAGA | |
| | GAGCUGGCAGGGAACACGUCUAGCCCACCGCUGUCCCCAGGCCGGCCC | |
| | AGCCCUAUGCAAAGGUUACUGCAACCAUUCCAGCCAGGUAGCAAGCCG | |
| | CCCUUCCUGGCGACGCCCCCCCUCCCUCCUCUGCAAUCCGCCCCUCCU | |
| | CCCUCCCAGCCCCCGGUCAAGUCCAAGUCAUGCGAGUUCUGCGGCAAG | |
| | ACGUUCAAAUUUCAGAGCAACCUGGUGGUGCACCGGCGCAGCCACACG | |
| | GGCGAGAAGCCCUACAAGUGCAACCUGUGCGACCACGCGUGCACCCAG | |
| | GCCAGCAAGCUGAAGCGCCACAUGAAGACGCACAUGCACAAAUCGUCC | |
| | CCCAUGACGGUCAAGUCCGACGACGGUCUCUCCACCGCCAGCUCCCCG | |
| | GAACCCGGCACCAGCGACUUGGUGGGCAGCGCCAGCAGCGCGCUCAAG | |
| | UCCGUGGUGGCCAAGUUCAAGAGCGAGAACGACCCCAACCUGAUCCCG | |
| | GAGAACGGGGACGAGGAGGAAGAGGAGGACGACGAGGAAGAGGAAGAA | |
| | GAGGAGGAAGAGGAGGAGGAGGAGCUGACGGAGAGCGAGAGGGUGGAC | |
| | UACGGCUUCGGGCUGAGCCUGGAGGCGGCGCGCCACCACGAGAACAGC | |
| | UCGCGGGGCGCGGUCGUGGGCGUGGGCGACGAGAGCCGCGCCCUGCCC | |
| | GACGUCAUGCAGGGCAUGGUGCUCAGCUCCAUGCAGCACUUCAGCGAG | |
| | GCCUUCCACCAGGUCCUGGGCGAGAAGCAUAAGCGCGGCCACCUGGCC | |
| | GAGGCCGAGGGCCACAGGGACACUUGCGACGAAGACUCGGUGGCCGGC | |
| | GAGUCGGACCGCAUAGACGAUGGCACUGUUAAUGGCCGCGGCUGCUCC | |
| | CCGGGCGAGUCGGCCUCGGGGGGCCUGUCCAAAAAGCUGCUGCUGGGC | |
| | AGCCCCAGCUCGCUGAGCCCCUUCUCUAAGCGCAUCAAGCUCGAGAAG | |
| | GAGUUCGACCUGCCCCCGGCCGCGAUGCCCAACACGGAGAACGUGUAC | |
| | UCGCAGUGGCUCGCCGGCUACGCGGCCUCCAGGCAGCUCAAAGAUCCC | |
| | UUCCUUAGCUUCGGAGACUCCAGACAAUCGCCUUUUGCCUCCUCGUCG | |
| | GAGCACUCCUCGGAGAACGGGAGUUUGCGCUUCUCCACACCGCCCGGG | |
| | GAGCUGGACGGAGGGAUCUCGGGGCGCAGCGGCACGGGAAGUGGAGGG | |
| | AGCACGCCCCAUAUUAGUGGUCCGGGCCCGGGCAGGCCCAGCUCAAAA | |
| | GAGGGCAGACGCAGCGACACUUGUGAGUACUGUGGGAAAGUCUUCAAG | |
| | AACUGUAGCAAUCUCACUGUCCACAGGAGAAGCCACACGGGCGAAAGG | |
| | CCUUAUAAAUGCGAGCUGUGCAACUAUGCCUGUGCCCAGAGUAGCAAG | |
| | CUCACCAGGCACAUGAAAACGCAUGGCCAGGUGGGGAAGGACGUUUAC | |
| | AAAUGUGAAAUUUGUAAGAUGCCUUUUAGCGUGUACAGUACCCUGGAG | |
| | AAACACAUGAAAAAAUGGCACAGUGAUCGAGUGUUGAAUAAUGAUAUA | |
| | AAAACUGAAUAGAGGUAUAUUAAUACCCCUCCCUCACUCCCACCUGAC | |
| | ACCCCCUUUUUCACCACUCCCCUUCCCCAUCGCCCUCCAGCCCCACUC | |
| | CCUGUAGGAUUUUUUUCUAGUCCCAUGUGAUUUAAACAAACAAACAAA | |
| | CAAACAGAAGUAACGAAGCUAAGAAUAUGAGAGUGCUUGUCACCAGCA | |
| | CACCUGUUUUUUUUCUUUUUCUUUUUCUUUUUUCUUUUUCCUUUUUUU | |
| | UUUUUUUCCUUUAUGUUCUCACCGUUUGAAUGCAUGAUCUGUAUGGGG | |
| | CAAUACUAUUGCAUUUUACGCAAACUUUGAGCCUUUCUCUUGUGCAAU | |
| | AAUUUACAUGUUGUGUAUGUUUUUUUUUAAACUUAGACAGCAUGUAUG | |
| | GUAUGUUAUGGCUAUUUUAAAUUGUCCCUAAUUCGUUGCUGAGCAAAC | |
| | AUGUUGCUGUUUCCAGUUCCGUUCUGAGAGAAAAAGAGAGAGAGAGAG | |
| | AAAAAGACCAUGCUGCAUACAUUCUGUAAUACAUAUCAUGUACAGUUU | |
| | UAUUUUAUAACGUGAGGAGGAAAAACAGUCUUUGGAUUAACCCUCUAU | |
| | AGACAGAAUAGAUAGCACUGAAAAAAAAUCUCUAUGAGCUAAAUGUCU | |
| | GUCUCUAAAGGGUUAAAUGUAUCAAUUGGAAAGGAAGAAAAAAGGCCU | |
| | UGAAUUGACAAAUUAACAGAAAAACAGAACAAGUUUAUUCUAUCAUUU | |
| | GGUUUUAAAAUAUGAGUGCCUUGGAUCUAUUAAAACCACAUCGAUGGU | |
| | UCUUUCUACUUGUUAUAAACUUGUAGCUUAAUUCAGCAUUGGGUGAGG | |
| | UAAUAAACCUUAGGAACUAGCAUAUAAUUCUAUAUUGUAUUUCUCACA | |
| | ACAAUGGCUACCUAAAAAGAUGACCCAUUAUGUCCUAGUUAAUCAUCA | |
| | UUUUUCCUUUAGUUUAAUUUUAUAAACAAAACUGAUUAUACCAGUAUA | |
| | AAAGCUACUUUGCUCCUGGUGAGAGCUUAAAAGAAAUGGGCUGUUUUG | |
| | CCCAAAGUUUUAUUUUUUUUAAACAAUGAUUAAAUUGAAUGUGUAAUG | |
| | UGCAAAAGCCCUGGAACGCAAUUAAAUACACUAGUAAGGAGUUCAUUU | |
| | UAUGAAGAUAUUUGCUUUAAUAAUGUCUUUUUAAAAAUACUGGCACCA | |
| | AAAGAAAUAGAUCCAGAUCUACUUGGUUGUCAAGUGGACAAUCAAAUG | |
| | AUAAACUUUAAGACCUUGUAUACCAUAUUGAAAGGAAGAGGCUGACAA | |
| | UAAGGUUUGACAGAGGGGAACAGAAGAAAAUAAUAUGAUUUAUUAGCA | |
| | CAACGUGGUACUAUUUGCCAUUUAAAACUAGAACAGGUAUAUAAGCUA | |
| | AUAUUGAUACAAUGAUGAUUAACUAUGAAUUCUUAAGACUUGCAUUUA | |
| | AAUGUGACAUUCUUAAAAAAAGAAGAGAAAGAAUUUUAAGAGUAGCAG | |
| | UAUAUAUGUCUGUGCUCCCUAAAAGUUGUACUUCAUUUCUUUUCCAUA | |
| | CACUGUGUGCUAUUUGUGUUAACAUGGAAGAGGAUUCAUUGUUUUUAU | |
| | UUUUAUUUUUUUAAUUUUUUCUUUUUUAUUAAGCUAGCAUCUGCCCCA | |
| | GUUGGUGUUCAAAUAGCACUUGACUCUGCCUGUGAUAUCUGUAUCUUU | |
| | UCUCUAAUCAGAGAUACAGAGGUUGAGUAUAAAAUAAACCUGCUCAGA | |
| | UAGGACAAUUAAGUGCACUGUACAAUUUUCCCAGUUUACAGGUCUAUA | |
| | CUUAAGGGAAAAGUUGCAAGAAUGCUGAAAAAAAAUUGAACACAAUCU | |
| | CAUUGAGGAGCAUUUUUUAAAAACUAAAAAAAAAAAAACUUUGCCAGC | |
| | CAUUUACUUGACUAUUGAGCUUACUUACUUGGACGCAACAUUGCAAGC | |
| | GCUGUGAAUGGAAACAGAAUACACUUAACAUAGAAAUGAAUGAUUGCU | |
| | UUCGCUUCUACAGUGCAAGGAUUUUUUUGUACAAAACUUUUUUAAAUA | |
| | UAAAUGUUAAGAAAAAUUUUUUUUAAAAAACACUUCAUUAUGUUUAGG | |
| | GGGGAACUGCAUUUUAGGGUUCCAUUGUCUUGGUGGUGUUACAAGACU | |
| | UGUUAUCCAUUUAAAAAUGGUAGUGGAAAUUCUAUGCCUUGGAUACAC | |
| | ACCGCUCUUCAGGUUGUAAAAAAAAAAAACAUACAUUGGGGAAAGGUU | |
| | UAAGAUUAUAUAGUACUUAAAUAUAGGAAAAUGCACACUCAUGUUGAU | |
| | UCCUAUGCUAAAAUACAUUUAUGGUCUUUUUUCUGUAUUUCUAGAAUG | |
| | GUAUUUGAAUUAAAUGUUCAUCUAGUGUUAGGCACUAUAGUAUUUAUA | |
| | UUGAAGCUUGUAUUUUUAACUGUUGCUUGUUCUCUUAAAAGGUAUCAA | |
| | UGUACCUUUUUUGGUAGUGGAAAAAAAAAAGACAGGCUGCCACAGUAU | |
| | AUUUUUUUAAUUUGGCAGGAUAAUAUAGUGCAAAUUAUUUGUAUGCUU | |
| | CAAAAAAAAAAAAAAGAGAGAAACAAAAAAGUGUGACAUUACAGAUGA | |
| | GAAGCCAUAUAAUGGCGGUUUGGGGGAGCCUGCUAGAAUGUCACAUGG | |
| | AUGGCUGUCAUAGGGGUUGUACAUAUCCUUUUUUGUUCCUUUUUCCUG | |
| | CUGCCAUACUGUAUGCAGUACUGCAAGCUAAUAACGUUGGUUUGUUAU | |
| | GUAGUGUGCUUUUUGUCCCUUUCCUUCUAUCACCCUACAUUCCAGCAU | |
| | CUUACCUUCAUAUGCAGUAAAAGAAAGAAAGAAAAAAAAAGGAAAAAA | |
| | AAAAAAAAACCAAUGUUUUGCAGUUUUUUUCAUUGCCAAAAACUAAAU | |
| | GGUGCUUUAUAUUUAGAUUGGAAAGAAUUUCAUAUGCAAAGCAUAUUA | |
| | AAGAGAAAGCCCGCUUUAGUCAAUACUUUUUUGUAAAUGGCAAUGCAG | |
| | AAUAUUUUGUUAUUGGCCUUUUCUAUUCCUGUAAUGAAAGCUGUUUGU | |
| | CGUAACUUGAAAUUUUAUCUUUUACUAUGGGAGUCACUAUUUAUUAUU | |
| | GCUUAUGUGCCCUGUUCAAAACAGAGGCACUUAAUUUGAUCUUUUAUU | |
| | UUUCUUUGUUUUUAUUUUUUUUUUUAUUUAGAUGACCAAAGGUCAUUA | |
| | CAACCUGGCUUUUUAUUGUAUUUGUUUCUGGUCUUUGUUAAGUUCUAU | |
| | UGGAAAAACCACUGUCUGUGUUUUUUUGGCAGUUGUCUGCAUUAACCU | |
| | GUUCAUACACCCAUUUUGUCCCUUUAUUGAAAAAAUAAAAAAAAUUAA | |
| | AGUACA | |
| Reverse | UGUACUUUAAUUUUUUUUAUUUUUUCAAUAAAGGGACAAAAUGGGUGU | 2 |
| Complement of | AUGAACAGGUUAAUGCAGACAACUGCCAAAAAAACACAGACAGUGGUU | |
| hBCL11A | UUUCCAAUAGAACUUAACAAAGACCAGAAACAAAUACAAUAAAAAGCC | |
| mRNA | AGGUUGUAAUGACCUUUGGUCAUCUAAAUAAAAAAAAAAAUAAAAACA | |
| | AAGAAAAAUAAAAGAUCAAAUUAAGUGCCUCUGUUUUGAACAGGGCAC | |
| | AUAAGCAAUAAUAAAUAGUGACUCCCAUAGUAAAAGAUAAAAUUUCAA | |
| | GUUACGACAAACAGCUUUCAUUACAGGAAUAGAAAAGGCCAAUAACAA | |
| | AAUAUUCUGCAUUGCCAUUUACAAAAAAGUAUUGACUAAAGCGGGCUU | |
| | UCUCUUUAAUAUGCUUUGCAUAUGAAAUUCUUUCCAAUCUAAAUAUAA | |
| | AGCACCAUUUAGUUUUUGGCAAUGAAAAAAACUGCAAAACAUUGGUUU | |
| | UUUUUUUUUUUUCCUUUUUUUUUCUUUCUUUCUUUUACUGCAUAUGAA | |
| | GGUAAGAUGCUGGAAUGUAGGGUGAUAGAAGGAAAGGGACAAAAAGCA | |
| | CACUACAUAACAAACCAACGUUAUUAGCUUGCAGUACUGCAUACAGUA | |
| | UGGCAGCAGGAAAAAGGAACAAAAAAGGAUAUGUACAACCCCUAUGAC | |
| | AGCCAUCCAUGUGACAUUCUAGCAGGCUCCCCCAAACCGCCAUUAUAU | |
| | GGCUUCUCAUCUGUAAUGUCACACUUUUUUGUUUCUCUCUUUUUUUUU | |
| | UUUUUGAAGCAUACAAAUAAUUUGCACUAUAUUAUCCUGCCAAAUUAA | |
| | AAAAAUAUACUGUGGCAGCCUGUCUUUUUUUUUUCCACUACCAAAAAA | |
| | GGUACAUUGAUACCUUUUAAGAGAACAAGCAACAGUUAAAAAUACAAG | |
| | CUUCAAUAUAAAUACUAUAGUGCCUAACACUAGAUGAACAUUUAAUUC | |
| | AAAUACCAUUCUAGAAAUACAGAAAAAAGACCAUAAAUGUAUUUUAGC | |
| | AUAGGAAUCAACAUGAGUGUGCAUUUUCCUAUAUUUAAGUACUAUAUA | |
| | AUCUUAAACCUUUCCCCAAUGUAUGUUUUUUUUUUUUACAACCUGAAG | |
| | AGCGGUGUGUAUCCAAGGCAUAGAAUUUCCACUACCAUUUUUAAAUGG | |
| | AUAACAAGUCUUGUAACACCACCAAGACAAUGGAACCCUAAAAUGCAG | |
| | UUCCCCCCUAAACAUAAUGAAGUGUUUUUUAAAAAAAAUUUUUCUUAA | |
| | CAUUUAUAUUUAAAAAAGUUUUGUACAAAAAAAUCCUUGCACUGUAGA | |
| | AGCGAAAGCAAUCAUUCAUUUCUAUGUUAAGUGUAUUCUGUUUCCAUU | |
| | CACAGCGCUUGCAAUGUUGCGUCCAAGUAAGUAAGCUCAAUAGUCAAG | |
| | UAAAUGGCUGGCAAAGUUUUUUUUUUUUUAGUUUUUAAAAAAUGCUCC | |
| | UCAAUGAGAUUGUGUUCAAUUUUUUUUCAGCAUUCUUGCAACUUUUCC | |
| | CUUAAGUAUAGACCUGUAAACUGGGAAAAUUGUACAGUGCACUUAAUU | |
| | GUCCUAUCUGAGCAGGUUUAUUUUAUACUCAACCUCUGUAUCUCUGAU | |
| | UAGAGAAAAGAUACAGAUAUCACAGGCAGAGUCAAGUGCUAUUUGAAC | |
| | ACCAACUGGGGCAGAUGCUAGCUUAAUAAAAAAGAAAAAAUUAAAAAA | |
| | AUAAAAAUAAAAACAAUGAAUCCUCUUCCAUGUUAACACAAAUAGCAC | |
| | ACAGUGUAUGGAAAAGAAAUGAAGUACAACUUUUAGGGAGCACAGACA | |
| | UAUAUACUGCUACUCUUAAAAUUCUUUCUCUUCUUUUUUUAAGAAUGU | |
| | CACAUUUAAAUGCAAGUCUUAAGAAUUCAUAGUUAAUCAUCAUUGUAU | |
| | CAAUAUUAGCUUAUAUACCUGUUCUAGUUUUAAAUGGCAAAUAGUACC | |
| | ACGUUGUGCUAAUAAAUCAUAUUAUUUUCUUCUGUUCCCCUCUGUCAA | |
| | ACCUUAUUGUCAGCCUCUUCCUUUCAAUAUGGUAUACAAGGUCUUAAA | |
| | GUUUAUCAUUUGAUUGUCCACUUGACAACCAAGUAGAUCUGGAUCUAU | |
| | UUCUUUUGGUGCCAGUAUUUUUAAAAAGACAUUAUUAAAGCAAAUAUC | |
| | UUCAUAAAAUGAACUCCUUACUAGUGUAUUUAAUUGCGUUCCAGGGCU | |
| | UUUGCACAUUACACAUUCAAUUUAAUCAUUGUUUAAAAAAAAUAAAAC | |
| | UUUGGGCAAAACAGCCCAUUUCUUUUAAGCUCUCACCAGGAGCAAAGU | |
| | AGCUUUUAUACUGGUAUAAUCAGUUUUGUUUAUAAAAUUAAACUAAAG | |
| | GAAAAAUGAUGAUUAACUAGGACAUAAUGGGUCAUCUUUUUAGGUAGC | |
| | CAUUGUUGUGAGAAAUACAAUAUAGAAUUAUAUGCUAGUUCCUAAGGU | |
| | UUAUUACCUCACCCAAUGCUGAAUUAAGCUACAAGUUUAUAACAAGUA | |
| | GAAAGAACCAUCGAUGUGGUUUUAAUAGAUCCAAGGCACUCAUAUUUU | |
| | AAAACCAAAUGAUAGAAUAAACUUGUUCUGUUUUUCUGUUAAUUUGUC | |
| | AAUUCAAGGCCUUUUUUCUUCCUUUCCAAUUGAUACAUUUAACCCUUU | |
| | AGAGACAGACAUUUAGCUCAUAGAGAUUUUUUUUCAGUGCUAUCUAUU | |
| | CUGUCUAUAGAGGGUUAAUCCAAAGACUGUUUUUCCUCCUCACGUUAU | |
| | AAAAUAAAACUGUACAUGAUAUGUAUUACAGAAUGUAUGCAGCAUGGU | |
| | CUUUUUCUCUCUCUCUCUCUUUUUCUCUCAGAACGGAACUGGAAACAG | |
| | CAACAUGUUUGCUCAGCAACGAAUUAGGGACAAUUUAAAAUAGCCAUA | |
| | ACAUACCAUACAUGCUGUCUAAGUUUAAAAAAAAACAUACACAACAUG | |
| | UAAAUUAUUGCACAAGAGAAAGGCUCAAAGUUUGCGUAAAAUGCAAUA | |
| | GUAUUGCCCCAUACAGAUCAUGCAUUCAAACGGUGAGAACAUAAAGGA | |
| | AAAAAAAAAAAAAGGAAAAAGAAAAAAGAAAAAGAAAAAGAAAAAAAA | |
| | CAGGUGUGCUGGUGACAAGCACUCUCAUAUUCUUAGCUUCGUUACUUC | |
| | UGUUUGUUUGUUUGUUUGUUUAAAUCACAUGGGACUAGAAAAAAAUCC | |
| | UACAGGGAGUGGGGCUGGAGGGCGAUGGGGAAGGGGAGUGGUGAAAAA | |
| | GGGGGUGUCAGGUGGGAGUGAGGGAGGGGUAUUAAUAUACCUCUAUUC | |
| | AGUUUUUAUAUCAUUAUUCAACACUCGAUCACUGUGCCAUUUUUUCAU | |
| | GUGUUUCUCCAGGGUACUGUACACGCUAAAAGGCAUCUUACAAAUUUC | |
| | ACAUUUGUAAACGUCCUUCCCCACCUGGCCAUGCGUUUUCAUGUGCCU | |
| | GGUGAGCUUGCUACUCUGGGCACAGGCAUAGUUGCACAGCUCGCAUUU | |
| | AUAAGGCCUUUCGCCCGUGUGGCUUCUCCUGUGGACAGUGAGAUUGCU | |
| | ACAGUUCUUGAAGACUUUCCCACAGUACUCACAAGUGUCGCUGCGUCU | |
| | GCCCUCUUUUGAGCUGGGCCUGCCCGGGCCCGGACCACUAAUAUGGGG | |
| | CGUGCUCCCUCCACUUCCCGUGCCGCUGCGCCCCGAGAUCCCUCCGUC | |
| | CAGCUCCCCGGGCGGUGUGGAGAAGCGCAAACUCCCGUUCUCCGAGGA | |
| | GUGCUCCGACGAGGAGGCAAAAGGCGAUUGUCUGGAGUCUCCGAAGCU | |
| | AAGGAAGGGAUCUUUGAGCUGCCUGGAGGCCGCGUAGCCGGCGAGCCA | |
| | CUGCGAGUACACGUUCUCCGUGUUGGGCAUCGCGGCCGGGGGCAGGUC | |
| | GAACUCCUUCUCGAGCUUGAUGCGCUUAGAGAAGGGGCUCAGCGAGCU | |
| | GGGGCUGCCCAGCAGCAGCUUUUUGGACAGGCCCCCCGAGGCCGACUC | |
| | GCCCGGGGAGCAGCCGCGGCCAUUAACAGUGCCAUCGUCUAUGCGGUC | |
| | CGACUCGCCGGCCACCGAGUCUUCGUCGCAAGUGUCCCUGUGGCCCUC | |
| | GGCCUCGGCCAGGUGGCCGCGCUUAUGCUUCUCGCCCAGGACCUGGUG | |
| | GAAGGCCUCGCUGAAGUGCUGCAUGGAGCUGAGCACCAUGCCCUGCAU | |
| | GACGUCGGGCAGGGCGCGGCUCUCGUCGCCCACGCCCACGACCGCGCC | |
| | CCGCGAGCUGUUCUCGUGGUGGCGCGCCGCCUCCAGGCUCAGCCCGAA | |
| | GCCGUAGUCCACCCUCUCGCUCUCCGUCAGCUCCUCCUCCUCCUCUUC | |
| | CUCCUCUUCUUCCUCUUCCUCGUCGUCCUCCUCUUCCUCCUCGUCCCC | |
| | GUUCUCCGGGAUCAGGUUGGGGUCGUUCUCGCUCUUGAACUUGGCCAC | |
| | CACGGACUUGAGCGCGCUGCUGGCGCUGCCCACCAAGUCGCUGGUGCC | |
| | GGGUUCCGGGGAGCUGGCGGUGGAGAGACCGUCGUCGGACUUGACCGU | |
| | CAUGGGGGACGAUUUGUGCAUGUGCGUCUUCAUGUGGCGCUUCAGCUU | |
| | GCUGGCCUGGGUGCACGCGUGGUCGCACAGGUUGCACUUGUAGGGCUU | |
| | CUCGCCCGUGUGGCUGCGCCGGUGCACCACCAGGUUGCUCUGAAAUUU | |
| | GAACGUCUUGCCGCAGAACUCGCAUGACUUGGACUUGACCGGGGGCUG | |
| | GGAGGGAGGAGGGGCGGAUUGCAGAGGAGGGAGGGGGGGCGUCGCCAG | |
| | GAAGGGCGGCUUGCUACCUGGCUGGAAUGGUUGCAGUAACCUUUGCAU | |
| | AGGGCUGGGCCGGCCUGGGGACAGCGGUGGGCUAGACGUGUUCCCUGC | |
| | CAGCUCUCUAAGUCUCCUAGAGAAAUCCAUGGCGGGAGGCUCCAUAGC | |
| | CAUUGGAUUCAACCGCAGCACCCUGUCAAAGGCACUCGGGUGAUGGGU | |
| | GGCCAGGGCCAUCUCUUCCGCCCCCAGGCGCUCUAUGCGGUGGGGGUC | |
| | CAAGUGAUGUCUCGGUGGUGGACUAAACAGGGGGGGAGUGGGUGGAAA | |
| | GCGCCCUUCUGCCAGGCCGGAAGCCUCUCUCGAUACUGAUCCUGGUAU | |
| | UCUUAGCAGGUUAAAGGGGUUAUUGUCUGCAAUAUGAAUCCCAUGGAG | |
| | AGGUGGCUGGGAAGGACAUUCUGCACCUAGUCCUGAAGGGAUACCAAC | |
| | CCGCGGGGUCAGGGGACUUCCGUGUUCGCUUUCUAAGUAGAUUCUUAA | |
| | UCCAUGAGUGUUCUGUGCGUGUUGCAAGAGAAACCAUGCACUGGUGAA | |
| | UGGCUGUUUGCAAGUUGUACAUGUGUAGCUGCUGGGCUCAUCUUUACA | |
| | AAUACCCUGCGGGGCAUAUUCUGCACUCAUCCCAGGCGUGGGGAUUAG | |
| | AGCUCCAUGUGCAGAACGAGGGGAGGAGAGGCCCCUCCAGUGCAGAAG | |
| | UUUAUCUGCUAUGUGUUCCUGUUUGGGGCAAAUUCCUCUAGAUGACGU | |
| | UGAUAAACAAUCGUCAUCCUCUGGCGUGACCUGGAUGCCAACCUCCAC | |
| | GGGAUUGGAUGCUUUUUUCAUCUCGAUUGGUGAAGGGGAAGGUGGCUU | |
| | AUCCACAGCUUUUUCUAAGCAGAGGCUGCCAUUGCAUUGUUUCCGUUU | |
| | GUGCUCGAUAAAAAUAAGAAUGUCCCCCAAUGGGAAGUUCAUCUGGCA | |
| | CUGCCCACAGGUGAGGAGGUCAUGAUCCCCUUCUGGAGCUCCCAACGG | |
| | GCCGUGGUCUGGUUCAUCAUCUGUAAGAAUGGCUUCAAGAGGCUCGGG | |
| | CGAGAAUUCCCGUUUGCUUAAGUGCUGGGGUUUGCCUUGCUUGCGGCG | |
| | AGACAUGGUGGGCUGCGGGGGGGGCGGCGGCGGCGGCGGCGGCGGCGG | |
| | CGGGCGGACGACGGCUCGGUUCACAUCGGGAGAGCCGGGUUAGAAAGA | |
| | AGGAGACUCCAGAGAAAAUAUCUUCAUCAGUGCCUUUUGACAUCCAAA | |
| | AUAAAUUAGAAAUAAUACAAAGAUGGCGCAGGGAAGAUGAAUUGUGGG | |
| | AGAGCCGUCAUGGCUUUUUUUUAAGCAAAAAAAAAAAAAAAAAAAAAA | |
| | AAAAAAAGAGGGAGAGAGAGAGAAGAGAGAUAGAGGGAGAGAGAGAGA | |
| | GAGAGAUGAAAAAAAUGGCAAAAGCCCCCCUGAGCUGCAAGUUCAAGU | |
| | GCGGACGUGACGUCCCUGCGAACUUGAACGUCAGGAGUCUGGAUGGAC | |
| | AGAGAC | |
| hBCL11A | MSRRKQGKPQHLSKREFSPEPLEAILTDDEPDHGPLGAPEGDHDLLTC | 3 |
| Isoform 1 | GQCQMNFPLGDILIFIEHKRKQCNGSLCLEKAVDKPPSPSPIEMKKAS | |
| Protein | NPVEVGIQVTPEDDDCLSTSSRGICPKQEHIADKLLHWRGLSSPRSAH | |
| NCBI Ref.: | GALIPTPGMSAEYAPQGICKDEPSSYTCTTCKOPFTSAWFLLQHAQNT | |
| NP_075044.2 | HGLRIYLESEHGSPLTPRVGIPSGLGAECPSQPPLHGIHIADNNPFNL | |
| | LRIPGSVSREASGLAEGRFPPTPPLFSPPPRHHLDPHRIERLGAEEMA | |
| | LATHHPSAFDRVLRLNPMAMEPPAMDFSRRLRELAGNTSSPPLSPGRP | |
| | SPMQRLLQPFQPGSKPPFLATPPLPPLQSAPPPSQPPVKSKSCEFCGK | |
| | IFKFQSNLVVHRRSHTGEKPYKCNLCDHACTQASKLKRHMKTHMHKSS | |
| | PMTVKSDDGLSTASSPEPGTSDLVGSASSALKSVVAKFKSENDPNLIP | |
| | ENGDEEEEEDDEEEEEEEEEEEEELTESERVDYGFGLSLEAARHHENS | |
| | SRGAVVGVGDESRALPDVMQGMVLSSMQHFSEAFHQVLGEKHKRGHLA | |
| | EAEGHRDTCDEDSVAGESDRIDDGTVNGRGCSPGESASGGLSKKLLLG | |
| | SPSSLSPFSKRIKLEKEFDLPPAAMPNTENVYSQWLAGYAASROLKDP | |
| | FLSFGDSRQSPFASSSEHSSENGSLRFSTPPGELDGGISGRSGTGSGG | |
| | STPHISGPGPGRPSSKEGRRSDTCEYCGKVFKNCSNLTVHRRSHTGER | |
| | PYKCELCNYACAQSSKLTRHMKTHGQVGKDVYKCEICKMPFSVYSTLE | |
| | KHMKKWHSDRVLNNDIKTE | |

[0198] In some embodiments, the agent (e.g., RNAi agent, dsRNA agent) comprises one or more RNA molecule. In some embodiments, the agent (e.g., RNAi agent, dsRNA agent) comprises an antisense strand. In some embodiments, the agent (e.g., RNAi agent, dsRNA agent) comprises a sense strand. In some embodiments, the agent comprises one or more single stranded RNA (ssRNA) molecules. In some embodiments, the agent (e.g., RNAi agent, dsRNA agent) comprises a dsRNA agent.

[0199] In some embodiments, the agent (e.g., RNAi agent) comprises a dsRNA agent comprising a sense strand and an antisense strand. In some embodiments, the agent (e.g., RNAi agent) comprises a dsRNA agent comprising a sense strand and an antisense strand that form a double stranded region. In some embodiments, the agent (e.g., RNAi agent) comprises a dsRNA agent comprising a sense strand and an antisense strand that hybridize to form a double stranded region. In some embodiments, the sense strand and the antisense strand are part of a single nucleic acid molecule (e.g., a single nucleic acid molecule comprising a hairpin loop). In some embodiments, the sense strand and the antisense strand are separate nucleic acid molecules.

### 4.2.1 Antisense Strand

### 4.2.1.1 Targeting Region

[0200] As described above, antisense strands (e.g., described herein) comprise a region of complementarity that comprises a nucleotide sequence that is at least partially (e.g., substantially, fully) complementary to the nucleotide sequence of a target nucleic acid molecule (e.g., a target mRNA (e.g., a BCL11A mRNA), a portion of a target mRNA (e.g., a BCL11A mRNA)). In some embodiments, the nucleotide sequence of the region of complementarity is at least substantially complementary to the nucleotide sequence of the target nucleic acid molecule (e.g., a target mRNA (e.g., a BCL11A mRNA), a portion of a target mRNA (e.g., a BCL11A mRNA)). In some embodiments, the nucleotide sequence of the region of complementarity is fully complementary to the nucleotide sequence of the target nucleic acid molecule (e.g., a target mRNA (e.g., a BCL11A mRNA), a portion of a target mRNA (e.g., a BCL11A mRNA)).

[0201] In some embodiments, the nucleotide sequence of the region of complementarity is at least 70%, 75%, 80%, 85%, 90%, 91%, 92%, 93%, 94%, 95%, 96%, 97%, 98%, 99%, or 100% complementary to the nucleotide sequence of the target nucleic acid molecule (e.g., a target mRNA (e.g., a BCL11A mRNA), a portion of a target mRNA (e.g., a BCL11A mRNA)). For example, the nucleotide sequence of the region of complementarity may be at least 70% complementary to the nucleotide sequence of the target nucleic acid molecule (e.g., a target mRNA (e.g., a BCL11A mRNA), a portion of a target mRNA (e.g., a BCL11A mRNA)). The nucleotide sequence of the region of complementarity may be at least 75% complementary to the nucleotide sequence of the target nucleic acid molecule (e.g., a target mRNA (e.g., a BCL11A mRNA), a portion of a target mRNA (e.g., a BCL11A mRNA)). The nucleotide sequence of the region of complementarity may be at least 80% complementary to the nucleotide sequence of the target nucleic acid molecule (e.g., a target mRNA (e.g., a BCL11A mRNA), a portion of a target mRNA (e.g., a BCL11A mRNA)). The nucleotide sequence of the region of complementarity may be at least 85% complementary to the nucleotide sequence of the target nucleic acid molecule (e.g., a target mRNA (e.g., a BCL11A mRNA), a portion of a target mRNA (e.g., a BCL11A mRNA)). The nucleotide sequence of the region of complementarity may be at least 90% complementary to the nucleotide sequence of the target nucleic acid molecule (e.g., a target mRNA (e.g., a BCL11A mRNA), a portion of a target mRNA (e.g., a BCL11A mRNA)). The nucleotide sequence of the region of complementarity may be at least 95% complementary to the nucleotide sequence of the target nucleic acid molecule (e.g., a target mRNA (e.g., a BCL11A mRNA), a portion of a target mRNA (e.g., a BCL11A mRNA)). In some embodiments, the nucleotide sequence of the region of complementarity is at least 80%, 85%, 90%, 91%, 92%, 93%, 94%, 95%, 96%, 97%, 98%, 99%, or 100% complementary to the nucleotide sequence of the target nucleic acid molecule (e.g., a target mRNA (e.g., a BCL11A mRNA), a portion of a target mRNA (e.g., a BCL11A mRNA)). In some embodiments, the nucleotide sequence of the region of complementarity is at least 95%, 96%, 97%, 98%, 99%, or 100% (e.g., in some embodiments, preferably at least 95%, more preferably at least 98%) complementary to the nucleotide sequence of the target nucleic acid molecule (e.g., a target mRNA (e.g., a BCL11A mRNA), a portion of a target mRNA (e.g., a BCL11A mRNA)). In some embodiments, the nucleotide sequence of the region of complementarity is 100% complementary to the nucleotide sequence of the target nucleic acid molecule (e.g., a target mRNA (e.g., a BCL11A mRNA), a portion of a target mRNA (e.g., a BCL11A mRNA)).

[0202] In some embodiments, the nucleotide sequence of the region of complementarity comprises or consists of one or more non-complementary nucleotide mismatches relative to the nucleotide sequence of the target nucleic acid molecule (e.g., a target mRNA (e.g., a BCL11A mRNA), a portion of a target mRNA (e.g., a BCL11A mRNA)). In some embodiments, the nucleotide sequence of the region of complementarity comprises or consists of no more than 5 (e.g., 4, 3, 2, 1, or 0) non-complementary nucleotide mismatches relative to the nucleotide sequence of the target nucleic acid molecule. In some embodiments, the nucleotide sequence of the region of complementarity comprises or consists of no more than 3 (e.g., 2, 1, or 0) non-complementary nucleotide mismatches relative to the nucleotide sequence of the target nucleic acid molecule. In some embodiments, the nucleotide sequence of the region of complementarity comprises or consists of no more than 2 (e.g., 1 or 0) non-complementary nucleotide mismatches relative to the nucleotide sequence of the target nucleic acid molecule. In some embodiments, the nucleotide sequence of the region of complementarity comprises or consists of no more than 1 (e.g., 0) non-complementary nucleotide mismatch relative to the nucleotide sequence of the target nucleic acid molecule. In some embodiments, the nucleotide sequence of the region of complementarity comprises 0 non-complementary nucleotide mismatches relative to the nucleotide sequence of the target nucleic acid molecule. In some embodiments, the region of complementarity comprises one or more (e.g., 2, 3, or more) non-complementary nucleotide mismatches relative to the nucleotide sequence of the target nucleic acid molecule, wherein the one or more non-complementary nucleotide mismatches are within the last 5 (e.g., 4, 3, 2, or 1) nucleotides from either the 5′- and/or 3′-end of the region of complementarity. In some embodiments, the region of complementarity comprises at least one but not more than 3 non-complementary nucleotide mismatches relative to the nucleotide sequence of the target nucleic acid molecule, wherein the one or more non-complementary nucleotide mismatches are within the last 5 (e.g., 4, 3, 2, or 1) nucleotides from either the 5′- and/or 3′-end of the region of complementarity. In some embodiments, the region of complementarity comprises one or more (e.g., 2, 3, or more) non-complementary nucleotide mismatches relative to the nucleotide sequence of the target nucleic acid molecule, wherein the one or more non-complementary nucleotide mismatches are within the last 3 (e.g., 2 or 1) nucleotides from either the 5′- and/or 3′-end of the region of complementarity. In some embodiments, the region of complementarity comprises at least one but not more than 3 non-complementary nucleotide mismatches relative to the nucleotide sequence of the target nucleic acid molecule, wherein the one or more non-complementary nucleotide mismatches are within the last 3 (e.g., 2 or 1) nucleotides from either the 5′- and/or 3′-end of the region of complementarity. Methods known in the art and described herein can be utilized to evaluate the effect of any non-complementary mismatches between an antisense strand and a target nucleic acid molecule on functional properties (e.g., inhibition of expression of the target nucleic acid molecule (e.g., a target mRNA (e.g., a BCL11A mRNA), a portion of a target mRNA (e.g., a BCL11A mRNA))).

[0203] In some embodiments, the region of complementarity comprises or consists of from about 15-30 nucleotides, e.g., 15-29, 15-28, 15-27, 15-26, 15-25, 15-24, 15-23, 15-22, 15-21, 15-20, 15-19, 15-18, 15-17, 18-30, 18-29, 18-28, 18-27, 18-26, 18-25, 18-24, 18-23, 18-22, 18-21, 18-20, 19-30, 19-29, 19-28, 19-27, 19-26, 19-25, 19-24, 19-23, 19-22, 19-21, 19-20, 20-30, 20-29, 20-28, 20-27, 20-26, 20-25, 20-24, 20-23, 20-22, 20-21, 21-30, 21-29, 21-28, 21-27, 21-26, 21-25, 21-24, 21-23, or 21-22 nucleotides. In some embodiments, the region of complementarity comprises from about 18-25, 18-24, 18-23, 18-22, 18-21, 18-20, 19-25, 19-24, 19-23, 19-22, 19-21, 19-20, 20-25, 20-24, 20-23, 20-22, 20-21, 21-25, 21-24, 21-23, 21-22, 22-25, 22-24, 22-23, 23-25, 23-24 or 24-25 nucleotides. In some embodiments, the region of complementarity comprises from about 19-21 (e.g., 19-20) nucleotides. In some embodiments, the region of complementarity comprises or consists of about 15, 16, 17, 18, 19, 20, 21, 22, 23, 24, 25, 26, 27, 28, 29, or 30 nucleotides. In some embodiments, the region of complementarity comprises or consists of about 19, 20, 21, 22, or 23 nucleotides. In some embodiments, the region of complementarity comprises or consists of about 19 nucleotides. In some embodiments, the region of complementarity comprises or consists of about 20 nucleotides. In some embodiments, the region of complementarity comprises or consists of about 21 nucleotides. In some embodiments, the region of complementarity comprises or consists of about 22 nucleotides. In some embodiments, the region of complementarity comprises or consists of about 23 nucleotides. Ranges and lengths intermediate to the above recited ranges and lengths are also contemplated to be part of the disclosure.

[0204] In some embodiments, the target nucleic acid molecule is part (e.g., a contiguous portion) of a larger nucleic acid molecule. For example, in some embodiments, the target nucleic acid molecule is a portion (e.g., a contiguous portion) of a target mRNA (e.g., a BCL11A mRNA). In some embodiments, the target nucleic acid molecule is a contiguous nucleotide sequence of a target mRNA (e.g., a BCL11A mRNA) of sufficient length to allow it to be a substrate for cleavage directed by an RNAi agent (e.g., an RNAi agent described herein, e.g., a dsRNA agent (e.g., described herein)) (i.e., cleavage through a RISC pathway).

[0205] In some embodiments, the target nucleic acid molecule is a target mRNA (e.g., a BCL11A mRNA). In some embodiments, the target nucleic acid molecule is at least a portion (e.g., a portion) of a target mRNA (e.g., a BCL11A mRNA). In some embodiments, the target nucleic acid molecule is at least a portion (e.g., a portion) of an mRNA (e.g., a BCL11A mRNA) formed in the expression of a target gene (e.g., a mammalian, primate, human, non-human primate, mouse, and/or rat gene) (e.g., a BCL11A gene). In some embodiments, the target nucleic acid molecule is at least a portion (e.g., a portion) of a BCL11A (e.g., hBCL11A) mRNA. In some embodiments, the target nucleic acid molecule is at least a portion (e.g., a portion) of an mRNA formed in the expression of a BCL11A (e.g., hBCL11A) gene. In some embodiments, the target nucleic acid molecule comprises at least a portion (e.g., a portion) of the nucleotide sequence set forth in SEQ ID NO: 1 (or a variant or fragment thereof). In some embodiments, the target nucleic acid molecule comprises at least a portion (e.g., a portion) of an mRNA encoding a target protein. In some embodiments, the target nucleic acid molecule comprises at least a portion (e.g., a portion) of an mRNA encoding a BCL11A (e.g., hBCL11A) protein. In some embodiments, the target nucleic acid molecule comprises at least a portion (e.g., a portion) of an mRNA sequence encoding a protein comprising the amino acid sequence set forth in SEQ ID NO: 3 (or a variant or fragment thereof).

[0206] In some embodiments, the target nucleic acid molecule comprises or consists of from about 19-30 nucleotides, e.g., 19-29, 19-28, 19-27, 19-26, 19-25, 19-24, 19-23, 19-22, 19-21, 19-20, 20-30, 20-29, 20-28, 20-27, 20-26, 20-25, 20-24, 20-23, 20-22, 20-21, 21-30, 21-29, 21-28, 21-27, 21-26, 21-25, 21-24, 21-23, 21-22, 22-30, 22-29, 22-28, 22-27, 22-26, 22-25, 22-24, 22-23, 23-30, 23-29, 23-28, 23-27, 23-26, 23-27, 23-26, 23-25, or 23-24 nucleotides. In some embodiments, the target nucleic acid molecule comprises or consists of from about 19-25 nucleotides. In some embodiments, the target nucleic acid molecule comprises or consists of from about 19-23 nucleotides. In some embodiments, the target nucleic acid molecule comprises or consists of from about 21-25 nucleotides. In some embodiments, the target nucleic acid molecule comprises or consists of from about 21-23 nucleotides. In some embodiments, the target nucleic acid molecule comprises or consists of about 19, 18, 20, 21, 22, 23, 24, 25, 26, 27, 28, 29, or 30 nucleotides. In some embodiments, the target nucleic acid molecule comprises or consists of about 19 nucleotides. In some embodiments, the target nucleic acid molecule comprises or consists of about 20 nucleotides. In some embodiments, the target nucleic acid molecule comprises or consists of about 21 nucleotides. In some embodiments, the target nucleic acid molecule comprises or consists of about 23 nucleotides. Ranges and lengths intermediate to the above recited ranges and lengths are also contemplated to be part of the disclosure.

### 4.2.1.2 Overall Length

[0207] In some embodiments, the antisense strand comprises or consists of from about 15-30 nucleotides (e.g., 15-29, 15-28, 15-27, 15-26, 15-25, 15-24, 15-23, 15-22, 15-21, 15-20, 15-19, 15-18, 15-17, 18-30, 18-29, 18-28, 18-27, 18-26, 18-25, 18-24, 18-23, 18-22, 18-21, 18-20, 19-30, 19-29, 19-28, 19-27, 19-26, 19-25, 19-24, 19-23, 19-22, 19-21, 19-20, 20-30, 20-29, 20-28, 20-27, 20-26, 20-25, 20-24, 20-23, 20-22, 20-21, 21-30, 21-29, 21-28, 21-27, 21-26, 21-25, 21-24, 21-23, or 21-22 nucleotides). In some embodiments, the antisense strand comprises or consists of from about 18-25 nucleotides (e.g., 18-24, 18-23, 18-22, 18-21, 18-20, 19-25, 19-24, 19-23, 19-22, 19-21, 19-20, 20-25, 20-24, 20-23, 20-22, 20-21, 21-25, 21-24, 21-23, 21-22, 22-25, 22-24, 22-23, 23-25, 23-24 or 24-25 nucleotides). In some embodiments, the antisense strand comprises or consists of from about 19-25 nucleotide (e.g., 19-20, 19-21, 19-22, 19-23, 19-24, 19-25, 20-21, 20-22, 20-23, 20-24, 20-25, 21-22, 21-23, 21-24, 21-25, 22-23, 22-24, 22-25, 23-24, 23-25, 24-25 nucleotides). In some embodiments, the antisense strand comprises or consists of from about 15-30, 16-30, 17-30, 18-30, 19-30 20-30, 21-30, 22-30, 23-30, 24-30, 25-30, 36-30, 27-30, 28-30-, 29-30, 19-20, 19-21, 19-22, 19-23, 19-24, or 19-25 nucleotides.

[0208] In some embodiments, the antisense strand comprises or consists of not more than about 15, 16, 17, 18, 19, 20, 21, 22, 23, 24, 25, 26, 27, 28, 29, or 30 nucleotides. In some embodiments, the antisense strand comprises or consists of about 15, 16, 17, 18, 19, 20, 21, 22, 23, 24, 25, 26, 27, 28, 29, or 30 nucleotides. In some embodiments, the antisense strand comprises or consists of about 21 nucleotides. In some embodiments, the antisense strand comprises or consists of about 23 nucleotides. In preferred embodiments, the antisense strand comprises or consists of about 23 nucleotides. In preferred embodiments, the antisense strand comprises 23 nucleotides. In preferred embodiments, the antisense strand consists of 23 nucleotides. Ranges and lengths intermediate to the above recited ranges and lengths are also contemplated to be part of the disclosure.

### 4.2.1.3 Exemplary Antisense Strands

[0209] In some embodiments, the nucleotide sequence of the antisense strand differs by no more than 5 (e.g., 0, 1, 2, 3, 4, or 5) nucleotides from the nucleotide sequence of any one of the antisense strands set forth in any one of Tables 2-5 (e.g., Table 3 or 5). In some embodiments, the nucleotide sequence of the antisense strand differs by no more than 3 (e.g., 0, 1, 2, or 3) nucleotides from the nucleotide sequence of any one of the antisense strands set forth in any one of Tables 2-5 (e.g., Table 3 or 5). In some embodiments, the nucleotide sequence of the antisense strand differs by no more than 2 (e.g., 0, 1, or 2) nucleotides from the nucleotide sequence of any one of the antisense strands set forth in any one of Tables 2-5 (e.g., Table 3 or 5). In some embodiments, the nucleotide sequence of the antisense strand differs by no more than 1 (e.g., 0 or 1) nucleotide from the nucleotide sequence of any one of the antisense strands set forth in any one of Tables 2-5 (e.g., Table 3 or 5).

[0210] In some embodiments, the nucleotide sequence of the antisense strand comprises the nucleotide sequence of any one of the antisense strands set forth in any one of Tables 2-5 (e.g., Table 3 or 5) differing by no more than 5 (e.g., 0, 1, 2, 3, 4, or 5) nucleotides from the antisense strand set forth in any one of Tables 2-5 (e.g., Table 3 or 5). In some embodiments, the nucleotide sequence of the antisense strand comprises the nucleotide sequence of any one of the antisense strands set forth in any one of Tables 2-5 (e.g., Table 3 or 5) differing by no more than 3 (e.g., 0, 1, 2, or 3) nucleotides from the antisense strand set forth in any one of Tables 2-5 (e.g., Table 3 or 5). In some embodiments, the nucleotide sequence of the antisense strand comprises the nucleotide sequence of any one of the antisense strands set forth in any one of Tables 2-5 (e.g., Table 3 or 5) differing by no more than 2 (e.g., 0, 1, or 2) nucleotides from the antisense strand set forth in any one of Tables 2-5 (e.g., Table 3 or 5). In some embodiments, the nucleotide sequence of the antisense strand comprises the nucleotide sequence of any one of the antisense strands set forth in any one of Tables 2-5 (e.g., Table 3 or 5) differing by no more than 1 (e.g., 0 or 1) nucleotide from the antisense strand set forth in any one of Tables 2-5 (e.g., Table 3 or 5).

[0211] In some embodiments, the nucleotide sequence of the antisense strand is at least 85%, 86%, 87%, 88%, 89%, 90%, 91%, 92%, 93%, 94%, 95%, 96%, 97%, 98%, 99% or 100% identical to the nucleotide sequence of any one of the antisense strands set forth in any one of Tables 2-5 (e.g., Table 3 or 5). In some embodiments, the nucleotide sequence of the antisense strand is at least 90%, 91%, 92%, 93%, 94%, 95%, 96%, 97%, 98%, 99% or 100% identical to the nucleotide sequence of any one of the antisense strands set forth in any one of Tables 2-5 (e.g., Table 3 or 5). In some embodiments, the nucleotide sequence of the antisense strand is at least 95%, 96%, 97%, 98%, 99% or 100% identical to the nucleotide sequence of any one of the antisense strands set forth in any one of Tables 2-5 (e.g., Table 3 or 5). In some embodiments, the nucleotide sequence of the antisense strand is at least 96%, 97%, 98%, 99% or 100% identical to the nucleotide sequence of any one of the antisense strands set forth in any one of Tables 2-5 (e.g., Table 3 or 5). In some embodiments, the nucleotide sequence of the antisense strand is at least 97%, identical to the nucleotide sequence of any one of the antisense strands set forth in any one of Tables 2-5 (e.g., Table 3 or 5). In some embodiments, the nucleotide sequence of the antisense strand is at least 98% identical to the nucleotide sequence of any one of the antisense strands set forth in any one of Tables 2-5 (e.g., Table 3 or 5). In some embodiments, the nucleotide sequence of the antisense strand is at least 99% identical to the nucleotide sequence of any one of the antisense strands set forth in any one of Tables 2-5 (e.g., Table 3 or 5). In some embodiments, the nucleotide sequence of the antisense strand is 100% identical to the nucleotide sequence of any one of the antisense strands set forth in any one of Tables 2-5 (e.g., Table 3 or 5).

[0212] In some embodiments, the nucleotide sequence of the antisense strand comprises the nucleotide sequence of any one of the antisense strands set forth in any one of Tables 2-5 (e.g., Table 3 or 5). In some embodiments, the nucleotide sequence of the antisense strand consists of the nucleotide sequence of any one of the antisense strands set forth in any one of Tables 2-5 (e.g., Table 3 or 5).

[0213] Tables 2-5 (e.g., Table 3 or 5) further identify the target nucleic acid molecule within the cited reference BCL11A mRNA transcript (SEQ ID NO: 1) targeted by each of the antisense strands. As such, the disclosure further provides antisense strands wherein the nucleotide sequence of the antisense strand differs by no more than 5 (e.g., 0, 1, 2, 3, 4, or 5 (e.g., no more than 3 (e.g., 0, 1, 2, or 3))) nucleotides from the nucleotide sequence of any one of the antisense strands set forth in any one of Tables 2-5 (e.g., Table 3 or 5) and further comprising additional nucleotide sequences (e.g., comprising from about 1-10, 1-9, 1-8, 1-7, 1-6, 1-5, 1-4, 1-3, or 1-2 nucleotides) at least partially complementary to the region contiguous (e.g., either at the 3′ end, the 5′ end, or both the 3′ and 5′ end) of the BCL11A mRNA transcript targeted by the select antisense strand.

[0214] In some embodiments, the antisense strand comprises at least 15 (e.g., 15, 16, 17, 18, 19, 20, 21, 22, 23, 24, 25, 26, 27, 28, 29, 30 (e.g., 19, 20, 21, 22, 23 (e.g., 23))) contiguous nucleotides differing by no more than 3 (e.g., 0, 1, 2, or 3) nucleotides from the nucleotide sequence of any one of the antisense strands set forth in any one of Tables 2-5 (e.g., Table 3 or 5). In some embodiments, the antisense strand comprises at least 19 (e.g., 20, 21, 22, 23, 24, 25, 26, 27, 28, 29, 30 (e.g., 19, 20, 21, 22, 23 (e.g., 23))) contiguous nucleotides differing by no more than 3 (e.g., 0, 1, 2, or 3) nucleotides from the nucleotide sequence of any one of the antisense strands set forth in any one of Tables 2-5 (e.g., Table 3 or 5). In some embodiments, the antisense strand comprises at least 21 (e.g., 22, 23, 24, 25, 26, 27, 28, 29, 30 (e.g., 21, 22, 23 (e.g., 23))) contiguous nucleotides differing by no more than 3 (e.g., 0, 1, 2, or 3) nucleotides from the nucleotide sequence of any one of the antisense strands set forth in any one of Tables 2-5 (e.g., Table 3 or 5). In some embodiments, the antisense strand comprises at least 23 (e.g., 24, 25, 26, 27, 28, 29, 30) contiguous nucleotides differing by no more than 3 (e.g., 0, 1, 2, or 3) nucleotides from the nucleotide sequence of any one of the antisense strands set forth in any one of Tables 2-5 (e.g., Table 3 or 5).

[0215] In some embodiments, the antisense strand comprises from about 15-23 (e.g., 15-22, 15-21, 15-20, 15-19, 15-18, 15-17, 15-16, 16-22, 16-20, 16-19, 16-18, 16-17, 17-23, 17-22, 17-21, 17-20, 17-19, 17-18, 18-23, 18-22, 18-21, 18-20, 18-19, 19-23, 19-22, 19-21, 19-20, 20-23, 20-22, 20-21, 21-23, 21-22, 22-23) contiguous nucleotides differing by no more than 3 (e.g., 0, 1, 2, or 3) nucleotides from the nucleotide sequence of any one of the antisense strands set forth in any one of Tables 2-5 (e.g., Table 3 or 5). In some embodiments, the antisense strand comprises from about 19-23 (e.g., 19-22, 19-21, 19-20, 20-23, 20-22, 20-21, 21-23, 21-22, 22-23) contiguous nucleotides differing by no more than 3 (e.g., 0, 1, 2, or 3) nucleotides from the nucleotide sequence of any one of the antisense strands set forth in any one of Tables 2-5 (e.g., Table 3 or 5). In some embodiments, the antisense strand comprises from about 21-23 (e.g., 21-22, 22-23) contiguous nucleotides differing by no more than 3 (e.g., 0, 1, 2, or 3) nucleotides from the nucleotide sequence of any one of the antisense strands set forth in any one of Tables 2-5 (e.g., Table 3 or 5).

[0216] In some embodiments, the nucleotide sequence of the antisense strand comprises the nucleotide sequence of any one of the antisense strands set forth in any one of Tables 2-5 (e.g., Table 3 or 5) differing by no more than 3 (e.g., 0, 1, 2, or 3) nucleotides from the antisense strand set forth in any one of Tables 2-5 (e.g., Table 3 or 5). In some embodiments, the nucleotide sequence of the antisense strand comprises the nucleotide sequence of any one of the antisense strands set forth in any one of Tables 2-5 (e.g., Table 3 or 5).

[0217] Tables 2-5 further identify the target nucleic acid molecule within the cited reference BCL11A mRNA transcript (SEQ ID NO: 1) targeted by each of the antisense strands. As such, the disclosure further provides antisense strands comprising at least 15 (e.g., 15, 16, 17, 18, 19, 20, 21, 22, 23, 24, 25, 26, 27, 28, 29, 30 (e.g., 19, 20, 21, 22, 23 (e.g., 23))) contiguous nucleotides differing by no more than 3 (e.g., 0, 1, 2, or 3) nucleotides from the nucleotide sequence of any one of the antisense strands set forth in any one of Tables 2-5 (e.g., Table 3 or 5) and further comprising additional nucleotide sequences (e.g., comprising from about 1-10, 1-9, 1-8, 1-7, 1-6, 1-5, 1-4, 1-3, or 1-2 nucleotides) at least partially complementary to the region contiguous (e.g., either at the 3′ end, the 5′ end, or both the 3′ and 5′ end) of the BCL11A mRNA transcript targeted by the select antisense strand.

[0218] In some embodiments, the nucleotide sequence of the antisense strand differs by no more than 5 (e.g., 0, 1, 2, 3, 4, or 5) nucleotides from the nucleotide sequence set forth in any one of SEQ ID NOS: 4-1576 (e.g., any one of SEQ ID NOS: 4-19 or 772-787). In some embodiments, the nucleotide sequence of the antisense strand differs by no more than 3 (e.g., 0, 1, 2, or 3) nucleotides from the nucleotide sequence set forth in any one of SEQ ID NOS: 4-1576 (e.g., any one of SEQ ID NOS: 4-19 or 772-787). In some embodiments, the nucleotide sequence of the antisense strand differs by no more than 2 (e.g., 0, 1, or 2) nucleotides from the nucleotide sequence set forth in any one of SEQ ID NOS: 4-1576 (e.g., any one of SEQ ID NOS: 4-19 or 772-787). In some embodiments, the nucleotide sequence of the antisense strand differs by no more than 1 (e.g., 0 or 1) nucleotide from the nucleotide sequence set forth in any one of SEQ ID NOS: 4-1576 (e.g., any one of SEQ ID NOS: 4-19 or 772-787).

[0219] In some embodiments, the nucleotide sequence of the antisense strand comprises the nucleotide sequence set forth in any one of SEQ ID NOS: 4-1576 (e.g., any one of SEQ ID NOS: 4-19 or 772-787) differing by no more than 5 (e.g., 0, 1, 2, 3, 4, or 5) nucleotides from the nucleotide sequence set forth in any one of SEQ ID NOS: 4-1576 (e.g., any one of SEQ ID NOS: 4-19 or 772-787). In some embodiments, the nucleotide sequence of the antisense strand comprises the nucleotide sequence set forth in any one of SEQ ID NOS: 4-1576 (e.g., any one of SEQ ID NOS: 4-19 or 772-787) differing by no more than 3 (e.g., 0, 1, 2, or 3) nucleotides from the nucleotide sequence set forth in any one of SEQ ID NOS: 4-1576 (e.g., any one of SEQ ID NOS: 4-19 or 772-787). In some embodiments, the nucleotide sequence of the antisense strand comprises the nucleotide sequence set forth in any one of SEQ ID NOS: 4-1576 (e.g., any one of SEQ ID NOS: 4-19 or 772-787) differing by no more than 2 (e.g., 0, 1, or 2) nucleotides from the nucleotide sequence set forth in any one of SEQ ID NOS: 4-1576 (e.g., any one of SEQ ID NOS: 4-19 or 772-787). In some embodiments, the nucleotide sequence of the antisense strand comprises the nucleotide sequence set forth in any one of SEQ ID NOS: 4-1576 (e.g., any one of SEQ ID NOS: 4-19 or 772-787) differing by no more than 1 (e.g., 0 or 1) nucleotide from the nucleotide sequence set forth in any one of SEQ ID NOS: 4-1576 (e.g., any one of SEQ ID NOS: 4-19 or 772-787).

[0220] In some embodiments, the nucleotide sequence of the antisense strand is at least 85%, 86%, 87%, 88%, 89%, 90%, 91%, 92%, 93%, 94%, 95%, 96%, 97%, 98%, 99% or 100% identical to the nucleotide sequence set forth in any one of SEQ ID NOS: 4-1576 (e.g., any one of SEQ ID NOS: 4-19 or 772-787). In some embodiments, the nucleotide sequence of the antisense strand is at least 90%, 91%, 92%, 93%, 94%, 95%, 96%, 97%, 98%, 99% or 100% identical to the nucleotide sequence set forth in any one of SEQ ID NOS: 4-1576 (e.g., any one of SEQ ID NOS: 4-19 or 772-787). In some embodiments, the nucleotide sequence of the antisense strand is at least 95%, 96%, 97%, 98%, 99% or 100% identical to the nucleotide sequence set forth in any one of SEQ ID NOS: 4-1576 (e.g., any one of SEQ ID NOS: 4-19 or 772-787). In some embodiments, the nucleotide sequence of the antisense strand is at least 96%, 97%, 98%, 99% or 100% identical to the nucleotide sequence set forth in any one of SEQ ID NOS: 4-1576 (e.g., any one of SEQ ID NOS: 4-19 or 772-787). In some embodiments, the nucleotide sequence of the antisense strand is at least 97%, identical to the nucleotide sequence set forth in any one of SEQ ID NOS: 4-1576 (e.g., any one of SEQ ID NOS: 4-19 or 772-787). In some embodiments, the nucleotide sequence of the antisense strand is at least 98% identical to the nucleotide sequence set forth in any one of SEQ ID NOS: 4-1576 (e.g., any one of SEQ ID NOS: 4-19 or 772-787). In some embodiments, the nucleotide sequence of the antisense strand is at least 99% identical to the nucleotide sequence set forth in any one of SEQ ID NOS: 4-1576 (e.g., any one of SEQ ID NOS: 4-19 or 772-787). In some embodiments, the nucleotide sequence of the antisense strand is 100% identical to the nucleotide sequence set forth in any one of SEQ ID NOS: 4-1576 (e.g., any one of SEQ ID NOS: 4-19 or 772-787).

[0221] In some embodiments, the nucleotide sequence of the antisense strand comprises the nucleotide sequence set forth in any one of SEQ ID NOS: 4-1576 (e.g., any one of SEQ ID NOS: 4-19 or 772-787). In some embodiments, the nucleotide sequence of the antisense strand consists of the nucleotide sequence set forth in any one of SEQ ID NOS: 4-1576 (e.g., any one of SEQ ID NOS: 4-19 or 772-787).

[0222] Tables 2-5 further identify the target nucleic acid molecule within the cited reference BCL11A mRNA transcript (SEQ ID NO: 1) targeted by each of the antisense strands. As such, the disclosure further provides antisense strands wherein the nucleotide sequence of the antisense strand differs by no more than 5 (e.g., 0, 1, 2, 3, 4, or 5 (e.g., no more than 3 (e.g., 0, 1, 2, or 3))) nucleotides from the nucleotide sequence set forth in any one of SEQ ID NOS: 4-1576 (e.g., any one of SEQ ID NOS: 4-19 or 772-787) and further comprising additional nucleotide sequences (e.g., comprising from about 1-10, 1-9, 1-8, 1-7, 1-6, 1-5, 1-4, 1-3, or 1-2 nucleotides) at least partially complementary to the region contiguous (e.g., either at the 3′ end, the 5′ end, or both the 3′ and 5′ end) of the BCL11A mRNA transcript targeted by the select antisense strand.

[0223] In some embodiments, the antisense strand comprises at least 15 (e.g., 15, 16, 17, 18, 19, 20, 21, 22, 23, 24, 25, 26, 27, 28, 29, 30 (e.g., 19, 20, 21, 22, 23 (e.g., 23))) contiguous nucleotides differing by no more than 3 (e.g., 0, 1, 2, or 3) nucleotides from the nucleotide sequence set forth in any one of SEQ ID NOS: 4-1576 (e.g., any one of SEQ ID NOS: 4-19 or 772-787). In some embodiments, the antisense strand comprises at least 19 (e.g., 20, 21, 22, 23, 24, 25, 26, 27, 28, 29, 30 (e.g., 19, 20, 21, 22, 23 (e.g., 23))) contiguous nucleotides differing by no more than 3 (e.g., 0, 1, 2, or 3) nucleotides from the nucleotide sequence of any one of the antisense strands set forth in SEQ ID NOS: 4-1576. In some embodiments, the antisense strand comprises at least 21 (e.g., 22, 23, 24, 25, 26, 27, 28, 29, 30 (e.g., 21, 22, 23 (e.g., 23))) contiguous nucleotides differing by no more than 3 (e.g., 0, 1, 2, or 3) nucleotides from the nucleotide sequence set forth in any one of SEQ ID NOS: 4-1576 (e.g., any one of SEQ ID NOS: 4-19 or 772-787). In some embodiments, the antisense strand comprises at least 23 (e.g., 24, 25, 26, 27, 28, 29, 30) contiguous nucleotides differing by no more than 3 (e.g., 0, 1, 2, or 3) nucleotides from the nucleotide sequence set forth in any one of SEQ ID NOS: 4-1576 (e.g., any one of SEQ ID NOS: 4-19 or 772-787).

[0224] In some embodiments, the antisense strand comprises from about 15-23 (e.g., 15-22, 15-21, 15-20, 15-19, 15-18, 15-17, 15-16, 16-22, 16-20, 16-19, 16-18, 16-17, 17-23, 17-22, 17-21, 17-20, 17-19, 17-18, 18-23, 18-22, 18-21, 18-20, 18-19, 19-23, 19-22, 19-21, 19-20, 20-23, 20-22, 20-21, 21-23, 21-22, 22-23) contiguous nucleotides differing by no more than 3 (e.g., 0, 1, 2, or 3) nucleotides from the nucleotide sequence set forth in any one of SEQ ID NOS: 4-1576 (e.g., any one of SEQ ID NOS: 4-19 or 772-787). In some embodiments, the antisense strand comprises from about 19-23 (e.g., 19-22, 19-21, 19-20, 20-23, 20-22, 20-21, 21-23, 21-22, 22-23) contiguous nucleotides differing by no more than 3 (e.g., 0, 1, 2, or 3) nucleotides from the nucleotide sequence set forth in any one of SEQ ID NOS: 4-1576 (e.g., any one of SEQ ID NOS: 4-19 or 772-787). In some embodiments, the antisense strand comprises from about 21-23 (e.g., 21-22, 22-23) contiguous nucleotides differing by no more than 3 (e.g., 0, 1, 2, or 3) nucleotides from the nucleotide sequence set forth in any one of SEQ ID NOS: 4-1576 (e.g., any one of SEQ ID NOS: 4-19 or 772-787).

[0225] In some embodiments, the nucleotide sequence of the antisense strand comprises the nucleotide sequence set forth in any one of SEQ ID NOS: 4-1576 (e.g., any one of SEQ ID NOS: 4-19 or 772-787) differing by no more than 3 (e.g., 0, 1, 2, or 3) nucleotides from the nucleotide sequence set forth in any one of SEQ ID NOS: 4-1576 (e.g., any one of SEQ ID NOS: 4-19 or 772-787). In some embodiments, the nucleotide sequence of the antisense strand comprises the nucleotide sequence set forth in any one of SEQ ID NOS: 4-1576 (e.g., any one of SEQ ID NOS: 4-19 or 772-787).

[0226] As described above, Tables 2-5 further identify the target nucleic acid molecule within the cited reference BCL11A mRNA transcript (SEQ ID NO: 1) targeted by each of the antisense strands. The disclosure further provides antisense strands comprising at least 15 (e.g., 15, 16, 17, 18, 19, 20, 21, 22, 23, 24, 25, 26, 27, 28, 29, 30 (e.g., 19, 20, 21, 22, 23 (e.g., 23))) contiguous nucleotides differing by no more than 3 (e.g., 0, 1, 2, or 3) nucleotides from the nucleotide sequence set forth in any one of SEQ ID NOS: 4-1576 (e.g., any one of SEQ ID NOS: 4-19 or 772-787) and further comprising additional nucleotide sequences (e.g., comprising from about 1-10, 1-9, 1-8, 1-7, 1-6, 1-5, 1-4, 1-3, or 1-2 nucleotides) at least partially complementary to the region contiguous (e.g., either at the 3′ end, the 5′ end, or both the 3′ and 5′ end) of the BCL11A mRNA transcript targeted by the select antisense strand.

[0227] In some embodiments, the antisense strand comprises at least 15 (e.g., 15, 16, 17, 18, 19, 20, 21, 22, 23, 24, 25, 26, 27, 28, 29, 30 (e.g., 19, 20, 21, 22, 23 (e.g., 23))) contiguous nucleotides differing by no more than 3 (e.g., 0, 1, 2, or 3) nucleotides from the nucleotide sequence of any one of the antisense strands of any one of dsRNA agents 1-1590 (e.g., one of dsRNA agents 1-16 or 770-785) set forth in any one of Tables 2-5 (e.g., Table 3 or 5). In some embodiments, the antisense strand comprises at least 19 (e.g., 20, 21, 22, 23, 24, 25, 26, 27, 28, 29, 30 (e.g., 19, 20, 21, 22, 23 (e.g., 23))) contiguous nucleotides differing by no more than 3 (e.g., 0, 1, 2, or 3) nucleotides from the nucleotide sequence of any one of the antisense strands of any one of dsRNA agents 1-1590 (e.g., one of dsRNA agents 1-16 or 770-785) set forth in any one of Tables 2-5 (e.g., Table 3 or 5). In some embodiments, the antisense strand comprises at least 21 (e.g., 22, 23, 24, 25, 26, 27, 28, 29, 30 (e.g., 21, 22, 23 (e.g., 23))) contiguous nucleotides differing by no more than 3 (e.g., 0, 1, 2, or 3) nucleotides from the nucleotide sequence of any one of the antisense strands of any one of dsRNA agents 1-1590 (e.g., one of dsRNA agents 1-16 or 770-785) set forth in any one of Tables 2-5 (e.g., Table 3 or 5). In some embodiments, the antisense strand comprises at least 23 (e.g., 24, 25, 26, 27, 28, 29, 30) contiguous nucleotides differing by no more than 3 (e.g., 0, 1, 2, or 3) nucleotides from the nucleotide sequence of any one of the antisense strands of any one of dsRNA agents 1-1590 (e.g., one of dsRNA agents 1-16 or 770-785) set forth in any one of Tables 2-5 (e.g., Table 3 or 5).

[0228] In some embodiments, the antisense strand comprises from about 15-23 (e.g., 15-22, 15-21, 15-20, 15-19, 15-18, 15-17, 15-16, 16-22, 16-20, 16-19, 16-18, 16-17, 17-23, 17-22, 17-21, 17-20, 17-19, 17-18, 18-23, 18-22, 18-21, 18-20, 18-19, 19-23, 19-22, 19-21, 19-20, 20-23, 20-22, 20-21, 21-23, 21-22, 22-23) contiguous nucleotides differing by no more than 3 (e.g., 0, 1, 2, or 3) nucleotides from the nucleotide sequence of any one of the antisense strands of any one of dsRNA agents 1-1590 (e.g., one of dsRNA agents 1-16 or 770-785) set forth in any one of Tables 2-5 (e.g., Table 3 or 5). In some embodiments, the antisense strand comprises from about 19-23 (e.g., 19-22, 19-21, 19-20, 20-23, 20-22, 20-21, 21-23, 21-22, 22-23) contiguous nucleotides differing by no more than 3 (e.g., 0, 1, 2, or 3) nucleotides from the nucleotide sequence of any one of the antisense strands of any one of dsRNA agents 1-1590 (e.g., one of dsRNA agents 1-16 or 770-785) set forth in any one of Tables 2-5 (e.g., Table 3 or 5). In some embodiments, the antisense strand comprises from about 21-23 (e.g., 21-22, 22-23) contiguous nucleotides differing by no more than 3 (e.g., 0, 1, 2, or 3) nucleotides from the nucleotide sequence of any one of the antisense strands of any one of dsRNA agents 1-1590 (e.g., one of dsRNA agents 1-16 or 770-785) set forth in any one of Tables 2-5 (e.g., Table 3 or 5).

[0229] In some embodiments, the nucleotide sequence of the antisense strand comprises the nucleotide sequence of any one of the antisense strands of any one of dsRNA agents 1-1590 (e.g., one of dsRNA agents 1-16 or 770-785) set forth in any one of Tables 2-5 (e.g., Table 3 or 5) differing by no more than 3 (e.g., 0, 1, 2, or 3) nucleotides from the antisense strand set forth in any one of Tables 2-5 (e.g., Table 3 or 5). In some embodiments, the nucleotide sequence of the antisense strand comprises the nucleotide sequence of any one of the antisense strands of any one of dsRNA agents 1-1590 (e.g., one of dsRNA agents 1-16 or 770-785) set forth in any one of Tables 2-5 (e.g., Table 3 or 5).

[0230] As described above, Tables 2-5 further identify the target nucleic acid molecule within the cited reference BCL11A mRNA transcript (SEQ ID NO: 1) targeted by each of the antisense strands. The disclosure further provides antisense strands comprising at least 15 (e.g., 15, 16, 17, 18, 19, 20, 21, 22, 23, 24, 25, 26, 27, 28, 29, 30 (e.g., 19, 20, 21, 22, 23 (e.g., 23))) contiguous nucleotides differing by no more than 3 (e.g., 0, 1, 2, or 3) nucleotides from the nucleotide sequence of any one of the antisense strands of any one of dsRNA agents 1-1590 (e.g., one of dsRNA agents 1-16 or 770-785) set forth in any one of Tables 2-5 (e.g., Table 3 or 5) and further comprising additional nucleotide sequences (e.g., comprising from about 1-10, 1-9, 1-8, 1-7, 1-6, 1-5, 1-4, 1-3, or 1-2 nucleotides) at least partially complementary to the region contiguous (e.g., either at the 3′ end, the 5′ end, or both the 3′ and 5′ end) of the BCL11A mRNA transcript targeted by the select antisense strand.

[0231] It is to be understood, that although the antisense strands set forth in any one of Tables 2-5 (e.g., Table 3 or 5) are not described as being modified (e.g., comprising chemically modified nucleotides), conjugated, etc., the disclosure includes any antisense strand set forth in any one of Tables 2-5 (e.g., Table 3 or 5) that is unmodified, unconjugated, modified (e.g., as described herein), or conjugated (e.g., as described herein).

### 4.2.2 Sense Strand

### 4.2.2.1 Antisense Strand Complementarity

[0232] As described above, sense strands (e.g., described herein) comprise a region of complementarity that comprises a nucleotide sequence that is at least partially (e.g., substantially, fully) complementary to the nucleotide sequence of at least a portion of an antisense strand. As such, pairs of sense and antisense strands can hybridize to form a double stranded region (e.g., under conditions in which the pairs will be used).

[0233] In some embodiments, the nucleotide sequence of the region of complementarity is at least substantially complementary to the nucleotide sequence of at least a portion of an antisense strand. In some embodiments, the nucleotide sequence of the region of complementarity is fully complementary to the nucleotide sequence of at least a portion of an antisense strand.

[0234] In some embodiments, the nucleotide sequence of the region of complementarity is at least 70%, 75%, 80%, 85%, 90%, 91%, 92%, 93%, 94%, 95%, 96%, 97%, 98%, 99%, or 100% complementary to the nucleotide sequence of at least a portion of an antisense strand. For example, the nucleotide sequence of the region of complementarity may be at least 70% complementary to the nucleotide sequence of at least a portion of an antisense strand. The nucleotide sequence of the region of complementarity may be at least 75% complementary to the nucleotide sequence of at least a portion of an antisense strand. The nucleotide sequence of the region of complementarity may be at least 80% complementary to the nucleotide sequence of at least a portion of an antisense strand. The nucleotide sequence of the region of complementarity may be at least 85% complementary to the nucleotide sequence of at least a portion of an antisense strand. The nucleotide sequence of the region of complementarity may be at least 90% complementary to the nucleotide sequence of at least a portion of an antisense strand. The nucleotide sequence of the region of complementarity may be at least 95% complementary to the nucleotide sequence of at least a portion of an antisense strand. In some embodiments, the nucleotide sequence of the region of complementarity is at least 80%, 85%, 90%, 91%, 92%, 93%, 94%, 95%, 96%, 97%, 98%, 99%, or 100% complementary to the nucleotide sequence of at least a portion of an antisense strand. In some embodiments, the nucleotide sequence of the region of complementarity is at least 95%, 96%, 97%, 98%, 99%, or 100% complementary to the nucleotide sequence of at least a portion of an antisense strand.

[0235] In some embodiments, the nucleotide sequence of the region of complementarity comprises or consists of one or more non-complementary nucleotide mismatches relative to the nucleotide sequence of the at least a portion of an antisense strand. In some embodiments, the nucleotide sequence of the region of complementarity comprises or consists of no more than 5 (e.g., 4, 3, 2, 1, or 0) non-complementary nucleotide mismatches relative to the nucleotide sequence of the at least a portion of an antisense strand. In some embodiments, the nucleotide sequence of the region of complementarity comprises or consists of no more than 3 (e.g., 2, 1, or 0) non-complementary nucleotide mismatches relative to the nucleotide sequence of the at least a portion of an antisense strand. In some embodiments, the nucleotide sequence of the region of complementarity comprises or consists of no more than 2 (e.g., 1 or 0) non-complementary nucleotide mismatches relative to the nucleotide sequence of the at least a portion of an antisense strand. In some embodiments, the nucleotide sequence of the region of complementarity comprises or consists of no more than 1 (e.g., 0) non-complementary nucleotide mismatches relative to the nucleotide sequence of the at least a portion of an antisense strand. In some embodiments, the nucleotide sequence of the region of complementarity comprises 0 non-complementary nucleotide mismatches relative to the nucleotide sequence of the at least a portion of an antisense strand. In some embodiments, the region of complementarity comprises one or more (e.g., 2, 3, or more) non-complementary nucleotide mismatches relative to the nucleotide sequence of the at least a portion of an antisense strand, wherein the one or more non-complementary nucleotide mismatch is within the last 5 (e.g., 4, 3, 2, or 1) nucleotides from either the 5′- and/or 3′-end of the region of complementarity. In some embodiments, the region of complementarity comprises at least one but not more than 3 (e.g., 1, 2, or 3) non-complementary nucleotide mismatches relative to the nucleotide sequence of the at least a portion of an antisense strand, wherein the one or more non-complementary nucleotide mismatch is within the last 5 (e.g., 4, 3, 2, or 1) nucleotides from either the 5′- and/or 3′-end of the region of complementarity.

[0236] In some embodiments, the region of complementarity comprises from about 15-30 nucleotides, e.g., 15-29, 15-28, 15-27, 15-26, 15-25, 15-24, 15-23, 15-22, 15-21, 15-20, 15-19, 15-18, 15-17, 18-30, 18-29, 18-28, 18-27, 18-26, 18-25, 18-24, 18-23, 18-22, 18-21, 18-20, 19-30, 19-29, 19-28, 19-27, 19-26, 19-25, 19-24, 19-23, 19-22, 19-21, 19-20, 20-30, 20-29, 20-28, 20-27, 20-26, 20-25, 20-24, 20-23, 20-22, 20-21, 21-30, 21-29, 21-28, 21-27, 21-26, 21-25, 21-24, 21-23, or 21-22 nucleotides. In some embodiments, the region of complementarity comprises from about 18-25, 18-24, 18-23, 18-22, 18-21, 18-20, 19-25, 19-24, 19-23, 19-22, 19-21, 19-20, 20-25, 20-24, 20-23, 20-22, 20-21, 21-25, 21-24, 21-23, 21-22, 22-25, 22-24, 22-23, 23-25, 23-24 or 24-25 nucleotides. In some embodiments, the region of complementarity comprises from about 19-21 (e.g., 19-20) nucleotides. In some embodiments, the region of complementarity comprises or consists of about 15, 16, 17, 18, 19, 20, 21, 22, 23, 24, 25, 26, 27, 28, 29, or 30 nucleotides. In some embodiments, the region of complementarity comprises or consists of about 19, 20, or 21 nucleotides. In some embodiments, the region of complementarity comprises or consists of about 19 nucleotides. In some embodiments, the region of complementarity comprises or consists of about 20 nucleotides. In some embodiments, the region of complementarity comprises or consists of about 21 nucleotides. Ranges and lengths intermediate to the above recited ranges and lengths are also contemplated to be part of the disclosure.

### 4.2.2.2 Overall Length

[0237] In some embodiments, the sense strand comprises or consists of from about 15-30 nucleotides (e.g., 15-29, 15-28, 15-27, 15-26, 15-25, 15-24, 15-23, 15-22, 15-21, 15-20, 15-19, 15-18, 15-17, 18-30, 18-29, 18-28, 18-27, 18-26, 18-25, 18-24, 18-23, 18-22, 18-21, 18-20, 19-30, 19-29, 19-28, 19-27, 19-26, 19-25, 19-24, 19-23, 19-22, 19-21, 19-20, 20-30, 20-29, 20-28, 20-27, 20-26, 20-25, 20-24, 20-23, 20-22, 20-21, 21-30, 21-29, 21-28, 21-27, 21-26, 21-25, 21-24, 21-23, or 21-22 nucleotides). In some embodiments, the sense strand comprises or consists of from about 18-25 nucleotides (e.g., 18-24, 18-23, 18-22, 18-21, 18-20, 19-25, 19-24, 19-23, 19-22, 19-21, 19-20, 20-25, 20-24, 20-23, 20-22, 20-21, 21-25, 21-24, 21-23, 21-22, 22-25, 22-24, 22-23, 23-25, 23-24 or 24-25 nucleotides). In some embodiments, the sense strand comprises or consists of from about 19-25 nucleotide (e.g., 19-20, 19-21, 19-22, 19-23, 19-24, 19-25, 20-21, 20-22, 20-23, 20-24, 20-25, 21-22, 21-23, 21-24, 21-25, 22-23, 22-24, 22-25, 23-24, 23-25, 24-25 nucleotides). In some embodiments, the sense strand comprises or consists of from about 15-30, 16-30, 17-30, 18-30, 19-30 20-30, 21-30, 22-30, 23-30, 24-30, 25-30, 36-30, 27-30, 28-30-, 29-30, 19-20, 19-21, 19-22, 19-23, 19-24, or 19-25 nucleotides.

[0238] In some embodiments, the sense strand comprises or consists of not more than about 15, 16, 17, 18, 19, 20, 21, 22, 23, 24, 25, 26, 27, 28, 29, or 30 nucleotides. In some embodiments, the sense strand comprises or consists of about 15, 16, 17, 18, 19, 20, 21, 22, 23, 24, 25, 26, 27, 28, 29, or 30 nucleotides. In some embodiments, the sense strand comprises or consists of about 19, 20, 21, 22, 23 nucleotides. In some embodiments, the sense strand comprises or consists of about 19, 20, 21 nucleotides. In some embodiments, the sense strand comprises or consists of about 20 nucleotides. In some embodiments, the sense strand comprises or consists of about 21 nucleotides. In some embodiments, the sense strand comprises or consists of about 21 nucleotides. In preferred embodiments, the sense strand comprises or consists of about 21 nucleotides. In preferred embodiments, the sense strand comprises 21 nucleotides. In preferred embodiments, the sense strand consists of 21 nucleotides. In some embodiments, the sense strand comprises or consists of about 23 nucleotides. Ranges and lengths intermediate to the above recited ranges and lengths are also contemplated to be part of the disclosure.

### 4.2.2.3 Exemplary Sense Strands

[0239] In some embodiments, the nucleotide sequence of the sense strand differs by no more than 5 (e.g., 0, 1, 2, 3, 4, or 5) nucleotides from the nucleotide sequence of any one of the sense strands set forth in any one of Tables 2-5 (e.g., Table 3 or 5). In some embodiments, the nucleotide sequence of the sense strand differs by no more than 3 (e.g., 0, 1, 2, or 3) nucleotides from the nucleotide sequence of any one of the sense strands set forth in any one of Tables 2-5 (e.g., Table 3 or 5). In some embodiments, the nucleotide sequence of the sense strand differs by no more than 2 (e.g., 0, 1, or 2) nucleotides from the nucleotide sequence of any one of the sense strands set forth in any one of Tables 2-5 (e.g., Table 3 or 5). In some embodiments, the nucleotide sequence of the sense strand differs by no more than 1 (e.g., 0 or 1) nucleotide from the nucleotide sequence of any one of the sense strands set forth in any one of Tables 2-5 (e.g., Table 3 or 5).

[0240] In some embodiments, the nucleotide sequence of the sense strand comprises the nucleotide sequence of any one of the sense strands set forth in any one of Tables 2-5 (e.g., Table 3 or 5) differing by no more than 5 (e.g., 0, 1, 2, 3, 4, or 5) nucleotides from the sense strand set forth in any one of Tables 2-5 (e.g., Table 3 or 5). In some embodiments, the nucleotide sequence of the sense strand comprises the nucleotide sequence of any one of the sense strands set forth in any one of Tables 2-5 (e.g., Table 3 or 5) differing by no more than 3 (e.g., 0, 1, 2, or 3) nucleotides from the sense strand set forth in any one of Tables 2-5 (e.g., Table 3 or 5). In some embodiments, the nucleotide sequence of the sense strand comprises the nucleotide sequence of any one of the sense strands set forth in any one of Tables 2-5 (e.g., Table 3 or 5) differing by no more than 2 (e.g., 0, 1, or 2) nucleotides from the sense strand set forth in any one of Tables 2-5 (e.g., Table 3 or 5). In some embodiments, the nucleotide sequence of the sense strand comprises the nucleotide sequence of any one of the sense strands set forth in any one of Tables 2-5 (e.g., Table 3 or 5) differing by no more than 1 (e.g., 0 or 1) nucleotide from the sense strand set forth in any one of Tables 2-5 (e.g., Table 3 or 5).

[0241] In some embodiments, the nucleotide sequence of the sense strand is at least 85%, 86%, 87%, 88%, 89%, 90%, 91%, 92%, 93%, 94%, 95%, 96%, 97%, 98%, 99% or 100% identical to the nucleotide sequence of any one of the sense strands set forth in any one of Tables 2-5 (e.g., Table 3 or 5). In some embodiments, the nucleotide sequence of the sense strand is at least 90%, 91%, 92%, 93%, 94%, 95%, 96%, 97%, 98%, 99% or 100% identical to the nucleotide sequence of any one of the sense strands set forth in any one of Tables 2-5 (e.g., Table 3 or 5). In some embodiments, the nucleotide sequence of the sense strand is at least 95%, 96%, 97%, 98%, 99% or 100% identical to the nucleotide sequence of any one of the sense strands set forth in any one of Tables 2-5 (e.g., Table 3 or 5). In some embodiments, the nucleotide sequence of the sense strand is at least 96%, 97%, 98%, 99% or 100% identical to the nucleotide sequence of any one of the sense strands set forth in any one of Tables 2-5 (e.g., Table 3 or 5). In some embodiments, the nucleotide sequence of the sense strand is at least 97%, identical to the nucleotide sequence of any one of the sense strands set forth in any one of Tables 2-5 (e.g., Table 3 or 5). In some embodiments, the nucleotide sequence of the sense strand is at least 98% identical to the nucleotide sequence of any one of the sense strands set forth in any one of Tables 2-5 (e.g., Table 3 or 5). In some embodiments, the nucleotide sequence of the sense strand is at least 99% identical to the nucleotide sequence of any one of the sense strands set forth in any one of Tables 2-5 (e.g., Table 3 or 5). In some embodiments, the nucleotide sequence of the sense strand is 100% identical to the nucleotide sequence of any one of the sense strands set forth in any one of Tables 2-5 (e.g., Table 3 or 5).

[0242] In some embodiments, the nucleotide sequence of the sense strand comprises the nucleotide sequence of any one of the sense strands set forth in any one of Tables 2-5 (e.g., Table 3 or 5). In some embodiments, the nucleotide sequence of the sense strand consists of the nucleotide sequence of any one of the sense strands set forth in any one of Tables 2-5 (e.g., Table 3 or 5).

[0243] Tables 2-5 further identify the target nucleic acid molecule within the cited reference BCL11A mRNA transcript (SEQ ID NO: 1) targeted by each of the sense strands. As such, the disclosure further provides sense strands wherein the nucleotide sequence of the sense strand differs by no more than 5 (e.g., 0, 1, 2, 3, 4, or 5 (e.g., no more than 3 (e.g., 0, 1, 2, or 3))) nucleotides from the nucleotide sequence of any one of the sense strands set forth in any one of Tables 2-5 (e.g., Table 3 or 5) and further comprising additional nucleotide sequences (e.g., comprising from about 1-10, 1-9, 1-8, 1-7, 1-6, 1-5, 1-4, 1-3, or 1-2 nucleotides) at least partially complementary to the region contiguous (e.g., either at the 3′ end, the 5′ end, or both the 3′ and 5′ end) of the BCL11A mRNA transcript targeted by the select sense strand.

[0244] In some embodiments, the sense strand comprises at least 15 (e.g., 15, 16, 17, 18, 19, 20, 21, 22, 23, 24, 25, 26, 27, 28, 29, 30 (e.g., 19, 20, 21, 22, 23 (e.g., 23))) contiguous nucleotides differing by no more than 3 (e.g., 0, 1, 2, or 3) nucleotides from the nucleotide sequence of any one of the sense strands set forth in any one of Tables 2-5 (e.g., Table 3 or 5). In some embodiments, the sense strand comprises at least 19 (e.g., 20, 21, 22, 23, 24, 25, 26, 27, 28, 29, 30 (e.g., 19, 20, 21, 22, 23 (e.g., 23))) contiguous nucleotides differing by no more than 3 (e.g., 0, 1, 2, or 3) nucleotides from the nucleotide sequence of any one of the sense strands set forth in any one of Tables 2-5 (e.g., Table 3 or 5). In some embodiments, the sense strand comprises at least 21 (e.g., 22, 23, 24, 25, 26, 27, 28, 29, 30 (e.g., 21, 22, 23 (e.g., 23))) contiguous nucleotides differing by no more than 3 (e.g., 0, 1, 2, or 3) nucleotides from the nucleotide sequence of any one of the sense strands set forth in any one of Tables 2-5 (e.g., Table 3 or 5). In some embodiments, the sense strand comprises at least 23 (e.g., 24, 25, 26, 27, 28, 29, 30) contiguous nucleotides differing by no more than 3 (e.g., 0, 1, 2, or 3) nucleotides from the nucleotide sequence of any one of the sense strands set forth in any one of Tables 2-5 (e.g., Table 3 or 5).

[0245] In some embodiments, the sense strand comprises from about 15-23 (e.g., 15-22, 15-21, 15-20, 15-19, 15-18, 15-17, 15-16, 16-22, 16-20, 16-19, 16-18, 16-17, 17-23, 17-22, 17-21, 17-20, 17-19, 17-18, 18-23, 18-22, 18-21, 18-20, 18-19, 19-23, 19-22, 19-21, 19-20, 20-23, 20-22, 20-21, 21-23, 21-22, 22-23) contiguous nucleotides differing by no more than 3 (e.g., 0, 1, 2, or 3) nucleotides from the nucleotide sequence of any one of the sense strands set forth in any one of Tables 2-5 (e.g., Table 3 or 5). In some embodiments, the sense strand comprises from about 19-23 (e.g., 19-22, 19-21, 19-20, 20-23, 20-22, 20-21, 21-23, 21-22, 22-23) contiguous nucleotides differing by no more than 3 (e.g., 0, 1, 2, or 3) nucleotides from the nucleotide sequence of any one of the sense strands set forth in any one of Tables 2-5 (e.g., Table 3 or 5). In some embodiments, the sense strand comprises from about 21-23 (e.g., 21-22, 22-23) contiguous nucleotides differing by no more than 3 (e.g., 0, 1, 2, or 3) nucleotides from the nucleotide sequence of any one of the sense strands set forth in any one of Tables 2-5 (e.g., Table 3 or 5).

[0246] In some embodiments, the nucleotide sequence of the sense strand comprises the nucleotide sequence of any one of the sense strands set forth in any one of Tables 2-5 (e.g., Table 3 or 5) differing by no more than 3 (e.g., 0, 1, 2, or 3) nucleotides from the sense strand set forth in any one of Tables 2-5 (e.g., Table 3 or 5). In some embodiments, the nucleotide sequence of the sense strand comprises the nucleotide sequence of any one of the sense strands set forth in any one of Tables 2-5 (e.g., Table 3 or 5).

[0247] Tables 2-5 further identify the target nucleic acid molecule within the reference BCL11A mRNA transcript at least partially identical to each of the sense strands. As such, the disclosure further provides sense strands comprising at least 15 (e.g., 15, 16, 17, 18, 19, 20, 21, 22, 23, 24, 25, 26, 27, 28, 29, 30 (e.g., 19, 20, 21, 22, 23 (e.g., 23))) contiguous nucleotides differing by no more than 3 (e.g., 0, 1, 2, or 3) nucleotides from the nucleotide sequence of any one of the sense strands set forth in any one of Tables 2-5 (e.g., Table 3 or 5) and further comprising additional nucleotide sequences (e.g., comprising from about 1-10, 1-9, 1-8, 1-7, 1-6, 1-5, 1-4, 1-3, or 1-2 nucleotides) at least partially identical to the region contiguous (e.g., either at the 3′ end, the 5′ end, or both the 3′ and 5′ end) of the BCL11A mRNA transcript identical to the select sense strand.

[0248] In some embodiments, the nucleotide sequence of the sense strand differs by no more than 5 (e.g., 0, 1, 2, 3, 4, or 5) nucleotides from the nucleotide sequence set forth in any one of SEQ ID NOS: 1577-3166 (e.g., any one of SEQ ID NOS: 1577-1592 or 2346-2361). In some embodiments, the nucleotide sequence of the sense strand differs by no more than 3 (e.g., 0, 1, 2, or 3) nucleotides from the nucleotide sequence set forth in any one of SEQ ID NOS: 1577-3166 (e.g., any one of SEQ ID NOS: 1577-1592 or 2346-2361). In some embodiments, the nucleotide sequence of the sense strand differs by no more than 2 (e.g., 0, 1, or 2) nucleotides from the nucleotide sequence set forth in any one of SEQ ID NOS: 1577-3166 (e.g., any one of SEQ ID NOS: 1577-1592 or 2346-2361). In some embodiments, the nucleotide sequence of the sense strand differs by no more than 1 (e.g., 0 or 1) nucleotide from the nucleotide sequence set forth in any one of SEQ ID NOS: 1577-3166 (e.g., any one of SEQ ID NOS: 1577-1592 or 2346-2361).

[0249] In some embodiments, the nucleotide sequence of the sense strand comprises the nucleotide sequence set forth in any one of SEQ ID NOS: 1577-3166 (e.g., any one of SEQ ID NOS: 1577-1592 or 2346-2361) differing by no more than 5 (e.g., 0, 1, 2, 3, 4, or 5) nucleotides from the nucleotide sequence set forth in any one of SEQ ID NOS: 1577-3166 (e.g., any one of SEQ ID NOS: 1577-1592 or 2346-2361). In some embodiments, the nucleotide sequence of the sense strand comprises the nucleotide sequence set forth in any one of SEQ ID NOS: 1577-3166 (e.g., any one of SEQ ID NOS: 1577-1592 or 2346-2361) differing by no more than 3 (e.g., 0, 1, 2, or 3) nucleotides from the nucleotide sequence set forth in any one of SEQ ID NOS: 1577-3166 (e.g., any one of SEQ ID NOS: 1577-1592 or 2346-2361). In some embodiments, the nucleotide sequence of the sense strand comprises the nucleotide sequence set forth in any one of SEQ ID NOS: 1577-3166 (e.g., any one of SEQ ID NOS: 1577-1592 or 2346-2361) differing by no more than 2 (e.g., 0, 1, or 2) nucleotides from the nucleotide sequence set forth in any one of SEQ ID NOS: 1577-3166 (e.g., any one of SEQ ID NOS: 1577-1592 or 2346-2361). In some embodiments, the nucleotide sequence of the sense strand comprises the nucleotide sequence set forth in any one of SEQ ID NOS: 1577-3166 (e.g., any one of SEQ ID NOS: 1577-1592 or 2346-2361) differing by no more than 1 (e.g., 0 or 1) nucleotide from the nucleotide sequence set forth in any one of SEQ ID NOS: 1577-3166 (e.g., any one of SEQ ID NOS: 1577-1592 or 2346-2361).

[0250] In some embodiments, the nucleotide sequence of the sense strand is at least 85%, 86%, 87%, 88%, 89%, 90%, 91%, 92%, 93%, 94%, 95%, 96%, 97%, 98%, 99% or 100% identical to the nucleotide sequence set forth in any one of SEQ ID NOS: 1577-3166 (e.g., any one of SEQ ID NOS: 1577-1592 or 2346-2361). In some embodiments, the nucleotide sequence of the sense strand is at least 90%, 91%, 92%, 93%, 94%, 95%, 96%, 97%, 98%, 99% or 100% identical to the nucleotide sequence set forth in any one of SEQ ID NOS: 1577-3166 (e.g., any one of SEQ ID NOS: 1577-1592 or 2346-2361). In some embodiments, the nucleotide sequence of the sense strand is at least 95%, 96%, 97%, 98%, 99% or 100% identical to the nucleotide sequence set forth in any one of SEQ ID NOS: 1577-3166 (e.g., any one of SEQ ID NOS: 1577-1592 or 2346-2361). In some embodiments, the nucleotide sequence of the sense strand is at least 96%, 97%, 98%, 99% or 100% identical to the nucleotide sequence set forth in any one of SEQ ID NOS: 1577-3166 (e.g., any one of SEQ ID NOS: 1577-1592 or 2346-2361). In some embodiments, the nucleotide sequence of the sense strand is at least 97%, identical to the nucleotide sequence set forth in any one of SEQ ID NOS: 1577-3166 (e.g., any one of SEQ ID NOS: 1577-1592 or 2346-2361). In some embodiments, the nucleotide sequence of the sense strand is at least 98% identical to the nucleotide sequence set forth in any one of SEQ ID NOS: 1577-3166 (e.g., any one of SEQ ID NOS: 1577-1592 or 2346-2361). In some embodiments, the nucleotide sequence of the sense strand is at least 99% identical to the nucleotide sequence set forth in any one of SEQ ID NOS: 1577-3166 (e.g., any one of SEQ ID NOS: 1577-1592 or 2346-2361). In some embodiments, the nucleotide sequence of the sense strand is 100% identical to the nucleotide sequence set forth in any one of SEQ ID NOS: 1577-3166 (e.g., any one of SEQ ID NOS: 1577-1592 or 2346-2361).

[0251] In some embodiments, the nucleotide sequence of the sense strand comprises the nucleotide sequence set forth in any one of SEQ ID NOS: 1577-3166 (e.g., any one of SEQ ID NOS: 1577-1592 or 2346-2361). In some embodiments, the nucleotide sequence of the sense strand consists of the nucleotide sequence set forth in any one of SEQ ID NOS: 1577-3166 (e.g., any one of SEQ ID NOS: 1577-1592 or 2346-2361).

[0252] Tables 2-5 further identify the target nucleic acid molecule within the cited reference BCL11A mRNA transcript (SEQ ID NO: 1) targeted by each of the sense strands. As such, the disclosure further provides sense strands wherein the nucleotide sequence of the sense strand differs by no more than 5 (e.g., 0, 1, 2, 3, 4, or 5 (e.g., no more than 3 (e.g., 0, 1, 2, or 3))) nucleotides from the nucleotide sequence set forth in any one of SEQ ID NOS: 1577-3166 (e.g., any one of SEQ ID NOS: 1577-1592 or 2346-2361) and further comprising additional nucleotide sequences (e.g., comprising from about 1-10, 1-9, 1-8, 1-7, 1-6, 1-5, 1-4, 1-3, or 1-2 nucleotides) at least partially complementary to the region contiguous (e.g., either at the 3′ end, the 5′ end, or both the 3′ and 5′ end) of the BCL11A mRNA transcript targeted by the select sense strand.

[0253] In some embodiments, the sense strand comprises at least 15 (e.g., 15, 16, 17, 18, 19, 20, 21, 22, 23, 24, 25, 26, 27, 28, 29, 30 (e.g., 19, 20, 21, 22, 23 (e.g., 23))) contiguous nucleotides differing by no more than 3 (e.g., 0, 1, 2, or 3) nucleotides from the nucleotide sequence set forth in any one of SEQ ID NOS: 1577-3166 (e.g., any one of SEQ ID NOS: 1577-1592 or 2346-2361). In some embodiments, the sense strand comprises at least 19 (e.g., 20, 21, 22, 23, 24, 25, 26, 27, 28, 29, 30 (e.g., 19, 20, 21, 22, 23 (e.g., 23))) contiguous nucleotides differing by no more than 3 (e.g., 0, 1, 2, or 3) nucleotides from the nucleotide sequence of any one of the sense strands set forth in SEQ ID NOS: 1577-3166. In some embodiments, the sense strand comprises at least 21 (e.g., 22, 23, 24, 25, 26, 27, 28, 29, 30 (e.g., 21, 22, 23 (e.g., 23))) contiguous nucleotides differing by no more than 3 (e.g., 0, 1, 2, or 3) nucleotides from the nucleotide sequence set forth in any one of SEQ ID NOS: 1577-3166 (e.g., any one of SEQ ID NOS: 1577-1592 or 2346-2361). In some embodiments, the sense strand comprises at least 23 (e.g., 24, 25, 26, 27, 28, 29, 30) contiguous nucleotides differing by no more than 3 (e.g., 0, 1, 2, or 3) nucleotides from the nucleotide sequence set forth in any one of SEQ ID NOS: 1577-3166 (e.g., any one of SEQ ID NOS: 1577-1592 or 2346-2361).

[0254] In some embodiments, the sense strand comprises from about 15-23 (e.g., 15-22, 15-21, 15-20, 15-19, 15-18, 15-17, 15-16, 16-22, 16-20, 16-19, 16-18, 16-17, 17-23, 17-22, 17-21, 17-20, 17-19, 17-18, 18-23, 18-22, 18-21, 18-20, 18-19, 19-23, 19-22, 19-21, 19-20, 20-23, 20-22, 20-21, 21-23, 21-22, 22-23) contiguous nucleotides differing by no more than 3 (e.g., 0, 1, 2, or 3) nucleotides from the nucleotide sequence set forth in any one of SEQ ID NOS: 1577-3166 (e.g., any one of SEQ ID NOS: 1577-1592 or 2346-2361). In some embodiments, the sense strand comprises from about 19-23 (e.g., 19-22, 19-21, 19-20, 20-23, 20-22, 20-21, 21-23, 21-22, 22-23) contiguous nucleotides differing by no more than 3 (e.g., 0, 1, 2, or 3) nucleotides from the nucleotide sequence set forth in any one of SEQ ID NOS: 1577-3166 (e.g., any one of SEQ ID NOS: 1577-1592 or 2346-2361). In some embodiments, the sense strand comprises from about 21-23 (e.g., 21-22, 22-23) contiguous nucleotides differing by no more than 3 (e.g., 0, 1, 2, or 3) nucleotides from the nucleotide sequence set forth in any one of SEQ ID NOS: 1577-3166 (e.g., any one of SEQ ID NOS: 1577-1592 or 2346-2361).

[0255] In some embodiments, the nucleotide sequence of the sense strand comprises the nucleotide sequence set forth in any one of SEQ ID NOS: 1577-3166 (e.g., any one of SEQ ID NOS: 1577-1592 or 2346-2361) differing by no more than 3 (e.g., 0, 1, 2, or 3) nucleotides from the nucleotide sequence set forth in any one of SEQ ID NOS: 1577-3166 (e.g., any one of SEQ ID NOS: 1577-1592 or 2346-2361). In some embodiments, the nucleotide sequence of the sense strand comprises the nucleotide sequence set forth in any one of SEQ ID NOS: 1577-3166 (e.g., any one of SEQ ID NOS: 1577-1592 or 2346-2361).

[0256] As described above, Tables 2-5 further identify the target nucleic acid molecule within the reference BCL11A mRNA transcript at least partially identical to each of the sense strands. As such, disclosure further provides sense strands comprising at least 15 (e.g., 15, 16, 17, 18, 19, 20, 21, 22, 23, 24, 25, 26, 27, 28, 29, 30 (e.g., 19, 20, 21, 22, 23 (e.g., 23))) contiguous nucleotides differing by no more than 3 (e.g., 0, 1, 2, or 3) nucleotides from the nucleotide sequence set forth in any one of SEQ ID NOS: 1577-3166 (e.g., any one of SEQ ID NOS: 1577-1592 or 2346-2361) and further comprising additional nucleotide sequences (e.g., comprising from about 1-10, 1-9, 1-8, 1-7, 1-6, 1-5, 1-4, 1-3, or 1-2 nucleotides) at least partially identical to the region contiguous (e.g., either at the 3′ end, the 5′ end, or both the 3′ and 5′ end) of the BCL11A mRNA transcript identical to the select sense strand.

[0257] In some embodiments, the sense strand comprises at least 15 (e.g., 15, 16, 17, 18, 19, 20, 21, 22, 23, 24, 25, 26, 27, 28, 29, 30 (e.g., 19, 20, 21, 22, 23 (e.g., 23))) contiguous nucleotides differing by no more than 3 (e.g., 0, 1, 2, or 3) nucleotides from the nucleotide sequence of any one of the sense strands of any one of dsRNA agents 1-1590 (e.g., one of dsRNA agents 1-16 or 770-785) set forth in any one of Tables 2-5 (e.g., Table 3 or 5). In some embodiments, the sense strand comprises at least 19 (e.g., 20, 21, 22, 23, 24, 25, 26, 27, 28, 29, 30 (e.g., 19, 20, 21, 22, 23 (e.g., 23))) contiguous nucleotides differing by no more than 3 (e.g., 0, 1, 2, or 3) nucleotides from the nucleotide sequence of any one of the sense strands of any one of dsRNA agents 1-1590 (e.g., one of dsRNA agents 1-16 or 770-785) set forth in any one of Tables 2-5 (e.g., Table 3 or 5). In some embodiments, the sense strand comprises at least 21 (e.g., 22, 23, 24, 25, 26, 27, 28, 29, 30 (e.g., 21, 22, 23 (e.g., 23))) contiguous nucleotides differing by no more than 3 (e.g., 0, 1, 2, or 3) nucleotides from the nucleotide sequence of any one of the sense strands of any one of dsRNA agents 1-1590 (e.g., one of dsRNA agents 1-16 or 770-785) set forth in any one of Tables 2-5 (e.g., Table 3 or 5). In some embodiments, the sense strand comprises at least 23 (e.g., 24, 25, 26, 27, 28, 29, 30) contiguous nucleotides differing by no more than 3 (e.g., 0, 1, 2, or 3) nucleotides from the nucleotide sequence of any one of the sense strands of any one of dsRNA agents 1-1590 (e.g., one of dsRNA agents 1-16 or 770-785) set forth in any one of Tables 2-5 (e.g., Table 3 or 5).

[0258] In some embodiments, the sense strand comprises from about 15-23 (e.g., 15-22, 15-21, 15-20, 15-19, 15-18, 15-17, 15-16, 16-22, 16-20, 16-19, 16-18, 16-17, 17-23, 17-22, 17-21, 17-20, 17-19, 17-18, 18-23, 18-22, 18-21, 18-20, 18-19, 19-23, 19-22, 19-21, 19-20, 20-23, 20-22, 20-21, 21-23, 21-22, 22-23) contiguous nucleotides differing by no more than 3 (e.g., 0, 1, 2, or 3) nucleotides from the nucleotide sequence of any one of the sense strands of any one of dsRNA agents 1-1590 (e.g., one of dsRNA agents 1-16 or 770-785) set forth in any one of Tables 2-5 (e.g., Table 3 or 5). In some embodiments, the sense strand comprises from about 19-23 (e.g., 19-22, 19-21, 19-20, 20-23, 20-22, 20-21, 21-23, 21-22, 22-23) contiguous nucleotides differing by no more than 3 (e.g., 0, 1, 2, or 3) nucleotides from the nucleotide sequence of any one of the sense strands of any one of dsRNA agents 1-1590 (e.g., one of dsRNA agents 1-16 or 770-785) set forth in any one of Tables 2-5 (e.g., Table 3 or 5). In some embodiments, the sense strand comprises from about 21-23 (e.g., 21-22, 22-23) contiguous nucleotides differing by no more than 3 (e.g., 0, 1, 2, or 3) nucleotides from the nucleotide sequence of any one of the sense strands of any one of dsRNA agents 1-1590 (e.g., one of dsRNA agents 1-16 or 770-785) set forth in any one of Tables 2-5 (e.g., Table 3 or 5).

[0259] In some embodiments, the nucleotide sequence of the sense strand comprises the nucleotide sequence of any one of the sense strands of any one of dsRNA agents 1-1590 (e.g., one of dsRNA agents 1-16 or 770-785) set forth in any one of Tables 2-5 (e.g., Table 3 or 5) differing by no more than 3 (e.g., 0, 1, 2, or 3) nucleotides from the sense strand set forth in any one of Tables 2-5 (e.g., Table 3 or 5). In some embodiments, the nucleotide sequence of the sense strand comprises the nucleotide sequence of any one of the sense strands of any one of dsRNA agents 1-1590 (e.g., one of dsRNA agents 1-16 or 770-785) set forth in any one of Tables 2-5 (e.g., Table 3 or 5).

[0260] As described above, Tables 2-5 further identify the target nucleic acid molecule within the reference BCL11A mRNA transcript at least partially identical to each of the sense strands. As such, disclosure further provides sense strands comprising at least 15 (e.g., 15, 16, 17, 18, 19, 20, 21, 22, 23, 24, 25, 26, 27, 28, 29, 30 (e.g., 19, 20, 21, 22, 23 (e.g., 23))) contiguous nucleotides differing by no more than 3 (e.g., 0, 1, 2, or 3) nucleotides from the nucleotide sequence of any one of the sense strands of any one of dsRNA agents 1-1590 (e.g., one of dsRNA agents 1-16 or 770-785) set forth in any one of Tables 2-5 (e.g., Table 3 or 5) and further comprising additional nucleotide sequences (e.g., comprising from about 1-10, 1-9, 1-8, 1-7, 1-6, 1-5, 1-4, 1-3, or 1-2 nucleotides) at least partially identical to the region contiguous (e.g., either at the 3′ end, the 5′ end, or both the 3′ and 5′ end) of the BCL11A mRNA transcript identical to the select sense strand. It is to be understood, that although the sense strands set forth in any one of Tables 2-5 (e.g., Table 3 or 5) are not described as being modified (e.g., comprising chemically modified nucleotides), conjugated, etc., the disclosure includes any sense strand set forth in any one of Tables 2-5 (e.g., Table 3 or 5) that is unmodified, unconjugated, modified (e.g., as described herein), or conjugated (e.g., as described herein).

4.2.3 dsRNA Agents

[0261] In some embodiments, the agent (e.g., RNAi agent) comprises a dsRNA agent comprising an antisense strand (e.g., described herein, e.g., described in § 4.2.1) and a sense strand (e.g., described herein, e.g., described in § 4.2.2) that hybridize to form a double stranded region (e.g., under conditions in which the dsRNA will be used (e.g., under physiological (e.g., mammalian, e.g., human) conditions within a cell)).

[0262] As described above, antisense strands (e.g., described herein) comprise a region of complementarity that comprises a nucleotide sequence that is at least partially (e.g., substantially, fully) complementary to the nucleotide sequence of a target nucleic acid molecule (e.g., a target mRNA (e.g., a BCL11A mRNA), a portion of a target mRNA (e.g., a BCL11A mRNA)); and the sense strands comprise a region of complementarity that comprises a nucleotide sequence that is at least partially (e.g., substantially, fully) complementary to the nucleotide sequence of at least a portion of an antisense strand.

### 4.2.3.1 Single & Multiple Nucleic Acid Molecules

[0263] As described herein, and known in the art, the sense strand and the antisense strand can be part of a single larger nucleic acid molecule (connected as a single stranded nucleic acid molecule) or separate nucleic acid molecules (only connected through the double stranded region). In some embodiments, the sense strand and the antisense strand are separate nucleic acid molecules. In some embodiments, sense strand and the antisense strand are part of a single larger nucleic acid molecule.

[0264] In embodiments wherein the sense and antisense strands are part of a single nucleic acid molecule, the nucleic acid molecule may comprise a hairpin loop between the antisense strand and the sense strand to allow for formation of the double stranded region. In some embodiments, the hairpin loop comprises at least 1 (e.g., at least 2, 3, 4, 5, 6, 7, 8, 9, 10, 20, 23, 25 or more) unpaired nucleotides (non-complementary nucleotide mismatches). In some embodiments, the hairpin loop comprises at least one but less than 25, 23, 20, 10, 9, 8, 7, 6, 5, 4, 3, or 2 unpaired nucleotides (non-complementary nucleotide mismatches). In some embodiments, the hairpin loop comprises about 25, 23, 20, 9, 8, 7, 6, 5, 4, 3, or 1 unpaired nucleotide (non-complementary nucleotide mismatch).

[0265] Without wishing to be bound by theory, in embodiments wherein the sense strand and the antisense strand are part of a single nucleic acid molecule, after introduction into a suitable cell (e.g., a mammalian cell, e.g., a human cell), the nucleic acid molecule may be cleaved into a dsRNA molecule wherein the two strands of the dsRNA molecule are no longer part of the same nucleic acid molecule e.g., by a Type III endonuclease (e.g., Dicer) (see, e.g., Sharp et al. (2001) Genes Dev. 15:485, the entire contents of which are incorporated by herein by reference for all purposes).

### 4.2.3.2 Length of Double Stranded Region

[0266] In some embodiments, the double stranded region is about 15-30 base pairs in length (e.g., 15-29, 15-28, 15-27, 15-26, 15-25, 15-24, 15-23, 15-22, 15-21, 15-20, 15-19, 15-18, 15-17, 18-30, 18-29, 18-28, 18-27, 18-26, 18-25, 18-24, 18-23, 18-22, 18-21, 18-20, 19-30, 19-29, 19-28, 19-27, 19-26, 19-25, 19-24, 19-23, 19-22, 19-21, 19-20, 20-30, 20-29, 20-28, 20-27, 20-26, 20-25, 20-24, 20-23, 20-22, 20-21, 21-30, 21-29, 21-28, 21-27, 21-26, 21-25, 21-24, 21-23, or 21-22 base pairs in length). In some embodiments, the double stranded region is about 18-25 base pairs in length (e.g., 18-25, 18-24, 18-23, 18-22, 18-21, 18-20, 19-25, 19-24, 19-23, 19-22, 19-21, 19-20, 20-25, 20-24, 20-23, 20-22, 20-21, 21-25, 21-24, 21-23, 21-22, 22-25, 22-24, 22-23, 23-25, 23-24 or 24-25 base pairs in length (e.g., 19-21 base pairs in length)). In some embodiments, the double stranded region is about 15-30, 15-29, 15-28, 15-27, 15-26, 15-25, 15-24, 15-23, 15-22, 15-21, 15-20, 15-19, 15-18, 15-17, 15-16, 19-30, 19-29, 19-28, 19-27, 19-26, 19-25, 19-24, 19-23, 19-22, 19-20, 19-21, 23-30, 23-29, 23-28, 23-27, 23-26, 23-25, 23-24, 21-30, 21-29, 21-28, 21-27, 21-26, 21-25, 21-24, 21-23, or 21-22 base pairs in length. In some embodiments, the double stranded region is about 19-21 (e.g., 19-20) base pairs in length.

[0267] In some embodiments, the double stranded region is not more than about 15, 16, 17, 18, 19, 20, 21, 22, 23, 24, 25, 26, 27, 28, 29, or 30 base pairs in length. In some embodiments, the double stranded region is about 15, 16, 17, 18, 19, 20, 21, 22, 23, 24, 25, 26, 27, 28, 29, or 30 base pairs in length. In some embodiments, the double stranded region is about 19, 20, or 21 base pairs in length. In some embodiments, the double stranded region is about 19 base pairs in length. In some embodiments, the double stranded region is about 20 base pairs in length. In some embodiments, the double stranded region is about 21 base pairs in length. In some embodiments, the double stranded region is about 23 base pairs in length. Ranges and lengths intermediate to the above recited ranges and lengths are also contemplated to be part of the disclosure.

### 4.2.3.3 Nucleotide Overhangs & Blunt Ends

[0268] In some embodiments, the dsRNA agent comprises one or more (e.g., 1 or 2) nucleotide overhang. As is clear from the disclosure, but for the sake of clarity, the nucleotides of a nucleotide overhang can include one or more a modified (e.g., chemically modified) nucleotide (e.g., described herein, e.g., described in §§ 4.4, 4.4.1).

[0269] In some embodiments, the nucleotide overhang comprises from about 1-5 nucleotides, e.g., 1-4, 1-3, 1-2, 2-5, 2-4, 2-3, 3-5, 3-4, 4-5 nucleotides. In some embodiments, the nucleotide overhang comprises or consists of about 1, 2, 3, 4, or 5 nucleotides. In some embodiments, the nucleotide overhang comprises or consists of about 1 nucleotide. In some embodiments, the nucleotide overhang comprises or consists of about 2 nucleotides.

[0270] The nucleotide overhang(s) can be on the sense strand, the antisense strand, or both the sense strand and the antisense strand. In some embodiments, the sense strand comprises a nucleotide overhang. In some embodiments, the antisense strand comprises a nucleotide overhang. In some embodiments, the sense strand and the antisense strand both comprise a nucleotide overhang.

[0271] Furthermore, the nucleotide(s) of an overhang can be present on the 5′-end, 3′-end, or both the 5′-end, 3′-end of an antisense or sense strand. In some embodiments, the sense strand comprises a nucleotide overhang at the 5′-end. In some embodiments, the sense strand comprises a nucleotide overhang at the 3′-end. In some embodiments, the sense strand comprises a nucleotide overhang at the 5′-end and the 3′-end. In some embodiments, the antisense strand comprises a nucleotide overhang at the 5′-end. In some embodiments, the antisense strand comprises a nucleotide overhang at the 3′-end. In some embodiments, the antisense strand comprises a nucleotide overhang at the 5′-end and the 3′-end. In some embodiments, the antisense strand comprises a nucleotide overhang at the 3′-end; and the sense strand comprises a nucleotide overhang at the 3′-end. In some embodiments, the antisense strand comprises a nucleotide overhang at the 5′-end; and the sense strand comprises a nucleotide overhang at the 5′-end.

[0272] In some embodiments, the dsRNA agent comprises one or more blunt end. In some embodiments, the dsRNA agent comprises a blunt end at the end of the agent comprising the 3′end of the sense strand and the 5′ end of the antisense strand. In some embodiments, the dsRNA agent comprises a blunt end at the end of the agent comprising the 5′end of the sense strand and the 3′ end of the antisense strand. In some embodiments, both ends of the dsRNA agent are blunt ends.

### 4.2.3.4 Exemplary Structural Combinations of Sense & Antisense Strands

[0273] In some embodiments, the antisense strand and the sense strand contain the same number of nucleotides. In some embodiments, the antisense strand and the sense strand contain different numbers of nucleotides. In some embodiments, the nucleotide sequence of the sense strand is from about 1-5, 1-3, or 1-2 nucleotides shorter than the nucleotide sequence of the antisense strand. In some embodiments, the nucleotide sequence of the sense strand is about 1, 2, 3, 4, or 5 nucleotides shorter than the nucleotide sequence of the antisense strand. In some embodiments, the nucleotide sequence of the sense strand is about 2 nucleotides shorter than the nucleotide sequence of the antisense strand. In some embodiments, the nucleotide sequence of the antisense strand is from about 1-5, 1-3, or 1-2 nucleotides shorter than the nucleotide sequence of the sense strand. In some embodiments, the nucleotide sequence of the antisense strand is about 1, 2, 3, 4, or 5 nucleotides shorter than the nucleotide sequence of the sense strand. In some embodiments, the nucleotide sequence of the antisense strand is about 2 nucleotides shorter than the nucleotide sequence of the sense strand.

[0274] In some embodiments, the sense strand comprises or consists of 21 nucleotides. In some embodiments, the antisense strand comprises or consists of 23 nucleotides. In some embodiments, the sense strand comprises or consists of 21 nucleotides; and the antisense strand comprises or consists of 23 nucleotides. In some preferred embodiments, the sense strand comprises 21 nucleotides; and the antisense strand comprises 23 nucleotides. In some preferred embodiments, the sense strand consists of 21 nucleotides; and the antisense strand consists of 23 nucleotides. In some embodiments, the double stranded region comprises or consists of 21 nucleotides. In some embodiments, the antisense strand comprises a 2-nucleotide overhang at the 3′end. In some embodiments, the 5′ end of the antisense strand and 3′ end of the sense strand form a blunt end. In some embodiments, the sense strand comprises or consists of 21 nucleotides; the antisense strand comprises or consists of 23 nucleotides; the double stranded region comprises or consists of 21 nucleotides; the antisense strand comprises a 2-nucleotide overhang at the 3′end; and the 5′ end of the antisense strand and 3′ end of the sense strand form a blunt end.

[0275] In some embodiments, the sense strand comprises or consists of 19 nucleotides. In some embodiments, the antisense strand comprises or consists of 21 nucleotides. In some embodiments, the sense strand comprises or consists of 19 nucleotides; and the antisense strand comprises or consists of 21 nucleotides. In some embodiments, the double stranded region comprises or consists of 19 nucleotides. In some embodiments, the antisense strand comprises a 2-nucleotide overhang at the 3′end. In some embodiments, the 5′ end of the antisense strand and 3′ end of the sense strand form a blunt end. In some embodiments, the sense strand comprises or consists of 19 nucleotides; the antisense strand comprises or consists of 21 nucleotides; the double stranded region comprises or consists of 19 nucleotides; the antisense strand comprises a 2-nucleotide overhang at the 3′end; and the 5′ end of the antisense strand and 3′ end of the sense strand form a blunt end.

[0276] In some embodiments, the sense strand comprises or consists of 21 nucleotides. In some embodiments, the antisense strand comprises or consists of 21 nucleotides. In some embodiments, the sense strand comprises or consists of 21 nucleotides; and the antisense strand comprises or consists of 21 nucleotides. In some embodiments, the double stranded region comprises or consists of 19 nucleotides. In some embodiments, the antisense strand comprises a 2-nucleotide overhang at the 3′end. In some embodiments, the sense strand comprises a 2-nucleotide overhang at the 3′end. In some embodiments, the sense strand comprises or consists of 21 nucleotides; the antisense strand comprises or consists of 21 nucleotides; the double stranded region comprises or consists of 19 nucleotides; the antisense strand comprises a 2-nucleotide overhang at the 3′end; and the sense strand comprises a 2-nucleotide overhang at the 3′end.

[0277] In some embodiments, the sense strand comprises or consists of 20 nucleotides. In some embodiments, the antisense strand comprises or consists of 19 nucleotides. In some embodiments, the sense strand comprises or consists of 20 nucleotides; and the antisense strand comprises or consists of 19 nucleotides. In some embodiments, the double stranded region comprises or consists of 20 nucleotides. In some embodiments, the sense strand comprises a 1-nucleotide overhang at the 5′ end. In some embodiments, the 5′ end of the antisense strand and 3′ end of the sense strand form a blunt end. In some embodiments, the sense strand comprises or consists of 20 nucleotides; the antisense strand comprises or consists of 19 nucleotides; the double stranded region comprises or consists of 20 nucleotides; the sense strand comprises a 1-nucleotide overhang at the 5′end; and the 5′ end of the antisense strand and 3′ end of the sense strand form a blunt end.

[0278] In some embodiments, the sense strand comprises or consists of 21 nucleotides. In some embodiments, the antisense strand comprises or consists of 19 nucleotides. In some embodiments, the sense strand comprises or consists of 21 nucleotides; and the antisense strand comprises or consists of 19 nucleotides. In some embodiments, the double stranded region comprises or consists of 19 nucleotides. In some embodiments, the sense strand comprises a 1-nucleotide overhang at the 3′end. In some embodiments, the sense strand comprises a 1-nucleotide overhang at the 5′end. In some embodiments, the sense strand comprises or consists of 21 nucleotides; the antisense strand comprises or consists of 19 nucleotides; the double stranded region comprises or consists of 19 nucleotides; the sense strand comprises a 1-nucleotide overhang at the 3′end; and the sense strand comprises a 1-nucleotide overhang at the 5′ end.

[0279] In some embodiments, the sense strand comprises or consists of 24 nucleotides. In some embodiments, the antisense strand comprises or consists of 23 nucleotides. In some embodiments, the sense strand comprises or consists of 24 nucleotides; and the antisense strand comprises or consists of 23 nucleotides. In some embodiments, the double stranded region comprises or consists of 21 nucleotides. In some embodiments, the antisense strand comprises a 2-nucleotide overhang at the 3′end. In some embodiments, the sense strand comprises a 3-nucleotide overhang at the 3′end. In some embodiments, the sense strand comprises or consists of 24 nucleotides; the antisense strand comprises or consists of 23 nucleotides; the double stranded region comprises or consists of 21 nucleotides; the antisense strand comprises a 2-nucleotide overhang at the 3′end; and the sense strand comprises a 3-nucleotide overhang at the 3′ end.

[0280] In some embodiments, the sense strand comprises or consists of 19 nucleotides. In some embodiments, the antisense strand comprises or consists of 19 nucleotides. In some embodiments, the sense strand comprises or consists of 19 nucleotides; and the antisense strand comprises or consists of 19 nucleotides. In some embodiments, the double stranded region comprises or consists of 19 nucleotides. In some embodiments, the 5′ end of the antisense strand (and 3′ end of the sense strand) form a blunt end. In some embodiments, the 3′ end of the antisense strand (and 5′ end of the sense strand) form a blunt end. In some embodiments, the sense strand comprises or consists of 19 nucleotides; the antisense strand comprises or consists of 19 nucleotides; the double stranded region comprises or consists of 19 nucleotides; the 5′ end of the antisense strand (and 3′ end of the sense strand) form a blunt end; and the 3′ end of the antisense strand (and 5′ end of the sense strand) form a blunt end

[0281] In some embodiments, the antisense strand and the sense strand are part of the same larger nucleic acid molecule, wherein the nucleic acid molecule comprises or consists of 44 nucleotides, the antisense portion comprises or consists of 21 nucleotides, the sense strand portion of the nucleic acid molecule comprises 19 nucleotides, the double stranded region comprises or consists of 19 nucleotides, the antisense strand comprises a 2-nucleotide overhang at the 3′end, and the intervening nucleotide sequence between the antisense strand and the sense strand comprises or consists of 4 unpaired nucleotides that create a hairpin loop.

### 4.2.3.5 Exemplary Antisense Strands & Sense Strands

[0282] In some embodiments, the antisense strand is an antisense strand described herein. In some embodiments, the sense strand is a sense strand described herein. In some embodiments, the antisense strand is an antisense strand described in § 4.2.1. In some embodiments, the sense strand is a sense strand described in § 4.2.2. In some embodiments, the antisense strand is an antisense strand described in § 4.2.1; and the sense strand is a sense strand described in § 4.2.2. It is to be understood that any sense strand described herein (e.g., in § 4.2.2); and be utilized in combination with any antisense strand in a dsRNA agent described herein (e.g., in § 4.2.1). For the sake of clarity, the entire contents of in §§ 4.2.1 and § 4.2.2, are incorporated by reference into the instant section in § 4.2.3.5.

[0283] In some embodiments, the nucleotide sequence of the sense strand differs by no more than 5 (e.g., 0, 1, 2, 3, 4, or 5) nucleotides from the nucleotide sequence of any one of the sense strands set forth in any one of Tables 2-5 (e.g., Table 3 or 5); and the nucleotide sequence of the antisense strand differs by no more than 5 (e.g., 0, 1, 2, 3, 4, or 5) nucleotides from the nucleotide sequence of any one of the antisense strands set forth in any one of Tables 2-5 (e.g., Table 3 or 5). In some embodiments, the nucleotide sequence of the sense strand differs by no more than 3 (e.g., 0, 1, 2, or 3) nucleotides from the nucleotide sequence of any one of the sense strands set forth in any one of Tables 2-5 (e.g., Table 3 or 5); and the nucleotide sequence of the antisense strand differs by no more than 3 (e.g., 0, 1, 2, or 3) nucleotides from the nucleotide sequence of any one of the antisense strands set forth in any one of Tables 2-5 (e.g., Table 3 or 5). In some embodiments, the nucleotide sequence of the sense strand differs by no more than 2 (e.g., 0, 1, or 2) nucleotides from the nucleotide sequence of any one of the sense strands set forth in any one of Tables 2-5 (e.g., Table 3 or 5); and the nucleotide sequence of the antisense strand differs by no more than 2 (e.g., 0, 1, or 2) nucleotides from the nucleotide sequence of any one of the antisense strands set forth in any one of Tables 2-5 (e.g., Table 3 or 5). In some embodiments, the nucleotide sequence of the sense strand differs by no more than 1 (e.g., 0 or 1) nucleotide from the nucleotide sequence of any one of the sense strands set forth in any one of Tables 2-5 (e.g., Table 3 or 5); and the nucleotide sequence of the antisense strand differs by no more than 1 (e.g., 0 or 1) nucleotide from the nucleotide sequence of any one of the antisense strands set forth in any one of Tables 2-5 (e.g., Table 3 or 5).

[0284] In some embodiments, the nucleotide sequence of the sense strand comprises the nucleotide sequence of any one of the sense strands set forth in any one of Tables 2-5 (e.g., Table 3 or 5) differing by no more than 5 (e.g., 0, 1, 2, 3, 4, or 5) nucleotides from the sense strand set forth in any one of Tables 2-5 (e.g., Table 3 or 5); and the nucleotide sequence of the antisense strand comprises the nucleotide sequence of any one of the antisense strands set forth in any one of Tables 2-5 (e.g., Table 3 or 5) differing by no more than 5 (e.g., 0, 1, 2, 3, 4, or 5) nucleotides from the antisense strand set forth in any one of Tables 2-5 (e.g., Table 3 or 5). In some embodiments, the nucleotide sequence of the sense strand comprises the nucleotide sequence of any one of the sense strands set forth in any one of Tables 2-5 (e.g., Table 3 or 5) differing by no more than 3 (e.g., 0, 1, 2, or 3) nucleotides from the sense strand set forth in any one of Tables 2-5 (e.g., Table 3 or 5); and the nucleotide sequence of the antisense strand comprises the nucleotide sequence of any one of the antisense strands set forth in any one of Tables 2-5 (e.g., Table 3 or 5) differing by no more than 3 (e.g., 0, 1, 2, or 3) nucleotides from the antisense strand set forth in any one of Tables 2-5 (e.g., Table 3 or 5). In some embodiments, the nucleotide sequence of the sense strand comprises the nucleotide sequence of any one of the sense strands set forth in any one of Tables 2-5 (e.g., Table 3 or 5) differing by no more than 2 (e.g., 0, 1, or 2) nucleotides from the sense strand set forth in any one of Tables 2-5 (e.g., Table 3 or 5); and the nucleotide sequence of the antisense strand comprises the nucleotide sequence of any one of the antisense strands set forth in any one of Tables 2-5 (e.g., Table 3 or 5) differing by no more than 2 (e.g., 0, 1, or 2) nucleotides from the antisense strand set forth in any one of Tables 2-5 (e.g., Table 3 or 5). In some embodiments, the nucleotide sequence of the sense strand comprises the nucleotide sequence of any one of the sense strands set forth in any one of Tables 2-5 (e.g., Table 3 or 5) differing by no more than 1 (e.g., 0 or 1) nucleotide from the sense strand set forth in any one of Tables 2-5 (e.g., Table 3 or 5); and the nucleotide sequence of the antisense strand comprises the nucleotide sequence of any one of the antisense strands set forth in any one of Tables 2-5 (e.g., Table 3 or 5) differing by no more than 1 (e.g., 0 or 1) nucleotide from the antisense strand set forth in any one of Tables 2-5 (e.g., Table 3 or 5).

[0285] In some embodiments, the nucleotide sequence of the sense strand is at least 85%, 86%, 87%, 88%, 89%, 90%, 91%, 92%, 93%, 94%, 95%, 96%, 97%, 98%, 99% or 100% identical to the nucleotide sequence of any one of the sense strands set forth in any one of Tables 2-5 (e.g., Table 3 or 5); and the nucleotide sequence of the antisense strand is at least 85%, 86%, 87%, 88%, 89%, 90%, 91%, 92%, 93%, 94%, 95%, 96%, 97%, 98%, 99% or 100% identical to the nucleotide sequence of any one of the antisense strands set forth in any one of Tables 2-5 (e.g., Table 3 or 5). In some embodiments, the nucleotide sequence of the sense strand is at least 90%, 91%, 92%, 93%, 94%, 95%, 96%, 97%, 98%, 99% or 100% identical to the nucleotide sequence of any one of the sense strands set forth in any one of Tables 2-5 (e.g., Table 3 or 5); and the nucleotide sequence of the antisense strand is at least 90%, 91%, 92%, 93%, 94%, 95%, 96%, 97%, 98%, 99% or 100% identical to the nucleotide sequence of any one of the antisense strands set forth in any one of Tables 2-5 (e.g., Table 3 or 5). In some embodiments, the nucleotide sequence of the sense strand is at least 95%, 96%, 97%, 98%, 99% or 100% identical to the nucleotide sequence of any one of the sense strands set forth in any one of Tables 2-5 (e.g., Table 3 or 5); and the nucleotide sequence of the antisense strand is at least 95%, 96%, 97%, 98%, 99% or 100% identical to the nucleotide sequence of any one of the antisense strands set forth in any one of Tables 2-5 (e.g., Table 3 or 5). In some embodiments, the nucleotide sequence of the sense strand is at least 96%, 97%, 98%, 99% or 100% identical to the nucleotide sequence of any one of the sense strands set forth in any one of Tables 2-5 (e.g., Table 3 or 5); and the nucleotide sequence of the antisense strand is at least 96%, 97%, 98%, 99% or 100% identical to the nucleotide sequence of any one of the antisense strands set forth in any one of Tables 2-5 (e.g., Table 3 or 5). In some embodiments, the nucleotide sequence of the sense strand is at least 97%, identical to the nucleotide sequence of any one of the sense strands set forth in any one of Tables 2-5 (e.g., Table 3 or 5); and the nucleotide sequence of the antisense strand is at least 97%, identical to the nucleotide sequence of any one of the antisense strands set forth in any one of Tables 2-5 (e.g., Table 3 or 5). In some embodiments, the nucleotide sequence of the sense strand is at least 98% identical to the nucleotide sequence of any one of the sense strands set forth in any one of Tables 2-5 (e.g., Table 3 or 5); and the nucleotide sequence of the antisense strand is at least 98% identical to the nucleotide sequence of any one of the antisense strands set forth in any one of Tables 2-5 (e.g., Table 3 or 5). In some embodiments, the nucleotide sequence of the sense strand is at least 99% identical to the nucleotide sequence of any one of the sense strands set forth in any one of Tables 2-5 (e.g., Table 3 or 5); and the nucleotide sequence of the antisense strand is at least 99% identical to the nucleotide sequence of any one of the antisense strands set forth in any one of Tables 2-5 (e.g., Table 3 or 5). In some embodiments, the nucleotide sequence of the sense strand is 100% identical to the nucleotide sequence of any one of the sense strands set forth in any one of Tables 2-5 (e.g., Table 3 or 5); and the nucleotide sequence of the antisense strand is 100% identical to the nucleotide sequence of any one of the antisense strands set forth in any one of Tables 2-5 (e.g., Table 3 or 5).

[0286] In some embodiments, the nucleotide sequence of the sense strand comprises the nucleotide sequence of any one of the sense strands set forth in any one of Tables 2-5 (e.g., Table 3 or 5); and the nucleotide sequence of the antisense strand comprises the nucleotide sequence of any one of the antisense strands set forth in any one of Tables 2-5 (e.g., Table 3 or 5). In some embodiments, the nucleotide sequence of the sense strand consists of the nucleotide sequence of any one of the sense strands set forth in any one of Tables 2-5 (e.g., Table 3 or 5); and the nucleotide sequence of the antisense strand consists of the nucleotide sequence of any one of the antisense strands set forth in any one of Tables 2-5 (e.g., Table 3 or 5).

[0287] In some embodiments, the antisense strand comprises at least 15 (e.g., 15, 16, 17, 18, 19, 20, 21, 22, 23, 24, 25, 26, 27, 28, 29, 30 (e.g., 19, 20, 21, 22, 23 (e.g., 23))) contiguous nucleotides differing by no more than 3 (e.g., 0, 1, 2, or 3) nucleotides from the nucleotide sequence of any one of the antisense strands set forth in any one of Tables 2-5 (e.g., Table 3 or 5); and the sense strand comprises at least 15 (e.g., 15, 16, 17, 18, 19, 20, 21, 22, 23, 24, 25, 26, 27, 28, 29, 30 (e.g., 19, 20, 21, 22, 23 (e.g., 21))) contiguous nucleotides differing by no more than 3 (e.g., 0, 1, 2, or 3) nucleotides from the nucleotide sequence of any one of the sense strands set forth in any one of Tables 2-5 (e.g., Table 3 or 5). In some embodiments, the antisense strand comprises at least 19 (e.g., 20, 21, 22, 23, 24, 25, 26, 27, 28, 29, 30 (e.g., 19, 20, 21, 22, 23 (e.g., 23))) contiguous nucleotides differing by no more than 3 (e.g., 0, 1, 2, or 3) nucleotides from the nucleotide sequence of any one of the antisense strands set forth in any one of Tables 2-5 (e.g., Table 3 or 5); and the sense strand comprises at least 19 (e.g., 20, 21, 22, 23, 24, 25, 26, 27, 28, 29, 30 (e.g., 19, 20, 21, 22, 23 (e.g., 21))) contiguous nucleotides differing by no more than 3 (e.g., 0, 1, 2, or 3) nucleotides from the nucleotide sequence of any one of the sense strands set forth in any one of Tables 2-5 (e.g., Table 3 or 5). In some embodiments, the antisense strand comprises at least 21 (e.g., 22, 23, 24, 25, 26, 27, 28, 29, 30 (e.g., 21, 22, 23 (e.g., 23))) contiguous nucleotides differing by no more than 3 (e.g., 0, 1, 2, or 3) nucleotides from the nucleotide sequence of any one of the antisense strands set forth in any one of Tables 2-5 (e.g., Table 3 or 5); and the sense strand comprises at least 19 (e.g., 20, 21, 22, 23, 24, 25, 26, 27, 28, 29, 30 (e.g., 19, 20, 21, 22, 23 (e.g., 21))) contiguous nucleotides differing by no more than 3 (e.g., 0, 1, 2, or 3) nucleotides from the nucleotide sequence of any one of the sense strands set forth in any one of Tables 2-5 (e.g., Table 3 or 5). In some embodiments, the antisense strand comprises at least 21 (e.g., 22, 23, 24, 25, 26, 27, 28, 29, 30 (e.g., 21, 22, 23 (e.g., 23))) contiguous nucleotides differing by no more than 3 (e.g., 0, 1, 2, or 3) nucleotides from the nucleotide sequence of any one of the antisense strands set forth in any one of Tables 2-5 (e.g., Table 3 or 5); and the sense strand comprises at least 21 (e.g., 22, 23, 24, 25, 26, 27, 28, 29, 30 (e.g., 21, 22, 23 (e.g., 21))) contiguous nucleotides differing by no more than 3 (e.g., 0, 1, 2, or 3) nucleotides from the nucleotide sequence of any one of the sense strands set forth in any one of Tables 2-5 (e.g., Table 3 or 5). In some embodiments, the antisense strand comprises at least 23 (e.g., 24, 25, 26, 27, 28, 29, 30 (e.g., 23)) contiguous nucleotides differing by no more than 3 (e.g., 0, 1, 2, or 3) nucleotides from the nucleotide sequence of any one of the antisense strands set forth in any one of Tables 2-5 (e.g., Table 3 or 5); and the sense strand comprises at least 21 (e.g., 22, 23, 24, 25, 26, 27, 28, 29, 30 (e.g., 21, 22, 23 (e.g., 21))) contiguous nucleotides differing by no more than 3 (e.g., 0, 1, 2, or 3) nucleotides from the nucleotide sequence of any one of the sense strands set forth in any one of Tables 2-5 (e.g., Table 3 or 5).

[0288] In some embodiments, the antisense strand comprises from about 15-23 (e.g., 15-22, 15-21, 15-20, 15-19, 15-18, 15-17, 15-16, 16-22, 16-20, 16-19, 16-18, 16-17, 17-23, 17-22, 17-21, 17-20, 17-19, 17-18, 18-23, 18-22, 18-21, 18-20, 18-19, 19-23, 19-22, 19-21, 19-20, 20-23, 20-22, 20-21, 21-23, 21-22, 22-23) contiguous nucleotides differing by no more than 3 (e.g., 0, 1, 2, or 3) nucleotides from the nucleotide sequence of any one of the antisense strands set forth in any one of Tables 2-5 (e.g., Table 3 or 5); and the sense strand comprises from about 15-23 (e.g., 15-22, 15-21, 15-20, 15-19, 15-18, 15-17, 15-16, 16-22, 16-20, 16-19, 16-18, 16-17, 17-23, 17-22, 17-21, 17-20, 17-19, 17-18, 18-23, 18-22, 18-21, 18-20, 18-19, 19-23, 19-22, 19-21, 19-20, 20-23, 20-22, 20-21, 21-23, 21-22, 22-23) contiguous nucleotides differing by no more than 3 (e.g., 0, 1, 2, or 3) nucleotides from the nucleotide sequence of any one of the sense strands set forth in any one of Tables 2-5 (e.g., Table 3 or 5). In some embodiments, the antisense strand comprises from about 19-23 (e.g., 19-22, 19-21, 19-20, 20-23, 20-22, 20-21, 21-23, 21-22, 22-23) contiguous nucleotides differing by no more than 3 (e.g., 0, 1, 2, or 3) nucleotides from the nucleotide sequence of any one of the antisense strands set forth in any one of Tables 2-5 (e.g., Table 3 or 5); and the sense strand comprises from about 19-23 (e.g., 19-22, 19-21, 19-20, 20-23, 20-22, 20-21, 21-23, 21-22, 22-23) contiguous nucleotides differing by no more than 3 (e.g., 0, 1, 2, or 3) nucleotides from the nucleotide sequence of any one of the sense strands set forth in any one of Tables 2-5 (e.g., Table 3 or 5). In some embodiments, the antisense strand comprises from about from about 21-23 (e.g., 21-22, 22-23) contiguous nucleotides differing by no more than 3 (e.g., 0, 1, 2, or 3) nucleotides from the nucleotide sequence of any one of the antisense strands set forth in any one of Tables 2-5 (e.g., Table 3 or 5); and the sense strand comprises from about 19-23 (e.g., 19-22, 19-21, 19-20, 20-23, 20-22, 20-21, 21-23, 21-22, 22-23) contiguous nucleotides differing by no more than 3 (e.g., 0, 1, 2, or 3) nucleotides from the nucleotide sequence of any one of the sense strands set forth in any one of Tables 2-5 (e.g., Table 3 or 5). In some embodiments, the antisense strand comprises from about 21-23 (e.g., 21-22, 22-23) contiguous nucleotides differing by no more than 3 (e.g., 0, 1, 2, or 3) nucleotides from the nucleotide sequence of any one of the antisense strands set forth in any one of Tables 2-5 (e.g., Table 3 or 5); and the sense strand comprises from about 21-23 (e.g., 21-22, 22-23) contiguous nucleotides differing by no more than 3 (e.g., 0, 1, 2, or 3) nucleotides from the nucleotide sequence of any one of the sense strands set forth in any one of Tables 2-5 (e.g., Table 3 or 5).

[0289] In some embodiments, the antisense strand comprises or consists of about 15, 16, 17, 18, 19, 20, 21, 22, 23, 24, 25, 26, 27, 28, 29, or 30 (e.g., 19, 20, 21, 22, 23 (e.g., 23)) contiguous nucleotides differing by no more than 3 (e.g., 0, 1, 2, or 3) nucleotides from the nucleotide sequence of any one of the antisense strands set forth in any one of Tables 2-5 (e.g., Table 3 or 5); and the sense strand comprises or consists of about 15, 16, 17, 18, 19, 20, 21, 22, 23, 24, 25, 26, 27, 28, 29, or 30 (e.g., 19, 20, 21, 22, 23 (e.g., 21)) contiguous nucleotides differing by no more than 3 (e.g., 0, 1, 2, or 3) nucleotides from the nucleotide sequence of any one of the sense strands set forth in any one of Tables 2-5 (e.g., Table 3 or 5). In some embodiments, the antisense strand comprises or consists of about 19, 20, 21, 22, 23, 24, 25, 26, 27, 28, 29, 30 (e.g., 19, 20, 21, 22, 23 (e.g., 23)) contiguous nucleotides differing by no more than 3 (e.g., 0, 1, 2, or 3) nucleotides from the nucleotide sequence of any one of the antisense strands set forth in any one of Tables 2-5 (e.g., Table 3 or 5); and the sense strand comprises or consists of 19, 20, 21, 22, 23, 24, 25, 26, 27, 28, 29, 30 (e.g., 19, 20, 21, 22, 23 (e.g., 21)) contiguous nucleotides differing by no more than 3 (e.g., 0, 1, 2, or 3) nucleotides from the nucleotide sequence of any one of the sense strands set forth in any one of Tables 2-5 (e.g., Table 3 or 5). In some embodiments, the antisense strand comprises or consists of about 21, 22, 23, 24, 25, 26, 27, 28, 29, 30 (e.g., 21, 22, 23 (e.g., 23)) contiguous nucleotides differing by no more than 3 (e.g., 0, 1, 2, or 3) nucleotides from the nucleotide sequence of any one of the antisense strands set forth in any one of Tables 2-5 (e.g., Table 3 or 5); and the sense strand comprises or consists of about 19, 20, 21, 22, 23, 24, 25, 26, 27, 28, 29, 30 (e.g., 19, 20, 21, 22, 23 (e.g., 21)) contiguous nucleotides differing by no more than 3 (e.g., 0, 1, 2, or 3) nucleotides from the nucleotide sequence of any one of the sense strands set forth in any one of Tables 2-5 (e.g., Table 3 or 5). In some embodiments, the antisense strand comprises or consists of about 21, 22, 23, 24, 25, 26, 27, 28, 29, 30 (e.g., 21, 22, 23 (e.g., 23)) contiguous nucleotides differing by no more than 3 (e.g., 0, 1, 2, or 3) nucleotides from the nucleotide sequence of any one of the antisense strands set forth in any one of Tables 2-5 (e.g., Table 3 or 5); and the sense strand comprises or consists of at about 21, 22, 23, 24, 25, 26, 27, 28, 29, 30 (e.g., 21, 22, 23 (e.g., 21)) contiguous nucleotides differing by no more than 3 (e.g., 0, 1, 2, or 3) nucleotides from the nucleotide sequence of any one of the sense strands set forth in any one of Tables 2-5 (e.g., Table 3 or 5). In some embodiments, the antisense strand comprises or consists of about 23, 24, 25, 26, 27, 28, 29, 30 (e.g., 23) contiguous nucleotides differing by no more than 3 (e.g., 0, 1, 2, or 3) nucleotides from the nucleotide sequence of any one of the antisense strands set forth in any one of Tables 2-5 (e.g., Table 3 or 5); and the sense strand comprises or consists of about 21, 22, 23, 24, 25, 26, 27, 28, 29, 30 (e.g., 21, 22, 23 (e.g., 21)) contiguous nucleotides differing by no more than 3 (e.g., 0, 1, 2, or 3) nucleotides from the nucleotide sequence of any one of the sense strands set forth in any one of Tables 2-5 (e.g., Table 3 or 5). In some embodiments, the antisense strand comprises or consists of about 23 contiguous nucleotides differing by no more than 3 (e.g., 0, 1, 2, or 3) nucleotides from the nucleotide sequence of any one of the antisense strands set forth in any one of Tables 2-5 (e.g., Table 3 or 5); and the sense strand comprises or consists of about 21 contiguous nucleotides differing by no more than 3 (e.g., 0, 1, 2, or 3) nucleotides from the nucleotide sequence of any one of the sense strands set forth in any one of Tables 2-5 (e.g., Table 3 or 5). In some embodiments, the antisense strand comprises or consists of about 21 contiguous nucleotides differing by no more than 3 (e.g., 0, 1, 2, or 3) nucleotides from the nucleotide sequence of any one of the antisense strands set forth in any one of Tables 2-5 (e.g., Table 3 or 5); and the sense strand comprises or consists of about 19 contiguous nucleotides differing by no more than 3 (e.g., 0, 1, 2, or 3) nucleotides from the nucleotide sequence of any one of the sense strands set forth in any one of Tables 2-5 (e.g., Table 3 or 5).

[0290] In some embodiments, the nucleotide sequence of the antisense strand comprises or consists of the nucleotide sequence of any one of the antisense strands set forth in any one of Tables 2-5 (e.g., Table 3 or 5) differing by no more than 3 (e.g., 0, 1, 2, or 3) nucleotides from the antisense strand set forth in any one of Tables 2-5 (e.g., Table 3 or 5); and the nucleotide sequence of the sense strand comprises or consists of the nucleotide sequence of any one of the sense strands set forth in any one of Tables 2-5 (e.g., Table 3 or 5) differing by no more than 3 (e.g., 0, 1, 2, or 3) nucleotides from the sense strand set forth in any one of Tables 2-5 (e.g., Table 3 or 5).

[0291] In some embodiments, the nucleotide sequence of the antisense strand comprises or consists of the nucleotide sequence of any one of any one of the antisense strands set forth in any one of Tables 2-5 (e.g., Table 3 or 5); and the nucleotide sequence of the sense strand comprises or consists of the nucleotide sequence of any one of the sense strands set forth in any one of Tables 2-5 (e.g., Table 3 or 5).

[0292] In some embodiments, the antisense strand comprises at least 15 (e.g., 15, 16, 17, 18, 19, 20, 21, 22, 23, 24, 25, 26, 27, 28, 29, 30 (e.g., 19, 20, 21, 22, 23 (e.g., 23))) contiguous nucleotides differing by no more than 3 (e.g., 0, 1, 2, or 3) nucleotides from the nucleotide sequence of any one of the antisense strands set forth in any one of Tables 2-5 (e.g., Table 3 or 5); and the sense strand comprises at least 15 (e.g., 15, 16, 17, 18, 19, 20, 21, 22, 23, 24, 25, 26, 27, 28, 29, 30 (e.g., 19, 20, 21, 22, 23 (e.g., 21))) contiguous nucleotides differing by no more than 3 (e.g., 0, 1, 2, or 3) nucleotides from the nucleotide sequence of the corresponding sense strand set forth in any one of Tables 2-5 (e.g., Table 3 or 5). In some embodiments, the antisense strand comprises at least 19 (e.g., 20, 21, 22, 23, 24, 25, 26, 27, 28, 29, 30 (e.g., 19, 20, 21, 22, 23 (e.g., 23))) contiguous nucleotides differing by no more than 3 (e.g., 0, 1, 2, or 3) nucleotides from the nucleotide sequence of any one of the antisense strands set forth in any one of Tables 2-5 (e.g., Table 3 or 5); and the sense strand comprises at least 19 (e.g., 20, 21, 22, 23, 24, 25, 26, 27, 28, 29, 30 (e.g., 19, 20, 21, 22, 23 (e.g., 21))) contiguous nucleotides differing by no more than 3 (e.g., 0, 1, 2, or 3) nucleotides from the nucleotide sequence of the corresponding sense strand set forth in any one of Tables 2-5 (e.g., Table 3 or 5). In some embodiments, the antisense strand comprises at least 21 (e.g., 22, 23, 24, 25, 26, 27, 28, 29, 30 (e.g., 21, 22, 23 (e.g., 23))) contiguous nucleotides differing by no more than 3 (e.g., 0, 1, 2, or 3) nucleotides from the nucleotide sequence of any one of the antisense strands set forth in any one of Tables 2-5 (e.g., Table 3 or 5); and the sense strand comprises at least 19 (e.g., 20, 21, 22, 23, 24, 25, 26, 27, 28, 29, 30 (e.g., 19, 20, 21, 22, 23 (e.g., 21))) contiguous nucleotides differing by no more than 3 (e.g., 0, 1, 2, or 3) nucleotides from the nucleotide sequence of the corresponding sense strand set forth in any one of Tables 2-5 (e.g., Table 3 or 5). In some embodiments, the antisense strand comprises at least 21 (e.g., 22, 23, 24, 25, 26, 27, 28, 29, 30 (e.g., 21, 22, 23 (e.g., 23))) contiguous nucleotides differing by no more than 3 (e.g., 0, 1, 2, or 3) nucleotides from the nucleotide sequence of any one of the antisense strands set forth in any one of Tables 2-5 (e.g., Table 3 or 5); and the sense strand comprises at least 21 (e.g., 22, 23, 24, 25, 26, 27, 28, 29, 30 (e.g., 21, 22, 23 (e.g., 21))) contiguous nucleotides differing by no more than 3 (e.g., 0, 1, 2, or 3) nucleotides from the nucleotide sequence of the corresponding sense strand set forth in any one of Tables 2-5 (e.g., Table 3 or 5). In some embodiments, the antisense strand comprises at least 23 (e.g., 24, 25, 26, 27, 28, 29, 30 (e.g., 23)) contiguous nucleotides differing by no more than 3 (e.g., 0, 1, 2, or 3) nucleotides from the nucleotide sequence of any one of the antisense strands set forth in any one of Tables 2-5 (e.g., Table 3 or 5); and the sense strand comprises at least 21 (e.g., 22, 23, 24, 25, 26, 27, 28, 29, 30 (e.g., 21, 22, 23 (e.g., 21))) contiguous nucleotides differing by no more than 3 (e.g., 0, 1, 2, or 3) nucleotides from the nucleotide sequence of the corresponding sense strand set forth in any one of Tables 2-5 (e.g., Table 3 or 5).

[0293] In some embodiments, the antisense strand comprises from about 15-23 (e.g., 15-22, 15-21, 15-20, 15-19, 15-18, 15-17, 15-16, 16-22, 16-20, 16-19, 16-18, 16-17, 17-23, 17-22, 17-21, 17-20, 17-19, 17-18, 18-23, 18-22, 18-21, 18-20, 18-19, 19-23, 19-22, 19-21, 19-20, 20-23, 20-22, 20-21, 21-23, 21-22, 22-23) contiguous nucleotides differing by no more than 3 (e.g., 0, 1, 2, or 3) nucleotides from the nucleotide sequence of any one of the antisense strands set forth in any one of Tables 2-5 (e.g., Table 3 or 5); and the sense strand comprises from about 15-23 (e.g., 15-22, 15-21, 15-20, 15-19, 15-18, 15-17, 15-16, 16-22, 16-20, 16-19, 16-18, 16-17, 17-23, 17-22, 17-21, 17-20, 17-19, 17-18, 18-23, 18-22, 18-21, 18-20, 18-19, 19-23, 19-22, 19-21, 19-20, 20-23, 20-22, 20-21, 21-23, 21-22, 22-23) contiguous nucleotides differing by no more than 3 (e.g., 0, 1, 2, or 3) nucleotides from the nucleotide sequence of the corresponding sense strand set forth in any one of Tables 2-5 (e.g., Table 3 or 5). In some embodiments, the antisense strand comprises from about 19-23 (e.g., 19-22, 19-21, 19-20, 20-23, 20-22, 20-21, 21-23, 21-22, 22-23) contiguous nucleotides differing by no more than 3 (e.g., 0, 1, 2, or 3) nucleotides from the nucleotide sequence of any one of the antisense strands set forth in any one of Tables 2-5 (e.g., Table 3 or 5); and the sense strand comprises from about 19-23 (e.g., 19-22, 19-21, 19-20, 20-23, 20-22, 20-21, 21-23, 21-22, 22-23) contiguous nucleotides differing by no more than 3 (e.g., 0, 1, 2, or 3) nucleotides from the nucleotide sequence of the corresponding sense strand set forth in any one of Tables 2-5 (e.g., Table 3 or 5). In some embodiments, the antisense strand comprises from about from about 21-23 (e.g., 21-22, 22-23) contiguous nucleotides differing by no more than 3 (e.g., 0, 1, 2, or 3) nucleotides from the nucleotide sequence of any one of the antisense strands set forth in any one of Tables 2-5 (e.g., Table 3 or 5); and the sense strand comprises from about 19-23 (e.g., 19-22, 19-21, 19-20, 20-23, 20-22, 20-21, 21-23, 21-22, 22-23) contiguous nucleotides differing by no more than 3 (e.g., 0, 1, 2, or 3) nucleotides from the nucleotide sequence of the corresponding sense strand set forth in any one of Tables 2-5 (e.g., Table 3 or 5). In some embodiments, the antisense strand comprises from about 21-23 (e.g., 21-22, 22-23) contiguous nucleotides differing by no more than 3 (e.g., 0, 1, 2, or 3) nucleotides from the nucleotide sequence of any one of the antisense strands set forth in any one of Tables 2-5 (e.g., Table 3 or 5); and the sense strand comprises from about 21-23 (e.g., 21-22, 22-23) contiguous nucleotides differing by no more than 3 (e.g., 0, 1, 2, or 3) nucleotides from the nucleotide sequence of the corresponding sense strand set forth in any one of Tables 2-5 (e.g., Table 3 or 5).

[0294] In some embodiments, the antisense strand comprises or consists of about 15, 16, 17, 18, 19, 20, 21, 22, 23, 24, 25, 26, 27, 28, 29, or 30 (e.g., 19, 20, 21, 22, 23 (e.g., 23)) contiguous nucleotides differing by no more than 3 (e.g., 0, 1, 2, or 3) nucleotides from the nucleotide sequence of any one of the antisense strands set forth in any one of Tables 2-5 (e.g., Table 3 or 5); and the sense strand comprises or consists of about 15, 16, 17, 18, 19, 20, 21, 22, 23, 24, 25, 26, 27, 28, 29, or 30 (e.g., 19, 20, 21, 22, 23 (e.g., 21)) contiguous nucleotides differing by no more than 3 (e.g., 0, 1, 2, or 3) nucleotides from the nucleotide sequence of the corresponding sense strand set forth in any one of Tables 2-5 (e.g., Table 3 or 5). In some embodiments, the antisense strand comprises or consists of about 19, 20, 21, 22, 23, 24, 25, 26, 27, 28, 29, 30 (e.g., 19, 20, 21, 22, 23 (e.g., 23)) contiguous nucleotides differing by no more than 3 (e.g., 0, 1, 2, or 3) nucleotides from the nucleotide sequence of any one of the antisense strands set forth in any one of Tables 2-5 (e.g., Table 3 or 5); and the sense strand comprises or consists of 19, 20, 21, 22, 23, 24, 25, 26, 27, 28, 29, 30 (e.g., 19, 20, 21, 22, 23 (e.g., 21)) contiguous nucleotides differing by no more than 3 (e.g., 0, 1, 2, or 3) nucleotides from the nucleotide sequence of the corresponding sense strand set forth in any one of Tables 2-5 (e.g., Table 3 or 5). In some embodiments, the antisense strand comprises or consists of about 21, 22, 23, 24, 25, 26, 27, 28, 29, 30 (e.g., 21, 22, 23 (e.g., 23)) contiguous nucleotides differing by no more than 3 (e.g., 0, 1, 2, or 3) nucleotides from the nucleotide sequence of any one of the antisense strands set forth in any one of Tables 2-5 (e.g., Table 3 or 5); and the sense strand comprises or consists of about 19, 20, 21, 22, 23, 24, 25, 26, 27, 28, 29, 30 (e.g., 19, 20, 21, 22, 23 (e.g., 21)) contiguous nucleotides differing by no more than 3 (e.g., 0, 1, 2, or 3) nucleotides from the nucleotide sequence of the corresponding sense strand set forth in any one of Tables 2-5 (e.g., Table 3 or 5). In some embodiments, the antisense strand comprises or consists of about 21, 22, 23, 24, 25, 26, 27, 28, 29, 30 (e.g., 21, 22, 23 (e.g., 23)) contiguous nucleotides differing by no more than 3 (e.g., 0, 1, 2, or 3) nucleotides from the nucleotide sequence of any one of the antisense strands set forth in any one of Tables 2-5 (e.g., Table 3 or 5); and the sense strand comprises or consists of at about 21, 22, 23, 24, 25, 26, 27, 28, 29, 30 (e.g., 21, 22, 23 (e.g., 21)) contiguous nucleotides differing by no more than 3 (e.g., 0, 1, 2, or 3) nucleotides from the nucleotide sequence of the corresponding sense strand set forth in any one of Tables 2-5 (e.g., Table 3 or 5). In some embodiments, the antisense strand comprises or consists of about 23, 24, 25, 26, 27, 28, 29, 30 (e.g., 23) contiguous nucleotides differing by no more than 3 (e.g., 0, 1, 2, or 3) nucleotides from the nucleotide sequence of any one of the antisense strands set forth in any one of Tables 2-5 (e.g., Table 3 or 5); and the sense strand comprises or consists of about 21, 22, 23, 24, 25, 26, 27, 28, 29, 30 (e.g., 21, 22, 23 (e.g., 21)) contiguous nucleotides differing by no more than 3 (e.g., 0, 1, 2, or 3) nucleotides from the nucleotide sequence of the corresponding sense strand set forth in any one of Tables 2-5 (e.g., Table 3 or 5). In some embodiments, the antisense strand comprises or consists of about 23 contiguous nucleotides differing by no more than 3 (e.g., 0, 1, 2, or 3) nucleotides from the nucleotide sequence of any one of the antisense strands set forth in any one of Tables 2-5 (e.g., Table 3 or 5); and the sense strand comprises or consists of about 21 contiguous nucleotides differing by no more than 3 (e.g., 0, 1, 2, or 3) nucleotides from the nucleotide sequence of the corresponding sense strand set forth in any one of Tables 2-5 (e.g., Table 3 or 5). In some embodiments, the antisense strand comprises or consists of about 21 contiguous nucleotides differing by no more than 3 (e.g., 0, 1, 2, or 3) nucleotides from the nucleotide sequence of any one of the antisense strands set forth in any one of Tables 2-5 (e.g., Table 3 or 5); and the sense strand comprises or consists of about 19 contiguous nucleotides differing by no more than 3 (e.g., 0, 1, 2, or 3) nucleotides from the nucleotide sequence of the corresponding sense strand set forth in any one of Tables 2-5 (e.g., Table 3 or 5).

[0295] In some embodiments, the nucleotide sequence of the antisense strand comprises or consists of the nucleotide sequence of any one of the antisense strands set forth in any one of Tables 2-5 (e.g., Table 3 or 5) differing by no more than 3 (e.g., 0, 1, 2, or 3) nucleotides from the antisense strand set forth in any one of Tables 2-5 (e.g., Table 3 or 5); and the nucleotide sequence of the sense strand comprises or consists of the nucleotide sequence of the corresponding sense strand set forth in any one of Tables 2-5 (e.g., Table 3 or 5) differing by no more than 3 (e.g., 0, 1, 2, or 3) nucleotides from the corresponding sense strand set forth in any one of Tables 2-5 (e.g., Table 3 or 5).

[0296] In some embodiments, the nucleotide sequence of the antisense strand comprises or consists of the nucleotide sequence of any one of any one of the antisense strands set forth in any one of Tables 2-5 (e.g., Table 3 or 5); and the nucleotide sequence of the sense strand comprises or consists of the nucleotide sequence of the corresponding sense strand set forth in any one of Tables 2-5 (e.g., Table 3 or 5).

[0297] In some embodiments, the nucleotide sequence of the sense strand differs by no more than 5 (e.g., 0, 1, 2, 3, 4, or 5) nucleotides from the nucleotide sequence set forth in any one of SEQ ID NOS: 1577-3166 (e.g., any one of SEQ ID NOS: 1577-1592 or 2346-2361); and the nucleotide sequence of the antisense strand comprises the nucleotide sequence set forth in any one of SEQ ID NOS: 4-1576 (e.g., any one of SEQ ID NOS: 4-19 or 772-787) differing by no more than 5 (e.g., 0, 1, 2, 3, 4, or 5) nucleotides from the nucleotide sequence set forth in any one of SEQ ID NOS: 4-1576 (e.g., any one of SEQ ID NOS: 4-19 or 772-787). In some embodiments, the nucleotide sequence of the sense strand differs by no more than 3 (e.g., 0, 1, 2, or 3) nucleotides from the nucleotide sequence set forth in any one of SEQ ID NOS: 1577-3166 (e.g., any one of SEQ ID NOS: 1577-1592 or 2346-2361); and the nucleotide sequence of the antisense strand comprises the nucleotide sequence set forth in any one of SEQ ID NOS: 4-1576 (e.g., any one of SEQ ID NOS: 4-19 or 772-787) differing by no more than 3 (e.g., 0, 1, 2, or 3) nucleotides from the nucleotide sequence set forth in any one of SEQ ID NOS: 4-1576 (e.g., any one of SEQ ID NOS: 4-19 or 772-787). In some embodiments, the nucleotide sequence of the sense strand differs by no more than 2 (e.g., 0, 1, or 2) nucleotides from the nucleotide sequence set forth in any one of SEQ ID NOS: 1577-3166 (e.g., any one of SEQ ID NOS: 1577-1592 or 2346-2361); and the nucleotide sequence of the antisense strand comprises the nucleotide sequence set forth in any one of SEQ ID NOS: 4-1576 (e.g., any one of SEQ ID NOS: 4-19 or 772-787) differing by no more than 2 (e.g., 0, 1, or 2) nucleotides from the nucleotide sequence set forth in any one of SEQ ID NOS: 4-1576 (e.g., any one of SEQ ID NOS: 4-19 or 772-787). In some embodiments, the nucleotide sequence of the sense strand differs by no more than 1 (e.g., 0 or 1) nucleotide from the nucleotide sequence set forth in any one of SEQ ID NOS: 1577-3166 (e.g., any one of SEQ ID NOS: 1577-1592 or 2346-2361); and the nucleotide sequence of the antisense strand comprises the nucleotide sequence set forth in any one of SEQ ID NOS: 4-1576 (e.g., any one of SEQ ID NOS: 4-19 or 772-787) differing by no more than 1 (e.g., 0 or 1) nucleotide from the nucleotide sequence set forth in any one of SEQ ID NOS: 4-1576 (e.g., any one of SEQ ID NOS: 4-19 or 772-787).

[0298] In some embodiments, the nucleotide sequence of the sense strand comprises the nucleotide sequence set forth in any one of SEQ ID NOS: 1577-3166 (e.g., any one of SEQ ID NOS: 1577-1592 or 2346-2361) differing by no more than 5 (e.g., 0, 1, 2, 3, 4, or 5) nucleotides from the nucleotide sequence set forth in any one of SEQ ID NOS: 1577-3166 (e.g., any one of SEQ ID NOS: 1577-1592 or 2346-2361); and the nucleotide sequence of the antisense strand differs by no more than 5 (e.g., 0, 1, 2, 3, 4, or 5) nucleotides from the nucleotide sequence set forth in any one of SEQ ID NOS: 4-1576 (e.g., any one of SEQ ID NOS: 4-19 or 772-787). In some embodiments, the nucleotide sequence of the sense strand comprises the nucleotide sequence set forth in any one of SEQ ID NOS: 1577-3166 (e.g., any one of SEQ ID NOS: 1577-1592 or 2346-2361) differing by no more than 3 (e.g., 0, 1, 2, or 3) nucleotides from the nucleotide sequence set forth in any one of SEQ ID NOS: 1577-3166 (e.g., any one of SEQ ID NOS: 1577-1592 or 2346-2361); and the nucleotide sequence of the antisense strand differs by no more than 3 (e.g., 0, 1, 2, or 3) nucleotides from the nucleotide sequence set forth in any one of SEQ ID NOS: 4-1576 (e.g., any one of SEQ ID NOS: 4-19 or 772-787). In some embodiments, the nucleotide sequence of the sense strand comprises the nucleotide sequence set forth in any one of SEQ ID NOS: 1577-3166 (e.g., any one of SEQ ID NOS: 1577-1592 or 2346-2361) differing by no more than 2 (e.g., 0, 1, or 2) nucleotides from the nucleotide sequence set forth in any one of SEQ ID NOS: 1577-3166 (e.g., any one of SEQ ID NOS: 1577-1592 or 2346-2361); and the nucleotide sequence of the antisense strand differs by no more than 2 (e.g., 0, 1, or 2) nucleotides from the nucleotide sequence set forth in any one of SEQ ID NOS: 4-1576 (e.g., any one of SEQ ID NOS: 4-19 or 772-787). In some embodiments, the nucleotide sequence of the sense strand comprises the nucleotide sequence set forth in any one of SEQ ID NOS: 1577-3166 (e.g., any one of SEQ ID NOS: 1577-1592 or 2346-2361) differing by no more than 1 (e.g., 0 or 1) nucleotide from the nucleotide sequence set forth in any one of SEQ ID NOS: 1577-3166 (e.g., any one of SEQ ID NOS: 1577-1592 or 2346-2361); and the nucleotide sequence of the antisense strand differs by no more than 1 (e.g., 0 or 1) nucleotide from the nucleotide sequence set forth in any one of SEQ ID NOS: 4-1576 (e.g., any one of SEQ ID NOS: 4-19 or 772-787).

[0299] In some embodiments, the nucleotide sequence of the sense strand is at least 85%, 86%, 87%, 88%, 89%, 90%, 91%, 92%, 93%, 94%, 95%, 96%, 97%, 98%, 99% or 100% identical to the nucleotide sequence set forth in any one of SEQ ID NOS: 1577-3166 (e.g., any one of SEQ ID NOS: 1577-1592 or 2346-2361); and the nucleotide sequence of the antisense strand is at least 85%, 86%, 87%, 88%, 89%, 90%, 91%, 92%, 93%, 94%, 95%, 96%, 97%, 98%, 99% or 100% identical to the nucleotide sequence set forth in any one of SEQ ID NOS: 4-1576 (e.g., any one of SEQ ID NOS: 4-19 or 772-787). In some embodiments, the nucleotide sequence of the sense strand is at least 90%, 91%, 92%, 93%, 94%, 95%, 96%, 97%, 98%, 99% or 100% identical to the nucleotide sequence set forth in any one of SEQ ID NOS: 1577-3166 (e.g., any one of SEQ ID NOS: 1577-1592 or 2346-2361); and the nucleotide sequence of the antisense strand is at least 90%, 91%, 92%, 93%, 94%, 95%, 96%, 97%, 98%, 99% or 100% identical to the nucleotide sequence set forth in any one of SEQ ID NOS: 4-1576 (e.g., any one of SEQ ID NOS: 4-19 or 772-787). In some embodiments, the nucleotide sequence of the sense strand is at least 95%, 96%, 97%, 98%, 99% or 100% identical to the nucleotide sequence set forth in any one of SEQ ID NOS: 1577-3166 (e.g., any one of SEQ ID NOS: 1577-1592 or 2346-2361); and the nucleotide sequence of the antisense strand is at least 95%, 96%, 97%, 98%, 99% or 100% identical to the nucleotide sequence set forth in any one of SEQ ID NOS: 4-1576 (e.g., any one of SEQ ID NOS: 4-19 or 772-787). In some embodiments, the nucleotide sequence of the sense strand is at least 96%, 97%, 98%, 99% or 100% identical to the nucleotide sequence set forth in any one of SEQ ID NOS: 1577-3166 (e.g., any one of SEQ ID NOS: 1577-1592 or 2346-2361); and the nucleotide sequence of the antisense strand is at least 96%, 97%, 98%, 99% or 100% identical to the nucleotide sequence set forth in any one of SEQ ID NOS: 4-1576 (e.g., any one of SEQ ID NOS: 4-19 or 772-787). In some embodiments, the nucleotide sequence of the sense strand is at least 97%, identical to the nucleotide sequence set forth in any one of SEQ ID NOS: 1577-3166 (e.g., any one of SEQ ID NOS: 1577-1592 or 2346-2361); and the nucleotide sequence of the antisense strand is at least 97%, identical to the nucleotide sequence set forth in any one of SEQ ID NOS: 4-1576 (e.g., any one of SEQ ID NOS: 4-19 or 772-787). In some embodiments, the nucleotide sequence of the sense strand is at least 98% identical to the nucleotide sequence set forth in any one of SEQ ID NOS: 1577-3166 (e.g., any one of SEQ ID NOS: 1577-1592 or 2346-2361); and the nucleotide sequence of the antisense strand is at least 98% identical to the nucleotide sequence set forth in any one of SEQ ID NOS: 4-1576 (e.g., any one of SEQ ID NOS: 4-19 or 772-787). In some embodiments, the nucleotide sequence of the sense strand is at least 99% identical to the nucleotide sequence set forth in any one of SEQ ID NOS: 1577-3166 (e.g., any one of SEQ ID NOS: 1577-1592 or 2346-2361); and the nucleotide sequence of the antisense strand is at least 99% identical to the nucleotide sequence set forth in any one of SEQ ID NOS: 4-1576 (e.g., any one of SEQ ID NOS: 4-19 or 772-787). In some embodiments, the nucleotide sequence of the sense strand is 100% identical to the nucleotide sequence set forth in any one of SEQ ID NOS: 1577-3166 (e.g., any one of SEQ ID NOS: 1577-1592 or 2346-2361); and the nucleotide sequence of the antisense strand is 100% identical to the nucleotide sequence set forth in any one of SEQ ID NOS: 4-1576 (e.g., any one of SEQ ID NOS: 4-19 or 772-787).

[0300] In some embodiments, the nucleotide sequence of the sense strand comprises the nucleotide sequence set forth in any one of SEQ ID NOS: 1577-3166 (e.g., any one of SEQ ID NOS: 1577-1592 or 2346-2361); and the nucleotide sequence of the antisense strand comprises the nucleotide sequence set forth in any one of SEQ ID NOS: 4-1576 (e.g., any one of SEQ ID NOS: 4-19 or 772-787). In some embodiments, the nucleotide sequence of the sense strand consists of the nucleotide sequence set forth in any one of SEQ ID NOS: 1577-3166 (e.g., any one of SEQ ID NOS: 1577-1592 or 2346-2361); and the nucleotide sequence of the antisense strand consists of the nucleotide sequence set forth in any one of SEQ ID NOS: 4-1576 (e.g., any one of SEQ ID NOS: 4-19 or 772-787).

[0301] In some embodiments, the nucleotide sequence of the sense strand differs by no more than 5 (e.g., 0, 1, 2, 3, 4, or 5) nucleotides from the nucleotide sequence set forth in any one of SEQ ID NOS: 1577-3166 (e.g., any one of SEQ ID NOS: 1577-1592 or 2346-2361). In some embodiments, the nucleotide sequence of the sense strand differs by no more than 3 (e.g., 0, 1, 2, or 3) nucleotides from the nucleotide sequence set forth in any one of SEQ ID NOS: 1577-3166 (e.g., any one of SEQ ID NOS: 1577-1592 or 2346-2361). In some embodiments, the nucleotide sequence of the sense strand differs by no more than 2 (e.g., 0, 1, or 2) nucleotides from the nucleotide sequence set forth in any one of SEQ ID NOS: 1577-3166 (e.g., any one of SEQ ID NOS: 1577-1592 or 2346-2361). In some embodiments, the nucleotide sequence of the sense strand differs by no more than 1 (e.g., 0 or 1) nucleotide from the nucleotide sequence set forth in any one of SEQ ID NOS: 1577-3166 (e.g., any one of SEQ ID NOS: 1577-1592 or 2346-2361).

[0302] In some embodiments, the antisense strand comprises at least 15 (e.g., 15, 16, 17, 18, 19, 20, 21, 22, 23, 24, 25, 26, 27, 28, 29, 30 (e.g., 19, 20, 21, 22, 23 (e.g., 23))) contiguous nucleotides differing by no more than 3 (e.g., 0, 1, 2, or 3) nucleotides from the nucleotide sequence of any one of the antisense strands set forth in any one of SEQ ID NOS: 4-1576 (e.g., any one of SEQ ID NOS: 4-19 or 772-787); and the sense strand comprises at least 15 (e.g., 15, 16, 17, 18, 19, 20, 21, 22, 23, 24, 25, 26, 27, 28, 29, 30 (e.g., 19, 20, 21, 22, 23 (e.g., 21))) contiguous nucleotides differing by no more than 3 (e.g., 0, 1, 2, or 3) nucleotides from the nucleotide sequence of any one of the sense strands set forth in any one of SEQ ID NOS: 1577-3166 (e.g., any one of SEQ ID NOS: 1577-1592 or 2346-2361). In some embodiments, the antisense strand comprises at least 19 (e.g., 20, 21, 22, 23, 24, 25, 26, 27, 28, 29, 30 (e.g., 19, 20, 21, 22, 23 (e.g., 23))) contiguous nucleotides differing by no more than 3 (e.g., 0, 1, 2, or 3) nucleotides from the nucleotide sequence of any one of the antisense strands set forth in any one of SEQ ID NOS: 4-1576 (e.g., any one of SEQ ID NOS: 4-19 or 772-787); and the sense strand comprises at least 19 (e.g., 20, 21, 22, 23, 24, 25, 26, 27, 28, 29, 30 (e.g., 19, 20, 21, 22, 23 (e.g., 21))) contiguous nucleotides differing by no more than 3 (e.g., 0, 1, 2, or 3) nucleotides from the nucleotide sequence of any one of the sense strands set forth in any one of SEQ ID NOS: 1577-3166 (e.g., any one of SEQ ID NOS: 1577-1592 or 2346-2361). In some embodiments, the antisense strand comprises at least 21 (e.g., 22, 23, 24, 25, 26, 27, 28, 29, 30 (e.g., 21, 22, 23 (e.g., 23))) contiguous nucleotides differing by no more than 3 (e.g., 0, 1, 2, or 3) nucleotides from the nucleotide sequence of any one of the antisense strands set forth in any one of SEQ ID NOS: 4-1576 (e.g., any one of SEQ ID NOS: 4-19 or 772-787); and the sense strand comprises at least 19 (e.g., 20, 21, 22, 23, 24, 25, 26, 27, 28, 29, 30 (e.g., 19, 20, 21, 22, 23 (e.g., 21))) contiguous nucleotides differing by no more than 3 (e.g., 0, 1, 2, or 3) nucleotides from the nucleotide sequence of any one of the sense strands set forth in any one of SEQ ID NOS: 1577-3166 (e.g., any one of SEQ ID NOS: 1577-1592 or 2346-2361). In some embodiments, the antisense strand comprises at least 21 (e.g., 22, 23, 24, 25, 26, 27, 28, 29, 30 (e.g., 21, 22, 23 (e.g., 23))) contiguous nucleotides differing by no more than 3 (e.g., 0, 1, 2, or 3) nucleotides from the nucleotide sequence of any one of the antisense strands set forth in any one of SEQ ID NOS: 4-1576 (e.g., any one of SEQ ID NOS: 4-19 or 772-787); and the sense strand comprises at least 21 (e.g., 22, 23, 24, 25, 26, 27, 28, 29, 30 (e.g., 21, 22, 23 (e.g., 21))) contiguous nucleotides differing by no more than 3 (e.g., 0, 1, 2, or 3) nucleotides from the nucleotide sequence of any one of the sense strands set forth in any one of SEQ ID NOS: 1577-3166 (e.g., any one of SEQ ID NOS: 1577-1592 or 2346-2361). In some embodiments, the antisense strand comprises at least 23 (e.g., 24, 25, 26, 27, 28, 29, 30 (e.g., 23)) contiguous nucleotides differing by no more than 3 (e.g., 0, 1, 2, or 3) nucleotides from the nucleotide sequence of any one of the antisense strands set forth in any one of SEQ ID NOS: 4-1576 (e.g., any one of SEQ ID NOS: 4-19 or 772-787); and the sense strand comprises at least 21 (e.g., 22, 23, 24, 25, 26, 27, 28, 29, 30 (e.g., 21, 22, 23 (e.g., 21))) contiguous nucleotides differing by no more than 3 (e.g., 0, 1, 2, or 3) nucleotides from the nucleotide sequence of any one of the sense strands set forth in any one of SEQ ID NOS: 1577-3166 (e.g., any one of SEQ ID NOS: 1577-1592 or 2346-2361).

[0303] In some embodiments, the antisense strand comprises from about 15-23 (e.g., 15-22, 15-21, 15-20, 15-19, 15-18, 15-17, 15-16, 16-22, 16-20, 16-19, 16-18, 16-17, 17-23, 17-22, 17-21, 17-20, 17-19, 17-18, 18-23, 18-22, 18-21, 18-20, 18-19, 19-23, 19-22, 19-21, 19-20, 20-23, 20-22, 20-21, 21-23, 21-22, 22-23) contiguous nucleotides differing by no more than 3 (e.g., 0, 1, 2, or 3) nucleotides from the nucleotide sequence of any one of the antisense strands set forth in any one of SEQ ID NOS: 4-1576 (e.g., any one of SEQ ID NOS: 4-19 or 772-787); and the sense strand comprises from about 15-23 (e.g., 15-22, 15-21, 15-20, 15-19, 15-18, 15-17, 15-16, 16-22, 16-20, 16-19, 16-18, 16-17, 17-23, 17-22, 17-21, 17-20, 17-19, 17-18, 18-23, 18-22, 18-21, 18-20, 18-19, 19-23, 19-22, 19-21, 19-20, 20-23, 20-22, 20-21, 21-23, 21-22, 22-23) contiguous nucleotides differing by no more than 3 (e.g., 0, 1, 2, or 3) nucleotides from the nucleotide sequence of any one of the sense strands set forth in any one of SEQ ID NOS: 1577-3166 (e.g., any one of SEQ ID NOS: 1577-1592 or 2346-2361). In some embodiments, the antisense strand comprises from about 19-23 (e.g., 19-22, 19-21, 19-20, 20-23, 20-22, 20-21, 21-23, 21-22, 22-23) contiguous nucleotides differing by no more than 3 (e.g., 0, 1, 2, or 3) nucleotides from the nucleotide sequence of any one of the antisense strands set forth in any one of SEQ ID NOS: 4-1576 (e.g., any one of SEQ ID NOS: 4-19 or 772-787); and the sense strand comprises from about 19-23 (e.g., 19-22, 19-21, 19-20, 20-23, 20-22, 20-21, 21-23, 21-22, 22-23) contiguous nucleotides differing by no more than 3 (e.g., 0, 1, 2, or 3) nucleotides from the nucleotide sequence of any one of the sense strands set forth in any one of SEQ ID NOS: 1577-3166 (e.g., any one of SEQ ID NOS: 1577-1592 or 2346-2361). In some embodiments, the antisense strand comprises from about from about 21-23 (e.g., 21-22, 22-23) contiguous nucleotides differing by no more than 3 (e.g., 0, 1, 2, or 3) nucleotides from the nucleotide sequence of any one of the antisense strands set forth in any one of SEQ ID NOS: 4-1576 (e.g., any one of SEQ ID NOS: 4-19 or 772-787); and the sense strand comprises from about 19-23 (e.g., 19-22, 19-21, 19-20, 20-23, 20-22, 20-21, 21-23, 21-22, 22-23) contiguous nucleotides differing by no more than 3 (e.g., 0, 1, 2, or 3) nucleotides from the nucleotide sequence of any one of the sense strands set forth in any one of SEQ ID NOS: 1577-3166 (e.g., any one of SEQ ID NOS: 1577-1592 or 2346-2361). In some embodiments, the antisense strand comprises from about 21-23 (e.g., 21-22, 22-23) contiguous nucleotides differing by no more than 3 (e.g., 0, 1, 2, or 3) nucleotides from the nucleotide sequence of any one of the antisense strands set forth in any one of SEQ ID NOS: 4-1576 (e.g., any one of SEQ ID NOS: 4-19 or 772-787); and the sense strand comprises from about 21-23 (e.g., 21-22, 22-23) contiguous nucleotides differing by no more than 3 (e.g., 0, 1, 2, or 3) nucleotides from the nucleotide sequence of any one of the sense strands set forth in any one of SEQ ID NOS: 1577-3166 (e.g., any one of SEQ ID NOS: 1577-1592 or 2346-2361).

[0304] In some embodiments, the antisense strand comprises or consists of about 15, 16, 17, 18, 19, 20, 21, 22, 23, 24, 25, 26, 27, 28, 29, or 30 (e.g., 19, 20, 21, 22, 23 (e.g., 23)) contiguous nucleotides differing by no more than 3 (e.g., 0, 1, 2, or 3) nucleotides from the nucleotide sequence of any one of the antisense strands set forth in any one of SEQ ID NOS: 4-1576 (e.g., any one of SEQ ID NOS: 4-19 or 772-787); and the sense strand comprises or consists of about 15, 16, 17, 18, 19, 20, 21, 22, 23, 24, 25, 26, 27, 28, 29, or 30 (e.g., 19, 20, 21, 22, 23 (e.g., 21)) contiguous nucleotides differing by no more than 3 (e.g., 0, 1, 2, or 3) nucleotides from the nucleotide sequence of any one of the sense strands set forth in any one of SEQ ID NOS: 1577-3166 (e.g., any one of SEQ ID NOS: 1577-1592 or 2346-2361). In some embodiments, the antisense strand comprises or consists of about 19, 20, 21, 22, 23, 24, 25, 26, 27, 28, 29, 30 (e.g., 19, 20, 21, 22, 23 (e.g., 23)) contiguous nucleotides differing by no more than 3 (e.g., 0, 1, 2, or 3) nucleotides from the nucleotide sequence of any one of the antisense strands set forth in any one of SEQ ID NOS: 4-1576 (e.g., any one of SEQ ID NOS: 4-19 or 772-787); and the sense strand comprises or consists of 19, 20, 21, 22, 23, 24, 25, 26, 27, 28, 29, 30 (e.g., 19, 20, 21, 22, 23 (e.g., 21)) contiguous nucleotides differing by no more than 3 (e.g., 0, 1, 2, or 3) nucleotides from the nucleotide sequence of any one of the sense strands set forth in any one of SEQ ID NOS: 1577-3166 (e.g., any one of SEQ ID NOS: 1577-1592 or 2346-2361). In some embodiments, the antisense strand comprises or consists of about 21, 22, 23, 24, 25, 26, 27, 28, 29, 30 (e.g., 21, 22, 23 (e.g., 23)) contiguous nucleotides differing by no more than 3 (e.g., 0, 1, 2, or 3) nucleotides from the nucleotide sequence of any one of the antisense strands set forth in any one of SEQ ID NOS: 4-1576 (e.g., any one of SEQ ID NOS: 4-19 or 772-787); and the sense strand comprises or consists of about 19, 20, 21, 22, 23, 24, 25, 26, 27, 28, 29, 30 (e.g., 19, 20, 21, 22, 23 (e.g., 21)) contiguous nucleotides differing by no more than 3 (e.g., 0, 1, 2, or 3) nucleotides from the nucleotide sequence of any one of the sense strands set forth in any one of SEQ ID NOS: 1577-3166 (e.g., any one of SEQ ID NOS: 1577-1592 or 2346-2361). In some embodiments, the antisense strand comprises or consists of about 21, 22, 23, 24, 25, 26, 27, 28, 29, 30 (e.g., 21, 22, 23 (e.g., 23)) contiguous nucleotides differing by no more than 3 (e.g., 0, 1, 2, or 3) nucleotides from the nucleotide sequence of any one of the antisense strands set forth in any one of SEQ ID NOS: 4-1576 (e.g., any one of SEQ ID NOS: 4-19 or 772-787); and the sense strand comprises or consists of at about 21, 22, 23, 24, 25, 26, 27, 28, 29, 30 (e.g., 21, 22, 23 (e.g., 21)) contiguous nucleotides differing by no more than 3 (e.g., 0, 1, 2, or 3) nucleotides from the nucleotide sequence of any one of the sense strands set forth in any one of SEQ ID NOS: 1577-3166 (e.g., any one of SEQ ID NOS: 1577-1592 or 2346-2361). In some embodiments, the antisense strand comprises or consists of about 23, 24, 25, 26, 27, 28, 29, 30 (e.g., 23) contiguous nucleotides differing by no more than 3 (e.g., 0, 1, 2, or 3) nucleotides from the nucleotide sequence of any one of the antisense strands set forth in any one of SEQ ID NOS: 4-1576 (e.g., any one of SEQ ID NOS: 4-19 or 772-787); and the sense strand comprises or consists of about 21, 22, 23, 24, 25, 26, 27, 28, 29, 30 (e.g., 21, 22, 23 (e.g., 21)) contiguous nucleotides differing by no more than 3 (e.g., 0, 1, 2, or 3) nucleotides from the nucleotide sequence of any one of the sense strands set forth in any one of SEQ ID NOS: 1577-3166 (e.g., any one of SEQ ID NOS: 1577-1592 or 2346-2361). In some embodiments, the antisense strand comprises or consists of about 23 contiguous nucleotides differing by no more than 3 (e.g., 0, 1, 2, or 3) nucleotides from the nucleotide sequence of any one of the antisense strands set forth in any one of SEQ ID NOS: 4-1576 (e.g., any one of SEQ ID NOS: 4-19 or 772-787); and the sense strand comprises or consists of about 21 contiguous nucleotides differing by no more than 3 (e.g., 0, 1, 2, or 3) nucleotides from the nucleotide sequence of any one of the sense strands set forth in any one of SEQ ID NOS: 1577-3166 (e.g., any one of SEQ ID NOS: 1577-1592 or 2346-2361). In some embodiments, the antisense strand comprises or consists of about 21 contiguous nucleotides differing by no more than 3 (e.g., 0, 1, 2, or 3) nucleotides from the nucleotide sequence of any one of the antisense strands set forth in any one of SEQ ID NOS: 4-1576 (e.g., any one of SEQ ID NOS: 4-19 or 772-787); and the sense strand comprises or consists of about 19 contiguous nucleotides differing by no more than 3 (e.g., 0, 1, 2, or 3) nucleotides from the nucleotide sequence of any one of the sense strands set forth in any one of SEQ ID NOS: 1577-3166 (e.g., any one of SEQ ID NOS: 1577-1592 or 2346-2361).

[0305] In some embodiments, the nucleotide sequence of the antisense strand comprises or consists of the nucleotide sequence of any one of the antisense strands set forth in any one of SEQ ID NOS: 4-1576 (e.g., any one of SEQ ID NOS: 4-19 or 772-787) differing by no more than 3 (e.g., 0, 1, 2, or 3) nucleotides from the antisense strand set forth in any one of SEQ ID NOS: 4-1576 (e.g., any one of SEQ ID NOS: 4-19 or 772-787); and the nucleotide sequence of the sense strand comprises or consists of the nucleotide sequence of any one of the sense strands set forth in any one of SEQ ID NOS: 1577-3166 (e.g., any one of SEQ ID NOS: 1577-1592 or 2346-2361) differing by no more than 3 (e.g., 0, 1, 2, or 3) nucleotides from the sense strand set forth in any one of SEQ ID NOS: 1577-3166 (e.g., any one of SEQ ID NOS: 1577-1592 or 2346-2361).

[0306] In some embodiments, the nucleotide sequence of the antisense strand comprises or consists of the nucleotide sequence of any one of any one of the antisense strands set forth in any one of SEQ ID NOS: 4-1576 (e.g., any one of SEQ ID NOS: 4-19 or 772-787); and the nucleotide sequence of the sense strand comprises or consists of the nucleotide sequence of any one of the sense strands set forth in any one of SEQ ID NOS: 1577-3166 (e.g., any one of SEQ ID NOS: 1577-1592 or 2346-2361).

[0307] In some embodiments, the antisense strand comprises at least 15 (e.g., 15, 16, 17, 18, 19, 20, 21, 22, 23, 24, 25, 26, 27, 28, 29, 30 (e.g., 19, 20, 21, 22, 23 (e.g., 23))) contiguous nucleotides differing by no more than 3 (e.g., 0, 1, 2, or 3) nucleotides from the nucleotide sequence of any one of the antisense strands set forth in any one of SEQ ID NOS: 4-1576 (e.g., any one of SEQ ID NOS: 4-19 or 772-787); and the sense strand comprises at least 15 (e.g., 15, 16, 17, 18, 19, 20, 21, 22, 23, 24, 25, 26, 27, 28, 29, 30 (e.g., 19, 20, 21, 22, 23 (e.g., 21))) contiguous nucleotides differing by no more than 3 (e.g., 0, 1, 2, or 3) nucleotides from the nucleotide sequence of the corresponding sense strand (e.g., as set forth in one of SEQ ID NOS: 1577-3166). In some embodiments, the antisense strand comprises at least 19 (e.g., 20, 21, 22, 23, 24, 25, 26, 27, 28, 29, 30 (e.g., 19, 20, 21, 22, 23 (e.g., 23))) contiguous nucleotides differing by no more than 3 (e.g., 0, 1, 2, or 3) nucleotides from the nucleotide sequence of any one of the antisense strands set forth in any one of SEQ ID NOS: 4-1576 (e.g., any one of SEQ ID NOS: 4-19 or 772-787); and the sense strand comprises at least 19 (e.g., 20, 21, 22, 23, 24, 25, 26, 27, 28, 29, 30 (e.g., 19, 20, 21, 22, 23 (e.g., 21))) contiguous nucleotides differing by no more than 3 (e.g., 0, 1, 2, or 3) nucleotides from the nucleotide sequence of the corresponding sense strand (e.g., as set forth in one of SEQ ID NOS: 1577-3166). In some embodiments, the antisense strand comprises at least 21 (e.g., 22, 23, 24, 25, 26, 27, 28, 29, 30 (e.g., 21, 22, 23 (e.g., 23))) contiguous nucleotides differing by no more than 3 (e.g., 0, 1, 2, or 3) nucleotides from the nucleotide sequence of any one of the antisense strands set forth in any one of SEQ ID NOS: 4-1576 (e.g., any one of SEQ ID NOS: 4-19 or 772-787); and the sense strand comprises at least 19 (e.g., 20, 21, 22, 23, 24, 25, 26, 27, 28, 29, 30 (e.g., 19, 20, 21, 22, 23 (e.g., 21))) contiguous nucleotides differing by no more than 3 (e.g., 0, 1, 2, or 3) nucleotides from the nucleotide sequence of the corresponding sense strand (e.g., as set forth in one of SEQ ID NOS: 1577-3166). In some embodiments, the antisense strand comprises at least 21 (e.g., 22, 23, 24, 25, 26, 27, 28, 29, 30 (e.g., 21, 22, 23 (e.g., 23))) contiguous nucleotides differing by no more than 3 (e.g., 0, 1, 2, or 3) nucleotides from the nucleotide sequence of any one of the antisense strands set forth in any one of SEQ ID NOS: 4-1576 (e.g., any one of SEQ ID NOS: 4-19 or 772-787); and the sense strand comprises at least 21 (e.g., 22, 23, 24, 25, 26, 27, 28, 29, 30 (e.g., 21, 22, 23 (e.g., 21))) contiguous nucleotides differing by no more than 3 (e.g., 0, 1, 2, or 3) nucleotides from the nucleotide sequence of the corresponding sense strand (e.g., as set forth in one of SEQ ID NOS: 1577-3166). In some embodiments, the antisense strand comprises at least 23 (e.g., 24, 25, 26, 27, 28, 29, 30 (e.g., 23)) contiguous nucleotides differing by no more than 3 (e.g., 0, 1, 2, or 3) nucleotides from the nucleotide sequence of any one of the antisense strands set forth in any one of SEQ ID NOS: 4-1576 (e.g., any one of SEQ ID NOS: 4-19 or 772-787); and the sense strand comprises at least 21 (e.g., 22, 23, 24, 25, 26, 27, 28, 29, 30 (e.g., 21, 22, 23 (e.g., 21))) contiguous nucleotides differing by no more than 3 (e.g., 0, 1, 2, or 3) nucleotides from the nucleotide sequence of the corresponding sense strand (e.g., as set forth in one of SEQ ID NOS: 1577-3166).

[0308] In some embodiments, the antisense strand comprises from about 15-23 (e.g., 15-22, 15-21, 15-20, 15-19, 15-18, 15-17, 15-16, 16-22, 16-20, 16-19, 16-18, 16-17, 17-23, 17-22, 17-21, 17-20, 17-19, 17-18, 18-23, 18-22, 18-21, 18-20, 18-19, 19-23, 19-22, 19-21, 19-20, 20-23, 20-22, 20-21, 21-23, 21-22, 22-23) contiguous nucleotides differing by no more than 3 (e.g., 0, 1, 2, or 3) nucleotides from the nucleotide sequence of any one of the antisense strands set forth in any one of SEQ ID NOS: 4-1576 (e.g., any one of SEQ ID NOS: 4-19 or 772-787); and the sense strand comprises from about 15-23 (e.g., 15-22, 15-21, 15-20, 15-19, 15-18, 15-17, 15-16, 16-22, 16-20, 16-19, 16-18, 16-17, 17-23, 17-22, 17-21, 17-20, 17-19, 17-18, 18-23, 18-22, 18-21, 18-20, 18-19, 19-23, 19-22, 19-21, 19-20, 20-23, 20-22, 20-21, 21-23, 21-22, 22-23) contiguous nucleotides differing by no more than 3 (e.g., 0, 1, 2, or 3) nucleotides from the nucleotide sequence of the corresponding sense strand (e.g., as set forth in one of SEQ ID NOS: 1577-3166). In some embodiments, the antisense strand comprises from about 19-23 (e.g., 19-22, 19-21, 19-20, 20-23, 20-22, 20-21, 21-23, 21-22, 22-23) contiguous nucleotides differing by no more than 3 (e.g., 0, 1, 2, or 3) nucleotides from the nucleotide sequence of any one of the antisense strands set forth in any one of SEQ ID NOS: 4-1576 (e.g., any one of SEQ ID NOS: 4-19 or 772-787); and the sense strand comprises from about 19-23 (e.g., 19-22, 19-21, 19-20, 20-23, 20-22, 20-21, 21-23, 21-22, 22-23) contiguous nucleotides differing by no more than 3 (e.g., 0, 1, 2, or 3) nucleotides from the nucleotide sequence of the corresponding sense strand (e.g., as set forth in one of SEQ ID NOS: 1577-3166). In some embodiments, the antisense strand comprises from about from about 21-23 (e.g., 21-22, 22-23) contiguous nucleotides differing by no more than 3 (e.g., 0, 1, 2, or 3) nucleotides from the nucleotide sequence of any one of the antisense strands set forth in any one of SEQ ID NOS: 4-1576 (e.g., any one of SEQ ID NOS: 4-19 or 772-787); and the sense strand comprises from about 19-23 (e.g., 19-22, 19-21, 19-20, 20-23, 20-22, 20-21, 21-23, 21-22, 22-23) contiguous nucleotides differing by no more than 3 (e.g., 0, 1, 2, or 3) nucleotides from the nucleotide sequence of the corresponding sense strand (e.g., as set forth in one of SEQ ID NOS: 1577-3166). In some embodiments, the antisense strand comprises from about 21-23 (e.g., 21-22, 22-23) contiguous nucleotides differing by no more than 3 (e.g., 0, 1, 2, or 3) nucleotides from the nucleotide sequence of any one of the antisense strands set forth in any one of SEQ ID NOS: 4-1576 (e.g., any one of SEQ ID NOS: 4-19 or 772-787); and the sense strand comprises from about 21-23 (e.g., 21-22, 22-23) contiguous nucleotides differing by no more than 3 (e.g., 0, 1, 2, or 3) nucleotides from the nucleotide sequence of the corresponding sense strand (e.g., as set forth in one of SEQ ID NOS: 1577-3166).

[0309] In some embodiments, the antisense strand comprises or consists of about 15, 16, 17, 18, 19, 20, 21, 22, 23, 24, 25, 26, 27, 28, 29, or 30 (e.g., 19, 20, 21, 22, 23 (e.g., 23)) contiguous nucleotides differing by no more than 3 (e.g., 0, 1, 2, or 3) nucleotides from the nucleotide sequence of any one of the antisense strands set forth in any one of SEQ ID NOS: 4-1576 (e.g., any one of SEQ ID NOS: 4-19 or 772-787); and the sense strand comprises or consists of about 15, 16, 17, 18, 19, 20, 21, 22, 23, 24, 25, 26, 27, 28, 29, or 30 (e.g., 19, 20, 21, 22, 23 (e.g., 21)) contiguous nucleotides differing by no more than 3 (e.g., 0, 1, 2, or 3) nucleotides from the nucleotide sequence of the corresponding sense strand (e.g., as set forth in one of SEQ ID NOS: 1577-3166). In some embodiments, the antisense strand comprises or consists of about 19, 20, 21, 22, 23, 24, 25, 26, 27, 28, 29, 30 (e.g., 19, 20, 21, 22, 23 (e.g., 23)) contiguous nucleotides differing by no more than 3 (e.g., 0, 1, 2, or 3) nucleotides from the nucleotide sequence of any one of the antisense strands set forth in any one of SEQ ID NOS: 4-1576 (e.g., any one of SEQ ID NOS: 4-19 or 772-787); and the sense strand comprises or consists of 19, 20, 21, 22, 23, 24, 25, 26, 27, 28, 29, 30 (e.g., 19, 20, 21, 22, 23 (e.g., 21)) contiguous nucleotides differing by no more than 3 (e.g., 0, 1, 2, or 3) nucleotides from the nucleotide sequence of the corresponding sense strand (e.g., as set forth in one of SEQ ID NOS: 1577-3166). In some embodiments, the antisense strand comprises or consists of about 21, 22, 23, 24, 25, 26, 27, 28, 29, 30 (e.g., 21, 22, 23 (e.g., 23)) contiguous nucleotides differing by no more than 3 (e.g., 0, 1, 2, or 3) nucleotides from the nucleotide sequence of any one of the antisense strands set forth in any one of SEQ ID NOS: 4-1576 (e.g., any one of SEQ ID NOS: 4-19 or 772-787); and the sense strand comprises or consists of about 19, 20, 21, 22, 23, 24, 25, 26, 27, 28, 29, 30 (e.g., 19, 20, 21, 22, 23 (e.g., 21)) contiguous nucleotides differing by no more than 3 (e.g., 0, 1, 2, or 3) nucleotides from the nucleotide sequence of the corresponding sense strand (e.g., as set forth in one of SEQ ID NOS: 1577-3166). In some embodiments, the antisense strand comprises or consists of about 21, 22, 23, 24, 25, 26, 27, 28, 29, 30 (e.g., 21, 22, 23 (e.g., 23)) contiguous nucleotides differing by no more than 3 (e.g., 0, 1, 2, or 3) nucleotides from the nucleotide sequence of any one of the antisense strands set forth in any one of SEQ ID NOS: 4-1576 (e.g., any one of SEQ ID NOS: 4-19 or 772-787); and the sense strand comprises or consists of at about 21, 22, 23, 24, 25, 26, 27, 28, 29, 30 (e.g., 21, 22, 23 (e.g., 21)) contiguous nucleotides differing by no more than 3 (e.g., 0, 1, 2, or 3) nucleotides from the nucleotide sequence of the corresponding sense strand (e.g., as set forth in one of SEQ ID NOS: 1577-3166). In some embodiments, the antisense strand comprises or consists of about 23, 24, 25, 26, 27, 28, 29, 30 (e.g., 23) contiguous nucleotides differing by no more than 3 (e.g., 0, 1, 2, or 3) nucleotides from the nucleotide sequence of any one of the antisense strands set forth in any one of SEQ ID NOS: 4-1576 (e.g., any one of SEQ ID NOS: 4-19 or 772-787); and the sense strand comprises or consists of about 21, 22, 23, 24, 25, 26, 27, 28, 29, 30 (e.g., 21, 22, 23 (e.g., 21)) contiguous nucleotides differing by no more than 3 (e.g., 0, 1, 2, or 3) nucleotides from the nucleotide sequence of the corresponding sense strand (e.g., as set forth in one of SEQ ID NOS: 1577-3166). In some embodiments, the antisense strand comprises or consists of about 23 contiguous nucleotides differing by no more than 3 (e.g., 0, 1, 2, or 3) nucleotides from the nucleotide sequence of any one of the antisense strands set forth in any one of SEQ ID NOS: 4-1576 (e.g., any one of SEQ ID NOS: 4-19 or 772-787); and the sense strand comprises or consists of about 21 contiguous nucleotides differing by no more than 3 (e.g., 0, 1, 2, or 3) nucleotides from the nucleotide sequence of the corresponding sense strand (e.g., as set forth in one of SEQ ID NOS: 1577-3166). In some embodiments, the antisense strand comprises or consists of about 21 contiguous nucleotides differing by no more than 3 (e.g., 0, 1, 2, or 3) nucleotides from the nucleotide sequence of any one of the antisense strands set forth in any one of SEQ ID NOS: 4-1576 (e.g., any one of SEQ ID NOS: 4-19 or 772-787); and the sense strand comprises or consists of about 19 contiguous nucleotides differing by no more than 3 (e.g., 0, 1, 2, or 3) nucleotides from the nucleotide sequence of the corresponding sense strand (e.g., as set forth in one of SEQ ID NOS: 1577-3166).

[0310] In some embodiments, the nucleotide sequence of the antisense strand comprises or consists of the nucleotide sequence of any one of the antisense strands set forth in any one of SEQ ID NOS: 4-1576 (e.g., any one of SEQ ID NOS: 4-19 or 772-787) differing by no more than 3 (e.g., 0, 1, 2, or 3) nucleotides from the antisense strand set forth in any one of SEQ ID NOS: 4-1576 (e.g., any one of SEQ ID NOS: 4-19 or 772-787); and the nucleotide sequence of the sense strand comprises or consists of the nucleotide sequence of the corresponding sense strand (e.g., as set forth in one of SEQ ID NOS: 1577-3166) differing by no more than 3 (e.g., 0, 1, 2, or 3) nucleotides from the sense strand set forth in any one of SEQ ID NOS: 1577-3166 (e.g., any one of SEQ ID NOS: 1577-1592 or 2346-2361).

[0311] In some embodiments, the nucleotide sequence of the antisense strand comprises or consists of the nucleotide sequence of any one of any one of the antisense strands set forth in any one of SEQ ID NOS: 4-1576 (e.g., any one of SEQ ID NOS: 4-19 or 772-787); and the nucleotide sequence of the sense strand comprises or consists of the nucleotide sequence of the corresponding sense strand (e.g., as set forth in one of SEQ ID NOS: 1577-3166).

[0312] In some embodiments, the antisense strand comprises at least 15 (e.g., 15, 16, 17, 18, 19, 20, 21, 22, 23, 24, 25, 26, 27, 28, 29, 30 (e.g., 19, 20, 21, 22, 23 (e.g., 23))) contiguous nucleotides differing by no more than 3 (e.g., 0, 1, 2, or 3) nucleotides from the nucleotide sequence of the antisense strand of any one of dsRNA agents 1-1590 (e.g., one of dsRNA agents 1-16 or 770-785); and the sense strand comprises at least 15 (e.g., 15, 16, 17, 18, 19, 20, 21, 22, 23, 24, 25, 26, 27, 28, 29, 30 (e.g., 19, 20, 21, 22, 23 (e.g., 21))) contiguous nucleotides differing by no more than 3 (e.g., 0, 1, 2, or 3) nucleotides from the nucleotide sequence of the sense strand of the corresponding (the same) dsRNA agent. In some embodiments, the antisense strand comprises at least 19 (e.g., 20, 21, 22, 23, 24, 25, 26, 27, 28, 29, 30 (e.g., 19, 20, 21, 22, 23 (e.g., 23))) contiguous nucleotides differing by no more than 3 (e.g., 0, 1, 2, or 3) nucleotides from the nucleotide sequence of the antisense strand of any one of dsRNA agents 1-1590 (e.g., one of dsRNA agents 1-16 or 770-785); and the sense strand comprises at least 19 (e.g., 20, 21, 22, 23, 24, 25, 26, 27, 28, 29, 30 (e.g., 19, 20, 21, 22, 23 (e.g., 21))) contiguous nucleotides differing by no more than 3 (e.g., 0, 1, 2, or 3) nucleotides from the nucleotide sequence of the sense strand of the corresponding (the same) dsRNA agent. In some embodiments, the antisense strand comprises at least 21 (e.g., 22, 23, 24, 25, 26, 27, 28, 29, 30 (e.g., 21, 22, 23 (e.g., 23))) contiguous nucleotides differing by no more than 3 (e.g., 0, 1, 2, or 3) nucleotides from the nucleotide sequence of the antisense strand of any one of dsRNA agents 1-1590 (e.g., one of dsRNA agents 1-16 or 770-785); and the sense strand comprises at least 19 (e.g., 20, 21, 22, 23, 24, 25, 26, 27, 28, 29, 30 (e.g., 19, 20, 21, 22, 23 (e.g., 21))) contiguous nucleotides differing by no more than 3 (e.g., 0, 1, 2, or 3) nucleotides from the nucleotide sequence of the sense strand of the corresponding (the same) dsRNA agent. In some embodiments, the antisense strand comprises at least 21 (e.g., 22, 23, 24, 25, 26, 27, 28, 29, 30 (e.g., 21, 22, 23 (e.g., 23))) contiguous nucleotides differing by no more than 3 (e.g., 0, 1, 2, or 3) nucleotides from the nucleotide sequence of the antisense strand of any one of dsRNA agents 1-1590 (e.g., one of dsRNA agents 1-16 or 770-785); and the sense strand comprises at least 21 (e.g., 22, 23, 24, 25, 26, 27, 28, 29, 30 (e.g., 21, 22, 23 (e.g., 21))) contiguous nucleotides differing by no more than 3 (e.g., 0, 1, 2, or 3) nucleotides from the nucleotide sequence of the sense strand of the corresponding (the same) dsRNA agent. In some embodiments, the antisense strand comprises at least 23 (e.g., 24, 25, 26, 27, 28, 29, 30 (e.g., 23)) contiguous nucleotides differing by no more than 3 (e.g., 0, 1, 2, or 3) nucleotides from the nucleotide sequence of the antisense strand of any one of dsRNA agents 1-1590 (e.g., one of dsRNA agents 1-16 or 770-785); and the sense strand comprises at least 21 (e.g., 22, 23, 24, 25, 26, 27, 28, 29, 30 (e.g., 21, 22, 23 (e.g., 21))) contiguous nucleotides differing by no more than 3 (e.g., 0, 1, 2, or 3) nucleotides from the nucleotide sequence of the sense strand of the corresponding (the same) dsRNA agent.

[0313] In some embodiments, the antisense strand comprises from about 15-23 (e.g., 15-22, 15-21, 15-20, 15-19, 15-18, 15-17, 15-16, 16-22, 16-20, 16-19, 16-18, 16-17, 17-23, 17-22, 17-21, 17-20, 17-19, 17-18, 18-23, 18-22, 18-21, 18-20, 18-19, 19-23, 19-22, 19-21, 19-20, 20-23, 20-22, 20-21, 21-23, 21-22, 22-23) contiguous nucleotides differing by no more than 3 (e.g., 0, 1, 2, or 3) nucleotides from the nucleotide sequence of the antisense strand of any one of dsRNA agents 1-1590 (e.g., one of dsRNA agents 1-16 or 770-785); and the sense strand comprises from about 15-23 (e.g., 15-22, 15-21, 15-20, 15-19, 15-18, 15-17, 15-16, 16-22, 16-20, 16-19, 16-18, 16-17, 17-23, 17-22, 17-21, 17-20, 17-19, 17-18, 18-23, 18-22, 18-21, 18-20, 18-19, 19-23, 19-22, 19-21, 19-20, 20-23, 20-22, 20-21, 21-23, 21-22, 22-23) contiguous nucleotides differing by no more than 3 (e.g., 0, 1, 2, or 3) nucleotides from the nucleotide sequence of the sense strand of the corresponding (the same) dsRNA agent. In some embodiments, the antisense strand comprises from about 19-23 (e.g., 19-22, 19-21, 19-20, 20-23, 20-22, 20-21, 21-23, 21-22, 22-23) contiguous nucleotides differing by no more than 3 (e.g., 0, 1, 2, or 3) nucleotides from the nucleotide sequence of the antisense strand of any one of dsRNA agents 1-1590 (e.g., one of dsRNA agents 1-16 or 770-785); and the sense strand comprises from about 19-23 (e.g., 19-22, 19-21, 19-20, 20-23, 20-22, 20-21, 21-23, 21-22, 22-23) contiguous nucleotides differing by no more than 3 (e.g., 0, 1, 2, or 3) nucleotides from the nucleotide sequence of the sense strand of the corresponding (the same) dsRNA agent. In some embodiments, the antisense strand comprises from about from about 21-23 (e.g., 21-22, 22-23) contiguous nucleotides differing by no more than 3 (e.g., 0, 1, 2, or 3) nucleotides from the nucleotide sequence of the antisense strand of any one of dsRNA agents 1-1590 (e.g., one of dsRNA agents 1-16 or 770-785); and the sense strand comprises from about 19-23 (e.g., 19-22, 19-21, 19-20, 20-23, 20-22, 20-21, 21-23, 21-22, 22-23) contiguous nucleotides differing by no more than 3 (e.g., 0, 1, 2, or 3) nucleotides from the nucleotide sequence of the sense strand of the corresponding (the same) dsRNA agent. In some embodiments, the antisense strand comprises from about 21-23 (e.g., 21-22, 22-23) contiguous nucleotides differing by no more than 3 (e.g., 0, 1, 2, or 3) nucleotides from the nucleotide sequence of the antisense strand of any one of dsRNA agents 1-1590 (e.g., one of dsRNA agents 1-16 or 770-785); and the sense strand comprises from about 21-23 (e.g., 21-22, 22-23) contiguous nucleotides differing by no more than 3 (e.g., 0, 1, 2, or 3) nucleotides from the nucleotide sequence of the sense strand of the corresponding (the same) dsRNA agent.

[0314] In some embodiments, the antisense strand comprises or consists of about 15, 16, 17, 18, 19, 20, 21, 22, 23, 24, 25, 26, 27, 28, 29, or 30 (e.g., 19, 20, 21, 22, 23 (e.g., 23)) contiguous nucleotides differing by no more than 3 (e.g., 0, 1, 2, or 3) nucleotides from the nucleotide sequence of the antisense strand of any one of dsRNA agents 1-1590 (e.g., one of dsRNA agents 1-16 or 770-785); and the sense strand comprises or consists of about 15, 16, 17, 18, 19, 20, 21, 22, 23, 24, 25, 26, 27, 28, 29, or 30 (e.g., 19, 20, 21, 22, 23 (e.g., 21)) contiguous nucleotides differing by no more than 3 (e.g., 0, 1, 2, or 3) nucleotides from the nucleotide sequence of the sense strand of the corresponding (the same) dsRNA agent. In some embodiments, the antisense strand comprises or consists of about 19, 20, 21, 22, 23, 24, 25, 26, 27, 28, 29, 30 (e.g., 19, 20, 21, 22, 23 (e.g., 23)) contiguous nucleotides differing by no more than 3 (e.g., 0, 1, 2, or 3) nucleotides from the nucleotide sequence of the antisense strand of any one of dsRNA agents 1-1590 (e.g., one of dsRNA agents 1-16 or 770-785); and the sense strand comprises or consists of 19, 20, 21, 22, 23, 24, 25, 26, 27, 28, 29, 30 (e.g., 19, 20, 21, 22, 23 (e.g., 21)) contiguous nucleotides differing by no more than 3 (e.g., 0, 1, 2, or 3) nucleotides from the nucleotide sequence of the sense strand of the corresponding (the same) dsRNA agent. In some embodiments, the antisense strand comprises or consists of about 21, 22, 23, 24, 25, 26, 27, 28, 29, 30 (e.g., 21, 22, 23 (e.g., 23)) contiguous nucleotides differing by no more than 3 (e.g., 0, 1, 2, or 3) nucleotides from the nucleotide sequence of the antisense strand of any one of dsRNA agents 1-1590 (e.g., one of dsRNA agents 1-16 or 770-785); and the sense strand comprises or consists of about 19, 20, 21, 22, 23, 24, 25, 26, 27, 28, 29, 30 (e.g., 19, 20, 21, 22, 23 (e.g., 21)) contiguous nucleotides differing by no more than 3 (e.g., 0, 1, 2, or 3) nucleotides from the nucleotide sequence of the sense strand of the corresponding (the same) dsRNA agent. In some embodiments, the antisense strand comprises or consists of about 21, 22, 23, 24, 25, 26, 27, 28, 29, 30 (e.g., 21, 22, 23 (e.g., 23)) contiguous nucleotides differing by no more than 3 (e.g., 0, 1, 2, or 3) nucleotides from the nucleotide sequence of the antisense strand of any one of dsRNA agents 1-1590 (e.g., one of dsRNA agents 1-16 or 770-785); and the sense strand comprises or consists of at about 21, 22, 23, 24, 25, 26, 27, 28, 29, 30 (e.g., 21, 22, 23 (e.g., 21)) contiguous nucleotides differing by no more than 3 (e.g., 0, 1, 2, or 3) nucleotides from the nucleotide sequence of the sense strand of the corresponding (the same) dsRNA agent. In some embodiments, the antisense strand comprises or consists of about 23, 24, 25, 26, 27, 28, 29, 30 (e.g., 23) contiguous nucleotides differing by no more than 3 (e.g., 0, 1, 2, or 3) nucleotides from the nucleotide sequence of the antisense strand of any one of dsRNA agents 1-1590 (e.g., one of dsRNA agents 1-16 or 770-785); and the sense strand comprises or consists of about 21, 22, 23, 24, 25, 26, 27, 28, 29, 30 (e.g., 21, 22, 23 (e.g., 21)) contiguous nucleotides differing by no more than 3 (e.g., 0, 1, 2, or 3) nucleotides from the nucleotide sequence of the sense strand of the corresponding (the same) dsRNA agent. In some embodiments, the antisense strand comprises or consists of about 23 contiguous nucleotides differing by no more than 3 (e.g., 0, 1, 2, or 3) nucleotides from the nucleotide sequence of the antisense strand of any one of dsRNA agents 1-1590 (e.g., one of dsRNA agents 1-16 or 770-785); and the sense strand comprises or consists of about 21 contiguous nucleotides differing by no more than 3 (e.g., 0, 1, 2, or 3) nucleotides from the nucleotide sequence of the sense strand of the corresponding (the same) dsRNA agent. In some embodiments, the antisense strand comprises or consists of about 21 contiguous nucleotides differing by no more than 3 (e.g., 0, 1, 2, or 3) nucleotides from the nucleotide sequence of the antisense strand of any one of dsRNA agents 1-1590 (e.g., one of dsRNA agents 1-16 or 770-785); and the sense strand comprises or consists of about 19 contiguous nucleotides differing by no more than 3 (e.g., 0, 1, 2, or 3) nucleotides from the nucleotide sequence of the sense strand of the corresponding (the same) dsRNA agent.

[0315] In some embodiments, the nucleotide sequence of the antisense strand comprises or consists of the nucleotide sequence of the antisense strand of any one of dsRNA agents 1-1590 (e.g., one of dsRNA agents 1-16 or 770-785) differing by no more than 3 (e.g., 0, 1, 2, or 3) nucleotides from the antisense strand set forth in any one of the dsRNA agents 1-1590 (e.g., one of dsRNA agents 1-16 or 770-785); and the nucleotide sequence of the sense strand comprises or consists of the nucleotide sequence of the sense strand of the corresponding (the same) dsRNA agent differing by no more than 3 (e.g., 0, 1, 2, or 3) nucleotides from the sense strand set forth in the corresponding (the same) dsRNA agent.

[0316] In some embodiments, the nucleotide sequence of the antisense strand comprises or consists of the nucleotide sequence the antisense strand of any one of dsRNA agents 1-1590 (e.g., one of dsRNA agents 1-16 or 770-785); and the nucleotide sequence of the sense strand comprises or consists of the nucleotide sequence of the sense strand of the corresponding (the same) dsRNA agent.

4.2.3.6 Exemplary dsRNA Agents

[0317] The nucleotide sequence of exemplary unmodified dsRNA agents comprising a sense and antisense strand (e.g., suitable for targeting hBCL11A, suitable for inhibiting hBCL11A expression)) are set forth in Table 2. More specifically, Table 2 sets forth the nucleotide sequence of exemplary sense strands, antisense strands, and dsRNA agent pairs of sense and antisense strands. It is to be understood that while the sense and antisense strands are set forth in pairs in Table 2, the disclosure encompasses dsRNA agents comprising any sense strand and any antisense set forth in Table 2 (e.g., that are at least partially complementary (e.g., as could be determined by a person of ordinary skill in the art)). It is to be understood that while the nucleotide sequence of the sense strands and antisense strands in Table 2 are set forth as unmodified (not containing any modified nucleotides), the disclosure encompasses the sense and antisense sense strands set forth in Table 2 comprising one or more modified nucleotide (e.g., as described herein).

TABLE 2
Unmodified Sense and Antisense Strand Sequences of BCL11A dsRNA Agents.

| | | | | | | | Exemplary | |
|---|---|---|---|---|---|---|---|---|
| dsRNA | Sense | SEQ | Range in | Antisense | SEQ | Range in | mRNA Target | SEQ |
| Agent | Sequence | ID | NM_ | Sequence | ID | NM_ | Sequence in | ID |
| ID | 5′to 3′ | NO | 022893.4 | 5′to 3′ | NO | 022893.4 | NM_022893.4 | NO |
| 1 | UGGAUUAAG | 1577 | 963-983 | UCUAAGUAGA | 4 | 961-983 | CAUGGAUUAA | 3548 |
| | AAUCUACUU | | | UUCUUAAUCC | | | GAAUCUACUU | |
| | AGA | | | AUG | | | AGA | |
| 2 | CACAAACGG | 1578 | 580-600 | AUUGCAUUGU | 5 | 578-600 | AGCACAAACG | 3549 |
| | AAACAAUGC | | | UUCCGUUUGU | | | GAAACAAUGC | |
| | AAU | | | GCU | | | AAU | |
| 3 | ACAUUCUUA | 1579 | 560-580 | UCUCGAUAAA | 6 | 558-580 | GGACAUUCUU | 3550 |
| | UUUUUAUCG | | | AAUAAGAAUG | | | AUUUUUAUCG | |
| | AGA | | | UCC | | | AGC | |
| 4 | GCAAACAGC | 1580 | 908-928 | AACUGGUGAA | 7 | 906-928 | UUGCAAACAG | 3551 |
| | CAUUCACCA | | | UGGCUGUUUG | | | CCAUUCACCA | |
| | GUU | | | CAA | | | GUG | |
| 5 | AUGUACAAC | 1581 | 897-917 | UGCUGUUUGC | 8 | 895-917 | ACAUGUACAA | 3552 |
| | UUGCAAACA | | | AAGUUGUACA | | | CUUGCAAACA | |
| | GCA | | | UGU | | | GCC | |
| 6 | AACACGCAC | 1582 | 944-964 | AAUGAGUGUU | 9 | 942-964 | GCAACACGCA | 3553 |
| | AGAACACUC | | | CUGUGCGUGU | | | CAGAACACUC | |
| | AUU | | | UGC | | | AUG | |
| 7 | GCUACACAU | 1583 | 890-910 | UGCAAGUUGU | 10 | 888-910 | CAGCUACACA | 3554 |
| | GUACAACUU | | | ACAUGUGUAG | | | UGUACAACUU | |
| | GCA | | | CUG | | | GCA | |
| 8 | CACAUGUAC | 1584 | 894-914 | UGUUUGCAAG | 11 | 892-914 | UACACAUGUA | 3555 |
| | AACUUGCAA | | | UUGUACAUGU | | | CAACUUGCAA | |
| | ACA | | | GUA | | | ACA | |
| 9 | ACUUGCAAA | 1585 | 904-924 | UGUGAAUGGC | 12 | 902-924 | CAACUUGCAA | 3556 |
| | CAGCCAUUC | | | UGUUUGCAAG | | | ACAGCCAUUC | |
| | ACA | | | UUG | | | ACC | |
| 10 | CGCACAGAA | 1586 | 948-968 | UAUCCAUGAG | 13 | 946-968 | CACGCACAGA | 3557 |
| | CACUCAUGG | | | UGUUCUGUGC | | | ACACUCAUGG | |
| | AUA | | | GUG | | | AUU | |
| 11 | AUUCUUAUU | 1587 | 562-582 | UUGCUCGAUA | 14 | 560-582 | ACAUUCUUAU | 3558 |
| | UUUAUCGAG | | | AAAAUAAGAA | | | UUUUAUCGAG | |
| | CAA | | | UGU | | | CAC | |
| 12 | AGUGCAUGG | 1588 | 925-945 | UUGCAAGAGA | 15 | 923-945 | CCAGUGCAUG | 3559 |
| | UUUCUCUUG | | | AACCAUGCAC | | | GUUUCUCUUG | |
| | CAA | | | UGG | | | CAA | |
| 13 | UCAUCUAGA | 1589 | 730-750 | UGGGCAAAUU | 16 | 728-750 | CGUCAUCUAG | 3560 |
| | GGAAUUUGC | | | CCUCUAGAUG | | | AGGAAUUUGC | |
| | CCA | | | ACG | | | CCC | |
| 14 | GGCGAGAAG | 1590 | 2083-2103 | UCCGCGCUUA | 17 | 2081-2103 | UGGGCGAGAA | 3561 |
| | CAUAAGCGC | | | UGCUUCUCGC | | | GCAUAAGCGC | |
| | GGA | | | CCA | | | GGC | |
| 15 | GUAAGAUGC | 1591 | 2798-2818 | UCACGCUAAA | 18 | 2796-2818 | UUGUAAGAUG | 3562 |
| | CUUUUAGCG | | | AGGCAUCUUA | | | CCUUUUAGCG | |
| | UGA | | | CAA | | | UGU | |
| 16 | GGGAUUCAU | 1592 | 1069-1089 | AUUGUCUGCA | 19 | 1067-1089 | AUGGGAUUCA | 3563 |
| | AUUGCAGAC | | | AUAUGAAUCC | | | UAUUGCAGAC | |
| | AAU | | | CAU | | | AAU | |
| 17 | AUUAAGAAU | 1593 | 966-986 | CUUUCUAAGU | 20 | 964-986 | GGAUUAAGAA | 3564 |
| | CUACUUAGA | | | AGAUUCUUAA | | | UCUACUUAGA | |
| | AAG | | | UCC | | | AAG | |
| 18 | GAAGGACGU | 1594 | 2772-2792 | UCACAUUUGU | 21 | 2770-2792 | GGGAAGGACG | 3565 |
| | UUACAAAUG | | | AAACGUCCUU | | | UUUACAAAUG | |
| | UGA | | | CCC | | | UGA | |
| 19 | GUGAAAUUU | 1595 | 2789-2809 | AAGGCAUCUU | 22 | 2787- | AUGUGAAAUU | 3566 |
| | GUAAGAUGC | | | ACAAAUUUCA | | 2809 | UGUAAGAUGC | |
| | CUU | | | CAU | | | CUU | |
| 20 | ACGUUCAAA | 1596 | 1537-1557 | GUUGCUCUGA | 23 | 1535- | AGACGUUCAA | 3567 |
| | UUUCAGAGC | | | AAUUUGAACG | | 1557 | AUUUCAGAGC | |
| | AAC | | | UCU | | | AAC | |
| 21 | CACUCAUGG | 1597 | 957-977 | UAGAUUCUUA | 24 | 955-977 | AACACUCAUG | 3568 |
| | AUUAAGAAU | | | AUCCAUGAGU | | | GAUUAAGAAU | |
| | CUA | | | GUU | | | CUA | |
| 22 | CAACGUCAU | 1598 | 725-745 | AAAUUCCUCU | 25 | 723-745 | AUCAACGUCA | 3569 |
| | CUAGAGGAA | | | AGAUGACGUU | | | UCUAGAGGAA | |
| | UUU | | | GAU | | | UUU | |
| 23 | CUCUAGGAG | 1599 | 1329-1349 | AGCUCUCUAA | 26 | 1327-1349 | UUCUCUAGGA | 3570 |
| | ACUUAGAGA | | | GUCUCCUAGA | | | GACUUAGAGA | |
| | GCU | | | GAA | | | GCU | |
| 24 | ACAGAACAC | 1600 | 951-971 | CUUAAUCCAU | 27 | 949-971 | GCACAGAACA | 3571 |
| | UCAUGGAUU | | | GAGUGUUCUG | | | CUCAUGGAUU | |
| | AAG | | | UGC | | | AAG | |
| 25 | UGACAGGGU | 1601 | 1275-1295 | UUCAACCGCA | 28 | 1273-1295 | UUUGACAGGG | 3572 |
| | GCUGCGGUU | | | GCACCCUGUC | | | UGCUGCGGUU | |
| | GAA | | | AAA | | | GAA | |
| 26 | UCGAGUGUU | 1602 | 2859-2879 | AUAUCAUUAU | 29 | 2857-2879 | GAUCGAGUGU | 3573 |
| | GAAUAAUGA | | | UCAACACUCG | | | UGAAUAAUGA | |
| | UAU | | | AUC | | | UAU | |
| 27 | AUGACGAUU | 1603 | 710-730 | ACGUUGAUAA | 30 | 708-730 | GGAUGACGAU | 3574 |
| | GUUUAUCAA | | | ACAAUCGUCA | | | UGUUUAUCAA | |
| | CGU | | | UCC | | | CGU | |
| 28 | AUGGAUUUC | 1604 | 1321-1341 | AAGUCUCCUA | 31 | 1319-1341 | CCAUGGAUUU | 3575 |
| | UCUAGGAGA | | | GAGAAAUCCA | | | CUCUAGGAGA | |
| | CUU | | | UGG | | | CUU | |
| 29 | CUCCAGGCA | 1605 | 2379-2399 | GGAUCUUUGA | 32 | 2377-2399 | GCCUCCAGGC | 3576 |
| | GCUCAAAGA | | | GCUGCCUGGA | | | AGCUCAAAGA | |
| | UCC | | | GGC | | | UCC | |
| 30 | CUGUAGCAA | 1606 | 2643- | UGGACAGUGA | 33 | 2641-2663 | AACUGUAGCA | 3577 |
| | UCUCACUGU | | 2663 | GAUUGCUACA | | | AUCUCACUGU | |
| | CCA | | | GUU | | | CCA | |
| 31 | CGAGCACAA | 1607 | 576-596 | CAUUGUUUCC | 34 | 574-596 | AUCGAGCACA | 3578 |
| | ACGGAAACA | | | GUUUGUGCUC | | | AACGGAAACA | |
| | AUG | | | GAU | | | AUG | |
| 32 | UCAACGUCA | 1608 | 724-744 | AAUUCCUCUA | 35 | 722-744 | UAUCAACGUC | 3579 |
| | UCUAGAGGA | | | GAUGACGUUG | | | AUCUAGAGGA | |
| | AUU | | | AUA | | | AUU | |
| 33 | UGCGGUUGA | 1609 | 1286-1306 | UAGCCAUUGG | 36 | 1284-1306 | GCUGCGGUUG | 3580 |
| | AUCCAAUGG | | | AUUCAACCGC | | | AAUCCAAUGG | |
| | CUA | | | AGC | | | CUA | |
| 34 | GACGAUUGU | 1610 | 712-732 | UGACGUUGAU | 37 | 710-732 | AUGACGAUUG | 3581 |
| | UUAUCAACG | | | AAACAAUCGU | | | UUUAUCAACG | |
| | UCA | | | CAU | | | UCA | |
| 35 | UGGAGUCUC | 1611 | 284-304 | GUUAGAAAGA | 38 | 282-304 | UCUGGAGUCU | 3582 |
| | CUUCUUUCU | | | AGGAGACUCC | | | CCUUCUUUCU | |
| | AAC | | | AGA | | | AAC | |
| 36 | UGUGAAAUU | 1612 | 2788-2808 | AGGCAUCUUA | 39 | 2786-2808 | AAUGUGAAAU | 3583 |
| | UGUAAGAUG | | | CAAAUUUCAC | | | UUGUAAGAUG | |
| | CCU | | | AUU | | | CCU | |
| 37 | ACGGCUCUC | 1613 | 191-211 | GAUGAAUUGU | 40 | 189-211 | UGACGGCUCU | 3584 |
| | CCACAAUUC | | | GGGAGAGCCG | | | CCCACAAUUC | |
| | AUC | | | UCA | | | AUC | |
| 38 | GGAAAGUCU | 1614 | 2627-2647 | UACAGUUCUU | 41 | 2625-2647 | UGGGAAAGUC | 3585 |
| | UCAAGAACU | | | GAAGACUUUC | | | UUCAAGAACU | |
| | GUA | | | CCA | | | GUA | |
| 39 | UCCAGGCAG | 1615 | 2380-2400 | GGGAUCUUUG | 42 | 2378-2400 | CCUCCAGGCA | 3586 |
| | CUCAAAGAU | | | AGCUGCCUGG | | | GCUCAAAGAU | |
| | CCC | | | AGG | | | CCC | |
| 40 | GGAUGACGA | 1616 | 708-728 | GUUGAUAAAC | 43 | 706-728 | GAGGAUGACG | 3587 |
| | UUGUUUAUC | | | AAUCGUCAUC | | | AUUGUUUAUC | |
| | AAC | | | CUC | | | AAC | |
| 41 | CUGCGGUUG | 1617 | 1285-1305 | AGCCAUUGGA | 44 | 1283-1305 | UGCUGCGGUU | 3588 |
| | AAUCCAAUG | | | UUCAACCGCA | | | GAAUCCAAUG | |
| | GCU | | | GCA | | | GCU | |
| 42 | UGACGAUUG | 1618 | 711-731 | GACGUUGAUA | 45 | 709-731 | GAUGACGAUU | 3589 |
| | UUUAUCAAC | | | AACAAUCGUC | | | GUUUAUCAAC | |
| | GUC | | | AUC | | | GUC | |
| 43 | AUCCAAUGG | 1619 | 1295-1315 | GAGGCUCCAU | 46 | 1293-1315 | GAAUCCAAUG | 3590 |
| | CUAUGGAGC | | | AGCCAUUGGA | | | GCUAUGGAGC | |
| | CUC | | | UUC | | | CUC | |
| 44 | GCCUUAUAA | 1620 | 2688-2708 | CACAGCUCGC | 47 | 2686-2708 | AGGCCUUAUA | 3591 |
| | AUGCGAGCU | | | AUUUAUAAGG | | | AAUGCGAGCU | |
| | GUG | | | CCU | | | GUG | |
| 45 | CACUUAAGC | 1621 | 415-435 | GAAUUCCCGU | 48 | 413-435 | AGCACUUAAG | 3592 |
| | AAACGGGAA | | | UUGCUUAAGU | | | CAAACGGGAA | |
| | UUC | | | GCU | | | UUC | |
| 46 | GGAUUAAGA | 1622 | 964-984 | UUCUAAGUAG | 49 | 962-984 | AUGGAUUAAG | 3593 |
| | AUCUACUUA | | | AUUCUUAAUC | | | AAUCUACUUA | |
| | GAA | | | CAU | | | GAA | |
| 47 | CAAUCUCAC | 1623 | 2649-2669 | CUCCUGUGGA | 50 | 2647-2669 | AGCAAUCUCA | 3594 |
| | UGUCCACAG | | | CAGUGAGAUU | | | CUGUCCACAG | |
| | GAG | | | GCU | | | GAG | |
| 48 | AACCCGGCU | 1624 | 302-322 | UCACAUCGGG | 51 | 300-322 | CUAACCCGGC | 3595 |
| | CUCCCGAUG | | | AGAGCCGGGU | | | UCUCCCGAUG | |
| | UGA | | | UAG | | | UGA | |
| 49 | ACACUCAUG | 1625 | 956-976 | AGAUUCUUAA | 52 | 954-976 | GAACACUCAU | 3596 |
| | GAUUAAGAA | | | UCCAUGAGUG | | | GGAUUAAGAA | |
| | UCU | | | UUC | | | UCU | |
| 50 | CAUGACGGC | 1626 | 187-207 | AAUUGUGGGA | 53 | 185-207 | GCCAUGACGG | 3597 |
| | UCUCCCACA | | | GAGCCGUCAU | | | CUCUCCCACA | |
| | AUU | | | GGC | | | AUU | |
| 51 | GGACGUUUA | 1627 | 2775-2795 | AUUUCACAUU | 54 | 2773-2795 | AAGGACGUUU | 3598 |
| | CAAAUGUGA | | | UGUAAACGUC | | | ACAAAUGUGA | |
| | AAU | | | CUU | | | AAU | |
| 52 | AUGACGGCU | 1628 | 188-208 | GAAUUGUGGG | 55 | 186-208 | CCAUGACGGC | 3599 |
| | CUCCCACAA | | | AGAGCCGUCA | | | UCUCCCACAA | |
| | UUC | | | UGG | | | UUC | |
| 53 | AGCACAAAC | 1629 | 578-598 | UGCAUUGUUU | 56 | 576-598 | CGAGCACAAA | 3600 |
| | GGAAACAAU | | | CCGUUUGUGC | | | CGGAAACAAU | |
| | GCA | | | UCG | | | GCA | |
| 54 | CUGUGCAAC | 1630 | 2704-2724 | GGCACAGGCA | 57 | 2702-2724 | AGCUGUGCAA | 3601 |
| | UAUGCCUGU | | | UAGUUGCACA | | | CUAUGCCUGU | |
| | GCC | | | GCU | | | GCC | |
| 55 | UCGCCGCAA | 1631 | 390-410 | GGUUUGCCUU | 58 | 388-410 | UCUCGCCGCA | 3602 |
| | GCAAGGCAA | | | GCUUGCGGCG | | | AGCAAGGCAA | |
| | ACC | | | AGA | | | ACC | |
| 56 | UCUUGCAAC | 1632 | 938-958 | UGUUCUGUGC | 59 | 936-958 | UCUCUUGCAA | 3603 |
| | ACGCACAGA | | | GUGUUGCAAG | | | CACGCACAGA | |
| | ACA | | | AGA | | | ACA | |
| 57 | ACGUCAUCU | 1633 | 727-747 | GCAAAUUCCU | 60 | 725-747 | CAACGUCAUC | 3604 |
| | AGAGGAAUU | | | CUAGAUGACG | | | UAGAGGAAUU | |
| | UGC | | | UUG | | | UGC | |
| 58 | UCUGGAGUC | 1634 | 282-302 | UAGAAAGAAG | 61 | 280-302 | UCUCUGGAGU | 3605 |
| | UCCUUCUUU | | | GAGACUCCAG | | | CUCCUUCUUU | |
| | CUA | | | AGA | | | CUA | |
| 59 | UAACCCGGC | 1635 | 301-321 | CACAUCGGGA | 62 | 299-321 | UCUAACCCGG | 3606 |
| | UCUCCCGAU | | | GAGCCGGGUU | | | CUCUCCCGAU | |
| | GUG | | | AGA | | | GUG | |
| 60 | AGCACUUAA | 1636 | 413-433 | AUUCCCGUUU | 63 | 411-433 | CCAGCACUUA | 3607 |
| | GCAAACGGG | | | GCUUAAGUGC | | | AGCAAACGGG | |
| | AAU | | | UGG | | | AAU | |
| 61 | AAACGGAAA | 1637 | 583-603 | GCCAUUGCAU | 64 | 581-603 | ACAAACGGAA | 3608 |
| | CAAUGCAAU | | | UGUUUCCGUU | | | ACAAUGCAAU | |
| | GGC | | | UGU | | | GGC | |
| 62 | AUGGAUUAA | 1638 | 962-982 | CUAAGUAGAU | 65 | 960-982 | UCAUGGAUUA | 3609 |
| | GAAUCUACU | | | UCUUAAUCCA | | | AGAAUCUACU | |
| | UAG | | | UGA | | | UAG | |
| 63 | ACGUCCGCA | 1639 | 47-67 | UGCAAGUUCA | 66 | 45-67 | UCACGUCCGC | 3610 |
| | CUUGAACUU | | | AGUGCGGACG | | | ACUUGAACUU | |
| | GCA | | | UGA | | | GCA | |
| 64 | CACAUAGCA | 1640 | 760-780 | CAGAAGUUUA | 67 | 758-780 | AACACAUAGC | 3611 |
| | GAUAAACUU | | | UCUGCUAUGU | | | AGAUAAACUU | |
| | CUG | | | GUU | | | CUG | |
| 65 | UGCUCAGCU | 1641 | 2036-2056 | AGUGCUGCAU | 68 | 2034-2056 | GGUGCUCAGC | 3612 |
| | CCAUGCAGC | | | GGAGCUGAGC | | | UCCAUGCAGC | |
| | ACU | | | ACC | | | ACU | |
| 66 | ACAUAGCAG | 1642 | 761-781 | GCAGAAGUUU | 69 | 759-781 | ACACAUAGCA | 3613 |
| | AUAAACUUC | | | AUCUGCUAUG | | | GAUAAACUUC | |
| | UGC | | | UGU | | | UGC | |
| 67 | AACACGCAC | 1643 | 944-964 | CAUGAGUGUU | 70 | 942-964 | GCAACACGCA | 3553 |
| | AGAACACUC | | | CUGUGCGUGU | | | CAGAACACUC | |
| | AUG | | | UGC | | | AUG | |
| 68 | GCUGCGGUU | 1644 | 1284-1304 | GCCAUUGGAU | 71 | 1282-1304 | GUGCUGCGGU | 3554 |
| | GAAUCCAAU | | | UCAACCGCAG | | | UGAAUCCAAU | |
| | GGC | | | CAC | | | GGC | |
| 69 | UCCGCACUU | 1645 | 50-70 | AGCUGCAAGU | 72 | 48-70 | CGUCCGCACU | 3555 |
| | GAACUUGCA | | | UCAAGUGCGG | | | UGAACUUGCA | |
| | GCU | | | ACG | | | GCU | |
| 70 | GUUGAAUCC | 1646 | 1290-1310 | UCCAUAGCCA | 73 | 1288-1310 | CGGUUGAAUC | 3556 |
| | AAUGGCUAU | | | UUGGAUUCAA | | | CAAUGGCUAU | |
| | GGA | | | CCG | | | GGA | |
| 71 | AACUGUAGC | 1647 | 2641-2661 | GACAGUGAGA | 74 | 2639-2661 | AGAACUGUAG | 3557 |
| | AAUCUCACU | | | UUGCUACAGU | | | CAAUCUCACU | |
| | GUC | | | UCU | | | GUC | |
| 72 | CCGGCUCUC | 1648 | 305-325 | GGUUCACAUC | 75 | 303-325 | ACCCGGCUCU | 3558 |
| | CCGAUGUGA | | | GGGAGAGCCG | | | CCCGAUGUGA | |
| | ACC | | | GGU | | | ACC | |
| 73 | CUUCCCUGC | 1649 | 211-231 | UACAAAGAUG | 76 | 209-231 | AUCUUCCCUG | 3559 |
| | GCCAUCUUU | | | GCGCAGGGAA | | | CGCCAUCUUU | |
| | GUA | | | GAU | | | GUA | |
| 74 | AAUGGCAGC | 1650 | 598-618 | UUCUAAGCAG | 77 | 596-618 | GCAAUGGCAG | 3560 |
| | CUCUGCUUA | | | AGGCUGCCAU | | | CCUCUGCUUA | |
| | GAA | | | UGC | | | GAA | |
| 75 | CAAGACGUU | 1651 | 1533-1553 | CUCUGAAAUU | 78 | 1531-1553 | GGCAAGACGU | 3561 |
| | CAAAUUUCA | | | UGAACGUCUU | | | UCAAAUUUCA | |
| | GAG | | | GCC | | | GAG | |
| 76 | CCCGGGCAG | 1652 | 2571-2591 | UUUGAGCUGG | 79 | 2569-2591 | GGCCCGGGCA | 3562 |
| | GCCCAGCUC | | | GCCUGCCCGG | | | GGCCCAGCUC | |
| | AAA | | | GCC | | | AAA | |
| 77 | CGAGCUGUG | 1653 | 2700-2720 | CAGGCAUAGU | 80 | 2698-2720 | UGCGAGCUGU | 3563 |
| | CAACUAUGC | | | UGCACAGCUC | | | GCAACUAUGC | |
| | CUG | | | GCA | | | CUG | |
| 78 | GACAGGGUG | 1654 | 1276-1296 | AUUCAACCGC | 81 | 1274-1296 | UUGACAGGGU | 3564 |
| | CUGCGGUUG | | | AGCACCCUGU | | | GCUGCGGUUG | |
| | AAU | | | CAA | | | AAU | |
| 79 | GAAUCCAAU | 1655 | 1293-1313 | GGCUCCAUAG | 82 | 1291-1313 | UUGAAUCCAA | 3565 |
| | GGCUAUGGA | | | CCAUUGGAUU | | | UGGCUAUGGA | |
| | GCC | | | CAA | | | GCC | |
| 80 | UGCAACUAU | 1656 | 2707-2727 | CUGGGCACAG | 83 | 2705-2727 | UGUGCAACUA | 3566 |
| | GCCUGUGCC | | | GCAUAGUUGC | | | UGCCUGUGCC | |
| | CAG | | | ACA | | | CAG | |
| 81 | AGGCCUUAU | 1657 | 2686-2706 | CAGCUCGCAU | 84 | 2684-2706 | AAAGGCCUUA | 3567 |
| | AAAUGCGAG | | | UUAUAAGGCC | | | UAAAUGCGAG | |
| | CUG | | | UUU | | | CUG | |
| 82 | AUCACCCGA | 1658 | 1259-1279 | UGUCAAAGGC | 85 | 1257-1279 | CCAUCACCCG | 3568 |
| | GUGCCUUUG | | | ACUCGGGUGA | | | AGUGCCUUUG | |
| | ACA | | | UGG | | | ACA | |
| 83 | CCUGGCCAC | 1659 | 1248-1268 | CUCGGGUGAU | 86 | 1246-1268 | GCCCUGGCCA | 3569 |
| | CCAUCACCC | | | GGGUGGCCAG | | | CCCAUCACCC | |
| | GAG | | | GGC | | | GAG | |
| 84 | AAUUCAUCU | 1660 | 204-224 | AUGGCGCAGG | 87 | 202-224 | ACAAUUCAUC | 3570 |
| | UCCCUGCGC | | | GAAGAUGAAU | | | UUCCCUGCGC | |
| | CAU | | | UGU | | | CAU | |
| 85 | CCCUGCGCC | 1661 | 214-234 | UAAUACAAAG | 88 | 212-234 | UUCCCUGCGC | 3571 |
| | AUCUUUGUA | | | AUGGCGCAGG | | | CAUCUUUGUA | |
| | UUA | | | GAA | | | UUA | |
| 86 | CCACCCAUC | 1662 | 1253-1273 | AGGCACUCGG | 89 | 1251-1273 | GGCCACCCAU | 3572 |
| | ACCCGAGUG | | | GUGAUGGGUG | | | CACCCGAGUG | |
| | CCU | | | GCC | | | CCU | |
| 87 | UGGUUUCUC | 1663 | 931-951 | UGCGUGUUGC | 90 | 929-951 | CAUGGUUUCU | 3573 |
| | UUGCAACAC | | | AAGAGAAACC | | | CUUGCAACAC | |
| | GCA | | | AUG | | | GCA | |
| 88 | GGCCUCCAG | 1664 | 2376-2396 | UCUUUGAGCU | 91 | 2374-2396 | GCGGCCUCCA | 3574 |
| | GCAGCUCAA | | | GCCUGGAGGC | | | GGCAGCUCAA | |
| | AGA | | | CGC | | | AGA | |
| 89 | CAGCCAUUC | 1665 | 913-933 | CCAUGCACUG | 92 | 911-933 | AACAGCCAUU | 3575 |
| | ACCAGUGCA | | | GUGAAUGGCU | | | CACCAGUGCA | |
| | UGG | | | GUU | | | UGG | |
| 90 | GUCUCGCCG | 1666 | 387-407 | UUGCCUUGCU | 93 | 385-407 | AUGUCUCGCC | 3576 |
| | CAAGCAAGG | | | UGCGGCGAGA | | | GCAAGCAAGG | |
| | CAA | | | CAU | | | CAA | |
| 91 | CUUUGACAG | 1667 | 1272-1292 | AACCGCAGCA | 94 | 1270-1292 | GCCUUUGACA | 3577 |
| | GGUGCUGCG | | | CCCUGUCAAA | | | GGGUGCUGCG | |
| | GUU | | | GGC | | | GUU | |
| 92 | UUCAUCUUC | 1668 | 206-226 | AGAUGGCGCA | 95 | 204-226 | AAUUCAUCUU | 3578 |
| | CCUGCGCCA | | | GGGAAGAUGA | | | CCCUGCGCCA | |
| | UCU | | | AUU | | | UCU | |
| 93 | AAAGAUGAG | 1669 | 874-894 | GUAGCUGCUG | 96 | 872-894 | GUAAAGAUGA | 3579 |
| | CCCAGCAGC | | | GGCUCAUCUU | | | GCCCAGCAGC | |
| | UAC | | | UAC | | | UAC | |
| 94 | GAGUGCCUU | 1670 | 1266-1286 | AGCACCCUGU | 97 | 1264-1286 | CCGAGUGCCU | 3580 |
| | UGACAGGGU | | | CAAAGGCACU | | | UUGACAGGGU | |
| | GCU | | | CGG | | | GCU | |
| 95 | AGAGGGCAG | 1671 | 2592-2612 | GUGUCGCUGC | 98 | 2590-2612 | AAAGAGGGCA | 3581 |
| | ACGCAGCGA | | | GUCUGCCCUC | | | GACGCAGCGA | |
| | CAC | | | UUU | | | CAC | |
| 96 | AUCUUCCCU | 1672 | 209-229 | CAAAGAUGGC | 99 | 207-229 | UCAUCUUCCC | 3582 |
| | GCGCCAUCU | | | GCAGGGAAGA | | | UGCGCCAUCU | |
| | UUG | | | UGA | | | UUG | |
| 97 | AUUCUUACA | 1673 | 457-477 | UGGUUCAUCA | 100 | 455-477 | CCAUUCUUAC | 3583 |
| | GAUGAUGAA | | | UCUGUAAGAA | | | AGAUGAUGAA | |
| | CCA | | | UGG | | | CCA | |
| 98 | GUCAAGUCC | 1674 | 1504-1524 | CUCGCAUGAC | 101 | 1502-1524 | CGGUCAAGUC | 3584 |
| | AAGUCAUGC | | | UUGGACUUGA | | | CAAGUCAUGC | |
| | GAG | | | CCG | | | GAG | |
| 99 | UCACCCGAG | 1675 | 1260-1280 | CUGUCAAAGG | 102 | 1258-1280 | CAUCACCCGA | 3585 |
| | UGCCUUUGA | | | CACUCGGGUG | | | GUGCCUUUGA | |
| | CAG | | | AUG | | | CAG | |
| 100 | CGUCAUCUA | 1676 | 728-748 | GGCAAAUUCC | 103 | 726-748 | AACGUCAUCU | 3586 |
| | GAGGAAUUU | | | UCUAGAUGAC | | | AGAGGAAUUU | |
| | GCC | | | GUU | | | GCC | |
| 101 | GUGCAACUA | 1677 | 2706-2726 | UGGGCACAGG | 104 | 2704-2726 | CUGUGCAACU | 3587 |
| | UGCCUGUGC | | | CAUAGUUGCA | | | AUGCCUGUGC | |
| | CCA | | | CAG | | | CCA | |
| 102 | GGCUCUCCC | 1678 | 193-213 | AAGAUGAAUU | 105 | 191-213 | ACGGCUCUCC | 3588 |
| | ACAAUUCAU | | | GUGGGAGAGC | | | CACAAUUCAU | |
| | CUU | | | CGU | | | CUU | |
| 103 | UAAGCAAAC | 1679 | 419-439 | GCGAGAAUUC | 106 | 417-439 | CUUAAGCAAA | 3589 |
| | GGGAAUUCU | | | CCGUUUGCUU | | | CGGGAAUUCU | |
| | CGC | | | AAG | | | CGC | |
| 104 | GGCCCUGGC | 1680 | 1245-1265 | GGGUGAUGGG | 107 | 1243-1265 | AUGGCCCUGG | 3590 |
| | CACCCAUCA | | | UGGCCAGGGC | | | CCACCCAUCA | |
| | CCC | | | CAU | | | CCC | |
| 105 | AGAAGCCAC | 1681 | 2668-2688 | CCUUUCGCCC | 108 | 2666-2688 | GGAGAAGCCA | 3591 |
| | ACGGGCGAA | | | GUGUGGCUUC | | | CACGGGCGAA | |
| | AGG | | | UCC | | | AGG | |
| 106 | CCCGGCUCU | 1682 | 304-324 | GUUCACAUCG | 109 | 302-324 | AACCCGGCUC | 3592 |
| | CCCGAUGUG | | | GGAGAGCCGG | | | UCCCGAUGUG | |
| | AAC | | | GUU | | | AAC | |
| 107 | GGAGAAGCC | 1683 | 2666-2686 | UUUCGCCCGU | 110 | 2664-2686 | CAGGAGAAGC | 3593 |
| | ACACGGGCG | | | GUGGCUUCUC | | | CACACGGGCG | |
| | AAA | | | CUG | | | AAA | |
| 108 | UGCAAUGGC | 1684 | 595-615 | UAAGCAGAGG | 111 | 593-615 | AAUGCAAUGG | 3594 |
| | AGCCUCUGC | | | CUGCCAUUGC | | | CAGCCUCUGC | |
| | UUA | | | AUU | | | UUA | |
| 109 | GCACUCCUC | 1685 | 2451-2471 | CUCCCGUUCU | 112 | 2449-2471 | GAGCACUCCU | 3595 |
| | GGAGAACGG | | | CCGAGGAGUG | | | CGGAGAACGG | |
| | GAG | | | CUC | | | GAG | |
| 110 | UUGUUUAUC | 1686 | 717-737 | CUAGAUGACG | 113 | 715-737 | GAUUGUUUAU | 3596 |
| | AACGUCAUC | | | UUGAUAAACA | | | CAACGUCAUC | |
| | UAG | | | AUC | | | UAG | |
| 111 | CAGGGUGCU | 1687 | 1278-1298 | GGAUUCAACC | 114 | 1276-1298 | GACAGGGUGC | 3597 |
| | GCGGUUGAA | | | GCAGCACCCU | | | UGCGGUUGAA | |
| | UCC | | | GUC | | | UCC | |
| 112 | UAUCGAGCA | 1688 | 573-593 | UGUUUCCGUU | 115 | 571-593 | UUUAUCGAGC | 3598 |
| | CAAACGGAA | | | UGUGCUCGAU | | | ACAAACGGAA | |
| | ACA | | | AAA | | | ACA | |
| 113 | CUCCCUCCU | 1689 | 1462-1482 | GGCGGAUUGC | 116 | 1460-1482 | CCCUCCCUCC | 3599 |
| | CUGCAAUCC | | | AGAGGAGGGA | | | UCUGCAAUCC | |
| | GCC | | | GGG | | | GCC | |
| 114 | GUAUCCCUU | 1690 | 1019-1039 | CACCUAGUCC | 117 | 1017-1039 | UGGUAUCCCU | 3600 |
| | CAGGACUAG | | | UGAAGGGAUA | | | UCAGGACUAG | |
| | GUG | | | CCA | | | GUG | |
| 115 | UCCUUCUUU | 1691 | 291-311 | GAGCCGGGUU | 118 | 289-311 | UCUCCUUCUU | 3601 |
| | CUAACCCGG | | | AGAAAGAAGG | | | UCUAACCCGG | |
| | CUC | | | AGA | | | CUC | |
| 116 | CCAUGACGG | 1692 | 186-206 | AUUGUGGGAG | 119 | 184-206 | AGCCAUGACG | 3602 |
| | CUCUCCCAC | | | AGCCGUCAUG | | | GCUCUCCCAC | |
| | AAU | | | GCU | | | AAU | |
| 117 | UUUGACAGG | 1693 | 1273-1293 | CAACCGCAGC | 120 | 1271-1293 | CCUUUGACAG | 3603 |
| | GUGCUGCGG | | | ACCCUGUCAA | | | GGUGCUGCGG | |
| | UUG | | | AGG | | | UUG | |
| 118 | GCGGGUUGG | 1694 | 1011-1031 | CCUGAAGGGA | 121 | 1009-1031 | CCGCGGGUUG | 3604 |
| | UAUCCCUUC | | | UACCAACCCG | | | GUAUCCCUUC | |
| | AGG | | | CGG | | | AGG | |
| 119 | UGUGCAACU | 1695 | 2705-2725 | GGGCACAGGC | 122 | 2703-2725 | GCUGUGCAAC | 3605 |
| | AUGCCUGUG | | | AUAGUUGCAC | | | UAUGCCUGUG | |
| | CCC | | | AGC | | | CCC | |
| 120 | GUGCUGCGG | 1696 | 1282-1302 | CAUUGGAUUC | 123 | 1280-1302 | GGGUGCUGCG | 3606 |
| | UUGAAUCCA | | | AACCGCAGCA | | | GUUGAAUCCA | |
| | AUG | | | CCC | | | AUG | |
| 121 | CAGCACUUA | 1697 | 412-432 | UUCCCGUUUG | 124 | 410-432 | CCCAGCACUU | 3607 |
| | AGCAAACGG | | | CUUAAGUGCU | | | AAGCAAACGG | |
| | GAA | | | GGG | | | GAA | |
| 122 | UUGAAUCCA | 1698 | 1291-1311 | CUCCAUAGCC | 125 | 1289-1311 | GGUUGAAUCC | 3608 |
| | AUGGCUAUG | | | AUUGGAUUCA | | | AAUGGCUAUG | |
| | GAG | | | ACC | | | GAG | |
| 123 | CUGGCAGAA | 1699 | 1144-1164 | UGGAAAGCGC | 126 | 1142-1164 | GCCUGGCAGA | 3609 |
| | GGGCGCUUU | | | CCUUCUGCCA | | | AGGGCGCUUU | |
| | CCA | | | GGC | | | CCA | |
| 124 | GGAUGAGUG | 1700 | 839-859 | GGGCAUAUUC | 127 | 837-859 | UGGGAUGAGU | 3610 |
| | CAGAAUAUG | | | UGCACUCAUC | | | GCAGAAUAUG | |
| | ccc | | | CCA | | | CCC | |
| 125 | UCUCCUUCU | 1701 | 289-309 | GCCGGGUUAG | 128 | 287-309 | AGUCUCCUUC | 3611 |
| | UUCUAACCC | | | AAAGAAGGAG | | | UUUCUAACCC | |
| | GGC | | | ACU | | | GGC | |
| 126 | UGCUGCGGU | 1702 | 1283- | CCAUUGGAUU | 129 | 1281-1303 | GGUGCUGCGG | 3612 |
| | UGAAUCCAA | | 1303 | CAACCGCAGC | | | UUGAAUCCAA | |
| | UGG | | | ACC | | | UGG | |
| 127 | GGAGUCUCC | 1703 | 285-305 | GGUUAGAAAG | 130 | 283-305 | CUGGAGUCUC | 3613 |
| | UUCUUUCUA | | | AAGGAGACUC | | | CUUCUUUCUA | |
| | ACC | | | CAG | | | ACC | |
| 128 | GCCCUGGCC | 1704 | 1246- | CGGGUGAUGG | 131 | 1244-1266 | UGGCCCUGGC | 3614 |
| | ACCCAUCAC | | 1266 | GUGGCCAGGG | | | CACCCAUCAC | |
| | CCG | | | CCA | | | CCG | |
| 129 | CGGCUCUCC | 1705 | 192-212 | AGAUGAAUUG | 132 | 190-212 | GACGGCUCUC | 3615 |
| | CACAAUUCA | | | UGGGAGAGCC | | | CCACAAUUCA | |
| | UCU | | | GUC | | | UCU | |
| 130 | GAGAAGCCA | 1706 | 2667- | CUUUCGCCCG | 133 | 2665-2687 | AGGAGAAGCC | 3616 |
| | CACGGGCGA | | 2687 | UGUGGCUUCU | | | ACACGGGCGA | |
| | AAG | | | CCU | | | AAG | |
| 131 | UGGCCCUGG | 1707 | 1244- | GGUGAUGGGU | 134 | 1242-1264 | GAUGGCCCUG | 3617 |
| | CCACCCAUC | | 1264 | GGCCAGGGCC | | | GCCACCCAUC | |
| | ACC | | | AUC | | | ACC | |
| 132 | AUAAACUUC | 1708 | 770-790 | CCCUCCAGUG | 135 | 768-790 | AGAUAAACUU | 3618 |
| | UGCACUGGA | | | CAGAAGUUUA | | | CUGCACUGGA | |
| | GGG | | | UCU | | | GGG | |
| 133 | CUAACCCGG | 1709 | 300-320 | ACAUCGGGAG | 136 | 298-320 | UUCUAACCCG | 3619 |
| | CUCUCCCGA | | | AGCCGGGUUA | | | GCUCUCCCGA | |
| | UGU | | | GAA | | | UGU | |
| 134 | AUUUCUCUA | 1710 | 1325- | CUCUAAGUCU | 137 | 1323-1345 | GGAUUUCUCU | 3620 |
| | GGAGACUUA | | 1345 | CCUAGAGAAA | | | AGGAGACUUA | |
| | GAG | | | UCC | | | GAG | |
| 135 | UUCUUUCUA | 1711 | 294-314 | GGAGAGCCGG | 138 | 292-314 | CCUUCUUUCU | 3621 |
| | ACCCGGCUC | | | GUUAGAAAGA | | | AACCCGGCUC | |
| | UCC | | | AGG | | | UCC | |
| 136 | UUGACAGGG | 1712 | 1274- | UCAACCGCAG | 139 | 1272-1294 | CUUUGACAGG | 3622 |
| | UGCUGCGGU | | 1294 | CACCCUGUCA | | | GUGCUGCGGU | |
| | UGA | | | AAG | | | UGA | |
| 137 | AGCACUCCU | 1713 | 2450- | UCCCGUUCUC | 140 | 2448-2470 | GGAGCACUCC | 3623 |
| | CGGAGAACG | | 2470 | CGAGGAGUGC | | | UCGGAGAACG | |
| | GGA | | | UCC | | | GGA | |
| 138 | CCCUGGCCA | 1714 | 1247- | UCGGGUGAUG | 141 | 1245-1267 | GGCCCUGGCC | 3624 |
| | CCCAUCACC | | 1267 | GGUGGCCAGG | | | ACCCAUCACC | |
| | CGA | | | GCC | | | CGA | |
| 139 | AGCAAACGG | 1715 | 421-441 | GGGCGAGAAU | 142 | 419-441 | UAAGCAAACG | 3625 |
| | GAAUUCUCG | | | UCCCGUUUGC | | | GGAAUUCUCG | |
| | CCC | | | UUA | | | CCC | |
| 140 | GCUGGCAGG | 1716 | 1347- | CUAGACGUGU | 143 | 1345-1367 | GAGCUGGCAG | 3626 |
| | GAACACGUC | | 1367 | UCCCUGCCAG | | | GGAACACGUC | |
| | UAG | | | CUC | | | UAG | |
| 141 | CCCUAUGCA | 1717 | 1395- | UGCAGUAACC | 144 | 1393-1415 | AGCCCUAUGC | 3627 |
| | AAGGUUACU | | 1415 | UUUGCAUAGG | | | AAAGGUUACU | |
| | GCA | | | GCU | | | GCA | |
| 142 | UCAUCUUCC | 1718 | 207-227 | AAGAUGGCGC | 145 | 205-227 | AUUCAUCUUC | 3628 |
| | CUGCGCCAU | | | AGGGAAGAUG | | | CCUGCGCCAU | |
| | CUU | | | AAU | | | CUU | |
| 143 | CUUCUUUCU | 1719 | 293-313 | GAGAGCCGGG | 146 | 291-313 | UCCUUCUUUC | 3629 |
| | AACCCGGCU | | | UUAGAAAGAA | | | UAACCCGGCU | |
| | CUC | | | GGA | | | CUC | |
| 144 | CCACCACCG | 1720 | 1186- | CAAGUGAUGU | 147 | 1184-1206 | GUCCACCACC | 3630 |
| | AGACAUCAC | | 1206 | CUCGGUGGUG | | | GAGACAUCAC | |
| | UUG | | | GAC | | | UUG | |
| 145 | AACCAUUCC | 1721 | 1415- | UGCUACCUGG | 148 | 1413-1435 | GCAACCAUUC | 3631 |
| | AGCCAGGUA | | 1435 | CUGGAAUGGU | | | CAGCCAGGUA | |
| | GCA | | | UGC | | | GCA | |
| 146 | UCUUCCCUG | 1722 | 210-230 | ACAAAGAUGG | 149 | 208-230 | CAUCUUCCCU | 3632 |
| | CGCCAUCUU | | | CGCAGGGAAG | | | GCGCCAUCUU | |
| | UGU | | | AUG | | | UGU | |
| 147 | CUGGCCACC | 1723 | 1249- | ACUCGGGUGA | 150 | 1247-1269 | CCCUGGCCAC | 3633 |
| | CAUCACCCG | | 1269 | UGGGUGGCCA | | | CCAUCACCCG | |
| | AGU | | | GGG | | | AGU | |
| 148 | GAGGGCAGA | 1724 | 2593-2613 | AGUGUCGCUG | 151 | 2591- | AAGAGGGCAG | 3634 |
| | CGCAGCGAC | | | CGUCUGCCCU | | 2613 | ACGCAGCGAC | |
| | ACU | | | CUU | | | ACU | |
| 149 | CACAAUUCA | 1725 | 201-221 | GCGCAGGGAA | 152 | 199-221 | CCCACAAUUC | 3635 |
| | UCUUCCCUG | | | GAUGAAUUGU | | | AUCUUCCCUG | |
| | CGC | | | GGG | | | CGC | |
| 150 | CCAUCACCC | 1726 | 1257-1277 | UCAAAGGCAC | 153 | 1255-1277 | ACCCAUCACC | 3636 |
| | GAGUGCCUU | | | UCGGGUGAUG | | | CGAGUGCCUU | |
| | UGA | | | GGU | | | UGA | |
| 151 | ACACGCACA | 1727 | 945-965 | CCAUGAGUGU | 154 | 943-965 | CAACACGCAC | 3637 |
| | GAACACUCA | | | UCUGUGCGUG | | | AGAACACUCA | |
| | UGG | | | UUG | | | UGG | |
| 152 | GAAGCCACA | 1728 | 2669-2689 | GCCUUUCGCC | 155 | 2667-2689 | GAGAAGCCAC | 3638 |
| | CGGGCGAAA | | | CGUGUGGCUU | | | ACGGGCGAAA | |
| | GGC | | | CUC | | | GGC | |
| 153 | CAUCACCCG | 1729 | 1258-1278 | GUCAAAGGCA | 156 | 1256-1278 | CCCAUCACCC | 3639 |
| | AGUGCCUUU | | | CUCGGGUGAU | | | GAGUGCCUUU | |
| | GAC | | | GGG | | | GAC | |
| 154 | UCAAGUUCG | 1730 | 28-48 | GUGACGUCCC | 157 | 26-48 | GUUCAAGUUC | 3640 |
| | CAGGGACGU | | | UGCGAACUUG | | | GCAGGGACGU | |
| | CAC | | | AAC | | | CAC | |
| 155 | UCUAACCCG | 1731 | 299-319 | CAUCGGGAGA | 158 | 297-319 | UUUCUAACCC | 3641 |
| | GCUCUCCCG | | | GCCGGGUUAG | | | GGCUCUCCCG | |
| | AUG | | | AAA | | | AUG | |
| 156 | GGGAAGUGG | 1732 | 2532-2552 | GGCGUGCUCC | 159 | 2530-2552 | ACGGGAAGUG | 3642 |
| | AGGGAGCAC | | | CUCCACUUCC | | | GAGGGAGCAC | |
| | GCC | | | CGU | | | GCC | |
| 157 | CUCGCCGCA | 1733 | 389-409 | GUUUGCCUUG | 160 | 387-409 | GUCUCGCCGC | 3643 |
| | AGCAAGGCA | | | CUUGCGGCGA | | | AAGCAAGGCA | |
| | AAC | | | GAC | | | AAC | |
| 158 | GAGCUGGCA | 1734 | 1345-1365 | AGACGUGUUC | 161 | 1343-1365 | GAGAGCUGGC | 3644 |
| | GGGAACACG | | | CCUGCCAGCU | | | AGGGAACACG | |
| | UCU | | | CUC | | | UCU | |
| 159 | ACCAGUGCA | 1735 | 922-942 | CAAGAGAAAC | 162 | 920-942 | UCACCAGUGC | 3645 |
| | UGGUUUCUC | | | CAUGCACUGG | | | AUGGUUUCUC | |
| | UUG | | | UGA | | | UUG | |
| 160 | GCAUCAAGC | 1736 | 2288-2308 | ACUCCUUCUC | 163 | 2286-2308 | GCGCAUCAAG | 3646 |
| | UCGAGAAGG | | | GAGCUUGAUG | | | CUCGAGAAGG | |
| | AGU | | | CGC | | | AGU | |
| 161 | CUUCCUUAG | 1737 | 2400-2420 | GAGUCUCCGA | 164 | 2398-2420 | CCCUUCCUUA | 3647 |
| | CUUCGGAGA | | | AGCUAAGGAA | | | GCUUCGGAGA | |
| | CUC | | | GGG | | | CUC | |
| 162 | GAGGAUGAC | 1738 | 706-726 | UGAUAAACAA | 165 | 704-726 | CAGAGGAUGA | 3648 |
| | GAUUGUUUA | | | UCGUCAUCCU | | | CGAUUGUUUA | |
| | UCA | | | CUG | | | UCA | |
| 163 | CAUCCAGAC | 1739 | 10-30 | UGAACGUCAG | 166 | 8-30 | UCCAUCCAGA | 3649 |
| | UCCUGACGU | | | GAGUCUGGAU | | | CUCCUGACGU | |
| | UCA | | | GGA | | | UCA | |
| 164 | CAGGGACAC | 1740 | 2127-2147 | UCUUCGUCGC | 167 | 2125-2147 | CACAGGGACA | 3650 |
| | UUGCGACGA | | | AAGUGUCCCU | | | CUUGCGACGA | |
| | AGA | | | GUG | | | AGA | |
| 165 | ACCAAAGGU | 1741 | 5939-5959 | CAGGUUGUAA | 168 | 5937-5959 | UGACCAAAGG | 3651 |
| | CAUUACAAC | | | UGACCUUUGG | | | UCAUUACAAC | |
| | CUG | | | UCA | | | CUG | |
| 166 | CGUUCAAAU | 1742 | 1538-1558 | GGUUGCUCUG | 169 | 1536-1558 | GACGUUCAAA | 3652 |
| | UUCAGAGCA | | | AAAUUUGAAC | | | UUUCAGAGCA | |
| | ACC | | | GUC | | | ACC | |
| 167 | CAGCCCUAU | 1743 | 1392-1412 | AGUAACCUUU | 170 | 1390-1412 | CCCAGCCCUA | 3653 |
| | GCAAAGGUU | | | GCAUAGGGCU | | | UGCAAAGGUU | |
| | ACU | | | GGG | | | ACU | |
| 168 | CACAGGGAC | 1744 | 2125-2145 | UUCGUCGCAA | 171 | 2123-2145 | GCCACAGGGA | 3654 |
| | ACUUGCGAC | | | GUGUCCCUGU | | | CACUUGCGAC | |
| | GAA | | | GGC | | | GAA | |
| 169 | GCAUCCAAU | 1745 | 667-687 | AACCUCCACG | 172 | 665-687 | AAGCAUCCAA | 3655 |
| | CCCGUGGAG | | | GGAUUGGAUG | | | UCCCGUGGAG | |
| | GUU | | | CUU | | | GUU | |
| 170 | GCCCAACAC | 1746 | 2331-2351 | UACACGUUCU | 173 | 2329-2351 | AUGCCCAACA | 3656 |
| | GGAGAACGU | | | CCGUGUUGGG | | | CGGAGAACGU | |
| | GUA | | | CAU | | | GUA | |
| 171 | CCAGCCACC | 1747 | 1053-1073 | AUCCCAUGGA | 174 | 1051-1073 | UCCCAGCCAC | 3657 |
| | UCUCCAUGG | | | GAGGUGGCUG | | | CUCUCCAUGG | |
| | GAU | | | GGA | | | GAU | |
| 172 | CCACCUCUC | 1748 | 1057-1077 | AUGAAUCCCA | 175 | 1055-1077 | AGCCACCUCU | 3658 |
| | CAUGGGAUU | | | UGGAGAGGUG | | | CCAUGGGAUU | |
| | CAU | | | GCU | | | CAU | |
| 173 | CGGCCCAGC | 1749 | 1387-1407 | CCUUUGCAUA | 176 | 1385-1407 | GCCGGCCCAG | 3659 |
| | CCUAUGCAA | | | GGGCUGGGCC | | | CCCUAUGCAA | |
| | AGG | | | GGC | | | AGG | |
| 174 | GGCACAGUG | 1750 | 2849-2869 | UCAACACUCG | 177 | 2847-2869 | AUGGCACAGU | 3660 |
| | AUCGAGUGU | | | AUCACUGUGC | | | GAUCGAGUGU | |
| | UGA | | | CAU | | | UGA | |
| 175 | CCUGGGCGA | 1751 | 2079-2099 | CGCUUAUGCU | 178 | 2077-2099 | GUCCUGGGCG | 3661 |
| | GAAGCAUAA | | | UCUCGCCCAG | | | AGAAGCAUAA | |
| | GCG | | | GAC | | | GCG | |
| 176 | UCCUGACGU | 1752 | 19-39 | CUGCGAACUU | 179 | 17-39 | ACUCCUGACG | 3662 |
| | UCAAGUUCG | | | GAACGUCAGG | | | UUCAAGUUCG | |
| | CAG | | | AGU | | | CAG | |
| 177 | GAUCGAGUG | 1753 | 2857-2877 | AUCAUUAUUC | 180 | 2855-2877 | GUGAUCGAGU | 3663 |
| | UUGAAUAAU | | | AACACUCGAU | | | GUUGAAUAAU | |
| | GAU | | | CAC | | | GAU | |
| 178 | ACGCCAGAG | 1754 | 700-720 | ACAAUCGUCA | 181 | 698-720 | UCACGCCAGA | 3664 |
| | GAUGACGAU | | | UCCUCUGGCG | | | GGAUGACGAU | |
| | UGU | | | UGA | | | UGU | |
| 179 | GGUUGGCAU | 1755 | 684-704 | GGCGUGACCU | 182 | 682-704 | GAGGUUGGCA | 3665 |
| | CCAGGUCAC | | | GGAUGCCAAC | | | UCCAGGUCAC | |
| | GCC | | | CUC | | | GCC | |
| 180 | GUGGCCAAG | 1756 | 1783-1803 | CUCGCUCUUG | 183 | 1781-1803 | UGGUGGCCAA | 3666 |
| | UUCAAGAGC | | | AACUUGGCCA | | | GUUCAAGAGC | |
| | GAG | | | CCA | | | GAG | |
| 181 | UACAAGUGC | 1757 | 1597-1617 | GUCGCACAGG | 184 | 1595-1617 | CCUACAAGUG | 3667 |
| | AACCUGUGC | | | UUGCACUUGU | | | CAACCUGUGC | |
| | GAC | | | AGG | | | GAC | |
| 182 | AGAUCCCUU | 1758 | 2394-2414 | CCGAAGCUAA | 185 | 2392-2414 | AAAGAUCCCU | 3668 |
| | CCUUAGCUU | | | GGAAGGGAUC | | | UCCUUAGCUU | |
| | CGG | | | UUU | | | CGG | |
| 183 | UCCAGACUC | 1759 | 12-32 | CUUGAACGUC | 186 | 10-32 | CAUCCAGACU | 3669 |
| | CUGACGUUC | | | AGGAGUCUGG | | | CCUGACGUUC | |
| | AAG | | | AUG | | | AAG | |
| 184 | GAGCUGGAC | 1760 | 2497-2517 | CGAGAUCCCU | 187 | 2495-2495 | GGGAGCUGGA | 3670 |
| | GGAGGGAUC | | | CCGUCCAGCU | | | CGGAGGGAUC | |
| | UCG | | | CCC | | | UCG | |
| 185 | ACAGGGACA | 1761 | 2126-2146 | CUUCGUCGCA | 188 | 2124-2146 | CCACAGGGAC | 3671 |
| | CUUGCGACG | | | AGUGUCCCUG | | | ACUUGCGACG | |
| | AAG | | | UGG | | | AAG | |
| 186 | CCUUCCUUA | 1762 | 2399-2419 | AGUCUCCGAA | 189 | 2397-2419 | UCCCUUCCUU | 3672 |
| | GCUUCGGAG | | | GCUAAGGAAG | | | AGCUUCGGAG | |
| | ACU | | | GGA | | | ACU | |
| 187 | AGGUCCUGG | 1763 | 2075-2095 | UAUGCUUCUC | 190 | 2073-2095 | CCAGGUCCUG | 3673 |
| | GCGAGAAGC | | | GCCCAGGACC | | | GGCGAGAAGC | |
| | AUA | | | UGG | | | AUA | |
| 188 | AUUUCAGAG | 1764 | 1545-1565 | ACCACCAGGU | 191 | 1543-1565 | AAAUUUCAGA | 3674 |
| | CAACCUGGU | | | UGCUCUGAAA | | | GCAACCUGGU | |
| | GGU | | | UUU | | | GGU | |
| 189 | AGAGGAUGA | 1765 | 705-725 | GAUAAACAAU | 192 | 703-725 | CCAGAGGAUG | 3675 |
| | CGAUUGUUU | | | CGUCAUCCUC | | | ACGAUUGUUU | |
| | AUC | | | UGG | | | AUC | |
| 190 | UGGUGGCCA | 1766 | 1781-1801 | CGCUCUUGAA | 193 | 1779-1801 | CGUGGUGGCC | 3676 |
| | AGUUCAAGA | | | CUUGGCCACC | | | AAGUUCAAGA | |
| | GCG | | | ACG | | | GCG | |
| 191 | GCCGGCCCA | 1767 | 1385-1405 | UUUGCAUAGG | 194 | 1383-1405 | AGGCCGGCCC | 3677 |
| | GCCCUAUGC | | | GCUGGGCCGG | | | AGCCCUAUGC | |
| | AAA | | | CCU | | | AAA | |
| 192 | AGCCACCUC | 1768 | 1055-1075 | GAAUCCCAUG | 195 | 1053-1075 | CCAGCCACCU | 3678 |
| | UCCAUGGGA | | | GAGAGGUGGC | | | CUCCAUGGGA | |
| | UUC | | | UGG | | | UUC | |
| 193 | UCUAAGCGC | 1769 | 2281-2301 | CUCGAGCUUG | 196 | 2279-2301 | UCUCUAAGCG | 3679 |
| | AUCAAGCUC | | | AUGCGCUUAG | | | CAUCAAGCUC | |
| | GAG | | | AGA | | | GAG | |
| 194 | AGGGAACAC | 1770 | 1353-1373 | GGUGGGCUAG | 197 | 1351-1373 | GCAGGGAACA | 3680 |
| | GUCUAGCCC | | | ACGUGUUCCC | | | CGUCUAGCCC | |
| | ACC | | | UGC | | | ACC | |
| 195 | UGUGGGCAG | 1771 | 526-546 | GUUCAUCUGG | 198 | 524-546 | CCUGUGGGCA | 3681 |
| | UGCCAGAUG | | | CACUGCCCAC | | | GUGCCAGAUG | |
| | AAC | | | AGG | | | AAC | |
| 196 | GCCACCUCU | 1772 | 1056-1076 | UGAAUCCCAU | 199 | 1054-1076 | CAGCCACCUC | 3682 |
| | CCAUGGGAU | | | GGAGAGGUGG | | | UCCAUGGGAU | |
| | UCA | | | CUG | | | UCA | |
| 197 | CCAACACGG | 1773 | 2333-2353 | AGUACACGUU | 200 | 2331-2353 | GCCCAACACG | 3684 |
| | AGAACGUGU | | | CUCCGUGUUG | | | GAGAACGUGU | |
| | ACU | | | GGC | | | ACU | |
| 198 | AAUACCAGG | 1774 | 1110-1130 | CUCGAUACUG | 201 | 1108-1130 | AGAAUACCAG | 3684 |
| | AUCAGUAUC | | | AUCCUGGUAU | | | GAUCAGUAUC | |
| | GAG | | | UCU | | | GAG | |
| 199 | CCUCCUCAC | 1775 | 516-536 | CACUGCCCAC | 202 | 514-536 | GACCUCCUCA | 3685 |
| | CUGUGGGCA | | | AGGUGAGGAG | | | CCUGUGGGCA | |
| | GUG | | | GUC | | | GUG | |
| 200 | CUUCUCUAA | 1776 | 2277-2297 | AGCUUGAUGC | 203 | 2275-2297 | CCCUUCUCUA | 3686 |
| | GCGCAUCAA | | | GCUUAGAGAA | | | AGCGCAUCAA | |
| | GCU | | | GGG | | | GCU | |
| 201 | GCAGUGCCA | 1777 | 531-551 | GGGAAGUUCA | 204 | 529-551 | GGGCAGUGCC | 3687 |
| | GAUGAACUU | | | UCUGGCACUG | | | AGAUGAACUU | |
| | CCC | | | CCC | | | CCC | |
| 202 | GAAGACGCA | 1778 | 1656-1676 | GAUUUGUGCA | 205 | 1654-1676 | AUGAAGACGC | 3688 |
| | CAUGCACAA | | | UGUGCGUCUU | | | ACAUGCACAA | |
| | AUC | | | CAU | | | AUC | |
| 203 | UGGCAGGGA | 1779 | 1349-1369 | GGCUAGACGU | 206 | 1347-1369 | GCUGGCAGGG | 3689 |
| | ACACGUCUA | | | GUUCCCUGCC | | | AACACGUCUA | |
| | GCC | | | AGC | | | GCC | |
| 204 | CUAUGGAGC | 1780 | 1304-1324 | CCAUGGCGGG | 207 | 1302-1324 | GGCUAUGGAG | 3690 |
| | CUCCCGCCA | | | AGGCUCCAUA | | | CCUCCCGCCA | |
| | UGG | | | GCC | | | UGG | |
| 205 | CACGCCAGA | 1781 | 699-719 | CAAUCGUCAU | 208 | 697-719 | GUCACGCCAG | 3691 |
| | GGAUGACGA | | | CCUCUGGCGU | | | AGGAUGACGA | |
| | UUG | | | GAC | | | UUG | |
| 206 | CCAGCCCUA | 1782 | 1391-1411 | GUAACCUUUG | 209 | 1389-1411 | GCCCAGCCCU | 3692 |
| | UGCAAAGGU | | | CAUAGGGCUG | | | AUGCAAAGGU | |
| | UAC | | | GGC | | | UAC | |
| 207 | CCAGACCAC | 1783 | 475-495 | UCCCAACGGG | 210 | 473-495 | AACCAGACCA | 3693 |
| | GGCCCGUUG | | | CCGUGGUCUG | | | CGGCCCGUUG | |
| | GGA | | | GUU | | | GGA | |
| 208 | CUCUAAGCG | 1784 | 2280-2300 | UCGAGCUUGA | 211 | 2278-2300 | UUCUCUAAGC | 3694 |
| | CAUCAAGCU | | | UGCGCUUAGA | | | GCAUCAAGCU | |
| | CGA | | | GAA | | | CGA | |
| 209 | GGACACUUG | 1785 | 2130-2150 | GAGUCUUCGU | 212 | 2128-2150 | AGGGACACUU | 3695 |
| | CGACGAAGA | | | CGCAAGUGUC | | | GCGACGAAGA | |
| | CUC | | | CCU | | | CUC | |
| 210 | GCCACAGGG | 1786 | 2123-2143 | CGUCGCAAGU | 213 | 2121-2143 | GGGCCACAGG | 3696 |
| | ACACUUGCG | | | GUCCCUGUGG | | | GACACUUGCG | |
| | ACG | | | CCC | | | ACG | |
| 211 | UCCCGUGGA | 1787 | 675-695 | UGGAUGCCAA | 214 | 673-695 | AAUCCCGUGG | 3687 |
| | GGUUGGCAU | | | CCUCCACGGG | | | AGGUUGGCAU | |
| | CCA | | | AUU | | | CCA | |
| 212 | CUGGGCGAG | 1788 | 2080-2100 | GCGCUUAUGC | 215 | 2078-2100 | UCCUGGGCGA | 3698 |
| | AAGCAUAAG | | | UUCUCGCCCA | | | GAAGCAUAAG | |
| | CGC | | | GGA | | | CGC | |
| 213 | CAACACGGA | 1789 | 2334-2354 | GAGUACACGU | 216 | 2332-2354 | CCCAACACGG | 3699 |
| | GAACGUGUA | | | UCUCCGUGUU | | | AGAACGUGUA | |
| | CUC | | | GGG | | | CUC | |
| 214 | ACCACGGCC | 1790 | 479-499 | GAGCUCCCAA | 217 | 477-499 | AGACCACGGC | 3700 |
| | CGUUGGGAG | | | CGGGCCGUGG | | | CCGUUGGGAG | |
| | CUC | | | UCU | | | CUC | |
| 215 | UCCAGGUCA | 1791 | 692-712 | CAUCCUCUGG | 218 | 690-712 | CAUCCAGGUC | 3701 |
| | CGCCAGAGG | | | CGUGACCUGG | | | ACGCCAGAGG | |
| | AUG | | | AUG | | | AUG | |
| 216 | UAGAUGACC | 1792 | 5933-5953 | GUAAUGACCU | 219 | 5931-5953 | UUUAGAUGAC | 3702 |
| | AAAGGUCAU | | | UUGGUCAUCU | | | CAAAGGUCAU | |
| | UAC | | | AAA | | | UAC | |
| 217 | GAAGCAUAA | 1793 | 2088-2108 | AGGUGGCCGC | 220 | 2086-2108 | GAGAAGCAUA | 3703 |
| | GCGCGGCCA | | | GCUUAUGCUU | | | AGCGCGGCCA | |
| | CCU | | | CUC | | | CCU | |
| 218 | AAGUGCAAC | 1794 | 1600-1620 | GUGGUCGCAC | 221 | 1598-1620 | ACAAGUGCAA | 3704 |
| | CUGUGCGAC | | | AGGUUGCACU | | | CCUGUGCGAC | |
| | CAC | | | UGU | | | CAC | |
| 219 | AGUGCAACC | 1795 | 1601-1621 | CGUGGUCGCA | 222 | 1599-1621 | CAAGUGCAAC | 3705 |
| | UGUGCGACC | | | CAGGUUGCAC | | | CUGUGCGACC | |
| | ACG | | | UUG | | | ACG | |
| 220 | CCUGCCCGA | 1796 | 2010-2030 | CCCUGCAUGA | 223 | 2008-2030 | GCCCUGCCCG | 3706 |
| | CGUCAUGCA | | | CGUCGGGCAG | | | ACGUCAUGCA | |
| | GGG | | | GGC | | | GGG | |
| 221 | CUCCUGACG | 1797 | 18-38 | UGCGAACUUG | 224 | 16-38 | GACUCCUGAC | 3707 |
| | UUCAAGUUC | | | AACGUCAGGA | | | GUUCAAGUUC | |
| | GCA | | | GUC | | | GCA | |
| 222 | GUGCAACCU | 1798 | 1602-1622 | GCGUGGUCGC | 225 | 1600-1622 | AAGUGCAACC | 3708 |
| | GUGCGACCA | | | ACAGGUUGCA | | | UGUGCGACCA | |
| | CGC | | | CUU | | | CGC | |
| 223 | GGUCCUGGG | 1799 | 2076-2096 | UUAUGCUUCU | 226 | 2074-2096 | CAGGUCCUGG | 3709 |
| | CGAGAAGCA | | | CGCCCAGGAC | | | GCGAGAAGCA | |
| | UAA | | | CUG | | | UAA | |
| 224 | GGCCACAGG | 1800 | 2122-2142 | GUCGCAAGUG | 227 | 2120-2142 | AGGGCCACAG | 3710 |
| | GACACUUGC | | | UCCCUGUGGC | | | GGACACUUGC | |
| | GAC | | | CCU | | | GAC | |
| 225 | AGAAUACCA | 1801 | 1108-1128 | CGAUACUGAU | 228 | 1106-1128 | UAAGAAUACC | 3711 |
| | GGAUCAGUA | | | CCUGGUAUUC | | | AGGAUCAGUA | |
| | UCG | | | UUA | | | UCG | |
| 226 | GAACCAGAC | 1802 | 472-492 | CAACGGGCCG | 229 | 470-492 | AUGAACCAGA | 3712 |
| | CACGGCCCG | | | UGGUCUGGUU | | | CCACGGCCCG | |
| | UUG | | | CAU | | | UUG | |
| 227 | GGAGCCUCC | 1803 | 1308-1328 | AAAUCCAUGG | 230 | 1306-1328 | AUGGAGCCUC | 3713 |
| | CGCCAUGGA | | | CGGGAGGCUC | | | CCGCCAUGGA | |
| | UUU | | | CAU | | | UUU | |
| 228 | UGAACCAGA | 1804 | 471-491 | AACGGGCCGU | 231 | 469-491 | GAUGAACCAG | 3714 |
| | CCACGGCCC | | | GGUCUGGUUC | | | ACCACGGCCC | |
| | GUU | | | AUC | | | GUU | |
| 229 | AGCCAGGUA | 1805 | 1424-1444 | AGGGCGGCUU | 232 | 1422-1444 | CCAGCCAGGU | 3715 |
| | GCAAGCCGC | | | GCUACCUGGC | | | AGCAAGCCGC | |
| | CCU | | | UGG | | | CCU | |
| 230 | AGACUCCUG | 1806 | 15-35 | GAACUUGAAC | 233 | 13-35 | CCAGACUCCU | 3716 |
| | ACGUUCAAG | | | GUCAGGAGUC | | | GACGUUCAAG | |
| | UUC | | | UGG | | | UUC | |
| 231 | UCACGCCAG | 1807 | 698-718 | AAUCGUCAUC | 234 | 696-718 | GGUCACGCCA | 3717 |
| | AGGAUGACG | | | CUCUGGCGUG | | | GAGGAUGACG | |
| | AUU | | | ACC | | | AUU | |
| 232 | GUCACGCCA | 1808 | 697-717 | AUCGUCAUCC | 235 | 695-717 | AGGUCACGCC | 3718 |
| | GAGGAUGAC | | | UCUGGCGUGA | | | AGAGGAUGAC | |
| | GAU | | | CCU | | | GAU | |
| 233 | UCCAAUCCC | 1809 | 670-690 | GCCAACCUCC | 236 | 668-690 | CAUCCAAUCC | 3719 |
| | GUGGAGGUU | | | ACGGGAUUGG | | | CGUGGAGGUU | |
| | GGC | | | AUG | | | GGC | |
| 234 | CAGACCACG | 1810 | 476-496 | CUCCCAACGG | 237 | 474-496 | ACCAGACCAC | 3720 |
| | GCCCGUUGG | | | GCCGUGGUCU | | | GGCCCGUUGG | |
| | GAG | | | GGU | | | GAG | |
| 235 | GCCAAGUUC | 1811 | 1786-1806 | GUUCUCGCUC | 238 | 1784-1806 | UGGCCAAGUU | 3721 |
| | AAGAGCGAG | | | UUGAACUUGG | | | CAAGAGCGAG | |
| | AAC | | | CCA | | | AAC | |
| 236 | AGAUGACCA | 1812 | 5934-5954 | UGUAAUGACC | 239 | 5932-5954 | UUAGAUGACC | 3722 |
| | AAGGUCAUU | | | UUUGGUCAUC | | | AAAGGUCAUU | |
| | ACA | | | UAA | | | ACA | |
| 237 | UCCCUUCCU | 1813 | 2397-2417 | UCUCCGAAGC | 240 | 2395-2417 | GAUCCCUUCC | 3723 |
| | UAGCUUCGG | | | UAAGGAAGGG | | | UUAGCUUCGG | |
| | AGA | | | AUC | | | AGA | |
| 238 | ACACGUCUA | 1814 | 1358-1378 | ACAGCGGUGG | 241 | 1356-1378 | GAACACGUCU | 3724 |
| | GCCCACCGC | | | GCUAGACGUG | | | AGCCCACCGC | |
| | UGU | | | UUC | | | UGU | |
| 239 | GUGGUGGCC | 1815 | 1780-1800 | GCUCUUGAAC | 242 | 1778-1800 | CCGUGGUGGC | 3725 |
| | AAGUUCAAG | | | UUGGCCACCA | | | CAAGUUCAAG | |
| | AGC | | | CGG | | | AGC | |
| 240 | CCCUUCCUU | 1816 | 2398-2418 | GUCUCCGAAG | 243 | 2396-2418 | AUCCCUUCCU | 3726 |
| | AGCUUCGGA | | | CUAAGGAAGG | | | UAGCUUCGGA | |
| | GAC | | | GAU | | | GAC | |
| 241 | UGCCCAACA | 1817 | 2330-2350 | ACACGUUCUC | 244 | 2328-2350 | GAUGCCCAAC | 3727 |
| | CGGAGAACG | | | CGUGUUGGGC | | | ACGGAGAACG | |
| | UGU | | | AUC | | | UGU | |
| 242 | GUAUCGAGA | 1818 | 1123-1143 | GCCGGAAGCC | 245 | 1121-1143 | CAGUAUCGAG | 3728 |
| | GAGGCUUCC | | | UCUCUCGAUA | | | AGAGGCUUCC | |
| | GGC | | | CUG | | | GGC | |
| 243 | CGUCUAGCC | 1819 | 1361-1381 | GGGACAGCGG | 246 | 1359-1381 | CACGUCUAGC | 3729 |
| | CACCGCUGU | | | UGGGCUAGAC | | | CCACCGCUGU | |
| | CCC | | | GUG | | | CCC | |
| 244 | AGGUUGGCA | 1820 | 683-703 | GCGUGACCUG | 247 | 681-703 | GGAGGUUGGC | 3730 |
| | UCCAGGUCA | | | GAUGCCAACC | | | AUCCAGGUCA | |
| | CGC | | | UCC | | | CGC | |
| 245 | UAUGGAGCC | 1821 | 1305-1325 | UCCAUGGCGG | 248 | 1303-1325 | GCUAUGGAGC | 3731 |
| | UCCCGCCAU | | | GAGGCUCCAU | | | CUCCCGCCAU | |
| | GGA | | | AGC | | | GGA | |
| 246 | AAUCCCGUG | 1822 | 673-693 | GAUGCCAACC | 249 | 671-693 | CCAAUCCCGU | 3732 |
| | GAGGUUGGC | | | UCCACGGGAU | | | GGAGGUUGGC | |
| | AUC | | | UGG | | | AUC | |
| 247 | UUGGCAUCC | 1823 | 686-706 | CUGGCGUGAC | 250 | 684-706 | GGUUGGCAUC | 3733 |
| | AGGUCACGC | | | CUGGAUGCCA | | | CAGGUCACGC | |
| | CAG | | | ACC | | | CAG | |
| 248 | CUUAGCUUC | 1824 | 2404-2424 | UCUGGAGUCU | 251 | 2402-2424 | UCCUUAGCUU | 3734 |
| | GGAGACUCC | | | CCGAAGCUAA | | | CGGAGACUCC | |
| | AGA | | | GGA | | | AGA | |
| 249 | CACGUCUAG | 1825 | 1359-1379 | GACAGCGGUG | 252 | 1357-1379 | AACACGUCUA | 3735 |
| | CCCACCGCU | | | GGCUAGACGU | | | GCCCACCGCU | |
| | GUC | | | GUU | | | GUC | |
| 250 | AACCAGACC | 1826 | 473-493 | CCAACGGGCC | 253 | 471-493 | UGAACCAGAC | 3736 |
| | ACGGCCCGU | | | GUGGUCUGGU | | | CACGGCCCGU | |
| | UGG | | | UCA | | | UGG | |
| 251 | AACACGUCU | 1827 | 1357-1377 | CAGCGGUGGG | 254 | 1355-1377 | GGAACACGUC | 3737 |
| | AGCCCACCG | | | CUAGACGUGU | | | UAGCCCACCG | |
| | CUG | | | UCC | | | CUG | |
| 252 | GUCCAUCCA | 1828 | 7-27 | ACGUCAGGAG | 255 | 5-27 | CUGUCCAUCC | 3738 |
| | GACUCCUGA | | | UCUGGAUGGA | | | AGACUCCUGA | |
| | CGU | | | CAG | | | CGU | |
| 253 | AGCUGGACG | 1829 | 2498-2518 | CCGAGAUCCC | 256 | 2496-2518 | GGAGCUGGAC | 3739 |
| | GAGGGAUCU | | | UCCGUCCAGC | | | GGAGGGAUCU | |
| | CGG | | | UCC | | | CGG | |
| 254 | CUAAGCGCA | 1830 | 2282-2302 | UCUCGAGCUU | 257 | 2280-2302 | CUCUAAGCGC | 3740 |
| | UCAAGCUCG | | | GAUGCGCUUA | | | AUCAAGCUCG | |
| | AGA | | | GAG | | | AGA | |
| 255 | GUUGGCAUC | 1831 | 685-705 | UGGCGUGACC | 258 | 683-705 | AGGUUGGCAU | 3741 |
| | CAGGUCACG | | | UGGAUGCCAA | | | CCAGGUCACG | |
| | CCA | | | CCU | | | CCA | |
| 256 | CCAGGUAGC | 1832 | 1426-1446 | GAAGGGCGGC | 259 | 1424-1446 | AGCCAGGUAG | 3742 |
| | AAGCCGCCC | | | UUGCUACCUG | | | CAAGCCGCCC | |
| | UUC | | | GCU | | | UUC | |
| 257 | CCAGCCAGG | 1833 | 1422-1442 | GGCGGCUUGC | 260 | 1420-1442 | UUCCAGCCAG | 3743 |
| | UAGCAAGCC | | | UACCUGGCUG | | | GUAGCAAGCC | |
| | GCC | | | GAA | | | GCC | |
| 258 | AGGGACACU | 1834 | 2128-2148 | GUCUUCGUCG | 261 | 2126-2148 | ACAGGGACAC | 3744 |
| | UGCGACGAA | | | CAAGUGUCCC | | | UUGCGACGAA | |
| | GAC | | | UGU | | | GAC | |
| 259 | ACAAGUGCA | 1835 | 1598-1618 | GGUCGCACAG | 262 | 1596-1618 | CUACAAGUGC | 3745 |
| | ACCUGUGCG | | | GUUGCACUUG | | | AACCUGUGCG | |
| | ACC | | | UAG | | | ACC | |
| 260 | GCUGGACGG | 1836 | 2499-2519 | CCCGAGAUCC | 263 | 2497-2519 | GAGCUGGACG | 3746 |
| | AGGGAUCUC | | | CUCCGUCCAG | | | GAGGGAUCUC | |
| | GGG | | | CUC | | | GGG | |
| 261 | CAAAUUUCA | 1837 | 1542-1562 | ACCAGGUUGC | 264 | 1540-1562 | UUCAAAUUUC | 3747 |
| | GAGCAACCU | | | UCUGAAAUUU | | | AGAGCAACCU | |
| | GGU | | | GAA | | | GGU | |
| 262 | CUGUCCAUC | 1838 | 5-25 | GUCAGGAGUC | 265 | 3-25 | CUCUGUCCAU | 3748 |
| | CAGACUCCU | | | UGGAUGGACA | | | CCAGACUCCU | |
| | GAC | | | GAG | | | GAC | |
| 263 | AUCCCGUGG | 1839 | 674-694 | GGAUGCCAAC | 266 | 672-694 | CAAUCCCGUG | 3749 |
| | AGGUUGGCA | | | CUCCACGGGA | | | GAGGUUGGCA | |
| | UCC | | | UUG | | | UCC | |
| 264 | UCCUGGGCG | 1840 | 2078-2098 | GCUUAUGCUU | 267 | 2076-2098 | GGUCCUGGGC | 3750 |
| | AGAAGCAUA | | | CUCGCCCAGG | | | GAGAAGCAUA | |
| | AGC | | | ACC | | | AGC | |
| 265 | UAUCGAGAG | 1841 | 1124-1144 | GGCCGGAAGC | 268 | 1122-1144 | AGUAUCGAGA | 3751 |
| | AGGCUUCCG | | | CUCUCUCGAU | | | GAGGCUUCCG | |
| | GCC | | | ACU | | | GCC | |
| 266 | CCGACGUCA | 1842 | 2015-2035 | CCAUGCCCUG | 269 | 2013-2035 | GCCCGACGUC | 3752 |
| | UGCAGGGCA | | | CAUGACGUCG | | | AUGCAGGGCA | |
| | UGG | | | GGC | | | UGG | |
| 267 | UGUCCAUCC | 1843 | 6-26 | CGUCAGGAGU | 270 | 4-26 | UCUGUCCAUC | 3753 |
| | AGACUCCUG | | | CUGGAUGGAC | | | CAGACUCCUG | |
| | ACG | | | AGA | | | ACG | |
| 268 | AGGGCCACA | 1844 | 2120-2140 | CGCAAGUGUC | 271 | 2118-2140 | CGAGGGCCAC | 3754 |
| | GGGACACUU | | | CCUGUGGCCC | | | AGGGACACUU | |
| | GCG | | | UCG | | | GCG | |
| 269 | ACCAGACCA | 1845 | 474-494 | CCCAACGGGC | 272 | 472-494 | GAACCAGACC | 3755 |
| | CGGCCCGUU | | | CGUGGUCUGG | | | ACGGCCCGUU | |
| | GGG | | | UUC | | | GGG | |
| 270 | GCAUAAGCG | 1846 | 2091-2111 | GCCAGGUGGC | 273 | 2089-2111 | AAGCAUAAGC | 3756 |
| | CGGCCACCU | | | CGCGCUUAUG | | | GCGGCCACCU | |
| | GGC | | | CUU | | | GGC | |
| 271 | AUGGCUAUG | 1847 | 1300-1320 | GGCGGGAGGC | 274 | 1298-1320 | CAAUGGCUAU | 3757 |
| | GAGCCUCCC | | | UCCAUAGCCA | | | GGAGCCUCCC | |
| | GCC | | | UUG | | | GCC | |
| 272 | CAGGAACAC | 1848 | 754-774 | UUUAUCUGCU | 275 | 752-774 | AACAGGAACA | 3758 |
| | AUAGCAGAU | | | AUGUGUUCCU | | | CAUAGCAGAU | |
| | AAA | | | GUU | | | AAA | |
| 273 | AGGAACACA | 1849 | 755-775 | GUUUAUCUGC | 276 | 753-775 | ACAGGAACAC | 3759 |
| | UAGCAGAUA | | | UAUGUGUUCC | | | AUAGCAGAUA | |
| | AAC | | | UGU | | | AAC | |
| 274 | GGAACACAU | 1850 | 756-776 | AGUUUAUCUG | 277 | 754-776 | CAGGAACACA | 3760 |
| | AGCAGAUAA | | | CUAUGUGUUC | | | UAGCAGAUAA | |
| | ACU | | | CUG | | | ACU | |
| 275 | GAACACAUA | 1851 | 757-777 | AAGUUUAUCU | 278 | 755-777 | AGGAACACAU | 3761 |
| | GCAGAUAAA | | | GCUAUGUGUU | | | AGCAGAUAAA | |
| | CUU | | | CCU | | | CUU | |
| 276 | AACACAUAG | 1852 | 758-778 | GAAGUUUAUC | 279 | 756-778 | GGAACACAUA | 3762 |
| | CAGAUAAAC | | | UGCUAUGUGU | | | GCAGAUAAAC | |
| | UUC | | | UCC | | | UUC | |
| 277 | CCCAGCAGC | 1853 | 883-903 | UGUACAUGUG | 280 | 881-903 | AGCCCAGCAG | 3763 |
| | UACACAUGU | | | UAGCUGCUGG | | | CUACACAUGU | |
| | ACA | | | GCU | | | ACA | |
| 278 | CAGCAGCUA | 1854 | 885-905 | GUUGUACAUG | 281 | 883-905 | CCCAGCAGCU | 3764 |
| | CACAUGUAC | | | UGUAGCUGCU | | | ACACAUGUAC | |
| | AAC | | | GGG | | | AAC | |
| 279 | GCAGCUACA | 1855 | 887-907 | AAGUUGUACA | 282 | 885-907 | CAGCAGCUAC | 3765 |
| | CAUGUACAA | | | UGUGUAGCUG | | | ACAUGUACAA | |
| | CUU | | | CUG | | | CUU | |
| 280 | AGCUACACA | 1856 | 889-909 | GCAAGUUGUA | 283 | 887-909 | GCAGCUACAC | 3766 |
| | UGUACAACU | | | CAUGUGUAGC | | | AUGUACAACU | |
| | UGC | | | UGC | | | UGC | |
| 281 | CUACACAUG | 1857 | 891-911 | UUGCAAGUUG | 284 | 889-911 | AGCUACACAU | 3767 |
| | UACAACUUG | | | UACAUGUGUA | | | GUACAACUUG | |
| | CAA | | | GCU | | | CAA | |
| 282 | UACACAUGU | 1858 | 892-912 | UUUGCAAGUU | 285 | 890-912 | GCUACACAUG | 3768 |
| | ACAACUUGC | | | GUACAUGUGU | | | UACAACUUGC | |
| | AAA | | | AGC | | | AAA | |
| 283 | ACAUGUACA | 1859 | 895-915 | AUGUUUGCAA | 286 | 893-915 | ACACAUGUAC | 3769 |
| | ACUUGCAAA | | | GUUGUACAUG | | | AACUUGCAAA | |
| | CAU | | | UGU | | | CAG | |
| 284 | CAUGUACAA | 1860 | 896-916 | GCUGUUUGCA | 287 | 894-916 | CACAUGUACA | 3770 |
| | CUUGCAAAC | | | AGUUGUACAU | | | ACUUGCAAAC | |
| | AGC | | | GUG | | | AGC | |
| 285 | AUGUACAAC | 1861 | 897-917 | GGCUGUUUGC | 288 | 895-917 | ACAUGUACAA | 3552 |
| | UUGCAAACA | | | AAGUUGUACA | | | CUUGCAAACA | |
| | GCC | | | UGU | | | GCC | |
| 286 | UGUACAACU | 1862 | 898-918 | UGGCUGUUUG | 289 | 896-918 | CAUGUACAAC | 3771 |
| | UGCAAACAG | | | CAAGUUGUAC | | | UUGCAAACAG | |
| | CCA | | | AUG | | | CCA | |
| 287 | GUACAACUU | 1863 | 899-919 | AUGGCUGUUU | 290 | 897-919 | AUGUACAACU | 3772 |
| | GCAAACAGC | | | GCAAGUUGUA | | | UGCAAACAGC | |
| | CAU | | | CAU | | | CAU | |
| 288 | UACAACUUG | 1864 | 900-920 | AAUGGCUGUU | 291 | 898-920 | UGUACAACUU | 3773 |
| | CAAACAGCC | | | UGCAAGUUGU | | | GCAAACAGCC | |
| | AUU | | | ACA | | | AUU | |
| 289 | ACAACUUGC | 1865 | 901-921 | GAAUGGCUGU | 292 | 899-921 | GUACAACUUG | 3774 |
| | AAACAGCCA | | | UUGCAAGUUG | | | CAAACAGCCA | |
| | UUC | | | UAC | | | UUC | |
| 290 | CAACUUGCA | 1866 | 902-922 | UGAAUGGCUG | 293 | 900-922 | UACAACUUGC | 3775 |
| | AACAGCCAU | | | UUUGCAAGUU | | | AAACAGCCAU | |
| | UCA | | | GUA | | | UCA | |
| 291 | AACUUGCAA | 1867 | 903-923 | GUGAAUGGCU | 294 | 901-923 | ACAACUUGCA | 3776 |
| | ACAGCCAUU | | | GUUUGCAAGU | | | AACAGCCAUU | |
| | CAC | | | UGU | | | CAC | |
| 292 | ACUUGCAAA | 1868 | 904-924 | GGUGAAUGGC | 295 | 902-924 | CAACUUGCAA | 3556 |
| | CAGCCAUUC | | | UGUUUGCAAG | | | ACAGCCAUUC | |
| | ACC | | | UUG | | | ACC | |
| 293 | CUUGCAAAC | 1869 | 905-925 | UGGUGAAUGG | 296 | 903-925 | AACUUGCAAA | 3778 |
| | AGCCAUUCA | | | CUGUUUGCAA | | | CAGCCAUUCA | |
| | CCA | | | GUU | | | CCA | |
| 294 | UUGCAAACA | 1870 | 906-926 | AUGGUGAAUG | 297 | 904-926 | ACUUGCAAAC | 3779 |
| | GCCAUUCAC | | | GCUGUUUGCA | | | AGCCAUUCAC | |
| | CAU | | | AGU | | | CAG | |
| 295 | UGCAAACAG | 1871 | 907-927 | ACUGGUGAAU | 298 | 905-927 | CUUGCAAACA | 3780 |
| | CCAUUCACC | | | GGCUGUUUGC | | | GCCAUUCACC | |
| | AGU | | | AAG | | | AGU | |
| 296 | GCAAACAGC | 1872 | 908-928 | CACUGGUGAA | 299 | 906-928 | UUGCAAACAG | 3551 |
| | CAUUCACCA | | | UGGCUGUUUG | | | CCAUUCACCA | |
| | GUG | | | CAA | | | GUG | |
| 297 | CAAACAGCC | 1873 | 909-929 | GCACUGGUGA | 300 | 907-929 | UGCAAACAGC | 3781 |
| | AUUCACCAG | | | AUGGCUGUUU | | | CAUUCACCAG | |
| | UGC | | | GCA | | | UGC | |
| 298 | AAACAGCCA | 1874 | 910-930 | UGCACUGGUG | 301 | 908-930 | GCAAACAGCC | 3782 |
| | UUCACCAGU | | | AAUGGCUGUU | | | AUUCACCAGU | |
| | GCA | | | UGC | | | GCA | |
| 299 | AACAGCCAU | 1875 | 911-931 | AUGCACUGGU | 302 | 909-931 | CAAACAGCCA | 3783 |
| | UCACCAGUG | | | GAAUGGCUGU | | | UUCACCAGUG | |
| | CAU | | | UUG | | | CAU | |
| 300 | ACAGCCAUU | 1876 | 912-932 | AAUGCACUGG | 303 | 910-932 | AAACAGCCAU | 3784 |
| | CACCAGUGC | | | UGAAUGGCUG | | | UCACCAGUGC | |
| | AUU | | | UUU | | | AUG | |
| 301 | CAGCCAUUC | 1877 | 913-933 | ACAUGCACUG | 304 | 911-933 | AACAGCCAUU | 3785 |
| | ACCAGUGCA | | | GUGAAUGGCU | | | CACCAGUGCA | |
| | UGU | | | GUU | | | UGG | |
| 302 | AGCCAUUCA | 1878 | 914-934 | ACCAUGCACU | 305 | 912-934 | ACAGCCAUUC | 3786 |
| | CCAGUGCAU | | | GGUGAAUGGC | | | ACCAGUGCAU | |
| | GGU | | | UGU | | | GGU | |
| 303 | GCCAUUCAC | 1879 | 915-935 | AACCAUGCAC | 306 | 913-935 | CAGCCAUUCA | 3787 |
| | CAGUGCAUG | | | UGGUGAAUGG | | | CCAGUGCAUG | |
| | GUU | | | CUG | | | GUU | |
| 304 | CCAUUCACC | 1880 | 916-936 | AAACCAUGCA | 307 | 914-936 | AGCCAUUCAC | 3788 |
| | AGUGCAUGG | | | CUGGUGAAUG | | | CAGUGCAUGG | |
| | UUU | | | GCU | | | UUU | |
| 305 | CAUUCACCA | 1881 | 917-937 | GAAACCAUGC | 308 | 915-937 | GCCAUUCACC | 3789 |
| | GUGCAUGGU | | | ACUGGUGAAU | | | AGUGCAUGGU | |
| | UUC | | | GGC | | | UUC | |
| 306 | AUUCACCAG | 1882 | 918-938 | AGAAACCAUG | 309 | 916-938 | CCAUUCACCA | 3790 |
| | UGCAUGGUU | | | CACUGGUGAA | | | GUGCAUGGUU | |
| | UCU | | | UGG | | | UCU | |
| 307 | UUCACCAGU | 1883 | 919-939 | GAGAAACCAU | 310 | 917-939 | CAUUCACCAG | 3791 |
| | GCAUGGUUU | | | GCACUGGUGA | | | UGCAUGGUUU | |
| | CUC | | | AUG | | | CUC | |
| 308 | UCACCAGUG | 1884 | 920-940 | AGAGAAACCA | 311 | 918-940 | AUUCACCAGU | 3792 |
| | CAUGGUUUC | | | UGCACUGGUG | | | GCAUGGUUUC | |
| | UCU | | | AAU | | | UCU | |
| 309 | CACCAGUGC | 1885 | 921-941 | AAGAGAAACC | 312 | 919-941 | UUCACCAGUG | 3793 |
| | AUGGUUUCU | | | AUGCACUGGU | | | CAUGGUUUCU | |
| | CUU | | | GAA | | | CUU | |
| 310 | ACCAGUGCA | 1886 | 922-942 | AAAGAGAAAC | 313 | 920-942 | UCACCAGUGC | 3794 |
| | UGGUUUCUC | | | CAUGCACUGG | | | AUGGUUUCUC | |
| | UUU | | | UGA | | | UUG | |
| 311 | GGUUUCUCU | 1887 | 932-952 | GUGCGUGUUG | 314 | 930-952 | AUGGUUUCUC | 3795 |
| | UGCAACACG | | | CAAGAGAAAC | | | UUGCAACACG | |
| | CAC | | | CAU | | | CAC | |
| 312 | GUUUCUCUU | 1888 | 933-953 | UGUGCGUGUU | 315 | 931-953 | UGGUUUCUCU | 3796 |
| | GCAACACGC | | | GCAAGAGAAA | | | UGCAACACGC | |
| | ACA | | | CCA | | | ACA | |
| 313 | UUCUCUUGC | 1889 | 935-955 | UCUGUGCGUG | 316 | 933-955 | GUUUCUCUUG | 3797 |
| | AACACGCAC | | | UUGCAAGAGA | | | CAACACGCAC | |
| | AGA | | | AAC | | | AGA | |
| 314 | UCUCUUGCA | 1890 | 936-956 | UUCUGUGCGU | 317 | 934-956 | UUUCUCUUGC | 3798 |
| | ACACGCACA | | | GUUGCAAGAG | | | AACACGCACA | |
| | GAA | | | AAA | | | GAA | |
| 315 | CUUGCAACA | 1891 | 939-959 | GUGUUCUGUG | 318 | 937-959 | CUCUUGCAAC | 3799 |
| | CGCACAGAA | | | CGUGUUGCAA | | | ACGCACAGAA | |
| | CAC | | | GAG | | | CAC | |
| 316 | UUGCAACAC | 1892 | 940-960 | AGUGUUCUGU | 319 | 938-960 | UCUUGCAACA | 3800 |
| | GCACAGAAC | | | GCGUGUUGCA | | | CGCACAGAAC | |
| | ACU | | | AGA | | | ACU | |
| 317 | GCAACACGC | 1893 | 942-962 | UGAGUGUUCU | 320 | 940-962 | UUGCAACACG | 3801 |
| | ACAGAACAC | | | GUGCGUGUUG | | | CACAGAACAC | |
| | UCA | | | CAA | | | UCA | |
| 318 | CAACACGCA | 1894 | 943-963 | AUGAGUGUUC | 321 | 941-963 | UGCAACACGC | 3802 |
| | CAGAACACU | | | UGUGCGUGUU | | | ACAGAACACU | |
| | CAU | | | GCA | | | CAU | |
| 319 | ACACGCACA | 1895 | 945-965 | ACAUGAGUGU | 322 | 943-965 | CAACACGCAC | 3803 |
| | GAACACUCA | | | UCUGUGCGUG | | | AGAACACUCA | |
| | UGU | | | UUG | | | UGG | |
| 320 | CACGCACAG | 1896 | 946-966 | UCCAUGAGUG | 323 | 944-966 | AACACGCACA | 3804 |
| | AACACUCAU | | | UUCUGUGCGU | | | GAACACUCAU | |
| | GGA | | | GUU | | | GGA | |
| 321 | ACGCACAGA | 1897 | 947-967 | AUCCAUGAGU | 324 | 945-967 | ACACGCACAG | 3805 |
| | ACACUCAUG | | | GUUCUGUGCG | | | AACACUCAUG | |
| | GAU | | | UGU | | | GAU | |
| 322 | CGCACAGAA | 1898 | 948-968 | AAUCCAUGAG | 325 | 946-968 | CACGCACAGA | 3557 |
| | CACUCAUGG | | | UGUUCUGUGC | | | ACACUCAUGG | |
| | AUU | | | GUG | | | AUU | |
| 323 | GCACAGAAC | 1899 | 949-969 | UAAUCCAUGA | 326 | 947-969 | ACGCACAGAA | 3806 |
| | ACUCAUGGA | | | GUGUUCUGUG | | | CACUCAUGGA | |
| | UUA | | | CGU | | | UUA | |
| 324 | CACAGAACA | 1900 | 950-970 | UUAAUCCAUG | 327 | 948-970 | CGCACAGAAC | 3807 |
| | CUCAUGGAU | | | AGUGUUCUGU | | | ACUCAUGGAU | |
| | UAA | | | GCG | | | UAA | |
| 325 | ACAGAACAC | 1901 | 951-971 | AUUAAUCCAU | 328 | 949-971 | GCACAGAACA | 3808 |
| | UCAUGGAUU | | | GAGUGUUCUG | | | CUCAUGGAUU | |
| | AAU | | | UGC | | | AAG | |
| 326 | CAGAACACU | 1902 | 952-972 | UCUUAAUCCA | 329 | 950-972 | CACAGAACAC | 3809 |
| | CAUGGAUUA | | | UGAGUGUUCU | | | UCAUGGAUUA | |
| | AGA | | | GUG | | | AGA | |
| 327 | AGAACACUC | 1903 | 953-973 | UUCUUAAUCC | 330 | 951-973 | ACAGAACACU | 3810 |
| | AUGGAUUAA | | | AUGAGUGUUC | | | CAUGGAUUAA | |
| | GAA | | | UGU | | | GAA | |
| 328 | GAACACUCA | 1904 | 954-974 | AUUCUUAAUC | 331 | 952-974 | CAGAACACUC | 3811 |
| | UGGAUUAAG | | | CAUGAGUGUU | | | AUGGAUUAAG | |
| | AAU | | | CUG | | | AAU | |
| 329 | AACACUCAU | 1905 | 955-975 | GAUUCUUAAU | 332 | 953-975 | AGAACACUCA | 3812 |
| | GGAUUAAGA | | | CCAUGAGUGU | | | UGGAUUAAGA | |
| | AUC | | | UCU | | | AUC | |
| 330 | UUAAGAAUC | 1906 | 967-987 | GCUUUCUAAG | 333 | 965-987 | GAUUAAGAAU | 3813 |
| | UACUUAGAA | | | UAGAUUCUUA | | | CUACUUAGAA | |
| | AGC | | | AUC | | | AGC | |
| 331 | GGUUGGUAU | 1907 | 1014-1034 | AGUCCUGAAG | 334 | 1012-1034 | CGGGUUGGUA | 3814 |
| | CCCUUCAGG | | | GGAUACCAAC | | | UCCCUUCAGG | |
| | ACU | | | CCG | | | ACU | |
| 332 | GUUGGUAUC | 1908 | 1015-1035 | UAGUCCUGAA | 335 | 1013-1035 | GGGUUGGUAU | 3815 |
| | CCUUCAGGA | | | GGGAUACCAA | | | CCCUUCAGGA | |
| | CUA | | | CCC | | | CUA | |
| 333 | UUGGUAUCC | 1909 | 1016-1036 | AUAGUCCUGA | 336 | 1014-1036 | GGUUGGUAUC | 3816 |
| | CUUCAGGAC | | | AGGGAUACCA | | | CCUUCAGGAC | |
| | UAU | | | ACC | | | UAG | |
| 334 | UGGUAUCCC | 1910 | 1017-1037 | ACUAGUCCUG | 337 | 1015-1037 | GUUGGUAUCC | 3817 |
| | UUCAGGACU | | | AAGGGAUACC | | | CUUCAGGACU | |
| | AGU | | | AAC | | | AGG | |
| 335 | GGUAUCCCU | 1911 | 1018-1038 | ACCUAGUCCU | 338 | 1016-1038 | UUGGUAUCCC | 3818 |
| | UCAGGACUA | | | GAAGGGAUAC | | | UUCAGGACUA | |
| | GGU | | | CAA | | | GGU | |
| 336 | AUCCCUUCA | 1912 | 1021-1041 | UGCACCUAGU | 339 | 1019-1041 | GUAUCCCUUC | 3819 |
| | GGACUAGGU | | | CCUGAAGGGA | | | AGGACUAGGU | |
| | GCA | | | UAC | | | GCA | |
| 337 | CCUUCAGGA | 1913 | 1024-1044 | UUCUGCACCU | 340 | 1022-1044 | UCCCUUCAGG | 3820 |
| | CUAGGUGCA | | | AGUCCUGAAG | | | ACUAGGUGCA | |
| | GAA | | | GGA | | | GAA | |
| 338 | UUCAGGACU | 1914 | 1026-1046 | AAUUCUGCAC | 341 | 1024-1046 | CCUUCAGGAC | 3821 |
| | AGGUGCAGA | | | CUAGUCCUGA | | | UAGGUGCAGA | |
| | AUU | | | AGG | | | AUG | |
| 339 | UCAGGACUA | 1915 | 1027-1047 | ACAUUCUGCA | 342 | 1025-1047 | CUUCAGGACU | 3822 |
| | GGUGCAGAA | | | CCUAGUCCUG | | | AGGUGCAGAA | |
| | UGU | | | AAG | | | UGU | |
| 340 | CAGGACUAG | 1916 | 1028-1048 | GACAUUCUGC | 343 | 1026-1048 | UUCAGGACUA | 3823 |
| | GUGCAGAAU | | | ACCUAGUCCU | | | GGUGCAGAAU | |
| | GUC | | | GAA | | | GUC | |
| 341 | AGGACUAGG | 1917 | 1029-1049 | GGACAUUCUG | 344 | 1027-1049 | UCAGGACUAG | 3824 |
| | UGCAGAAUG | | | CACCUAGUCC | | | GUGCAGAAUG | |
| | UCC | | | UGA | | | UCC | |
| 342 | GGACUAGGU | 1918 | 1030-1050 | AGGACAUUCU | 345 | 1028-1050 | CAGGACUAGG | 3825 |
| | GCAGAAUGU | | | GCACCUAGUC | | | UGCAGAAUGU | |
| | CCU | | | CUG | | | CCU | |
| 343 | GACUAGGUG | 1919 | 1031-1051 | AAGGACAUUC | 346 | 1029-1051 | AGGACUAGGU | 3826 |
| | CAGAAUGUC | | | UGCACCUAGU | | | GCAGAAUGUC | |
| | CUU | | | CCU | | | CUU | |
| 344 | CACCUCUCC | 1920 | 1058-1078 | UAUGAAUCCC | 347 | 1056-1078 | GCCACCUCUC | 3827 |
| | AUGGGAUUC | | | AUGGAGAGGU | | | CAUGGGAUUC | |
| | AUA | | | GGC | | | AUA | |
| 345 | ACCUCUCCA | 1921 | 1059-1079 | AUAUGAAUCC | 348 | 1057-1079 | CCACCUCUCC | 3828 |
| | UGGGAUUCA | | | CAUGGAGAGG | | | AUGGGAUUCA | |
| | UAU | | | UGG | | | UAU | |
| 346 | CCUCUCCAU | 1922 | 1060-1080 | AAUAUGAAUC | 349 | 1058-1080 | CACCUCUCCA | 3829 |
| | GGGAUUCAU | | | CCAUGGAGAG | | | UGGGAUUCAU | |
| | AUU | | | GUG | | | AUU | |
| 347 | CUCUCCAUG | 1923 | 1061-1081 | AAAUAUGAAU | 350 | 1059-1081 | ACCUCUCCAU | 3830 |
| | GGAUUCAUA | | | CCCAUGGAGA | | | GGGAUUCAUA | |
| | UUU | | | GGU | | | UUG | |
| 348 | UCUCCAUGG | 1924 | 1062-1082 | GCAAUAUGAA | 351 | 1060-1082 | CCUCUCCAUG | 3831 |
| | GAUUCAUAU | | | UCCCAUGGAG | | | GGAUUCAUAU | |
| | UGC | | | AGG | | | UGC | |
| 349 | CUCCAUGGG | 1925 | 1063-1083 | UGCAAUAUGA | 352 | 1061-1083 | CUCUCCAUGG | 3832 |
| | AUUCAUAUU | | | AUCCCAUGGA | | | GAUUCAUAUU | |
| | GCA | | | GAG | | | GCA | |
| 350 | UCCAUGGGA | 1926 | 1064-1084 | AUGCAAUAUG | 353 | 1062-1084 | UCUCCAUGGG | 3833 |
| | UUCAUAUUG | | | AAUCCCAUGG | | | AUUCAUAUUG | |
| | CAU | | | AGA | | | CAG | |
| 351 | CCAUGGGAU | 1927 | 1065-1085 | UCUGCAAUAU | 354 | 1063-1085 | CUCCAUGGGA | 3834 |
| | UCAUAUUGC | | | GAAUCCCAUG | | | UUCAUAUUGC | |
| | AGA | | | GAG | | | AGA | |
| 352 | CAUGGGAUU | 1928 | 1066-1086 | GUCUGCAAUA | 355 | 1064-1086 | UCCAUGGGAU | 3835 |
| | CAUAUUGCA | | | UGAAUCCCAU | | | UCAUAUUGCA | |
| | GAC | | | GGA | | | GAC | |
| 353 | AUGGGAUUC | 1929 | 1067-1087 | UGUCUGCAAU | 356 | 1065-1087 | CCAUGGGAUU | 3836 |
| | AUAUUGCAG | | | AUGAAUCCCA | | | CAUAUUGCAG | |
| | ACA | | | UGG | | | ACA | |
| 354 | UGGGAUUCA | 1930 | 1068-1088 | UUGUCUGCAA | 357 | 1066-1088 | CAUGGGAUUC | 3837 |
| | UAUUGCAGA | | | UAUGAAUCCC | | | AUAUUGCAGA | |
| | CAA | | | AUG | | | CAA | |
| 355 | GGAUUCAUA | 1931 | 1070-1090 | UAUUGUCUGC | 358 | 1068-1090 | UGGGAUUCAU | 3838 |
| | UUGCAGACA | | | AAUAUGAAUC | | | AUUGCAGACA | |
| | AUA | | | CCA | | | AUA | |
| 356 | GAUUCAUAU | 1932 | 1071-1091 | UUAUUGUCUG | 359 | 1069-1091 | GGGAUUCAUA | 3839 |
| | UGCAGACAA | | | CAAUAUGAAU | | | UUGCAGACAA | |
| | UAA | | | CCC | | | UAA | |
| 357 | AUUCAUAUU | 1933 | 1072-1092 | GUUAUUGUCU | 360 | 1070-1092 | GGAUUCAUAU | 3840 |
| | GCAGACAAU | | | GCAAUAUGAA | | | UGCAGACAAU | |
| | AAC | | | UCC | | | AAC | |
| 358 | UUCAUAUUG | 1934 | 1073-1093 | GGUUAUUGUC | 361 | 1071-1093 | GAUUCAUAUU | 3841 |
| | CAGACAAUA | | | UGCAAUAUGA | | | GCAGACAAUA | |
| | ACC | | | AUC | | | ACC | |
| 359 | UCAUAUUGC | 1935 | 1074-1094 | GGGUUAUUGU | 362 | 1072-1094 | AUUCAUAUUG | 3842 |
| | AGACAAUAA | | | CUGCAAUAUG | | | CAGACAAUAA | |
| | CCC | | | AAU | | | CCC | |
| 360 | CUUUAACCU | 1936 | 1095-1115 | GGUAUUCUUA | 363 | 1093-1115 | CCCUUUAACC | 3843 |
| | GCUAAGAAU | | | GCAGGUUAAA | | | UGCUAAGAAU | |
| | ACC | | | GGG | | | ACC | |
| 361 | UUUAACCUG | 1937 | 1096-1116 | UGGUAUUCUU | 364 | 1094-1116 | CCUUUAACCU | 3844 |
| | CUAAGAAUA | | | AGCAGGUUAA | | | GCUAAGAAUA | |
| | CCA | | | AGG | | | CCA | |
| 362 | UUAACCUGC | 1938 | 1097-1117 | AUGGUAUUCU | 365 | 1095-1117 | CUUUAACCUG | 3845 |
| | UAAGAAUAC | | | UAGCAGGUUA | | | CUAAGAAUAC | |
| | CAU | | | AAG | | | CA | |
| 363 | UAACCUGCU | 1939 | 1098-1118 | ACUGGUAUUC | 366 | 1096-1118 | UUUAACCUGC | 3846 |
| | AAGAAUACC | | | UUAGCAGGUU | | | UAAGAAUACC | |
| | AGU | | | AAA | | | AGG | |
| 364 | AACCUGCUA | 1940 | 1099-1119 | UCCUGGUAUU | 367 | 1097-1119 | UUAACCUGCU | 3847 |
| | AGAAUACCA | | | CUUAGCAGGU | | | AAGAAUACCA | |
| | GGA | | | UAA | | | GGA | |
| 365 | ACCUGCUAA | 1941 | 1100-1120 | AUCCUGGUAU | 368 | 1098-1120 | UAACCUGCUA | 3848 |
| | GAAUACCAG | | | UCUUAGCAGG | | | AGAAUACCAG | |
| | GAU | | | UUA | | | GAU | |
| 366 | CCUGCUAAG | 1942 | 1101-1121 | GAUCCUGGUA | 369 | 1099-1121 | AACCUGCUAA | 3849 |
| | AAUACCAGG | | | UUCUUAGCAG | | | GAAUACCAGG | |
| | AUC | | | GUU | | | AUC | |
| 367 | CUGCUAAGA | 1943 | 1102-1122 | UGAUCCUGGU | 370 | 1100-1122 | ACCUGCUAAG | 3850 |
| | AUACCAGGA | | | AUUCUUAGCA | | | AAUACCAGGA | |
| | UCA | | | GGU | | | UCA | |
| 368 | UGCUAAGAA | 1944 | 1103-1123 | AUGAUCCUGG | 371 | 1101-1123 | CCUGCUAAGA | 3851 |
| | UACCAGGAU | | | UAUUCUUAGC | | | AUACCAGGAU | |
| | CAU | | | AGG | | | CAG | |
| 369 | GCUAAGAAU | 1945 | 1104-1124 | ACUGAUCCUG | 372 | 1102-1124 | CUGCUAAGAA | 3852 |
| | ACCAGGAUC | | | GUAUUCUUAG | | | UACCAGGAUC | |
| | AGU | | | CAG | | | AGU | |
| 370 | CUAAGAAUA | 1946 | 1105-1125 | UACUGAUCCU | 373 | 1103-1125 | UGCUAAGAAU | 3853 |
| | CCAGGAUCA | | | GGUAUUCUUA | | | ACCAGGAUCA | |
| | GUA | | | GCA | | | GUA | |
| 371 | UAAGAAUAC | 1947 | 1106-1126 | AUACUGAUCC | 374 | 1104-1126 | GCUAAGAAUA | 3854 |
| | CAGGAUCAG | | | UGGUAUUCUU | | | CCAGGAUCAG | |
| | UAU | | | AGC | | | UAU | |
| 372 | AAGAAUACC | 1948 | 1107-1127 | GAUACUGAUC | 375 | 1105-1127 | CUAAGAAUAC | 3855 |
| | AGGAUCAGU | | | CUGGUAUUCU | | | CAGGAUCAGU | |
| | AUC | | | UAG | | | AUC | |
| 373 | AGAAUACCA | 1949 | 1108-1128 | AGAUACUGAU | 376 | 1106-1128 | UAAGAAUACC | 3856 |
| | GGAUCAGUA | | | CCUGGUAUUC | | | AGGAUCAGUA | |
| | UCU | | | UUA | | | UCG | |
| 374 | GAAUACCAG | 1950 | 1109-1129 | UCGAUACUGA | 377 | 1107-1129 | AAGAAUACCA | 3857 |
| | GAUCAGUAU | | | UCCUGGUAUU | | | GGAUCAGUAU | |
| | CGA | | | CUU | | | CGA | |
| 375 | AAUACCAGG | 1951 | 1110-1130 | AUCGAUACUG | 378 | 1108-1130 | AGAAUACCAG | 3858 |
| | AUCAGUAUC | | | AUCCUGGUAU | | | GAUCAGUAUC | |
| | GAU | | | UCU | | | GAG | |
| 376 | AUACCAGGA | 1952 | 1111-1131 | UCUCGAUACU | 379 | 1109-1131 | GAAUACCAGG | 3859 |
| | UCAGUAUCG | | | GAUCCUGGUA | | | AUCAGUAUCG | |
| | AGA | | | UUC | | | AGA | |
| 377 | UACCAGGAU | 1953 | 1112-1132 | AUCUCGAUAC | 380 | 1110-1132 | AAUACCAGGA | 3860 |
| | CAGUAUCGA | | | UGAUCCUGGU | | | UCAGUAUCGA | |
| | GAU | | | AUU | | | GAG | |
| 378 | ACCAGGAUC | 1954 | 1113-1133 | UCUCUCGAUA | 381 | 1111-1133 | AUACCAGGAU | 3861 |
| | AGUAUCGAG | | | CUGAUCCUGG | | | CAGUAUCGAG | |
| | AGA | | | UAU | | | AGA | |
| 379 | CCAGGAUCA | 1955 | 1114-1134 | AUCUCUCGAU | 382 | 1112-1134 | UACCAGGAUC | 3862 |
| | GUAUCGAGA | | | ACUGAUCCUG | | | AGUAUCGAGA | |
| | GAU | | | GUA | | | GAG | |
| 380 | CAGGAUCAG | 1956 | 1115-1135 | ACUCUCUCGA | 383 | 1113-1135 | ACCAGGAUCA | 3863 |
| | UAUCGAGAG | | | UACUGAUCCU | | | GUAUCGAGAG | |
| | AGU | | | GGU | | | AGG | |
| 381 | AGGAUCAGU | 1957 | 1116-1136 | GCCUCUCUCG | 384 | 1114-1136 | CCAGGAUCAG | 3864 |
| | AUCGAGAGA | | | AUACUGAUCC | | | UAUCGAGAGA | |
| | GGC | | | UGG | | | GGC | |
| 382 | CCUGGCAGA | 1958 | 1143-1163 | GGAAAGCGCC | 385 | 1141-1163 | GGCCUGGCAG | 3865 |
| | AGGGCGCUU | | | CUUCUGCCAG | | | AAGGGCGCUU | |
| | UCC | | | GCC | | | UCC | |
| 383 | AGAAGGGCG | 1959 | 1149-1169 | GUGGGUGGAA | 386 | 1147-1169 | GCAGAAGGGC | 3866 |
| | CUUUCCACC | | | AGCGCCCUUC | | | GCUUUCCACC | |
| | CAC | | | UGC | | | CAC | |
| 384 | GAAGGGCGC | 1960 | 1150-1170 | AGUGGGUGGA | 387 | 1148-1170 | CAGAAGGGCG | 3867 |
| | UUUCCACCC | | | AAGCGCCCUU | | | CUUUCCACCC | |
| | ACU | | | CUG | | | ACU | |
| 385 | CUGUUUAGU | 1961 | 1177-1197 | UCUCGGUGGU | 388 | 1175-1197 | CCCUGUUUAG | 3868 |
| | CCACCACCG | | | GGACUAAACA | | | UCCACCACCG | |
| | AGA | | | GGG | | | AGA | |
| 386 | UGUUUAGUC | 1962 | 1178-1198 | GUCUCGGUGG | 389 | 1176-1198 | CCUGUUUAGU | 3869 |
| | CACCACCGA | | | UGGACUAAAC | | | CCACCACCGA | |
| | GAC | | | AGG | | | GAC | |
| 387 | GUUUAGUCC | 1963 | 1179-1199 | UGUCUCGGUG | 390 | 1177-1199 | CUGUUUAGUC | 3870 |
| | ACCACCGAG | | | GUGGACUAAA | | | CACCACCGAG | |
| | ACA | | | CAG | | | ACA | |
| 388 | UUUAGUCCA | 1964 | 1180-1200 | AUGUCUCGGU | 391 | 1178-1200 | UGUUUAGUCC | 3871 |
| | CCACCGAGA | | | GGUGGACUAA | | | ACCACCGAGA | |
| | CAU | | | ACA | | | CAU | |
| 389 | UUAGUCCAC | 1965 | 1181-1201 | GAUGUCUCGG | 392 | 1179-1201 | GUUUAGUCCA | 3872 |
| | CACCGAGAC | | | UGGUGGACUA | | | CCACCGAGAC | |
| | AUC | | | AAC | | | AUC | |
| 390 | UAGUCCACC | 1966 | 1182-1202 | UGAUGUCUCG | 393 | 1180-1202 | UUUAGUCCAC | 3873 |
| | ACCGAGACA | | | GUGGUGGACU | | | CACCGAGACA | |
| | UCA | | | AAA | | | UCA | |
| 391 | AGUCCACCA | 1967 | 1183-1203 | GUGAUGUCUC | 394 | 1181-1203 | UUAGUCCACC | 3874 |
| | CCGAGACAU | | | GGUGGUGGAC | | | ACCGAGACAU | |
| | CAC | | | UAA | | | CAC | |
| 392 | GUCCACCAC | 1968 | 1184-1204 | AGUGAUGUCU | 395 | 1182-1204 | UAGUCCACCA | 3875 |
| | CGAGACAUC | | | CGGUGGUGGA | | | CCGAGACAUC | |
| | ACU | | | CUA | | | ACU | |
| 393 | CCACCACCG | 1969 | 1186-1206 | AAAGUGAUGU | 396 | 1184-1206 | GUCCACCACC | 3876 |
| | AGACAUCAC | | | CUCGGUGGUG | | | GAGACAUCAC | |
| | UUU | | | GAC | | | UUG | |
| 394 | CACCACCGA | 1970 | 1187-1207 | ACAAGUGAUG | 397 | 1185-1207 | UCCACCACCG | 3877 |
| | GACAUCACU | | | UCUCGGUGGU | | | AGACAUCACU | |
| | UGU | | | GGA | | | UGG | |
| 395 | ACCACCGAG | 1971 | 1188-1208 | UCCAAGUGAU | 398 | 1186-1208 | CCACCACCGA | 3878 |
| | ACAUCACUU | | | GUCUCGGUGG | | | GACAUCACUU | |
| | GGA | | | UGG | | | GGA | |
| 396 | CCACCGAGA | 1972 | 1189-1209 | GUCCAAGUGA | 399 | 1187-1209 | CACCACCGAG | 3879 |
| | CAUCACUUG | | | UGUCUCGGUG | | | ACAUCACUUG | |
| | GAC | | | GUG | | | GAC | |
| 397 | UGCUGCGGU | 1973 | 1283-1303 | ACAUUGGAUU | 400 | 1281-1303 | GGUGCUGCGG | 3880 |
| | UGAAUCCAA | | | CAACCGCAGC | | | UUGAAUCCAA | |
| | UGU | | | ACC | | | UGG | |
| 398 | AGCCUCCCG | 1974 | 1310-1330 | AGAAAUCCAU | 401 | 1308-1330 | GGAGCCUCCC | 3881 |
| | CCAUGGAUU | | | GGCGGGAGGC | | | GCCAUGGAUU | |
| | UCU | | | UCC | | | UCU | |
| 399 | GCCUCCCGC | 1975 | 1311-1331 | GAGAAAUCCA | 402 | 1309-1331 | GAGCCUCCCG | 3882 |
| | CAUGGAUUU | | | UGGCGGGAGG | | | CCAUGGAUUU | |
| | CUC | | | CUC | | | CUC | |
| 400 | CUCCCGCCA | 1976 | 1313-1333 | UAGAGAAAUC | 403 | 1311-1333 | GCCUCCCGCC | 3883 |
| | UGGAUUUCU | | | CAUGGCGGGA | | | AUGGAUUUCU | |
| | CUA | | | GGC | | | CUA | |
| 401 | UCCCGCCAU | 1977 | 1314-1334 | AUAGAGAAAU | 404 | 1312-1334 | CCUCCCGCCA | 3884 |
| | GGAUUUCUC | | | CCAUGGCGGG | | | UGGAUUUCUC | |
| | UAU | | | AGG | | | UAG | |
| 402 | CCCGCCAUG | 1978 | 1315-1335 | ACUAGAGAAA | 405 | 1313-1335 | CUCCCGCCAU | 3885 |
| | GAUUUCUCU | | | UCCAUGGCGG | | | GGAUUUCUCU | |
| | AGU | | | GAG | | | AGG | |
| 403 | CGCCAUGGA | 1979 | 1317-1337 | AUCCUAGAGA | 406 | 1315-1337 | CCCGCCAUGG | 3886 |
| | UUUCUCUAG | | | AAUCCAUGGC | | | AUUUCUCUAG | |
| | GAU | | | GGG | | | GAG | |
| 404 | UAGGAGACU | 1980 | 1332-1352 | GCCAGCUCUC | 407 | 1330-1352 | UCUAGGAGAC | 3887 |
| | UAGAGAGCU | | | UAAGUCUCCU | | | UUAGAGAGCU | |
| | GGC | | | AGA | | | GGC | |
| 405 | AGGAGACUU | 1981 | 1333-1353 | UGCCAGCUCU | 408 | 1331-1353 | CUAGGAGACU | 3888 |
| | AGAGAGCUG | | | CUAAGUCUCC | | | UAGAGAGCUG | |
| | GCA | | | UAG | | | GCA | |
| 406 | GGAACACGU | 1982 | 1334-1354 | GCGGUGGGCU | 409 | 1332-1354 | AGGGAACACG | 3889 |
| | CUAGCCCAC | | | AGACGUGUUC | | | UCUAGCCCAC | |
| | CGC | | | CCU | | | CGC | |
| 407 | CCUAUGCAA | 1983 | 1396-1416 | UUGCAGUAAC | 410 | 1394-1416 | GCCCUAUGCA | 3890 |
| | AGGUUACUG | | | CUUUGCAUAG | | | AAGGUUACUG | |
| | CAA | | | GGC | | | CAA | |
| 408 | CUAUGCAAA | 1984 | 1397-1417 | GUUGCAGUAA | 411 | 1395-1417 | CCCUAUGCAA | 3891 |
| | GGUUACUGC | | | CCUUUGCAUA | | | AGGUUACUGC | |
| | AAC | | | GGG | | | AAC | |
| 409 | UAUGCAAAG | 1985 | 1398-1418 | GGUUGCAGUA | 412 | 1396-1418 | UAUGCAAAGG | 3892 |
| | GUUACUGCA | | | ACCUUUGCAU | | | UUACUGCAAC | |
| | ACC | | | AGG | | | C | |
| 410 | UGCAAAGGU | 1986 | 1400-1420 | AUGGUUGCAG | 413 | 1398-1420 | UAUGCAAAGG | 3893 |
| | UACUGCAAC | | | UAACCUUUGC | | | UUACUGCAAC | |
| | CAU | | | AUA | | | CAU | |
| 411 | GCAAAGGUU | 1987 | 1411-1421 | AAUGGUUGCA | 414 | 1399-1421 | AUGCAAAGGU | 3894 |
| | ACUGCAACC | | | GUAACCUUUG | | | UACUGCAACC | |
| | AUU | | | CAU | | | AUU | |
| 412 | CAAAGGUUA | 1988 | 1402-1422 | GAAUGGUUGC | 415 | 1400-1422 | UGCAAAGGUU | 3895 |
| | CUGCAACCA | | | AGUAACCUUU | | | ACUGCAACCA | |
| | UUC | | | GCA | | | UUC | |
| 413 | AAAGGUUAC | 1989 | 1403-1423 | GGAAUGGUUG | 416 | 1401-1423 | GCAAAGGUUA | 3896 |
| | UGCAACCAU | | | CAGUAACCUU | | | CUGCAACCAU | |
| | UCC | | | UGC | | | UCC | |
| 414 | AAGGUUACU | 1990 | 1404-1424 | UGGAAUGGUU | 417 | 1402-1424 | CAAAGGUUAC | 3897 |
| | GCAACCAUU | | | GCAGUAACCU | | | UGCAACCAUU | |
| | CCA | | | UUG | | | CCA | |
| 415 | AGGUUACUG | 1991 | 1405-1425 | AUGGAAUGGU | 418 | 1403-1425 | AAAGGUUACU | 3898 |
| | CAACCAUUC | | | UGCAGUAACC | | | GCAACCAUUC | |
| | CAU | | | UUU | | | CAG | |
| 416 | GGUUACUGC | 1992 | 1406-1426 | GCUGGAAUGG | 419 | 1404-1426 | AAGGUUACUG | 3899 |
| | AACCAUUCC | | | UUGCAGUAAC | | | CAACCAUUCC | |
| | AGC | | | CUU | | | AGC | |
| 417 | UACUGCAAC | 1993 | 1409-1429 | AUGGCUGGAA | 420 | 1407-1429 | GUUACUGCAA | 3900 |
| | CAUUCCAGC | | | UGGUUGCAGU | | | CCAUUCCAGC | |
| | CAU | | | AAC | | | CA | |
| 418 | CGGUCAAGU | 1994 | 1502-1522 | AGCAUGACUU | 421 | 1500-1522 | CCCGGUCAAG | 3901 |
| | CCAAGUCAU | | | GGACUUGACC | | | UCCAAGUCAU | |
| | GCU | | | GGG | | | GC | |
| 419 | GGUCAAGUC | 1995 | 1503-1523 | UCGCAUGACU | 422 | 1501-1523 | CCGGUCAAGU | 3902 |
| | CAAGUCAUG | | | UGGACUUGAC | | | CCAAGUCAUG | |
| | CGA | | | CGG | | | CGA | |
| 420 | GUCAAGUCC | 1996 | 1504-1524 | AUCGCAUGAC | 423 | 1502-1524 | CGGUCAAGUC | 3903 |
| | AAGUCAUGC | | | UUGGACUUGA | | | CAAGUCAUGC | |
| | GAU | | | CCG | | | GAG | |
| 421 | UCAAGUCCA | 1997 | 1505-1525 | ACUCGCAUGA | 424 | 1503-1525 | GGUCAAGUCC | 3904 |
| | AGUCAUGCG | | | CUUGGACUUG | | | AAGUCAUGCG | |
| | AGU | | | ACC | | | AGU | |
| 422 | CAAGUCCAA | 1998 | 1506-1526 | AACUCGCAUG | 425 | 1504-1526 | GUCAAGUCCA | 3905 |
| | GUCAUGCGA | | | ACUUGGACUU | | | AGUCAUGCGA | |
| | GUU | | | GAC | | | GUU | |
| 423 | AAGUCCAAG | 1999 | 1507-1527 | GAACUCGCAU | 426 | 1505-1527 | UCAAGUCCAA | 3906 |
| | UCAUGCGAG | | | GACUUGGACU | | | GUCAUGCGAG | |
| | UUC | | | UGA | | | UUC | |
| 424 | AGUCCAAGU | 2000 | 1508-1528 | AGAACUCGCA | 427 | 1506-1528 | CAAGUCCAAG | 3907 |
| | CAUGCGAGU | | | UGACUUGGAC | | | UCAUGCGAGU | |
| | UCU | | | UUG | | | UCU | |
| 425 | GUCCAAGUC | 2001 | 1509-1529 | AAGAACUCGC | 428 | 1507-1529 | AAGUCCAAGU | 3908 |
| | AUGCGAGUU | | | AUGACUUGGA | | | CAUGCGAGUU | |
| | CUU | | | CUU | | | CUG | |
| 426 | UCCAAGUCA | 2002 | 1510-1530 | GCAGAACUCG | 429 | 1508-1530 | AGUCCAAGUC | 3909 |
| | UGCGAGUUC | | | CAUGACUUGG | | | AUGCGAGUUC | |
| | UGC | | | ACU | | | UGC | |
| 427 | CCAAGUCAU | 2003 | 1511-1531 | AGCAGAACUC | 430 | 1509-1531 | GUCCAAGUCA | 3910 |
| | GCGAGUUCU | | | GCAUGACUUG | | | UGCGAGUUCU | |
| | GCU | | | GAC | | | GCG | |
| 428 | CAAGUCAUG | 2004 | 1512-1532 | ACGCAGAACU | 431 | 1510-1532 | UCCAAGUCAU | 3911 |
| | CGAGUUCUG | | | CGCAUGACUU | | | GCGAGUUCUG | |
| | CGU | | | GGA | | | CGG | |
| 429 | AGUCAUGCG | 2005 | 1514-1534 | UGCCGCAGAA | 432 | 1512-1534 | CAAGUCAUGC | 3912 |
| | AGUUCUGCG | | | CUCGCAUGAC | | | GAGUUCUGCG | |
| | GCA | | | UUG | | | GCA | |
| 430 | GUCAUGCGA | 2006 | 1515-1535 | UUGCCGCAGA | 433 | 1513-1535 | AAGUCAUGCG | 3913 |
| | GUUCUGCGG | | | ACUCGCAUGA | | | AGUUCUGCGG | |
| | CAA | | | CUU | | | CAA | |
| 431 | UCAUGCGAG | 2007 | 1516-1536 | AUUGCCGCAG | 434 | 1514-1536 | AGUCAUGCGA | 3914 |
| | UUCUGCGGC | | | AACUCGCAUG | | | GUUCUGCGGC | |
| | AAU | | | ACU | | | AAG | |
| 432 | GCGAGUUCU | 2008 | 1520-1540 | ACGUCUUGCC | 435 | 1518-1540 | AUGCGAGUUC | 3915 |
| | GCGGCAAGA | | | GCAGAACUCG | | | UGCGGCAAGA | |
| | CGU | | | CAU | | | CGU | |
| 433 | CGAGUUCUG | 2009 | 1521-1541 | AACGUCUUGC | 436 | 1519-1541 | UGCGAGUUCU | 3916 |
| | CGGCAAGAC | | | CGCAGAACUC | | | GCGGCAAGAC | |
| | GUU | | | GCA | | | GUU | |
| 434 | GAGUUCUGC | 2010 | 1522-1542 | GAACGUCUUG | 437 | 1520-1542 | GCGAGUUCUG | 3917 |
| | GGCAAGACG | | | CCGCAGAACU | | | CGGCAAGACG | |
| | UUC | | | CGC | | | UUC | |
| 435 | AGUUCUGCG | 2011 | 1523-1543 | UGAACGUCUU | 438 | 1521-1543 | CGAGUUCUGC | 3918 |
| | GCAAGACGU | | | GCCGCAGAAC | | | GGCAAGACGU | |
| | UCA | | | UCG | | | UCA | |
| 436 | GUUCUGCGG | 2012 | 1524-1544 | UUGAACGUCU | 439 | 1522-1544 | GAGUUCUGCG | 3919 |
| | CAAGACGUU | | | UGCCGCAGAA | | | GCAAGACGUU | |
| | CAA | | | CUC | | | CAA | |
| 437 | UUCUGCGGC | 2013 | 1525-1545 | UUUGAACGUC | 440 | 1523-1545 | AGUUCUGCGG | 3920 |
| | AAGACGUUC | | | UUGCCGCAGA | | | CAAGACGUUC | |
| | AAA | | | ACU | | | AAA | |
| 438 | UCUGCGGCA | 2014 | 1526-1546 | AUUUGAACGU | 441 | 1524-1546 | GUUCUGCGGC | 3921 |
| | AGACGUUCA | | | CUUGCCGCAG | | | AAGACGUUCA | |
| | AAU | | | AAC | | | AAU | |
| 439 | CUGCGGCAA | 2015 | 1527-1547 | AAUUUGAACG | 442 | 1525-1547 | UUCUGCGGCA | 3922 |
| | GACGUUCAA | | | UCUUGCCGCA | | | AGACGUUCAA | |
| | AUU | | | GAA | | | AUU | |
| 440 | UGCGGCAAG | 2016 | 1528-1548 | AAAUUUGAAC | 443 | 1526-1548 | UCUGCGGCAA | 3923 |
| | ACGUUCAAA | | | GUCUUGCCGC | | | GACGUUCAAA | |
| | UUU | | | AGA | | | UUU | |
| 441 | GCGGCAAGA | 2017 | 1529-1549 | GAAAUUUGAA | 444 | 1527-1549 | CUGCGGCAAG | 3924 |
| | CGUUCAAAU | | | CGUCUUGCCG | | | ACGUUCAAAU | |
| | UUC | | | CAG | | | UUC | |
| 442 | CAUGACGGU | 2018 | 1683-1703 | UCGUCGGACU | 445 | 1681-1703 | CCCAUGACGG | 3925 |
| | CAAGUCCGA | | | UGACCGUCAU | | | UCAAGUCCGA | |
| | CGA | | | GGG | | | CGA | |
| 443 | CAAGUCCGU | 2019 | 1773-1793 | AACUUGGCCA | 446 | 1771-1793 | CUCAAGUCCG | 3926 |
| | GGUGGCCAA | | | CCACGGACUU | | | UGGUGGCCAA | |
| | GUU | | | GAG | | | GUU | |
| 444 | AAGUCCGUG | 2020 | 1774-1794 | GAACUUGGCC | 447 | 1772-1794 | UCAAGUCCGU | 3927 |
| | GUGGCCAAG | | | ACCACGGACU | | | GGUGGCCAAG | |
| | UUC | | | UGA | | | UUC | |
| 445 | UCCGUGGUG | 2021 | 1777-1797 | AUUGAACUUG | 448 | 1775-1797 | AGUCCGUGGU | 3928 |
| | GCCAAGUUC | | | GCCACCACGG | | | GGCCAAGUUC | |
| | AAU | | | ACU | | | AAG | |
| 446 | AGAGGAGGA | 2022 | 1845-1865 | UCUUCCUCGU | 449 | 1843-1865 | GAAGAGGAGG | 3929 |
| | CGACGAGGA | | | CGUCCUCCUC | | | ACGACGAGGA | |
| | AGA | | | UUC | | | AGA | |
| 447 | GAGGAGGAC | 2023 | 1846-1866 | AUCUUCCUCG | 450 | 1844-1866 | AAGAGGAGGA | 3930 |
| | GACGAGGAA | | | UCGUCCUCCU | | | CGACGAGGAA | |
| | GAU | | | CUU | | | GAG | |
| 448 | GGAGCUGAC | 2024 | 1893-1913 | AUCUCGCUCU | 451 | 1891-1913 | GAGGAGCUGA | 3931 |
| | GGAGAGCGA | | | CCGUCAGCUC | | | CGGAGAGCGA | |
| | GAU | | | CUC | | | GAG | |
| 449 | AGCUGACGG | 2025 | 1895-1915 | ACCUCUCGCU | 452 | 1893-1915 | GGAGCUGACG | 3932 |
| | AGAGCGAGA | | | CUCCGUCAGC | | | GAGAGCGAGA | |
| | GGU | | | UCC | | | GGG | |
| 450 | GCUGACGGA | 2026 | 1896-1916 | ACCCUCUCGC | 453 | 1894-1916 | GAGCUGACGG | 3933 |
| | GAGCGAGAG | | | UCUCCGUCAG | | | AGAGCGAGAG | |
| | GGU | | | CUC | | | GGU | |
| 451 | CUGACGGAG | 2027 | 1897-1917 | AACCCUCUCG | 454 | 1895-1917 | AGCUGACGGA | 3934 |
| | AGCGAGAGG | | | CUCUCCGUCA | | | GAGCGAGAGG | |
| | GUU | | | GCU | | | GUG | |
| 452 | CAUGCAGCA | 2028 | 2046-2066 | GCCUCGCUGA | 455 | 2044-2066 | UCCAUGCAGC | 3935 |
| | CUUCAGCGA | | | AGUGCUGCAU | | | ACUUCAGCGA | |
| | GGC | | | GGA | | | GGC | |
| 453 | UGCAGCACU | 2029 | 2048-2068 | AGGCCUCGCU | 456 | 2046-2068 | CAUGCAGCAC | 3936 |
| | UCAGCGAGG | | | GAAGUGCUGC | | | UUCAGCGAGG | |
| | CCU | | | AUG | | | CCU | |
| 454 | UCAGCGAGG | 2030 | 2057-2077 | ACUGGUGGAA | 457 | 2055-2077 | CUUCAGCGAG | 3937 |
| | CCUUCCACC | | | GGCCUCGCUG | | | GCCUUCCACC | |
| | AGU | | | AAG | | | AGG | |
| 455 | ACCGCAUAG | 2031 | 2168-2188 | AAGUGCCAUC | 458 | 2166-2188 | GGACCGCAUA | 3938 |
| | ACGAUGGCA | | | GUCUAUGCGG | | | GACGAUGGCA | |
| | CUU | | | UCC | | | CU | |
| 456 | CGCAUAGAC | 2032 | 2170-2190 | AACAGUGCCA | 459 | 2168-2190 | ACCGCAUAGA | 3939 |
| | GAUGGCACU | | | UCGUCUAUGC | | | CGAUGGCACU | |
| | GUU | | | GGU | | | GUU | |
| 457 | CAUAGACGA | 2033 | 2172-2192 | UUAACAGUGC | 460 | 2170-2192 | CGCAUAGACG | 3940 |
| | UGGCACUGU | | | CAUCGUCUAU | | | AUGGCACUGU | |
| | UAA | | | GCG | | | UAA | |
| 458 | AGGCAGCUC | 2034 | 2383-2403 | GAAGGGAUCU | 461 | 2381-2403 | CCAGGCAGCU | 3941 |
| | AAAGAUCCC | | | UUGAGCUGCC | | | CAAAGAUCCC | |
| | UUC | | | UGG | | | UUC | |
| 459 | GGCAGCUCA | 2035 | 2384-2404 | GGAAGGGAUC | 462 | 2382-2404 | CAGGCAGCUC | 3942 |
| | AAGAUCCCU | | | UUUGAGCUGC | | | AAAGAUCCCU | |
| | UCC | | | CUG | | | UCC | |
| 460 | GCAGCUCAA | 2036 | 2385-2405 | AGGAAGGGAU | 463 | 2383-2405 | AGGCAGCUCA | 3943 |
| | AGAUCCCUU | | | CUUUGAGCUG | | | AAGAUCCCUU | |
| | CCU | | | CCU | | | CCU | |
| 461 | UCGGAGACU | 2037 | 2411-2431 | GCGAUUGUCU | 464 | 2409-2431 | CUUCGGAGAC | 3944 |
| | CCAGACAAU | | | GGAGUCUCCG | | | UCCAGACAAU | |
| | CGC | | | AAG | | | CGC | |
| 462 | CGGAGACUC | 2038 | 2412-2432 | GGCGAUUGUC | 465 | 2410-2432 | UUCGGAGACU | 3945 |
| | CAGACAAUC | | | UGGAGUCUCC | | | CCAGACAAUC | |
| | GCC | | | GAA | | | GCC | |
| 463 | GGAGACUCC | 2039 | 2413-2433 | AGGCGAUUGU | 466 | 2411-2433 | UCGGAGACUC | 3946 |
| | AGACAAUCG | | | CUGGAGUCUC | | | CAGACAAUCG | |
| | CCU | | | CGA | | | CCU | |
| 464 | GAGACUCCA | 2040 | 2414-2434 | AAGGCGAUUG | 467 | 2412-2434 | CGGAGACUCC | 3947 |
| | GACAAUCGC | | | UCUGGAGUCU | | | AGACAAUCGC | |
| | CUU | | | CCG | | | CUU | |
| 465 | AGACUCCAG | 2041 | 2415-2435 | AAAGGCGAUU | 468 | 2413-2435 | GGAGACUCCA | 3948 |
| | ACAAUCGCC | | | GUCUGGAGUC | | | GACAAUCGCC | |
| | UUU | | | UCC | | | UUU | |
| 466 | GACUCCAGA | 2042 | 2416-2436 | AAAAGGCGAU | 469 | 2414-2436 | GAGACUCCAG | 3949 |
| | CAAUCGCCU | | | UGUCUGGAGU | | | ACAAUCGCCU | |
| | UUU | | | CUC | | | UUU | |
| 467 | ACUCCAGAC | 2043 | 2417-2437 | AAAAAGGCGA | 470 | 2415-2437 | AGACUCCAGA | 3950 |
| | AAUCGCCUU | | | UUGUCUGGAG | | | CAAUCGCCUU | |
| | UUU | | | UCU | | | UUG | |
| 468 | CUCCAGACA | 2044 | 2418-2438 | GCAAAAGGCG | 471 | 2416-2438 | GACUCCAGAC | 3951 |
| | AUCGCCUUU | | | AUUGUCUGGA | | | AAUCGCCUUU | |
| | UGC | | | GUC | | | UGC | |
| 469 | CCAGACAAU | 2045 | 2420-2440 | AGGCAAAAGG | 472 | 2418-2440 | CUCCAGACAA | 3952 |
| | CGCCUUUUG | | | CGAUUGUCUG | | | UCGCCUUUUG | |
| | CCU | | | GAG | | | CCU | |
| 470 | CAGACAAUC | 2046 | 2421-2441 | GAGGCAAAAG | 473 | 2419-2441 | UCCAGACAAU | 3953 |
| | GCCUUUUGC | | | GCGAUUGUCU | | | CGCCUUUUGC | |
| | CUC | | | GGA | | | CUC | |
| 471 | GACGCAGCG | 2047 | 2600-2620 | ACUCACAAGU | 474 | 2598-2620 | CAGACGCAGC | 3954 |
| | ACACUUGUG | | | GUCGCUGCGU | | | GACACUUGUG | |
| | AGU | | | CUG | | | AGU | |
| 472 | CGCAGCGAC | 2048 | 2602-2622 | GUACUCACAA | 475 | 2600-2622 | GACGCAGCGA | 3955 |
| | ACUUGUGAG | | | GUGUCGCUGC | | | CACUUGUGAG | |
| | UAC | | | GUC | | | UAC | |
| 473 | GCAGCGACA | 2049 | 2603-2623 | AGUACUCACA | 476 | 2601-2623 | ACGCAGCGAC | 3956 |
| | CUUGUGAGU | | | AGUGUCGCUG | | | ACUUGUGAGU | |
| | ACU | | | CGU | | | ACU | |
| 474 | CAGCGACAC | 2050 | 2604-2624 | AAGUACUCAC | 477 | 2602-2624 | CGCAGCGACA | 3957 |
| | UUGUGAGUA | | | AAGUGUCGCU | | | CUUGUGAGUA | |
| | CUU | | | GCG | | | CUG | |
| 475 | GACACUUGU | 2051 | 2608-2628 | ACCACAGUAC | 478 | 2606-2628 | GCGACACUUG | 3958 |
| | GAGUACUGU | | | UCACAAGUGU | | | UGAGUACUGU | |
| | GGU | | | CGC | | | GGG | |
| 476 | ACACUUGUG | 2052 | 2609-2629 | UCCCACAGUA | 479 | 2607-2629 | CGACACUUGU | 3959 |
| | AGUACUGUG | | | CUCACAAGUG | | | GAGUACUGUG | |
| | GGA | | | UCG | | | GGA | |
| 477 | CACUUGUGA | 2053 | 2610-2630 | UUCCCACAGU | 480 | 2608-2630 | GACACUUGUG | 3960 |
| | GUACUGUGG | | | ACUCACAAGU | | | AGUACUGUGG | |
| | GAA | | | GUC | | | GAA | |
| 478 | ACUUGUGAG | 2054 | 2611-2631 | UUUCCCACAG | 481 | 2609-2631 | ACACUUGUGA | 3961 |
| | UACUGUGGG | | | UACUCACAAG | | | GUACUGUGGG | |
| | AAA | | | UGU | | | AA | |
| 479 | CUUGUGAGU | 2055 | 2612-2632 | AUUUCCCACA | 482 | 2610-2632 | CACUUGUGAG | 3962 |
| | ACUGUGGGA | | | GUACUCACAA | | | UACUGUGGGA | |
| | AAU | | | GUG | | | AAG | |
| 480 | UUGUGAGUA | 2056 | 2613-2633 | ACUUUCCCAC | 483 | 2611-2633 | ACUUGUGAGU | 3963 |
| | CUGUGGGAA | | | AGUACUCACA | | | ACUGUGGGAA | |
| | AGU | | | AGU | | | AGU | |
| 481 | UGUGAGUAC | 2057 | 2614-2634 | GACUUUCCCA | 484 | 2612-2634 | CUUGUGAGUA | 3964 |
| | UGUGGGAAA | | | CAGUACUCAC | | | CUGUGGGAAA | |
| | GUC | | | AAG | | | GUC | |
| 482 | GUGAGUACU | 2058 | 2615-2635 | AGACUUUCCC | 485 | 2613-2635 | UUGUGAGUAC | 3965 |
| | GUGGGAAAG | | | ACAGUACUCA | | | UGUGGGAAAG | |
| | UCU | | | CAA | | | UCU | |
| 483 | GUCUUCAAG | 2059 | 2632-2652 | AUUGCUACAG | 486 | 2630-2652 | AAGUCUUCAA | 3966 |
| | AACUGUAGC | | | UUCUUGAAGA | | | GAACUGUAGC | |
| | AAU | | | CUU | | | AAU | |
| 484 | UCUUCAAGA | 2060 | 2633-2653 | GAUUGCUACA | 487 | 2631-2653 | AGUCUUCAAG | 3967 |
| | ACUGUAGCA | | | GUUCUUGAAG | | | AACUGUAGCA | |
| | AUC | | | ACU | | | AUC | |
| 485 | CUUCAAGAA | 2061 | 2634-2654 | AGAUUGCUAC | 488 | 2632-2654 | GUCUUCAAGA | 3968 |
| | CUGUAGCAA | | | AGUUCUUGAA | | | ACUGUAGCAA | |
| | UCU | | | GAC | | | UCU | |
| 486 | UUCAAGAAC | 2062 | 2635-2655 | GAGAUUGCUA | 489 | 2633-2655 | UCUUCAAGAA | 3969 |
| | UGUAGCAAU | | | CAGUUCUUGA | | | CUGUAGCAAU | |
| | CUC | | | AGA | | | CUC | |
| 487 | UCAAGAACU | 2063 | 2636-2656 | UGAGAUUGCU | 490 | 2634-2656 | CUUCAAGAAC | 3970 |
| | GUAGCAAUC | | | ACAGUUCUUG | | | UGUAGCAAUC | |
| | UCA | | | AAG | | | UCA | |
| 488 | CAAGAACUG | 2064 | 2637-2657 | GUGAGAUUGC | 491 | 2635-2657 | UUCAAGAACU | 3971 |
| | UAGCAAUCU | | | UACAGUUCUU | | | GUAGCAAUCU | |
| | CAC | | | GAA | | | CAC | |
| 489 | AAGAACUGU | 2065 | 2638-2658 | AGUGAGAUUG | 492 | 2636-2658 | UCAAGAACUG | 3972 |
| | AGCAAUCUC | | | CUACAGUUCU | | | UAGCAAUCUC | |
| | ACU | | | UGA | | | ACU | |
| 490 | GAGAAGCCA | 2066 | 2667-2687 | AUUUCGCCCG | 493 | 2665-2687 | AGGAGAAGCC | 3973 |
| | CACGGGCGA | | | UGUGGCUUCU | | | ACACGGGCGA | |
| | AAU | | | CCU | | | AAG | |
| 491 | AGCCACACG | 2067 | 2671-2691 | AGGCCUUUCG | 494 | 2669-2691 | GAAGCCACAC | 3974 |
| | GGCGAAAGG | | | CCCGUGUGGC | | | GGGCGAAAGG | |
| | CCU | | | UUC | | | CCU | |
| 492 | GCCACACGG | 2068 | 2672-2692 | AAGGCCUUUC | 495 | 2670-2692 | AAGCCACACG | 3975 |
| | GCGAAAGGC | | | GCCCGUGUGG | | | GGCGAAAGGC | |
| | CUU | | | CUU | | | CUU | |
| 493 | ACACGGGCG | 2069 | 2674-2695 | UAUAAGGCCU | 496 | 2673-2695 | CCACACGGGC | 3976 |
| | AAAGGCCUU | | | UUCGCCCGUG | | | GAAAGGCCUU | |
| | AUA | | | UGG | | | AUA | |
| 494 | CACGGGCGA | 2070 | 2676-2696 | UUAUAAGGCC | 497 | 2674-2696 | CACACGGGCG | 3977 |
| | AAGGCCUUA | | | UUUCGCCCGU | | | AAAGGCCUUA | |
| | UAA | | | GUG | | | UAA | |
| 495 | ACGGGCGAA | 2071 | 2677-2697 | UUUAUAAGGC | 498 | 2675-2697 | ACACGGGCGA | 3978 |
| | AGGCCUUAU | | | CUUUCGCCCG | | | AAGGCCUUAU | |
| | AAA | | | UGU | | | AAA | |
| 496 | CGGGCGAAA | 2072 | 2678-2698 | AUUUAUAAGG | 499 | 2676-2698 | CACGGGCGAA | 3979 |
| | GGCCUUAUA | | | CCUUUCGCCC | | | AGGCCUUAUA | |
| | AAU | | | GUG | | | AAU | |
| 497 | GGGCGAAAG | 2073 | 2679-2699 | AAUUUAUAAG | 500 | 2677-2699 | ACGGGCGAAA | 3980 |
| | GCCUUAUAA | | | GCCUUUCGCC | | | GGCCUUAUAA | |
| | AUU | | | CGU | | | AUG | |
| 498 | GGCGAAAGG | 2074 | 2680-2700 | GCAUUUAUAA | 501 | 2678-2700 | CGGGCGAAAG | 3981 |
| | CCUUAUAAA | | | GGCCUUUCGC | | | GCCUUAUAAA | |
| | UGC | | | CCG | | | UGC | |
| 499 | GCGAAAGGC | 2075 | 2681-2701 | AGCAUUUAUA | 502 | 2679-2701 | GGGCGAAAGG | 3982 |
| | CUUAUAAAU | | | AGGCCUUUCG | | | CCUUAUAAAU | |
| | GCU | | | CCC | | | GCG | |
| 500 | GAAAGGCCU | 2076 | 2683-2703 | AUCGCAUUUA | 503 | 2681-2703 | GCGAAAGGCC | 3983 |
| | UAUAAAUGC | | | UAAGGCCUUU | | | UUAUAAAUGC | |
| | GAU | | | CGC | | | GAG | |
| 501 | AAAGGCCUU | 2077 | 2684-2704 | GCUCGCAUUU | 504 | 2682-2704 | CGAAAGGCCU | 3984 |
| | AUAAAUGCG | | | AUAAGGCCUU | | | UAUAAAUGCG | |
| | AGC | | | UCG | | | AGG | |
| 502 | AAGGCCUUA | 2078 | 2685-2705 | AGCUCGCAUU | 505 | 2683-2705 | GAAAGGCCUU | 3985 |
| | UAAAUGCGA | | | UAUAAGGCCU | | | AUAAAUGCGA | |
| | GCU | | | UUC | | | GCU | |
| 503 | AGGCCUUAU | 2079 | 2686-2706 | AAGCUCGCAU | 506 | 2684-2706 | AAAGGCCUUA | 3986 |
| | AAAUGCGAG | | | UUAUAAGGCC | | | UAAAUGCGAG | |
| | CUU | | | UUU | | | CUG | |
| 504 | GGCCUUAUA | 2080 | 2687-2707 | ACAGCUCGCA | 507 | 2685-2707 | AAGGCCUUAU | 3987 |
| | AAUGCGAGC | | | UUUAUAAGGC | | | AAAUGCGAGC | |
| | UGU | | | CUU | | | UG | |
| 505 | GCCUUAUAA | 2081 | 2688-2708 | AACAGCUCGC | 508 | 2686-2708 | AGGCCUUAUA | 3988 |
| | AUGCGAGCU | | | AUUUAUAAGG | | | AAUGCGAGCU | |
| | GUU | | | CCU | | | GUG | |
| 506 | CCUUAUAAA | 2082 | 2689-2709 | GCACAGCUCG | 509 | 2687-2709 | GGCCUUAUAA | 3989 |
| | UGCGAGCUG | | | CAUUUAUAAG | | | AUGCGAGCUG | |
| | UGC | | | GCC | | | UGC | |
| 507 | CUUAUAAAU | 2083 | 2690-2710 | UGCACAGCUC | 510 | 2688-2710 | GCCUUAUAAA | 3990 |
| | GCGAGCUGU | | | GCAUUUAUAA | | | UGCGAGCUGU | |
| | GCA | | | GGC | | | GCA | |
| 508 | UUAUAAAUG | 2084 | 2691-2711 | UUGCACAGCU | 511 | 2689-2711 | GCCUUAUAAA | 3991 |
| | CGAGCUGUG | | | CGCAUUUAUA | | | UGCGAGCUGU | |
| | CAA | | | AGG | | | GCAA | |
| 509 | UAUAAAUGC | 2085 | 2692-2712 | GUUGCACAGC | 512 | 2690-2712 | CUUAUAAAUG | 3992 |
| | GAGCUGUGC | | | UCGCAUUUAU | | | CGAGCUGUGC | |
| | AAC | | | AAG | | | AACU | |
| 510 | AUAAAUGCG | 2086 | 2693-2713 | AGUUGCACAG | 513 | 2691-2713 | UUAUAAAUGC | 3993 |
| | AGCUGUGCA | | | CUCGCAUUUA | | | GAGCUGUGCA | |
| | ACU | | | UAA | | | ACU | |
| 511 | UAAAUGCGA | 2087 | 2694-2714 | UAGUUGCACA | 514 | 2692-2714 | UAUAAAUGCG | 3994 |
| | GCUGUGCAA | | | GCUCGCAUUU | | | AGCUGUGCAA | |
| | CUA | | | AUA | | | CUA | |
| 512 | AAAUGCGAG | 2088 | 2695-2715 | AUAGUUGCAC | 515 | 2693-2715 | AUAAAUGCGA | 3995 |
| | CUGUGCAAC | | | AGCUCGCAUU | | | GCUGUGCAAC | |
| | UAU | | | UAU | | | UAU | |
| 513 | AAUGCGAGC | 2089 | 2696-2716 | AAUAGUUGCA | 516 | 2694-2716 | UAAAUGCGAG | 3996 |
| | UGUGCAACU | | | CAGCUCGCAU | | | CUGUGCAACU | |
| | AUU | | | UUA | | | AUG | |
| 514 | AUGCGAGCU | 2090 | 2697-2717 | GCAUAGUUGC | 517 | 2695-2717 | AAAUGCGAGC | 3997 |
| | GUGCAACUA | | | ACAGCUCGCA | | | UGUGCAACUA | |
| | UGC | | | UUU | | | UGC | |
| 515 | GCGAGCUGU | 2091 | 2699-2719 | AGGCAUAGUU | 518 | 2697-2719 | AUGCGAGCUG | 3998 |
| | GCAACUAUG | | | GCACAGCUCG | | | UGCAACUAUG | |
| | CCU | | | CAU | | | CCU | |
| 516 | GAGCUGUGC | 2092 | 2701-2691 | ACAGGCAUAG | 519 | 2669-2691 | GCGAGCUGUG | 3999 |
| | AACUAUGCC | | | UUGCACAGCU | | | CAACUAUGCC | |
| | UGU | | | CGC | | | UGU | |
| 517 | GCUGUGCAA | 2093 | 2703-2693 | GCACAGGCAU | 520 | 2671-2693 | GAGCUGUGCA | 4000 |
| | CUAUGCCUG | | | AGUUGCACAG | | | ACUAUGCCUG | |
| | UGC | | | CUC | | | UGC | |
| 518 | GGGAAGGAC | 2094 | 2747-2767 | ACAUUUGUAA | 521 | 2745-2767 | UGGGGAAGGA | 4001 |
| | GUUUACAAA | | | ACGUCCUUCC | | | CGUUUACAAA | |
| | UGU | | | CCA | | | UGU | |
| 519 | GGAAGGACG | 2095 | 2748-2768 | AACAUUUGUA | 522 | 2746-2768 | GGGGAAGGAC | 4002 |
| | UUUACAAAU | | | AACGUCCUUC | | | GUUUACAAAU | |
| | GUU | | | CCC | | | GUG | |
| 520 | UUGUAAGAU | 2096 | 2773-2793 | ACGCUAAAAG | 523 | 2771-2793 | AUUUGUAAGA | 4003 |
| | GCCUUUUAG | | | GCAUCUUACA | | | UGCCUUUUAG | |
| | CGU | | | AAU | | | CGU | |
| 521 | UGUAAGAUG | 2097 | 2774-2794 | AACGCUAAAA | 524 | 2772-2794 | UUUGUAAGAU | 4004 |
| | CCUUUUAGC | | | GGCAUCUUAC | | | GCCUUUUAGC | |
| | GUU | | | AAA | | | GUG | |
| 522 | GUAAGAUGC | 2098 | 2775-2795 | ACACGCUAAA | 525 | 2773-2795 | UUGUAAGAUG | 3562 |
| | CUUUUAGCG | | | AGGCAUCUUA | | | CCUUUUAGCG | |
| | UGU | | | CAA | | | UGU | |
| 523 | UAAGAUGCC | 2099 | 2776-2796 | UACACGCUAA | 526 | 2774-2796 | UGUAAGAUGC | 4005 |
| | UUUUAGCGU | | | AAGGCAUCUU | | | CUUUUAGCGU | |
| | GUA | | | ACA | | | GUA | |
| 524 | AAGAUGCCU | 2100 | 2778-2798 | GUACACGCUA | 527 | 2776-2798 | GUAAGAUGCC | 4006 |
| | UUUAGCGUG | | | AAAGGCAUCU | | | UUUUAGCGUG | |
| | UAC | | | UAC | | | UAC | |
| 525 | AGAUGCCUU | 2101 | 2779-2799 | UGUACACGCU | 528 | 2777-2799 | UAAGAUGCCU | 4007 |
| | UUAGCGUGU | | | AAAAGGCAUC | | | UUUAGCGUGU | |
| | ACA | | | UUA | | | ACA | |
| 526 | AUGCCUUUU | 2102 | 2781-2801 | ACUGUACACG | 529 | 2779-2801 | AGAUGCCUUU | 4008 |
| | AGCGUGUAC | | | CUAAAAGGCA | | | UAGCGUGUAC | |
| | AGU | | | UCU | | | AGU | |
| 527 | UGCCUUUUA | 2103 | 2782-2802 | UACUGUACAC | 530 | 2780-2802 | GAUGCCUUUU | 4009 |
| | GCGUGUACA | | | GCUAAAAGGC | | | AGCGUGUACA | |
| | GUA | | | AUC | | | GUA | |
| 528 | GCCUUUUAG | 2104 | 2783-2803 | GUACUGUACA | 531 | 2781-2803 | AUGCCUUUUA | 4010 |
| | CGUGUACAG | | | CGCUAAAAGG | | | GCGUGUACAG | |
| | UAC | | | CAU | | | UAC | |
| 529 | CCUUUUAGC | 2105 | 2784-2804 | GGUACUGUAC | 532 | 2782-2804 | UGCCUUUUAG | 4011 |
| | GUGUACAGU | | | ACGCUAAAAG | | | CGUGUACAGU | |
| | ACC | | | GCA | | | ACC | |
| 530 | CUUUUAGCG | 2106 | 2785-2805 | GGGUACUGUA | 533 | 2783-2805 | GCCUUUUAGC | 4012 |
| | UGUACAGUA | | | CACGCUAAAA | | | GUGUACAGUA | |
| | CCC | | | GGC | | | CCC | |
| 531 | UUUUAGCGU | 2107 | 2786-2806 | AGGGUACUGU | 534 | 2784-2806 | CCUUUUAGCG | 4013 |
| | GUACAGUAC | | | ACACGCUAAA | | | UGUACAGUAC | |
| | CCU | | | AGG | | | CCU | |
| 532 | UUUAGCGUG | 2108 | 2787-2807 | AAGGGUACUG | 535 | 2785-2807 | CUUUUAGCGU | 4014 |
| | UACAGUACC | | | UACACGCUAA | | | GUACAGUACC | |
| | CUU | | | AAG | | | CUG | |
| 533 | UUAGCGUGU | 2109 | 2788-2808 | ACAGGGUACU | 536 | 2786-2808 | UUUUAGCGUG | 4015 |
| | ACAGUACCC | | | GUACACGCUA | | | UACAGUACCC | |
| | UGU | | | AAA | | | UGG | |
| 534 | UAGCGUGUA | 2110 | 2789-2809 | UCCAGGGUAC | 537 | 2787-2809 | UUUAGCGUGU | 4016 |
| | CAGUACCCU | | | UGUACACGCU | | | ACAGUACCCU | |
| | GGA | | | AAA | | | GGA | |
| 535 | AGCGUGUAC | 2111 | 2790-2810 | AUCCAGGGUA | 538 | 2788-2810 | UUAGCGUGUA | 4017 |
| | AGUACCCUG | | | CUGUACACGC | | | CAGUACCCUG | |
| | GAU | | | UAA | | | GAG | |
| 536 | GUGUACAGU | 2112 | 2792-2812 | UUUCUCCAGG | 539 | 2790-2812 | UUAGCGUGUA | 4018 |
| | ACCCUGGAG | | | GUACUGUACA | | | CAGUACCCUG | |
| | AAA | | | CGC | | | GAG | |
| 537 | UGUACAGUA | 2113 | 2793-2813 | GUUUCUCCAG | 540 | 2791-2813 | CGUGUACAGU | 4019 |
| | CCCUGGAGA | | | GGUACUGUAC | | | ACCCUGGAGA | |
| | AAC | | | ACG | | | AAC | |
| 538 | AUGGCACAG | 2114 | 2824-2844 | AACACUCGAU | 541 | 2822-2844 | AAAUGGCACA | 4020 |
| | UGAUCGAGU | | | CACUGUGCCA | | | GUGAUCGAGU | |
| | GUU | | | UUU | | | GUU | |
| 539 | UGGCACAGU | 2115 | 2825-2845 | AAACACUCGA | 542 | 2823-2845 | AAUGGCACAG | 4021 |
| | GAUCGAGUG | | | UCACUGUGCC | | | UGAUCGAGUG | |
| | UUU | | | AUU | | | UUG | |
| 540 | CACAGUGAU | 2116 | 2828-2848 | AUUCAACACU | 543 | 2826-2848 | GGCACAGUGA | 4022 |
| | CGAGUGUUG | | | CGAUCACUGU | | | UCGAGUGUUG | |
| | AAU | | | GCC | | | AAU | |
| 541 | ACAGUGAUC | 2117 | 2829-2849 | UAUUCAACAC | 544 | 2827-2849 | GCACAGUGAU | 4023 |
| | GAGUGUUGA | | | UCGAUCACUG | | | CGAGUGUUGA | |
| | AUA | | | UGC | | | AUA | |
| 542 | CAGUGAUCG | 2118 | 2830-2850 | UUAUUCAACA | 545 | 2828-2850 | CACAGUGAUC | 4024 |
| | AGUGUUGAA | | | CUCGAUCACU | | | GAGUGUUGAA | |
| | UAA | | | GUG | | | UAA | |
| 543 | AGUGAUCGA | 2119 | 2831-2851 | AUUAUUCAAC | 546 | 2829-2851 | ACAGUGAUCG | 4025 |
| | GUGUUGAAU | | | ACUCGAUCAC | | | AGUGUUGAAU | |
| | AAU | | | UGU | | | AAU | |
| 544 | GUGAUCGAG | 2120 | 2832-2852 | AAUUAUUCAA | 547 | 2830-2852 | CAGUGAUCGA | 4026 |
| | UGUUGAAUA | | | CACUCGAUCA | | | GUGUUGAAUA | |
| | AUU | | | CUG | | | AUG | |
| 545 | GCAGGGAAC | 2121 | 1351-1371 | UGGGCUAGAC | 548 | 1349-1371 | UGGCAGGGAA | 4027 |
| | ACGUCUAGC | | | GUGUUCCCUG | | | CACGUCUAGC | |
| | CCA | | | CCA | | | CCA | |
| 546 | UUCAGAGCA | 2122 | 1547-1567 | GCACCACCAG | 549 | 1545-1567 | AUUUCAGAGC | 4028 |
| | ACCUGGUGG | | | GUUGCUCUGA | | | AACCUGGUGG | |
| | UGC | | | AAU | | | UGC | |
| 547 | AUGACGGUC | 2123 | 1684-1704 | GUCGUCGGAC | 550 | 1682-1704 | CCAUGACGGU | 4029 |
| | AAGUCCGAC | | | UUGACCGUCA | | | CAAGUCCGAC | |
| | GAC | | | UGG | | | GAC | |
| 548 | UGACGGUCA | 2124 | 1685-1705 | AGUCGUCGGA | 551 | 1683-1705 | CAUGACGGUC | 4030 |
| | AGUCCGACG | | | CUUGACCGUC | | | AAGUCCGACG | |
| | ACU | | | AUG | | | ACG | |
| 549 | ACGGUCAAG | 2125 | 1687-1707 | ACCGUCGUCG | 552 | 1685-1707 | UGACGGUCAA | 4031 |
| | UCCGACGAC | | | GACUUGACCG | | | GUCCGACGAC | |
| | GGU | | | UCA | | | GGU | |
| 550 | CAAGUCCGA | 2126 | 1692-1712 | GAGAGACCGU | 553 | 1690-1712 | GUCAAGUCCG | 4032 |
| | CGACGGUCU | | | CGUCGGACUU | | | ACGACGGUCU | |
| | CUC | | | GAC | | | CUC | |
| 551 | CGCUCAAGU | 2127 | 1769-1789 | UGGCCACCAC | 554 | 1767-1789 | CGCGCUCAAG | 4033 |
| | CCGUGGUGG | | | GGACUUGAGC | | | UCCGUGGUGG | |
| | CCA | | | GCG | | | CCA | |
| 552 | UCAAGUCCG | 2128 | 1772-1792 | ACUUGGCCAC | 555 | 1770-1792 | GCUCAAGUCC | 4034 |
| | UGGUGGCCA | | | CACGGACUUG | | | GUGGUGGCCA | |
| | AGU | | | AGC | | | AGU | |
| 553 | UGGUGGCCA | 2129 | 1781-1801 | AGCUCUUGAA | 556 | 1779-1801 | CGUGGUGGCC | 4035 |
| | AGUUCAAGA | | | CUUGGCCACC | | | AAGUUCAAGA | |
| | GCU | | | ACG | | | GCG | |
| 554 | GGUGGCCAA | 2130 | 1782-1802 | UCGCUCUUGA | 557 | 1780-1802 | GUGGUGGCCA | 4036 |
| | GUUCAAGAG | | | ACUUGGCCAC | | | AGUUCAAGAG | |
| | CGA | | | CAC | | | CGA | |
| 555 | AGGAGGACG | 2131 | 1847-1867 | ACUCUUCCUC | 558 | 1845-1867 | AGAGGAGGAC | 4037 |
| | ACGAGGAAG | | | GUCGUCCUCC | | | GACGAGGAAG | |
| | AGU | | | UCU | | | AGG | |
| 556 | GAGGACGAC | 2132 | 1849-1869 | UUCCUCUUCC | 559 | 1847-1869 | AGGAGGACGA | 4038 |
| | GAGGAAGAG | | | UCGUCGUCCU | | | CGAGGAAGAG | |
| | GAA | | | CCU | | | GAA | |
| 557 | CAUCAAGCU | 2133 | 2289-2309 | AACUCCUUCU | 560 | 2287-2309 | CGCAUCAAGC | 4039 |
| | CGAGAAGGA | | | CGAGCUUGAU | | | UCGAGAAGGA | |
| | GUU | | | GCG | | | GUU | |
| 558 | AUCAAGCUC | 2134 | 2290-2310 | GAACUCCUUC | 561 | 2288-2310 | GCAUCAAGCU | 4040 |
| | GAGAAGGAG | | | UCGAGCUUGA | | | CGAGAAGGAG | |
| | UUC | | | UGC | | | UUC | |
| 559 | CAAGCUCGA | 2135 | 2292-2312 | UCGAACUCCU | 562 | 2290-2312 | AUCAAGCUCG | 4041 |
| | GAAGGAGUU | | | UCUCGAGCUU | | | AGAAGGAGUU | |
| | CGA | | | GAU | | | CGA | |
| 560 | UCCUUAGCU | 2136 | 2402-2422 | UGGAGUCUCC | 563 | 2400-2422 | CUUCCUUAGC | 4042 |
| | UCGGAGACU | | | GAAGCUAAGG | | | UUCGGAGACU | |
| | CCA | | | AAG | | | CCA | |
| 561 | CCUUAGCUU | 2137 | 2403-2423 | AUGGAGUCUC | 564 | 2401-2423 | UUCCUUAGCU | 4043 |
| | CGGAGACUC | | | CGAAGCUAAG | | | UCGGAGACUC | |
| | CAU | | | GAA | | | CAG | |
| 562 | UAGCUUCGG | 2138 | 2406-2426 | UGUCUGGAGU | 565 | 2404-2426 | CUUAGCUUCG | 4044 |
| | AGACUCCAG | | | CUCCGAAGCU | | | GAGACUCCAG | |
| | ACA | | | AAG | | | ACA | |
| 563 | AGCUUCGGA | 2139 | 2407-2427 | UUGUCUGGAG | 566 | 2405-2427 | UUAGCUUCGG | 4045 |
| | GACUCCAGA | | | UCUCCGAAGC | | | AGACUCCAGA | |
| | CAA | | | UAA | | | CAA | |
| 564 | GCUUCGGAG | 2140 | 2408-2428 | AUUGUCUGGA | 567 | 2406-2428 | UAGCUUCGGA | 4046 |
| | ACUCCAGAC | | | GUCUCCGAAG | | | GACUCCAGAC | |
| | AAU | | | CUA | | | AAU | |
| 565 | CUUCGGAGA | 2141 | 2409-2429 | GAUUGUCUGG | 568 | 2407-2429 | AGCUUCGGAG | 4047 |
| | CUCCAGACA | | | AGUCUCCGAA | | | ACUCCAGACA | |
| | AUC | | | GCU | | | AUC | |
| 566 | UUGCCUCCU | 2142 | 2410-2430 | AGUGCUCCGA | 569 | 2408-2430 | UUUUGCCUCC | 4048 |
| | CGUCGGAGC | | | CGAGGAGGCA | | | UCGUCGGAGC | |
| | ACU | | | AAA | | | ACU | |
| 567 | UGCCUCCUC | 2143 | 2411-2431 | GAGUGCUCCG | 570 | 2409-2431 | UUUGCCUCCU | 4049 |
| | GUCGGAGCA | | | ACGAGGAGGC | | | CGUCGGAGCA | |
| | CUC | | | AAA | | | CUC | |
| 568 | GGACAUUCU | 2144 | 558-578 | UCGAUAAAAA | 571 | 556-578 | GGGGACAUUC | 4050 |
| | UAUUUUUAU | | | UAAGAAUGUC | | | UUAUUUUUAU | |
| | CGA | | | CCC | | | CGA | |
| 569 | GACAUUCUU | 2145 | 559-579 | CUCGAUAAAA | 572 | 557-579 | GGGACAUUCU | 4051 |
| | AUUUUUAUC | | | AUAAGAAUGU | | | UAUUUUUAUC | |
| | GAG | | | CCC | | | GAG | |
| 570 | ACAUUCUUA | 2146 | 560-580 | GCUCGAUAAA | 573 | 558-580 | GGACAUUCUU | 3550 |
| | UUUUUAUCG | | | AAUAAGAAUG | | | AUUUUUAUCG | |
| | AGC | | | UCC | | | AGC | |
| 571 | GCUCGAUAA | 2147 | 561-581 | UGCUCGAUAA | 574 | 558-581 | GACAUUCUUA | 4052 |
| | AAAUAAGAA | | | AAAUAAGAAU | | | UUUUUAUCGA | |
| | UGU | | | GUC | | | GCA | |
| 572 | AUUCUUAUU | 2148 | 562-582 | GUGCUCGAUA | 575 | 560-582 | ACAUUCUUAU | 3558 |
| | UUUAUCGAG | | | AAAAUAAGAA | | | UUUUAUCGAG | |
| | CAC | | | UGU | | | CAC | |
| 573 | UUCUUAUUU | 2149 | 563-583 | UGUGCUCGAU | 576 | 561-583 | CAUUCUUAUU | 4053 |
| | UUAUCGAGC | | | AAAAAUAAGA | | | UUUAUCGAGC | |
| | ACA | | | AUG | | | ACA | |
| 574 | UCUUAUUUU | 2150 | 564-584 | UUGUGCUCGA | 577 | 562-584 | AUUCUUAUUU | 4054 |
| | UAUCGAGCA | | | UAAAAAUAAG | | | UUAUCGAGCA | |
| | CAA | | | AAU | | | CAA | |
| 575 | CUUAUUUUU | 2151 | 565-585 | UUUGUGCUCG | 578 | 563-585 | UUCUUAUUUU | 4055 |
| | AUCGAGCAC | | | AUAAAAAUAA | | | UAUCGAGCAC | |
| | AAA | | | GAA | | | AAA | |
| 576 | UUAUUUUUA | 2152 | 566-586 | GUUUGUGCUC | 579 | 564-586 | UCUUAUUUUU | 4056 |
| | UCGAGCACA | | | GAUAAAAAUA | | | AUCGAGCACA | |
| | AAC | | | AGA | | | AAC | |
| 577 | UAUUUUUAU | 2153 | 567-587 | CGUUUGUGCU | 580 | 565-587 | CUUAUUUUUA | 4057 |
| | CGAGCACAA | | | CGAUAAAAAU | | | UCGAGCACAA | |
| | ACG | | | AAG | | | ACG | |
| 578 | AUUUUUAUC | 2154 | 568-588 | CCGUUUGUGC | 581 | 566-588 | UUAUUUUUAU | 4058 |
| | GAGCACAAA | | | UCGAUAAAAA | | | CGAGCACAAA | |
| | CGG | | | UAA | | | CGG | |
| 579 | UUUUUAUCG | 2155 | 569-589 | UCCGUUUGUG | 582 | 567-589 | UAUUUUUAUC | 4059 |
| | AGCACAAAC | | | CUCGAUAAAA | | | GAGCACAAAC | |
| | GGA | | | AUA | | | GGA | |
| 580 | UUUUAUCGA | 2156 | 570-590 | UUCCGUUUGU | 583 | 568-590 | AUUUUUAUCG | 4060 |
| | GCACAAACG | | | GCUCGAUAAA | | | AGCACAAACG | |
| | GAA | | | AAU | | | GAA | |
| 581 | UUUAUCGAG | 2157 | 571-591 | UUUCCGUUUG | 584 | 569-591 | UUUUUAUCGA | 4061 |
| | CACAAACGG | | | UGCUCGAUAA | | | GCACAAACGG | |
| | AAA | | | AAA | | | AAA | |
| 582 | UUAUCGAGC | 2158 | 572-592 | GUUUCCGUUU | 585 | 570-592 | UUUUAUCGAG | 4062 |
| | ACAAACGGA | | | GUGCUCGAUA | | | CACAAACGGA | |
| | AAC | | | AAA | | | AAC | |
| 583 | UAUGCCCCG | 2159 | 853-873 | ACAAAUACCC | 586 | 851-873 | AAUAUGCCCC | 4063 |
| | CAGGGUAUU | | | UGCGGGGCAU | | | GCAGGGUAUU | |
| | UGU | | | AUU | | | UGU | |
| 584 | CGCAGGGUA | 2160 | 860-880 | CAUCUUUACA | 587 | 858-880 | CCCGCAGGGU | 4064 |
| | UUUGUAAAG | | | AAUACCCUGC | | | AUUUGUAAAG | |
| | AUG | | | GGG | | | AUG | |
| 585 | GCAGGGUAU | 2161 | 861-881 | UCAUCUUUAC | 588 | 859-881 | CCGCAGGGUA | 4065 |
| | UUGUAAAGA | | | AAAUACCCUG | | | UUUGUAAAGA | |
| | UGA | | | CGG | | | UGA | |
| 586 | CAGGGUAUU | 2162 | 862-882 | CUCAUCUUUA | 589 | 860-882 | CGCAGGGUAU | 4066 |
| | UGUAAAGAU | | | CAAAUACCCU | | | UUGUAAAGAU | |
| | GAG | | | GCG | | | GAG | |
| 587 | AGGGUAUUU | 2163 | 863-883 | GCUCAUCUUU | 590 | 861-883 | GCAGGGUAUU | 4067 |
| | GUAAAGAUG | | | ACAAAUACCC | | | UGUAAAGAUG | |
| | AGC | | | UGC | | | AGC | |
| 588 | GGUAUUUGU | 2164 | 865-885 | GGGCUCAUCU | 591 | 863-885 | AGGGUAUUUG | 4068 |
| | AAAGAUGAG | | | UUACAAAUAC | | | UAAAGAUGAG | |
| | CCC | | | CUG | | | CCC | |
| 589 | GUAUUUGUA | 2165 | 866-886 | UGGGCUCAUC | 592 | 864-886 | GGGUAUUUGU | 4069 |
| | AAGAUGAGC | | | UUUACAAAUA | | | AAAGAUGAGC | |
| | CCA | | | CCU | | | CCA | |
| 590 | UAUUUGUAA | 2166 | 867-887 | CUGGGCUCAU | 593 | 865-887 | GGUAUUUGUA | 4070 |
| | AGAUGAGCC | | | CUUUACAAAU | | | AAGAUGAGCC | |
| | CAG | | | ACC | | | CAG | |
| 591 | AUUUGUAAA | 2167 | 868-888 | GCUGGGCUCA | 594 | 866-888 | GUAUUUGUAA | 4071 |
| | GAUGAGCCC | | | UCUUUACAAA | | | AGAUGAGCCC | |
| | AGC | | | UAC | | | AGC | |
| 592 | UUUGUAAAG | 2168 | 869-889 | UGCUGGGCUC | 595 | 867-889 | UAUUUGUAAA | 4072 |
| | AUGAGCCCA | | | AUCUUUACAA | | | GAUGAGCCCA | |
| | GCA | | | AUA | | | GCA | |
| 593 | UUGUAAAGA | 2169 | 870-890 | CUGCUGGGCU | 596 | 868-890 | AUUUGUAAAG | 4073 |
| | UGAGCCCAG | | | CAUCUUUACA | | | AUGAGCCCAG | |
| | CAG | | | AAU | | | CAG | |
| 594 | UGUAAAGAU | 2170 | 871-891 | GCUGCUGGGC | 597 | 869-891 | UUUGUAAAGA | 4074 |
| | GAGCCCAGC | | | UCAUCUUUAC | | | UGAGCCCAGC | |
| | AGC | | | AAA | | | AGC | |
| 595 | GUAAAGAUG | 2171 | 872-892 | AGCUGCUGGG | 598 | 870-892 | UUGUAAAGAU | 4075 |
| | AGCCCAGCA | | | CUCAUCUUUA | | | GAGCCCAGCA | |
| | GCU | | | CAA | | | GCU | |
| 596 | UAAAGAUGA | 2172 | 873-893 | UAGCUGCUGG | 599 | 871-893 | UGUAAAGAUG | 4076 |
| | GCCCAGCAG | | | GCUCAUCUUU | | | AGCCCAGCAG | |
| | CUA | | | ACA | | | CUA | |
| 597 | AAGAUGAGC | 2173 | 875-895 | UGUAGCUGCU | 600 | 872-895 | UAAAGAUGAG | 4077 |
| | CCAGCAGCU | | | GGGCUCAUCU | | | CCCAGCAGCU | |
| | ACA | | | UUA | | | ACA | |
| 598 | AGAUGAGCC | 2174 | 876-896 | GUGUAGCUGC | 601 | 874-896 | AAAGAUGAGC | 4078 |
| | CAGCAGCUA | | | UGGGCUCAUC | | | CCAGCAGCUA | |
| | CAC | | | UUU | | | CAC | |
| 599 | GAUGAGCCC | 2175 | 877-897 | UGUGUAGCUG | 602 | 875-897 | AAGAUGAGCC | 4079 |
| | AGCAGCUAC | | | CUGGGCUCAU | | | CAGCAGCUAC | |
| | ACA | | | CUU | | | ACA | |
| 600 | AUGAGCCCA | 2176 | 878-898 | AUGUGUAGCU | 603 | 876-898 | AGAUGAGCCC | 4080 |
| | GCAGCUACA | | | GCUGGGCUCA | | | AGCAGCUACA | |
| | CAU | | | UCU | | | CAU | |
| 601 | UGAGCCCAG | 2177 | 879-899 | CAUGUGUAGC | 604 | 877-899 | GAUGAGCCCA | 4081 |
| | CAGCUACAC | | | UGCUGGGCUC | | | GCAGCUACAC | |
| | AUG | | | AUC | | | AUG | |
| 602 | ACACAUGUA | 2178 | 893-913 | GUUUGCAAGU | 605 | 891-913 | CUACACAUGU | 4082 |
| | CAACUUGCA | | | UGUACAUGUG | | | ACAACUUGCA | |
| | AAC | | | UAG | | | AAC | |
| 603 | ACAUGUACA | 2179 | 895-915 | CUGUUUGCAA | 606 | 893-915 | ACACAUGUAC | 4083 |
| | ACUUGCAAA | | | GUUGUACAUG | | | AACUUGCAAA | |
| | CAG | | | UGU | | | CAG | |
| 604 | UGCAACACG | 2180 | 941-961 | GAGUGUUCUG | 607 | 939-961 | CUUGCAACAC | 4084 |
| | CACAGAACA | | | UGCGUGUUGC | | | GCACAGAACA | |
| | CUC | | | AAG | | | CUC | |
| 605 | GUACAGUAC | 2181 | 2817-2837 | UGUUUCUCCA | 608 | 2815-2837 | GUGUACAGUA | 4085 |
| | CCUGGAGAA | | | GGGUACUGUA | | | CCCUGGAGAA | |
| | ACA | | | CAC | | | ACA | |
| 606 | UACAGUACC | 2182 | 2818-2838 | GUGUUUCUCC | 609 | 2816-2838 | UGUACAGUAC | 4086 |
| | CUGGAGAAA | | | AGGGUACUGU | | | CCUGGAGAAA | |
| | CAC | | | ACA | | | CAC | |
| 607 | ACAGUACCC | 2183 | 2819-2839 | UGUGUUUCUC | 610 | 2817-2839 | GUACAGUACC | 4087 |
| | UGGAGAAAC | | | CAGGGUACUG | | | CUGGAGAAAC | |
| | ACA | | | UAC | | | ACA | |
| 608 | CAGUACCCU | 2184 | 2820-2840 | AUGUGUUUCU | 611 | 2818-2840 | UACAGUACCC | 4088 |
| | GGAGAAACA | | | CCAGGGUACU | | | UGGAGAAACA | |
| | CAU | | | GUA | | | CAU | |
| 609 | AGUACCCUG | 2185 | 2821-2841 | CAUGUGUUUC | 612 | 2819-2841 | ACAGUACCCU | 4089 |
| | GAGAAACAC | | | UCCAGGGUAC | | | GGAGAAACAC | |
| | AUG | | | UGU | | | AUG | |
| 610 | GUACCCUGG | 2186 | 2822-2842 | UCAUGUGUUU | 613 | 2820-2842 | CAGUACCCUG | 4090 |
| | AGAAACACA | | | CUCCAGGGUA | | | GAGAAACACA | |
| | UGA | | | CUG | | | UGA | |
| 611 | UACCCUGGA | 2187 | 2823-2843 | UUCAUGUGUU | 614 | 2821-2843 | AGUACCCUGG | 4091 |
| | GAAACACAU | | | UCUCCAGGGU | | | AGAAACACAU | |
| | GAA | | | ACU | | | GAA | |
| 612 | ACCCUGGAG | 2188 | 2824-2844 | UUUCAUGUGU | 615 | 2822-2844 | GUACCCUGGA | 4092 |
| | AAACACAUG | | | UUCUCCAGGG | | | GAAACACAUG | |
| | AAA | | | UAC | | | AAA | |
| 613 | CCCUGGAGA | 2189 | 2825-2845 | UUUUCAUGUG | 616 | 2823-2845 | UACCCUGGAG | 4093 |
| | AACACAUGA | | | UUUCUCCAGG | | | AAACACAUGA | |
| | AAA | | | GUA | | | AAA | |
| 614 | CCUGGAGAA | 2190 | 2826-2846 | UUUUUCAUGU | 617 | 2824-2846 | ACCCUGGAGA | 4094 |
| | ACACAUGAA | | | GUUUCUCCAG | | | AACACAUGAA | |
| | AAA | | | GGU | | | AAA | |
| 615 | CUGGAGAAA | 2191 | 2827-2847 | UUUUUUCAUG | 618 | 2825-2847 | CCCUGGAGAA | 4095 |
| | CACAUGAAA | | | UGUUUCUCCA | | | ACACAUGAAA | |
| | AAA | | | GGG | | | AAA | |
| 616 | UGGAGAAAC | 2192 | 2828-2848 | AUUUUUUCAU | 619 | 2826-2848 | CCUGGAGAAA | 4096 |
| | ACAUGAAAA | | | GUGUUUCUCC | | | CACAUGAAAA | |
| | AAU | | | AGG | | | AAU | |
| 617 | GGAGAAACA | 2193 | 2829-2849 | CAUUUUUUCA | 620 | 2827-2849 | CUGGAGAAAC | 4097 |
| | CAUGAAAAA | | | UGUGUUUCUC | | | ACAUGAAAAA | |
| | AUG | | | CAG | | | AUG | |
| 618 | AACCAGACC | 2194 | 473-493 | UCAACGGGCC | 621 | 471-493 | UGAACCAGAC | 4098 |
| | ACGGCCCGU | | | GUGGUCUGGU | | | CACGGCCCGU | |
| | UGA | | | UCA | | | UGG | |
| 619 | ACCAGACCA | 2195 | 474-494 | UCCAACGGGC | 622 | 472-494 | GAACCAGACC | 4099 |
| | CGGCCCGUU | | | CGUGGUCUGG | | | ACGGCCCGUU | |
| | GGA | | | UUC | | | GGG | |
| 620 | GACAUUCUU | 2196 | 559-479 | UUCGAUAAAA | 623 | 557-479 | GGGACAUUCU | 4100 |
| | AUUUUUAUC | | | AUAAGAAUGU | | | UAUUUUUAUC | |
| | GAA | | | CCC | | | GAG | |
| 621 | CAUUCUUAU | 2197 | 561-581 | UGCUCGAUAA | 574 | 559-581 | GACAUUCUUA | 4101 |
| | UUUUAUCGA | | | AAAUAAGAAU | | | UUUUUAUCGA | |
| | GCA | | | GUC | | | GCA | |
| 622 | UUAUUUUUA | 2198 | 566-586 | UUUUGUGCUC | 624 | 564-586 | UCUUAUUUUU | 4102 |
| | UCGAGCACA | | | GAUAAAAAUA | | | AUCGAGCACA | |
| | AAA | | | AGA | | | AA | |
| 623 | UAUUUUUAU | 2199 | 567-587 | UGUUUGUGCU | 625 | 565-587 | CUUAUUUUUA | 4103 |
| | CGAGCACAA | | | CGAUAAAAAU | | | UCGAGCACAA | |
| | ACA | | | AAG | | | ACG | |
| 624 | AUUUUUAUC | 2200 | 568-588 | UCGUUUGUGC | 626 | 566-588 | UUAUUUUUAU | 4104 |
| | GAGCACAAA | | | UCGAUAAAAA | | | CGAGCACAAA | |
| | CGA | | | UAA | | | CGG | |
| 625 | UUAUCGAGC | 2201 | 572-592 | UUUUCCGUUU | 627 | 569-592 | UUUUAUCGAG | 4105 |
| | ACAAACGGA | | | GUGCUCGAUA | | | CACAAACGGA | |
| | AAA | | | AAA | | | AAC | |
| 626 | CCUUCCCCU | 2202 | 637-657 | UUCGAUUGGU | 628 | 635-657 | CACCUUCCCC | 4106 |
| | UCACCAAUC | | | GAAGGGGAAG | | | UUCACCAAUC | |
| | GAA | | | GUG | | | GA | |
| 627 | CUUCACCAA | 2203 | 644-664 | UUUUCAUCUC | 629 | 642-664 | CCCUUCACCA | 4107 |
| | UCGAGAUGA | | | GAUUGGUGAA | | | AUCGAGAUGA | |
| | AAA | | | GGG | | | AAA | |
| 628 | AAAGCAUCC | 2204 | 664-684 | UUCCACGGGA | 630 | 662-684 | AAAAAGCAUC | 4108 |
| | AAUCCCGUG | | | UUGGAUGCUU | | | CAAUCCCGUG | |
| | GAA | | | UUU | | | GAG | |
| 629 | GCAUCCAAU | 2205 | 667-687 | UACCUCCACG | 631 | 665-687 | AAGCAUCCAA | 4109 |
| | CCCGUGGAG | | | GGAUUGGAUG | | | UCCCGUGGAG | |
| | GUA | | | CUU | | | GUU | |
| 630 | UCACGCCAG | 2206 | 698-718 | UAUCGUCAUC | 632 | 696-718 | GGUCACGCCA | 4110 |
| | AGGAUGACG | | | CUCUGGCGUG | | | GAGGAUGACG | |
| | AUA | | | ACC | | | AUU | |
| 631 | AUGACGAUU | 2207 | 710-730 | UCGUUGAUAA | 633 | 708-730 | GGAUGACGAU | 4111 |
| | GUUUAUCAA | | | ACAAUCGUCA | | | UGUUUAUCAA | |
| | CGA | | | UCC | | | CGU | |
| 632 | UGACGAUUG | 2208 | 711-731 | UACGUUGAUA | 634 | 709-731 | GAUGACGAUU | 4112 |
| | UUUAUCAAC | | | AACAAUCGUC | | | GUUUAUCAAC | |
| | GUA | | | AUC | | | GUC | |
| 633 | UUGUUUAUC | 2209 | 717-737 | UUAGAUGACG | 635 | 715-737 | GAUUGUUUAU | 4113 |
| | AACGUCAUC | | | UUGAUAAACA | | | CAACGUCAUC | |
| | UAA | | | AUC | | | UAG | |
| 634 | UAUGCCCCG | 2210 | 853-873 | UCAAAUACCC | 636 | 851-873 | AAUAUGCCCC | 4114 |
| | CAGGGUAUU | | | UGCGGGGCAU | | | GCAGGGUAUU | |
| | UGA | | | AUU | | | UGU | |
| 635 | CGCAGGGUA | 2211 | 860-880 | UAUCUUUACA | 637 | 858-880 | CCCGCAGGGU | 4115 |
| | UUUGUAAAG | | | AAUACCCUGC | | | AUUUGUAAAG | |
| | AUA | | | GGG | | | AUG | |
| 636 | CAGGGUAUU | 2212 | 862-882 | UUCAUCUUUA | 638 | 860-882 | CGCAGGGUAU | 4116 |
| | UGUAAAGAU | | | CAAAUACCCU | | | UUGUAAAGAU | |
| | GAA | | | GCG | | | GAG | |
| 637 | AGGGUAUUU | 2213 | 863-883 | UCUCAUCUUU | 639 | 861-883 | GCAGGGUAUU | 4117 |
| | GUAAAGAUG | | | ACAAAUACCC | | | UGUAAAGAUG | |
| | AGA | | | UGC | | | AGC | |
| 638 | GGUAUUUGU | 2214 | 865-885 | UGGCUCAUCU | 640 | 863-885 | AGGGUAUUUG | 4118 |
| | AAAGAUGAG | | | UUACAAAUAC | | | UAAAGAUGAG | |
| | CCA | | | CUG | | | CCC | |
| 639 | UAUUUGUAA | 2215 | 867-887 | UUGGGCUCAU | 641 | 865-887 | GGUAUUUGUA | 4119 |
| | AGAUGAGCC | | | CUUUACAAAU | | | AAGAUGAGCC | |
| | CAA | | | ACC | | | CAG | |
| 640 | AUUUGUAAA | 2216 | 868-888 | UCUGGGCUCA | 642 | 866-888 | GUAUUUGUAA | 4120 |
| | GAUGAGCCC | | | UCUUUACAAA | | | AGAUGAGCCC | |
| | AGA | | | UAC | | | AGC | |
| 641 | UUGUAAAGA | 2217 | 870-890 | UUGCUGGGCU | 643 | 868-890 | AUUUGUAAAG | 4121 |
| | UGAGCCCAG | | | CAUCUUUACA | | | AUGAGCCCAG | |
| | CAA | | | AAU | | | CAG | |
| 642 | UGUAAAGAU | 2218 | 871-891 | UCUGCUGGGC | 644 | 869-891 | UUUGUAAAGA | 4122 |
| | GAGCCCAGC | | | UCAUCUUUAC | | | UGAGCCCAGC | |
| | AGA | | | AAA | | | AGC | |
| 643 | GUAAAGAUG | 2219 | 872-892 | UGCUGCUGGG | 645 | 870-892 | UUGUAAAGAU | 4123 |
| | AGCCCAGCA | | | CUCAUCUUUA | | | GAGCCCAGCA | |
| | GCA | | | CAA | | | GCU | |
| 644 | AGAUGAGCC | 2220 | 876-896 | UUGUAGCUGC | 646 | 874-896 | AAAGAUGAGC | 4124 |
| | CAGCAGCUA | | | UGGGCUCAUC | | | CCAGCAGCUA | |
| | CAA | | | UUU | | | CAC | |
| 645 | AUGAGCCCA | 2221 | 878-898 | UUGUGUAGCU | 647 | 876-898 | AGAUGAGCCC | 4125 |
| | GCAGCUACA | | | GCUGGGCUCA | | | AGCAGCUACA | |
| | CAA | | | UCU | | | CAU | |
| 646 | UGAGCCCAG | 2222 | 879-898 | UAUGUGUAGC | 648 | 877-898 | GAUGAGCCCA | 4126 |
| | CAGCUACAC | | | UGCUGGGCUC | | | GCAGCUACAC | |
| | AUA | | | AUC | | | AUG | |
| 647 | ACACAUGUA | 2223 | 893-913 | UUUUGCAAGU | 649 | 891-913 | CUACACAUGU | 4127 |
| | CAACUUGCA | | | UGUACAUGUG | | | ACAACUUGCA | |
| | AAA | | | UAG | | | AAC | |
| 648 | ACAUGUACA | 2224 | 895-915 | UUGUUUGCAA | 650 | 893-915 | ACACAUGUAC | 4128 |
| | ACUUGCAAA | | | GUUGUACAUG | | | AACUUGCAAA | |
| | CAA | | | UGU | | | CAG | |
| 649 | UGCAACACG | 2225 | 941-961 | UAGUGUUCUG | 651 | 939-961 | CUUGCAACAC | 4129 |
| | CACAGAACA | | | UGCGUGUUGC | | | GCACAGAACA | |
| | CUA | | | AAG | | | CUC | |
| 650 | CAACACGCA | 2226 | 943-963 | UUGAGUGUUC | 652 | 941-963 | UGCAACACGC | 4130 |
| | CAGAACACU | | | UGUGCGUGUU | | | ACAGAACACU | |
| | CAA | | | GCA | | | CAU | |
| 651 | AACACGCAC | 2227 | 944-964 | UAUGAGUGUU | 653 | 942-964 | GCAACACGCA | 3553 |
| | AGAACACUC | | | CUGUGCGUGU | | | CAGAACACUC | |
| | AUA | | | UGC | | | AUG | |
| 652 | ACACGCACA | 2228 | 945-965 | UCAUGAGUGU | 654 | 943-965 | CAACACGCAC | 4131 |
| | GAACACUCA | | | UCUGUGCGUG | | | AGAACACUCA | |
| | UGA | | | UUG | | | UGG | |
| 653 | CCCUGACCC | 2229 | 1001-1021 | UACCAACCCG | 655 | 999-1021 | UCCCCUGACC | 4132 |
| | CGCGGGUUG | | | CGGGGUCAGG | | | CCGCGGGUUG | |
| | GUA | | | GGA | | | GUA | |
| 654 | CUGACCCCG | 2230 | 1003-1023 | UAUACCAACC | 656 | 1001-1023 | CCCUGACCCC | 4133 |
| | CGGGUUGGU | | | CGCGGGGUCA | | | GCGGGUUGGU | |
| | AUA | | | GGG | | | AUC | |
| 655 | GACCCCGCG | 2231 | 1005-1025 | UGGAUACCAA | 657 | 1003-1025 | CUGACCCCGC | 4134 |
| | GGUUGGUAU | | | CCCGCGGGGU | | | GGGUUGGUAU | |
| | CCA | | | CAG | | | CCC | |
| 656 | ACCCCGCGG | 2232 | 1106-1126 | UGGGAUACCA | 658 | 1104-1126 | UGACCCCGCG | 4135 |
| | GUUGGUAUC | | | ACCCGCGGGG | | | GGUUGGUAUC | |
| | CCA | | | UCA | | | CCU | |
| 657 | GUAUCCCUU | 2233 | 1019-1039 | UACCUAGUCC | 659 | 1017-1039 | UGGUAUCCCU | 4136 |
| | CAGGACUAG | | | UGAAGGGAUA | | | UCAGGACUAG | |
| | GUA | | | CCA | | | GUG | |
| 658 | CAGACAAUA | 2234 | 1082-1102 | UGUUAAAGGG | 660 | 1080-1102 | UGCAGACAAU | 4137 |
| | ACCCCUUUA | | | GUUAUUGUCU | | | AACCCCUUUA | |
| | ACA | | | GCA | | | ACC | |
| 659 | AGACAAUAA | 2235 | 1083-1103 | UGGUUAAAGG | 661 | 1081-1103 | GCAGACAAUA | 4138 |
| | CCCCUUUAA | | | GGUUAUUGUC | | | ACCCCUUUAA | |
| | CCA | | | UGC | | | CCU | |
| 660 | AAUACCAGG | 2236 | 1110-1130 | UUCGAUACUG | 662 | 1108-1130 | AGAAUACCAG | 4139 |
| | AUCAGUAUC | | | AUCCUGGUAU | | | GAUCAGUAUC | |
| | GAA | | | UCU | | | GAG | |
| 661 | CCUGUUUAG | 2237 | 1176-1196 | UUCGGUGGUG | 663 | 1174-1196 | CCCCUGUUUA | 4140 |
| | UCCACCACC | | | GACUAAACAG | | | GUCCACCACC | |
| | GAA | | | GGG | | | GAG | |
| 662 | CAAGUCCAA | 2238 | 1506-1526 | UACUCGCAUG | 664 | 1504-1526 | GUCAAGUCCA | 4141 |
| | GUCAUGCGA | | | ACUUGGACUU | | | AGUCAUGCGA | |
| | GUA | | | GAC | | | GUU | |
| 663 | AAGUCCAAG | 2239 | 1508-1528 | UAACUCGCAU | 665 | 1506-1528 | UCAAGUCCAA | 4142 |
| | UCAUGCGAG | | | GACUUGGACU | | | GUCAUGCGAG | |
| | UUA | | | UGA | | | UUC | |
| 664 | GUGCGACCA | 2240 | 1611-1631 | UGGGUGCACG | 666 | 1609-1631 | CUGUGCGACC | 4143 |
| | CGCGUGCAC | | | CGUGGUCGCA | | | ACGCGUGCAC | |
| | CCA | | | CAG | | | CCA | |
| 665 | CCAUGACGG | 2241 | 1682-1702 | UGUCGGACUU | 667 | 1680-1702 | CCCCAUGACG | 4144 |
| | UCAAGUCCG | | | GACCGUCAUG | | | GUCAAGUCCG | |
| | ACA | | | GGG | | | ACG | |
| 666 | AUGACGGUC | 2242 | 1684-1704 | UUCGUCGGAC | 668 | 1682-1704 | CCAUGACGGU | 4145 |
| | AAGUCCGAC | | | UUGACCGUCA | | | CAAGUCCGAC | |
| | GAA | | | UGG | | | GAC | |
| 667 | UGACGGUCA | 2243 | 2124-2144 | UGUCGUCGGA | 669 | 2122-2144 | CAUGACGGUC | 4146 |
| | AGUCCGACG | | | CUUGACCGUC | | | AAGUCCGACG | |
| | ACA | | | AUG | | | ACG | |
| 668 | GACGGUCAA | 2244 | 1686-1706 | UCGUCGUCGG | 670 | 1684-1706 | AUGACGGUCA | 4147 |
| | GUCCGACGA | | | ACUUGACCGU | | | AGUCCGACGA | |
| | CGA | | | CAU | | | CGG | |
| 669 | ACGGUCAAG | 2245 | 1687-1707 | UCCGUCGUCG | 671 | 1685-1707 | UGACGGUCAA | 4148 |
| | UCCGACGAC | | | GACUUGACCG | | | GUCCGACGAC | |
| | GGA | | | UCA | | | GGU | |
| 670 | CGGUCAAGU | 2246 | 1688-1708 | UACCGUCGUC | 672 | 1686-1708 | GACGGUCAAG | 4149 |
| | CCGACGACG | | | GGACUUGACC | | | UCCGACGACG | |
| | GUA | | | GUC | | | GUC | |
| 671 | GGUCAAGUC | 2247 | 1689-1709 | UGACCGUCGU | 673 | 1687-1709 | ACGGUCAAGU | 4150 |
| | CGACGACGG | | | CGGACUUGAC | | | CCGACGACGG | |
| | UCA | | | CGU | | | UCU | |
| 672 | CAAGUCCGA | 2248 | 1692-1712 | UAGAGACCGU | 674 | 1690-1712 | GUCAAGUCCG | 4151 |
| | CGACGGUCU | | | CGUCGGACUU | | | ACGACGGUCU | |
| | CUA | | | GAC | | | CUC | |
| 673 | AGCAGCGCG | 2249 | 1762-1782 | UACGGACUUG | 675 | 1760-1782 | CCAGCAGCGC | 4152 |
| | CUCAAGUCC | | | AGCGCGCUGC | | | GCUCAAGUCC | |
| | GUA | | | UGG | | | GUG | |
| 674 | GCAGCGCGC | 2250 | 1763-1783 | UCACGGACUU | 676 | 1761-1783 | CAGCAGCGCG | 4153 |
| | UCAAGUCCG | | | GAGCGCGCUG | | | CUCAAGUCCG | |
| | UGA | | | CUG | | | UGG | |
| 675 | GAGAACGAC | 2251 | 1801-1821 | UAUCAGGUUG | 677 | 1799-1821 | GCGAGAACGA | 4154 |
| | CCCAACCUG | | | GGGUCGUUCU | | | CCCCAACCUG | |
| | AUA | | | CGC | | | AUC | |
| 676 | CUGACGGAG | 2252 | 1897-1917 | UACCCUCUCG | 678 | 1897-1917 | AGCUGACGGA | 4155 |
| | AGCGAGAGG | | | CUCUCCGUCA | | | GAGCGAGAGG | |
| | GUA | | | GCU | | | GUG | |
| 677 | AGAGCGAGA | 2253 | 1904-1924 | UGUAGUCCAC | 679 | 1904-1924 | GGAGAGCGAG | 4156 |
| | GGGUGGACU | | | CCUCUCGCUC | | | AGGGUGGACU | |
| | ACA | | | UCC | | | ACG | |
| 678 | GCGAGAGGG | 2254 | 1907-1927 | UGCCGUAGUC | 680 | 1907-1927 | GAGCGAGAGG | 4157 |
| | UGGACUACG | | | CACCCUCUCG | | | GUGGACUACG | |
| | GCA | | | CUC | | | GCU | |
| 679 | CGAGAGGGU | 2255 | 1908-1928 | UAGCCGUAGU | 681 | 1908-1928 | AGCGAGAGGG | 4158 |
| | GGACUACGG | | | CCACCCUCUC | | | UGGACUACGG | |
| | CUA | | | GCU | | | CUU | |
| 680 | GAGGGUGGA | 2256 | 1911-1931 | UCGAAGCCGU | 682 | 1911-1931 | GAGAGGGUGG | 4159 |
| | CUACGGCUU | | | AGUCCACCCU | | | ACUACGGCUU | |
| | CGA | | | CUC | | | CGG | |
| 681 | CACGAGAAC | 2257 | 1957-1977 | UCCCCGCGAG | 683 | 1957-1977 | ACCACGAGAA | 4160 |
| | AGCUCGCGG | | | CUGUUCUCGU | | | CAGCUCGCGG | |
| | GGA | | | GGU | | | GGC | |
| 682 | GGGCGAGAA | 2258 | 2082-2102 | UCGCGCUUAU | 684 | 2082-2102 | CUGGGCGAGA | 4161 |
| | GCAUAAGCG | | | GCUUCUCGCC | | | AGCAUAAGCG | |
| | CGA | | | CAG | | | CGG | |
| 683 | GAGAAGCAU | 2259 | 2086-2106 | UUGGCCGCGC | 685 | 2086-2106 | GCGAGAAGCA | 4162 |
| | AAGCGCGGC | | | UUAUGCUUCU | | | UAAGCGCGGC | |
| | CAA | | | CGC | | | CAC | |
| 684 | UGCGACGAA | 2260 | 2137-2157 | UGCCACCGAG | 686 | 2137-2157 | CUUGCGACGA | 4163 |
| | GACUCGGUG | | | UCUUCGUCGC | | | AGACUCGGUG | |
| | GCA | | | AAG | | | GCC | |
| 685 | GACUCGGUG | 2261 | 2146-2166 | UGACUCGCCG | 687 | 2146-2166 | AAGACUCGGU | 4164 |
| | GCCGGCGAG | | | GCCACCGAGU | | | GGCCGGCGAG | |
| | UCA | | | CUU | | | UCG | |
| 686 | GCCGGCGAG | 2262 | 2155-2175 | UAUGCGGUCC | 688 | 2155-2175 | UGGCCGGCGA | 4165 |
| | UCGGACCGC | | | GACUCGCCGG | | | GUCGGACCGC | |
| | AUA | | | CCA | | | AUA | |
| 687 | CGGCGAGUC | 2263 | 2157-2177 | UCUAUGCGGU | 689 | 2157-2177 | GCCGGCGAGU | 4166 |
| | GGACCGCAU | | | CCGACUCGCC | | | CGGACCGCAU | |
| | AGA | | | GGC | | | AGA | |
| 688 | GGCGAGUCG | 2264 | 2158-2178 | UUCUAUGCGG | 690 | 2158-2178 | CCGGCGAGUC | 4167 |
| | GACCGCAUA | | | UCCGACUCGC | | | GGACCGCAUA | |
| | GAA | | | CGG | | | GAC | |
| 689 | GAGUCGGAC | 2265 | 2161-2181 | UUCGUCUAUG | 691 | 2161-2181 | GCGAGUCGGA | 4168 |
| | CGCAUAGAC | | | CGGUCCGACU | | | CCGCAUAGAC | |
| | GAA | | | CGC | | | GAU | |
| 690 | AGUCGGACC | 2266 | 2162-2182 | UAUCGUCUAU | 692 | 2162-2182 | CGAGUCGGAC | 4169 |
| | GCAUAGACG | | | GCGGUCCGAC | | | CGCAUAGACG | |
| | AUA | | | UCG | | | AUG | |
| 691 | GUCGGACCG | 2267 | 2163-2182 | UCAUCGUCUA | 693 | 2163-2182 | GAGUCGGACC | 4170 |
| | CAUAGACGA | | | UGCGGUCCGA | | | GCAUAGACGA | |
| | UGA | | | CUC | | | UGG | |
| 692 | GAGACUCCA | 2268 | 2414-2434 | UAGGCGAUUG | 694 | 2414-2434 | CGGAGACUCC | 4171 |
| | GACAAUCGC | | | UCUGGAGUCU | | | AGACAAUCGC | |
| | CUA | | | CCG | | | CUU | |
| 693 | GCCUUUUGC | 2269 | 2430-2450 | UCCGACGAGG | 695 | 2430-2450 | UCGCCUUUUG | 4172 |
| | CUCCUCGUC | | | AGGCAAAAGG | | | CCUCCUCGUC | |
| | GGA | | | CGA | | | GGA | |
| 694 | CUCGUCGGA | 2270 | 2442-2462 | UCCGAGGAGU | 696 | 2442-2462 | UCCUCGUCGG | 4173 |
| | GCACUCCUC | | | GCUCCGACGA | | | AGCACUCCUC | |
| | GGA | | | GGA | | | GGA | |
| 695 | CGUCGGAGC | 2271 | 2444-2464 | UCUCCGAGGA | 697 | 2442-2464 | CUCGUCGGAG | 4174 |
| | ACUCCUCGG | | | GUGCUCCGAC | | | CACUCCUCGG | |
| | AGA | | | GAG | | | AGA | |
| 696 | GAGCACUCC | 2272 | 2449-2469 | UCCGUUCUCC | 698 | 2447-2469 | CGGAGCACUC | 4175 |
| | UCGGAGAAC | | | GAGGAGUGCU | | | CUCGGAGAAC | |
| | GGA | | | CCG | | | GGG | |
| 697 | GAGCACGCC | 2273 | 2544-2564 | UCACUAAUAU | 699 | 2542-2564 | GGGAGCACGC | 4176 |
| | CCAUAUUAG | | | GGGGCGUGCU | | | CCCAUAUUAG | |
| | UGA | | | CCC | | | UGG | |
| 698 | AGCACGCCC | 2274 | 2545-2565 | UCCACUAAUA | 700 | 2543-2565 | GGAGCACGCC | 4177 |
| | CAUAUUAGU | | | UGGGGCGUGC | | | CCAUAUUAGU | |
| | GGA | | | UCC | | | GGU | |
| 699 | CACGCCCCA | 2275 | 2547-2567 | UGACCACUAA | 701 | 2545-2567 | AGCACGCCCC | 4178 |
| | UAUUAGUGG | | | UAUGGGGCGU | | | AUAUUAGUGG | |
| | UCA | | | GCU | | | UCC | |
| 700 | CCCAUAUUA | 2276 | 2552-2572 | UGCCCGGACC | 702 | 2550-2572 | GCCCCAUAUU | 4179 |
| | GUGGUCCGG | | | ACUAAUAUGG | | | AGUGGUCCGG | |
| | GCA | | | GGC | | | GCC | |
| 701 | UAUUAGUGG | 2277 | 2556-2576 | UCCGGGCCCG | 703 | 2554-2576 | CAUAUUAGUG | 4180 |
| | UCCGGGCCC | | | GACCACUAAU | | | GUCCGGGCCC | |
| | GGA | | | AUG | | | GGG | |
| 702 | UUUGUAAGA | 2278 | 2795-2815 | UGCUAAAAGG | 704 | 2793-2815 | AAUUUGUAAG | 4181 |
| | UGCCUUUUA | | | CAUCUUACAA | | | AUGCCUUUUA | |
| | GCA | | | AUU | | | GCG | |
| 703 | UUGUAAGAU | 2279 | 2796-2816 | UCGCUAAAAG | 705 | 2794-2816 | AUUUGUAAGA | 4182 |
| | GCCUUUUAG | | | GCAUCUUACA | | | UGCCUUUUAG | |
| | CGA | | | AAU | | | CGU | |
| 704 | UGUAAGAUG | 2280 | 2797-2817 | UACGCUAAAA | 706 | 2795-2817 | UUUGUAAGAU | 4183 |
| | CCUUUUAGC | | | GGCAUCUUAC | | | GCCUUUUAGC | |
| | GUA | | | AAA | | | GUG | |
| 705 | AAGAUGCCU | 2281 | 2799-2819 | UUACACGCUA | 707 | 2797-2819 | GUAAGAUGCC | 4184 |
| | UUUAGCGUG | | | AAAGGCAUCU | | | UUUUAGCGUG | |
| | UAA | | | UAC | | | UAC | |
| 706 | CUUUUAGCG | 2282 | 2807-2827 | UGGUACUGUA | 708 | 2805-2827 | GCCUUUUAGC | 4185 |
| | UGUACAGUA | | | CACGCUAAAA | | | GUGUACAGUA | |
| | CCA | | | GGC | | | CCC | |
| 707 | UUUUAGCGU | 2283 | 2808-2828 | UGGGUACUGU | 709 | 2806-2828 | CCUUUUAGCG | 4186 |
| | GUACAGUAC | | | ACACGCUAAA | | | UGUACAGUAC | |
| | CCA | | | AGG | | | CCU | |
| 708 | UACAGUACC | 2284 | 2818-2838 | UUGUUUCUCC | 710 | 2816-2838 | UGUACAGUAC | 4187 |
| | CUGGAGAAA | | | AGGGUACUGU | | | CCUGGAGAAA | |
| | CAA | | | ACA | | | CAC | |
| 709 | CAGUACCCU | 2285 | 2820-2840 | UUGUGUUUCU | 711 | 2818-2840 | UACAGUACCC | 4188 |
| | GGAGAAACA | | | CCAGGGUACU | | | UGGAGAAACA | |
| | CAA | | | GUA | | | CAU | |
| 710 | AGUACCCUG | 2286 | 2821-2841 | UAUGUGUUUC | 712 | 2819-2841 | ACAGUACCCU | 4189 |
| | GAGAAACAC | | | UCCAGGGUAC | | | GGAGAAACAC | |
| | AUA | | | UGU | | | AUG | |
| 711 | UGGAGAAAC | 2287 | 2828-2848 | UUUUUUUCAU | 713 | 2826-2848 | CCUGGAGAAA | 4190 |
| | ACAUGAAAA | | | GUGUUUCUCC | | | CACAUGAAAA | |
| | AAA | | | AGG | | | AAU | |
| 712 | GGAGAAACA | 2288 | 2829-2849 | UAUUUUUUCA | 714 | 2827-2849 | CUGGAGAAAC | 4191 |
| | CAUGAAAAA | | | UGUGUUUCUC | | | ACAUGAAAAA | |
| | AUA | | | CAG | | | AUG | |
| 713 | AUGGCACAG | 2289 | 2847-2867 | UACACUCGAU | 715 | 2845-2867 | AAAUGGCACA | 4192 |
| | UGAUCGAGU | | | CACUGUGCCA | | | GUGAUCGAGU | |
| | GUA | | | UUU | | | GUU | |
| 714 | AACAGUCUU | 2290 | 3431-3451 | UGGGUUAAUC | 716 | 3431-3451 | AAAACAGUCU | 4193 |
| | UGGAUUAAC | | | CAAAGACUGU | | | UUGGAUUAAC | |
| | CCA | | | UUU | | | CCU | |
| 715 | GGAUUAACC | 2291 | 3442-3462 | UUGUCUAUAG | 717 | 3442-3462 | UUGGAUUAAC | 4194 |
| | CUCUAUAGA | | | AGGGUUAAUC | | | CCUCUAUAGA | |
| | CAA | | | CAA | | | CAG | |
| 716 | AUAGACAGA | 2292 | 3455-3475 | UGUGCUAUCU | 718 | 3455-3475 | CUAUAGACAG | 4195 |
| | AUAGAUAGC | | | AUUCUGUCUA | | | AAUAGAUAGC | |
| | ACA | | | UAG | | | ACU | |
| 717 | UAAUAAACC | 2293 | 3697-3717 | UCUAGUUCCU | 719 | 3697-3717 | GGUAAUAAAC | 4196 |
| | UUAGGAACU | | | AAGGUUUAUU | | | CUUAGGAACU | |
| | AGA | | | ACC | | | AGC | |
| 718 | AUGACCCAU | 2294 | 3764-3784 | UACUAGGACA | 720 | 3764-3784 | AGAUGACCCA | 4197 |
| | UAUGUCCUA | | | UAAUGGGUCA | | | UUAUGUCCUA | |
| | GUA | | | UCU | | | GUU | |
| 719 | UAUACCAGU | 2295 | 3829-3849 | UGUAGCUUUU | 721 | 3829-3849 | AUUAUACCAG | 4198 |
| | AUAAAAGCU | | | AUACUGGUAU | | | UAUAAAAGCU | |
| | ACA | | | AAU | | | ACU | |
| 720 | AAAGCCCUG | 2296 | 3941-3961 | UUAAUUGCGU | 722 | 3941-3961 | CAAAAGCCCU | 4199 |
| | GAACGCAAU | | | UCCAGGGCUU | | | GGAACGCAAU | |
| | UAA | | | UUG | | | UAA | |
| 721 | AAUUAAAUA | 2297 | 3956-3976 | UCCUUACUAG | 723 | 3956-3961 | GCAAUUAAAU | 4200 |
| | CACUAGUAA | | | UGUAUUUAAU | | | ACACUAGUAA | |
| | GGA | | | UGC | | | GGA | |
| 722 | AUUAAAUAC | 2298 | 3957-3977 | UUCCUUACUA | 724 | 3957-3977 | CAAUUAAAUA | 4201 |
| | ACUAGUAAG | | | GUGUAUUUAA | | | CACUAGUAAG | |
| | GAA | | | UUG | | | GAG | |
| 723 | UAUGAUUUA | 2299 | 4162-4182 | UCGUUGUGCU | 725 | 4162-4182 | AAUAUGAUUU | 4202 |
| | UUAGCACAA | | | AAUAAAUCAU | | | AUUAGCACAA | |
| | CGA | | | AUU | | | CGU | |
| 724 | AUGAUUUAU | 2300 | 4163-4183 | UACGUUGUGC | 726 | 4163-4183 | AUAUGAUUUA | 4203 |
| | UAGCACAAC | | | UAAUAAAUCA | | | UUAGCACAAC | |
| | GUA | | | UAU | | | GUG | |
| 725 | GAUUUAUUA | 2301 | 4165-4185 | UCCACGUUGU | 727 | 4165-4185 | AUGAUUUAUU | 4204 |
| | GCACAACGU | | | GCUAAUAAAU | | | AGCACAACGU | |
| | GGA | | | CAU | | | GGU | |
| 726 | AUUUAUUAG | 2302 | 4166-4186 | UACCACGUUG | 728 | 4166-4186 | UGAUUUAUUA | 4205 |
| | CACAACGUG | | | UGCUAAUAAA | | | GCACAACGUG | |
| | GUA | | | UCA | | | GUA | |
| 727 | UUAUUAGCA | 2303 | 4168-4188 | UGUACCACGU | 729 | 4168-4188 | AUUUAUUAGC | 4206 |
| | CAACGUGGU | | | UGUGCUAAUA | | | ACAACGUGGU | |
| | ACA | | | AAU | | | ACU | |
| 728 | UAGCACAAC | 2304 | 4172-4192 | UAAUAGUACC | 730 | 4172-4192 | AUUAGCACAA | 4207 |
| | GUGGUACUA | | | ACGUUGUGCU | | | CGUGGUACUA | |
| | UUA | | | AAU | | | UUU | |
| 729 | UUUUUUAUU | 2305 | 4438-4458 | UGAUGCUAGC | 731 | 4438-4458 | UCUUUUUUAU | 4208 |
| | AAGCUAGCA | | | UUAAUAAAAA | | | UAAGCUAGCA | |
| | UCA | | | AGA | | | UCU | |
| 730 | UUUAUUAAG | 2306 | 4441-4461 | UGCAGAUGCU | 732 | 4441-4461 | UUUUUAUUAA | 4209 |
| | CUAGCAUCU | | | AGCUUAAUAA | | | GCUAGCAUCU | |
| | GCA | | | AAA | | | GCC | |
| 731 | UUUUCUCUA | 2307 | 4510-4530 | UGUAUCUCUG | 733 | 4510-4530 | UCUUUUCUCU | 4210 |
| | AUCAGAGAU | | | AUUAGAGAAA | | | AAUCAGAGAU | |
| | ACA | | | AGA | | | ACA | |
| 732 | GAUACAGAG | 2308 | 4525-4545 | UUUAUACUCA | 734 | 4523-4545 | GAGAUACAGA | 4211 |
| | GUUGAGUAU | | | ACCUCUGUAU | | | GGUUGAGUAU | |
| | AAA | | | CUC | | | AAA | |
| 733 | CAGAUAGGA | 2309 | 4557-4577 | UGCACUUAAU | 735 | 4555-4577 | CUCAGAUAGG | 4212 |
| | CAAUUAAGU | | | UGUCCUAUCU | | | ACAAUUAAGU | |
| | GCA | | | GAG | | | GCA | |
| 734 | GAUAGGACA | 2310 | 4559-4579 | UGUGCACUUA | 736 | 4557-4579 | CAGAUAGGAC | 4213 |
| | AUUAAGUGC | | | AUUGUCCUAU | | | AAUUAAGUGC | |
| | ACA | | | CUG | | | ACU | |
| 735 | CCCAGUUUA | 2311 | 4590-4610 | UGUAUAGACC | 737 | 4588-4610 | UUCCCAGUUU | 4214 |
| | CAGGUCUAU | | | UGUAAACUGG | | | ACAGGUCUAU | |
| | ACA | | | GAA | | | ACU | |
| 736 | UUGAGCUUA | 2312 | 4719-4739 | UGUCCAAGUA | 738 | 4717-4739 | UAUUGAGCUU | 4215 |
| | CUUACUUGG | | | AGUAAGCUCA | | | ACUUACUUGG | |
| | ACA | | | AUA | | | ACG | |
| 737 | AGCUUACUU | 2313 | 4722-4742 | UUGCGUCCAA | 739 | 4720-4742 | UGAGCUUACU | 4216 |
| | ACUUGGACG | | | GUAAGUAAGC | | | UACUUGGACG | |
| | CAA | | | UCA | | | CAA | |
| 738 | UGGACGCAA | 2314 | 4734-4754 | UCGCUUGCAA | 740 | 4732-4754 | CUUGGACGCA | 4217 |
| | CAUUGCAAG | | | UGUUGCGUCC | | | ACAUUGCAAG | |
| | CGA | | | AAG | | | CGC | |
| 739 | GGACGCAAC | 2315 | 4735-4755 | UGCGCUUGCA | 741 | 4733-4755 | UUGGACGCAA | 4218 |
| | AUUGCAAGC | | | AUGUUGCGUC | | | CAUUGCAAGC | |
| | GCA | | | CAA | | | GCU | |
| 740 | GACGCAACA | 2316 | 4736-4756 | UAGCGCUUGC | 742 | 4734-4756 | UGGACGCAAC | 4219 |
| | UUGCAAGCG | | | AAUGUUGCGU | | | AUUGCAAGCG | |
| | CUA | | | CCA | | | CUG | |
| 741 | GCAACAUUG | 2317 | 4739-4759 | UCACAGCGCU | 743 | 4737-4759 | ACGCAACAUU | 4220 |
| | CAAGCGCUG | | | UGCAAUGUUG | | | GCAAGCGCUG | |
| | UGA | | | CGU | | | UGA | |
| 742 | AAAUGAAUG | 2318 | 4786-4806 | UGCGAAAGCA | 744 | 4784-4806 | AGAAAUGAAU | 4221 |
| | AUUGCUUUC | | | AUCAUUCAUU | | | GAUUGCUUUC | |
| | GCA | | | UCU | | | GCU | |
| 743 | AAUGAAUGA | 2319 | 4787-4807 | UAGCGAAAGC | 745 | 4785-4807 | GAAAUGAAUG | 4222 |
| | UUGCUUUCG | | | AAUCAUUCAU | | | AUUGCUUUCG | |
| | CUA | | | UUC | | | CUU | |
| 744 | AAUGAUUGC | 2320 | 4791-4811 | UUAGAAGCGA | 746 | 4789-4811 | UGAAUGAUUG | 4223 |
| | UUUCGCUUC | | | AAGCAAUCAU | | | CUUUCGCUUC | |
| | UAA | | | UCA | | | UAC | |
| 745 | AUGAUUGCU | 2321 | 4792-4812 | UGUAGAAGCG | 747 | 4790-4812 | GAAUGAUUGC | 4224 |
| | UUCGCUUCU | | | AAAGCAAUCA | | | UUUCGCUUCU | |
| | ACA | | | UUC | | | ACA | |
| 746 | UGAUUGCUU | 2322 | 4793-4813 | UUGUAGAAGC | 748 | 4791-4813 | AAUGAUUGCU | 4225 |
| | UCGCUUCUA | | | GAAAGCAAUC | | | UUCGCUUCUA | |
| | CAA | | | AUU | | | CAG | |
| 747 | AUUUUAGGG | 2323 | 4907-4927 | UAGACAAUGG | 749 | 4905-4927 | GCAUUUUAGG | 4226 |
| | UUCCAUUGU | | | AACCCUAAAA | | | GUUCCAUUGU | |
| | CUA | | | UGC | | | CUU | |
| 748 | AUUGUCUUG | 2324 | 4920-4940 | UUGUAACACC | 750 | 4918-4940 | CCAUUGUCUU | 4227 |
| | GUGGUGUUA | | | ACCAAGACAA | | | GGUGGUGUUA | |
| | CAA | | | UGG | | | CAA | |
| 749 | UGGUAGUGG | 2325 | 4962-4982 | UGCAUAGAAU | 751 | 4960-4982 | AAUGGUAGUG | 4228 |
| | AAAUUCUAU | | | UUCCACUACC | | | GAAAUUCUAU | |
| | GCA | | | AUU | | | GCC | |
| 750 | ACCGCUCUU | 2326 | 4993-5013 | UUUUACAACC | 752 | 4991-5013 | ACACCGCUCU | 4229 |
| | CAGGUUGUA | | | UGAAGAGCGG | | | UCAGGUUGUA | |
| | AAA | | | UGU | | | AAA | |
| 751 | CAUCUAGUG | 2327 | 5155-5175 | UAUAGUGCCU | 753 | 5153-5175 | UUCAUCUAGU | 4230 |
| | UUAGGCACU | | | AACACUAGAU | | | GUUAGGCACU | |
| | AUA | | | GAA | | | AUA | |
| 752 | AUCUAGUGU | 2328 | 5156-5176 | UUAUAGUGCC | 754 | 5154-5176 | UCAUCUAGUG | 4231 |
| | UAGGCACUA | | | UAACACUAGA | | | UUAGGCACUA | |
| | UAA | | | UGA | | | UAG | |
| 753 | GUUAGGCAC | 2329 | 5163-5183 | UUAAAUACUA | 755 | 5161-5183 | GUGUUAGGCA | 4232 |
| | UAUAGUAUU | | | UAGUGCCUAA | | | CUAUAGUAUU | |
| | UAA | | | CAC | | | UAU | |
| 754 | UAAAAGGUA | 2330 | 5220-5540 | UAGGUACAUU | 756 | 5218-5540 | CUUAAAAGGU | 4233 |
| | UCAAUGUAC | | | GAUACCUUUU | | | AUCAAUGUAC | |
| | CUA | | | AAG | | | CUU | |
| 755 | CAGGAUAAU | 2331 | 5296-5316 | UAUUUGCACU | 757 | 5294-5316 | GGCAGGAUAA | 4234 |
| | AUAGUGCAA | | | AUAUUAUCCU | | | UAUAGUGCAA | |
| | AUA | | | GCC | | | AUU | |
| 756 | GAGAAGCCA | 2332 | 5375-5395 | UCCGCCAUUA | 758 | 5373-5395 | AUGAGAAGCC | 4235 |
| | UAUAAUGGC | | | UAUGGCUUCU | | | AUAUAAUGGC | |
| | GGA | | | CAU | | | GGU | |
| 757 | GAAGCCAUA | 2333 | 5377-5397 | UAACCGCCAU | 759 | 5375-5397 | GAGAAGCCAU | 4236 |
| | UAAUGGCGG | | | UAUAUGGCUU | | | AUAAUGGCGG | |
| | UUA | | | CUC | | | UUU | |
| 758 | UGCAGUACU | 2334 | 5486-5506 | UUAUUAGCUU | 760 | 5484-5506 | UAUGCAGUAC | 4237 |
| | GCAAGCUAA | | | GCAGUACUGC | | | UGCAAGCUAA | |
| | UAA | | | AUA | | | UAA | |
| 759 | CUGCAAGCU | 2335 | 5493-5513 | UCCAACGUUA | 761 | 5491-5513 | UACUGCAAGC | 4238 |
| | AAUAACGUU | | | UUAGCUUGCA | | | UAAUAACGUU | |
| | GGA | | | GUA | | | GGU | |
| 760 | UGCAAGCUA | 2336 | 5494-5514 | UACCAACGUU | 762 | 5492-5514 | ACUGCAAGCU | 4239 |
| | AUAACGUUG | | | AUUAGCUUGC | | | AAUAACGUUG | |
| | GUA | | | AGU | | | GUU | |
| 761 | GCAAGCUAA | 2337 | 5495-5515 | UAACCAACGU | 763 | 5493-5515 | CUGCAAGCUA | 4240 |
| | UAACGUUGG | | | UAUUAGCUUG | | | AUAACGUUGG | |
| | UUA | | | CAG | | | UUU | |
| 762 | UAAUAACGU | 2338 | 5501-5521 | UAUAACAAAC | 764 | 5499-5521 | GCUAAUAACG | 4241 |
| | UGGUUUGUU | | | CAACGUUAUU | | | UUGGUUUGUU | |
| | AUA | | | AGC | | | AUG | |
| 763 | AGAAAGCCC | 2339 | 5716-5736 | UUUGACUAAA | 765 | 5714-5736 | AGAGAAAGCC | 4242 |
| | GCUUUAGUC | | | GCGGGCUUUC | | | CGCUUUAGUC | |
| | AAA | | | UCU | | | AAU | |
| 764 | GAAAGCCCG | 2340 | 5717-5737 | UAUUGACUAA | 766 | 5715-5737 | GAGAAAGCCC | 4243 |
| | CUUUAGUCA | | | AGCGGGCUUU | | | GCUUUAGUCA | |
| | AUA | | | CUC | | | AUAC | |
| 765 | AAAGCCCGC | 2341 | 5718-5738 | UUAUUGACUA | 767 | 5716-5738 | AGAAAGCCCG | 4244 |
| | UUUAGUCAA | | | AAGCGGGCUU | | | CUUUAGUCAA | |
| | UAA | | | UCU | | | UAC | |
| 766 | GCCCGCUUU | 2342 | 5721-5741 | UAAGUAUUGA | 768 | 5719-5741 | AAGCCCGCUU | 4245 |
| | AGUCAAUAC | | | CUAAAGCGGG | | | UAGUCAAUAC | |
| | UUA | | | CUU | | | UUU | |
| 767 | GUUGUCUGC | 2343 | 6032-6052 | UAACAGGUUA | 769 | 6030-6052 | CAGUUGUCUG | 4246 |
| | AUUAACCUG | | | AUGCAGACAA | | | CAUUAACCUG | |
| | UUA | | | CUG | | | UUC | |
| 768 | GUUCAUACA | 2344 | 6049-6069 | UGACAAAAUG | 770 | 6047-6069 | CUGUUCAUAC | 4247 |
| | CCCAUUUUG | | | GGUGUAUGAA | | | ACCCAUUUUG | |
| | UCA | | | CAG | | | UCC | |
| 769 | UCAUACACC | 2345 | 6051-6071 | UGGGACAAAA | 771 | 6049-6071 | GUUCAUACAC | 4248 |
| | CAUUUUGUC | | | UGGGUGUAUG | | | CCAUUUUGUC | |
| | CCA | | | AAC | | | CCU | |

[0318] The nucleotide sequence of exemplary preferred unmodified versions of the dsRNA agents set forth in Table 2 are set forth in Table 3. More specifically, Table 3 sets forth the nucleotide sequence of exemplary sense strands, antisense strands, and dsRNA agent pairs of sense and antisense strands that may be preferred in some embodiments.

TABLE 3
Unmodified Sense and Antisense Strand Sequences
of Exemplary Preferred BCL11A dsRNA Agents.

| | | | | | | | Exemplary | |
|---|---|---|---|---|---|---|---|---|
| dsRNA | Sense | SEQ | | Antisense | SEQ | | mRNA Target | SEQ |
| Agent | Sequence | ID | Range in | Sequence | ID | Range in | Sequence in | ID |
| ID | 5′ to 3′ | NO | NM_022893.4 | 5′ to 3′ | NO | NM_022893.4 | NM_022893.4 | NO |
| 1 | UGGAUUAAG | 1577 | 963-983 | UCUAAGUAGA | 4 | 961-983 | CAUGGAUUAA | 3548 |
| | AAUCUACUU | | | UUCUUAAUCC | | | GAAUCUACUU | |
| | AGA | | | AUG | | | AGA | |
| 2 | CACAAACGG | 1578 | 580-600 | AUUGCAUUGU | 5 | 578-600 | AGCACAAACG | 3549 |
| | AAACAAUGC | | | UUCCGUUUGU | | | GAAACAAUGC | |
| | AAU | | | GCU | | | AAU | |
| 3 | ACAUUCUUA | 1579 | 560-580 | UCUCGAUAAA | 6 | 558-580 | GGACAUUCUU | 3550 |
| | UUUUUAUCG | | | AAUAAGAAUG | | | AUUUUUAUCG | |
| | AGA | | | UCC | | | AGC | |
| 4 | GCAAACAGC | 1580 | 908-928 | AACUGGUGAA | 7 | 906-928 | UUGCAAACAG | 3551 |
| | CAUUCACCA | | | UGGCUGUUUG | | | CCAUUCACCA | |
| | GUU | | | CAA | | | GUG | |
| 5 | AUGUACAAC | 1581 | 897-917 | UGCUGUUUGC | 8 | 895-917 | ACAUGUACAA | 3552 |
| | UUGCAAACA | | | AAGUUGUACA | | | CUUGCAAACA | |
| | GCA | | | UGU | | | GCC | |
| 6 | AACACGCAC | 1582 | 944-964 | AAUGAGUGUU | 9 | 942-964 | GCAACACGCA | 3553 |
| | AGAACACUC | | | CUGUGCGUGU | | | CAGAACACUC | |
| | AUU | | | UGC | | | AUG | |
| 7 | GCUACACAU | 1583 | 890-910 | UGCAAGUUGU | 10 | 888-910 | CAGCUACACA | 3554 |
| | GUACAACUU | | | ACAUGUGUAG | | | UGUACAACUU | |
| | GCA | | | CUG | | | GCA | |
| 8 | CACAUGUAC | 1584 | 894-914 | UGUUUGCAAG | 11 | 892-914 | UACACAUGUA | 3555 |
| | AACUUGCAA | | | UUGUACAUGU | | | CAACUUGCAA | |
| | ACA | | | GUA | | | ACA | |
| 9 | ACUUGCAAA | 1585 | 904-924 | UGUGAAUGGC | 12 | 902-924 | CAACUUGCAA | 3556 |
| | CAGCCAUUC | | | UGUUUGCAAG | | | ACAGCCAUUC | |
| | ACA | | | UUG | | | ACC | |
| 10 | CGCACAGAA | 1586 | 948-968 | UAUCCAUGAG | 13 | 946-968 | CACGCACAGA | 3557 |
| | CACUCAUGG | | | UGUUCUGUGC | | | ACACUCAUGG | |
| | AUA | | | GUG | | | AUU | |
| 11 | AUUCUUAUU | 1587 | 562-582 | UUGCUCGAUA | 14 | 560-582 | ACAUUCUUAU | 3558 |
| | UUUAUCGAG | | | AAAAUAAGAA | | | UUUUAUCGAG | |
| | CAA | | | UGU | | | CAC | |
| 12 | AGUGCAUGG | 1588 | 925-945 | UUGCAAGAGA | 15 | 923-945 | CCAGUGCAUG | 3559 |
| | UUUCUCUUG | | | AACCAUGCAC | | | GUUUCUCUUG | |
| | CAA | | | UGG | | | CAA | |
| 13 | UCAUCUAGA | 1589 | 730-750 | UGGGCAAAUU | 16 | 728-750 | CGUCAUCUAG | 3560 |
| | GGAAUUUGC | | | CCUCUAGAUG | | | AGGAAUUUGC | |
| | CCA | | | ACG | | | CCC | |
| 14 | GGCGAGAAG | 1590 | 2083-2103 | UCCGCGCUUA | 17 | 2081-2103 | UGGGCGAGAA | 3561 |
| | CAUAAGCGC | | | UGCUUCUCGC | | | GCAUAAGCGC | |
| | GGA | | | CCA | | | GGC | |
| 15 | GUAAGAUGC | 1591 | 2798-2818 | UCACGCUAAA | 18 | 2796-2818 | UUGUAAGAUG | 3562 |
| | CUUUUAGCG | | | AGGCAUCUUA | | | CCUUUUAGCG | |
| | UGA | | | CAA | | | UGU | |
| 16 | GGGAUUCAU | 1592 | 1069-1089 | AUUGUCUGCA | 19 | 1067-1089 | AUGGGAUUCA | 3563 |
| | AUUGCAGAC | | | AUAUGAAUCC | | | UAUUGCAGAC | |
| | AAU | | | CAU | | | AAU | |

[0319] The nucleotide sequence of exemplary modified versions of the dsRNA agents set forth in Table 2 are set forth in Table 4. More specifically, Table 8 sets forth the nucleotide sequence of exemplary sense strands, antisense strands, and dsRNA agent pairs of sense and antisense strands. It is to be understood that while the sense and antisense strands are set forth in pairs in Table 4, the disclosure encompasses dsRNA agents comprising any sense strand and any antisense set forth in Table 4 (e.g., that are at least partially complementary (e.g., as could be determined by a person of ordinary skill in the art)). It is to be understood that while the nucleotide sequence of the sense strands and antisense strands in Table 4 are set forth as modified (i.e., contain at least one modified nucleotide), the disclosure encompasses the sense and antisense sense strands set forth in Table 4 comprising other nucleotide modifications (e.g., as described herein) or that are unmodified.

TABLE 4
Modified Sense and Antisense Strand Sequences of BCL11A dsRNA Agents.

| | | | | | | | Exemplary | |
|---|---|---|---|---|---|---|---|---|
| dsRNA | Sense | SEQ | | Antisense | SEQ | | mRNA Target | SEQ |
| Agent | Sequence | ID | Range in | Sequence | ID | Range in | Sequence in | ID |
| ID | 5′ to 3′ | NO | NM_022893.4 | 5′ to 3′ | NO | NM_022893.4 | NM_022893.4 | NO |
| 770 | u*g*gauuA | 2346 | 963-983 | (VPmU)*C*uaa | 772 | 961-983 | CAUGGAUUAA | 3548 |
| | aGAAucuaC | | | GuAGauucUuAa | | | GAAUCUACUU | |
| | Uua*g*a | | | (y)cca*u*g | | | AGA | |
| 771 | c*a*caaaC | 2347 | 580-600 | (VPmA)*U*ugc | 773 | 578-600 | AGCACAAACG | 3549 |
| | gGAAacaaU | | | AuUGuuucCgUu | | | GAAACAAUGC | |
| | Gca*a*u | | | ug(y)g*c*u | | | AAU | |
| 772 | a*c*auucU | 2348 | 560-580 | (VPmU)*C*ucg | 774 | 558-580 | GGACAUUCUU | 3550 |
| | uAUUuuuau | | | AuaaaaauAaGa | | | AUUUUUAUCG | |
| | cga*g*a | | | augu*c*c | | | AGC | |
| 773 | g*c*aaacA | 2349 | 908-928 | (VPmA)*A*cug | 775 | 906-928 | UUGCAAACAG | 3551 |
| | gCCAuucaC | | | GuGAaugXCuGu | | | CCAUUCACCA | |
| | CaX*u*u | | | (y)ugc*a*a | | | GUG | |
| 774 | a*u*guacA | 2350 | 897-917 | (VPmU)*G*cug | 776 | 895-917 | ACAUGUACAA | 3552 |
| | aCUUgcaaA | | | UuUGcaagUuGu | | | CUUGCAAACA | |
| | CaX*c*a | | | acau*g*u | | | GCC | |
| 775 | a*a*cacgC | 2351 | 944-964 | (VPmA)*A*uga | 777 | 942-964 | GCAACACGCA | 3553 |
| | aCAGaacaC | | | GuGUucugUgCg | | | CAGAACACUC | |
| | Uca*u*u | | | uguu*g*c | | | AUG | |
| 776 | g*c*uacaC | 2352 | 890-910 | (VPmU)*G*caa | 778 | 888-910 | CAGCUACACA | 3554 |
| | aUGUacaaC | | | GuUGuacaUgUg | | | UGUACAACUU | |
| | Uug*c*a | | | (y)agc*u*g | | | GCA | |
| 777 | c*a*caugU | 2353 | 894-914 | (VPmU)*G*uuu | 779 | 892-914 | UACACAUGUA | 3555 |
| | aCAAcuugc | | | GcaaguugUaCa | | | CAACUUGCAA | |
| | aaa*c*a | | | ugug*u*a | | | ACA | |
| 778 | a*c*uugcA | 2354 | 904-924 | (VPmU)*G*uga | 780 | 902-924 | CAACUUGCAA | 3556 |
| | aACAgccaU | | | AuGGcuguUuGc | | | ACAGCCAUUC | |
| | Uca*c*a | | | aag(y)*u*g | | | ACC | |
| 779 | c*g*cacaG | 2355 | 948-968 | (VPmU)*A*ucc | 781 | 946-968 | CACGCACAGA | 3557 |
| | aACAcucau | | | AugaguguUcUg | | | ACACUCAUGG | |
| | gga*u*a | | | ugcg*u*g | | | AUU | |
| 780 | a*u*ucuuA | 2356 | 562-582 | (VPmU)*U*gcu | 782 | 560-582 | ACAUUCUUAU | 3558 |
| | uUUUuaucg | | | CgauaaaaAuAa | | | UUUUAUCGAG | |
| | agc*a*a | | | gaau*g*u | | | CAC | |
| 781 | a*g*ugcaU | 2357 | 925-945 | (VPmU)*U*gca | 783 | 923-945 | CCAGUGCAUG | 3559 |
| | gGUUucucU | | | AgAGaaacCaUg | | | GUUUCUCUUG | |
| | UXc*a*a | | | cac(y)*g*g | | | CAA | |
| 782 | u*c*aucuA | 2358 | 730-750 | (VPmU)*G*ggc | 784 | 728-750 | CGUCAUCUAG | 3560 |
| | gAGGaauuu | | | AaauuccuCuAg | | | AGGAAUUUGC | |
| | gcc*c*a | | | auga*c*g | | | CCC | |
| 783 | g*g*cgagA | 2359 | 2083-2103 | (VPmU)*C*cgc | 785 | 2081-2103 | UGGGCGAGAA | 3561 |
| | aGCAuaagc | | | GcuuaugcUuCu | | | GCAUAAGCGC | |
| | gcg*g*a | | | cgcc*c*a | | | GGC | |
| 784 | g*u*aagaU | 2360 | 2798-2818 | (VPmU)*C*acg | 786 | 2796-2818 | UUGUAAGAUG | 3562 |
| | gCCUuuuag | | | CuaaaaggCaUc | | | CCUUUUAGCG | |
| | cgu*g*a | | | uuac*a*a | | | UGU | |
| 785 | g*g*gauuC | 2361 | 1069-1089 | (VPmA)*U*ugu | 787 | 1067-1089 | AUGGGAUUCA | 3563 |
| | aUAUugcaG | | | CuGCaauaUgAa | | | UAUUGCAGAC | |
| | Aca*a*u | | | (y)ccc*a*u | | | AAU | |
| 786 | a*u*UaAgA | 2362 | 966-986 | (VPmU)*U*uUc | 788 | 964-986 | GGAUUAAGAA | 3564 |
| | aUcUaCuUa | | | UaAgUaGaUuCu | | | UCUACUUAGA | |
| | GaA*a*g | | | UaAu*c*c | | | AAG | |
| 787 | g*a*AgGaC | 2363 | 2772-2792 | (VPmU)*C*aCa | 789 | 2770-2792 | GGGAAGGACG | 3565 |
| | gUuUaCaAa | | | UuUgUaAaCgUc | | | UUUACAAAUG | |
| | UgU*g*a | | | CuUc*c*c | | | UGA | |
| 788 | g*c*AcAgA | 2364 | 949-969 | (VPmU)*A*aUc | 790 | 947-969 | ACGCACAGAA | 3566 |
| | aCaCuCaUg | | | CaUgAgUgUuCu | | | CACUCAUGGA | |
| | GaU*u*a | | | GuGc*g*u | | | UUA | |
| 789 | g*g*AcUaG | 2365 | 1030-1050 | (VPmA)*G*gAc | 791 | 1028-1050 | CAGGACUAGG | 3567 |
| | gUgCaGaAu | | | AuUcUgCaCcUa | | | UGCAGAAUGU | |
| | GuC*c*u | | | GuCc*u*g | | | CCU | |
| 790 | g*u*GaAaU | 2366 | 2789-2809 | (VPmA)*A*gGc | 792 | 2787-2809 | AUGUGAAAUU | 3568 |
| | uUgUaAgAu | | | AuCuUaCaAaUu | | | UGUAAGAUGC | |
| | GcC*u*u | | | UcAc*a*u | | | CUU | |
| 791 | a*c*GuUcA | 2367 | 1537-1557 | (VPmG)*U*uGc | 793 | 1535-1557 | AGACGUUCAA | 3569 |
| | aAuUuCaGa | | | UcUgAaAuUuGa | | | AUUUCAGAGC | |
| | GcA*a*c | | | AcGu*c*u | | | AAC | |
| 792 | c*a*CuCaU | 2368 | 957-977 | (VPmU)*A*gAu | 794 | 955-977 | AACACUCAUG | 3570 |
| | gGaUuAaGa | | | UcUuAaUcCaUg | | | GAUUAAGAAU | |
| | AuC*u*a | | | AgUg*u*u | | | CUA | |
| 793 | c*a*AcGuC | 2369 | 725-745 | (VPmA)*A*aUu | 795 | 723-745 | AUCAACGUCA | 3571 |
| | aUcUaGaGg | | | CcUcUaGaUgAc | | | UCUAGAGGAA | |
| | AaU*u*u | | | GuUg*a*u | | | UUU | |
| 794 | c*u*CuAgG | 2370 | 1329-1349 | (VPmA)*G*cUc | 796 | 1327-1349 | UUCUCUAGGA | 3572 |
| | aGaCuUaGa | | | UcUaAgUcUcCu | | | GACUUAGAGA | |
| | GaG*c*u | | | AgAg*a*a | | | GCU | |
| 795 | a*c*AgAaC | 2371 | 951-971 | (VPmU)*U*uAa | 797 | 949-971 | GCACAGAACA | 3573 |
| | aCuCaUgGa | | | UcCaUgAgUgUu | | | CUCAUGGAUU | |
| | UuA*a*g | | | CuGu*g*c | | | AAG | |
| 796 | g*c*UuCgG | 2372 | 2408-2428 | (VPmA)*U*uGu | 798 | 2406-2428 | UAGCUUCGGA | 3574 |
| | aGaCuCcAg | | | CuGgAgUcUcCg | | | GACUCCAGAC | |
| | AcA*a*u | | | AaGc*u*a | | | AAU | |
| 797 | a*a*CaCuC | 2373 | 955-975 | (VPmG)*A*uUc | 799 | 953-975 | AGAACACUCA | 3575 |
| | aUgGaUuAa | | | UuAaUcCaUgAg | | | UGGAUUAAGA | |
| | GaA*u*c | | | UgUu*c*u | | | AUC | |
| 798 | u*g*AcAgG | 2374 | 1275-1295 | (VPmU)*U*cAa | 800 | 1273-1295 | UUUGACAGGG | 3576 |
| | gUgCuGcGg | | | CcGcAgCaCcCu | | | UGCUGCGGUU | |
| | UuG*a*a | | | GuCa*a*a | | | GAA | |
| 799 | u*c*GaGuG | 2375 | 2859-2879 | (VPmA)*U*aUc | 801 | 2857-2879 | GAUCGAGUGU | 3577 |
| | uUgAaUaAu | | | AuUaUuCaAcAc | | | UGAAUAAUGA | |
| | GaU*a*u | | | UcGa*u*c | | | UAU | |
| 800 | a*u*GaCgA | 2376 | 710-730 | (VPmA)*C*gUu | 802 | 708-730 | GGAUGACGAU | 3578 |
| | uUgUuUaUc | | | GaUaAaCaAuCg | | | UGUUUAUCAA | |
| | AaC*g*u | | | UcAu*c*c | | | CGU | |
| 801 | a*u*GgAuU | 2377 | 1321-1341 | (VPmA)*A*gUc | 803 | 1319-1341 | CCAUGGAUUU | 3579 |
| | uCuCuAgGa | | | UcCuAgAgAaAu | | | CUCUAGGAGA | |
| | GaC*u*u | | | CcAu*g*g | | | CUU | |
| 802 | u*g*UgAgU | 2378 | 2614-2634 | (VPmG)*A*cUu | 804 | 2612-2634 | CUUGUGAGUA | 3580 |
| | aCuGuGgGa | | | UcCcAcAgUaCu | | | CUGUGGGAAA | |
| | AaG*u*c | | | CaCa*a*g | | | GUC | |
| 803 | c*u*CcAgG | 2379 | 2379-2399 | (VPmG)*G*aUc | 805 | 2377-2399 | GCCUCCAGGC | 3581 |
| | cAgCuCaAa | | | UuUgAgCuGcCu | | | AGCUCAAAGA | |
| | GaU*c*c | | | GgAg*g*c | | | UCC | |
| 804 | g*c*AgCgA | 2380 | 2603-2623 | (VPmA)*G*uAc | 806 | 2601-2623 | ACGCAGCGAC | 3582 |
| | cAcUuGuGa | | | UcAcAaGuGuCg | | | ACUUGUGAGU | |
| | GuA*c*u | | | CuGc*g*u | | | ACU | |
| 805 | c*u*GuAgC | 2381 | 2643-2663 | (VPmU)*G*gAc | 807 | 2641-2663 | AACUGUAGCA | 3583 |
| | aAuCuCaCu | | | AgUgAgAuUgCu | | | AUCUCACUGU | |
| | GuC*c*a | | | AcAg*u*u | | | CCA | |
| 806 | u*c*UuCaA | 2382 | 2633-2653 | (VPmG)*A*uUg | 808 | 2631-2653 | AGUCUUCAAG | 3584 |
| | gAaCuGuAg | | | CuAcAgUuCuUg | | | AACUGUAGCA | |
| | CaA*u*c | | | AaGa*c*u | | | AUC | |
| 807 | c*u*GcUaA | 2383 | 1102-1122 | (VPmU)*G*aUc | 809 | 1100-1122 | ACCUGCUAAG | 3585 |
| | gAaUaCcAg | | | CuGgUaUuCuUa | | | AAUACCAGGA | |
| | GaU*c*a | | | GcAg*g*u | | | UCA | |
| 808 | g*g*UuGgU | 2384 | 1014-1034 | (VPmA)*G*uCc | 810 | 1012-1034 | CGGGUUGGUA | 3586 |
| | aUcCcUuCa | | | UgAaGgGaUaCc | | | UCCCUUCAGG | |
| | GgA*c*u | | | AaCc*c*g | | | ACU | |
| 809 | c*g*CaGcG | 2385 | 2602-2622 | (VPmG)*U*aCu | 811 | 2600-2622 | GACGCAGCGA | 3587 |
| | aCaCuUgUg | | | CaCaAgUgUcGc | | | CACUUGUGAG | |
| | AgU*a*c | | | UgCg*u*c | | | UAC | |
| 810 | c*g*AgCaC | 2386 | 576-596 | (VPmU)*A*uUg | 812 | 574-596 | AUCGAGCACA | 3588 |
| | aAaCgGaAa | | | UuUcCgUuUgUg | | | AACGGAAACA | |
| | CaA*u*g | | | CuCg*a*u | | | AUG | |
| 811 | u*c*AaCgU | 2387 | 724-744 | (VPmA)*A*uUc | 813 | 722-744 | UAUCAACGUC | 3589 |
| | cAuCuAgAg | | | CuCuAgAuGaCg | | | AUCUAGAGGA | |
| | GaA*u*u | | | UuGa*u*a | | | AUU | |
| 812 | u*g*CgGuU | 2388 | 1286-1306 | (VPmU)*A*gCc | 814 | 1284-1306 | GCUGCGGUUG | 3590 |
| | gAaUcCaAu | | | AuUgGaUuCaAc | | | AAUCCAAUGG | |
| | GgC*u*a | | | CgCa*g*c | | | CUA | |
| 813 | g*a*CgAuU | 2389 | 712-732 | (VPmU)*G*aCg | 815 | 710-732 | AUGACGAUUG | 3591 |
| | gUuUaUcAa | | | UuGaUaAaCaAu | | | UUUAUCAACG | |
| | CgU*c*a | | | CgUc*a*u | | | UCA | |
| 814 | u*g*GaGuC | 2390 | 284-304 | (VPmG)*U*uAg | 816 | 282-304 | UCUGGAGUCU | 3592 |
| | uCcUuCuUu | | | AaAgAaGgAgAc | | | CCUUCUUUCU | |
| | CuA*a*c | | | UcCa*g*a | | | AAC | |
| 815 | c*g*CaUaG | 2391 | 2170-2190 | (VPmA)*A*cAg | 817 | 2168-2190 | ACCGCAUAGA | 3593 |
| | aCgAuGgCa | | | UgCcAuCgUcUa | | | CGAUGGCACU | |
| | CuG*u*u | | | UgCg*g*u | | | GUU | |
| 816 | u*g*UgAaA | 2392 | 2788-2808 | (VPmA)*G*gCa | 818 | 2786-2808 | AAUGUGAAAU | 3594 |
| | uUuGuAaGa | | | UcUuAcAaAuUu | | | UUGUAAGAUG | |
| | UgC*c*u | | | CaCa*u*u | | | CCU | |
| 817 | c*a*GaAcA | 2393 | 952-972 | (VPmU)*C*uUa | 819 | 950-972 | CACAGAACAC | 3595 |
| | cUcAuGgAu | | | AuCcAuGaGuGu | | | UCAUGGAUUA | |
| | UaA*g*a | | | UcUg*u*g | | | AGA | |
| 818 | a*c*GgCuC | 2394 | 191-211 | (VPmG)*A*uGa | 820 | 189-211 | UGACGGCUCU | 3596 |
| | uCcCaCaAu | | | AuUgUgGgAgAg | | | CCCACAAUUC | |
| | UcA*u*c | | | CcGu*c*a | | | AUC | |
| 819 | g*g*AaAgU | 2395 | 2627-2647 | (VPmU)*A*cAg | 821 | 2625-2647 | UGGGAAAGUC | 3597 |
| | cUuCaAgAa | | | UuCuUgAaGaCu | | | UUCAAGAACU | |
| | CuG*u*a | | | UuCc*c*a | | | GUA | |
| 820 | c*u*UaUaA | 2396 | 2690-2710 | (VPmU)*G*cAc | 822 | 2688-2710 | GCCUUAUAAA | 3598 |
| | aUgCgAgCu | | | AgCuCgCaUuUa | | | UGCGAGCUGU | |
| | GuG*c*a | | | UaAg*g*c | | | GCA | |
| 821 | u*u*CaAgA | 2397 | 2635-2655 | (VPmG)*A*gAu | 823 | 2633-2655 | UCUUCAAGAA | 3599 |
| | aCuGuAgCa | | | UgCuAcAgUuCu | | | CUGUAGCAAU | |
| | AuC*u*c | | | UgAa*g*a | | | CUC | |
| 822 | u*c*CaGgC | 2398 | 2380-2400 | (VPmG)*G*gAu | 824 | 2378-2400 | CCUCCAGGCA | 3600 |
| | aGcUcAaAg | | | CuUuGaGcUgCc | | | GCUCAAAGAU | |
| | AuC*c*c | | | UgGa*g*g | | | CCC | |
| 823 | g*g*AuGaC | 2399 | 708-728 | (VPmG)*U*uGa | 825 | 706-728 | GAGGAUGACG | 3601 |
| | gAuUgUuUa | | | UaAaCaAuCgUc | | | AUUGUUUAUC | |
| | UcA*a*c | | | AuCc*u*c | | | AAC | |
| 824 | c*u*GcGgU | 2400 | 1285-1305 | (VPmA)*G*cCa | 826 | 1283-1305 | UGCUGCGGUU | 3602 |
| | uGaAuCcAa | | | UuGgAuUcAaCc | | | GAAUCCAAUG | |
| | UgG*c*u | | | GcAg*c*a | | | GCU | |
| 825 | u*g*AcGaU | 2401 | 711-731 | (VPmG)*A*cGu | 827 | 709-731 | GAUGACGAUU | 3603 |
| | uGuUuAuCa | | | UgAuAaAcAaUc | | | GUUUAUCAAC | |
| | AcG*u*c | | | GuCa*u*c | | | GUC | |
| 826 | c*u*UcGgA | 2402 | 2409-2429 | (VPmG)*A*uUg | 828 | 2407-2429 | AGCUUCGGAG | 3604 |
| | gAcUcCaGa | | | UcUgGaGuCuCc | | | ACUCCAGACA | |
| | CaA*u*c | | | GaAg*c*u | | | AUC | |
| 827 | c*u*UcAaG | 2403 | 2634-2654 | (VPmA)*G*aUu | 829 | 2632-2654 | GUCUUCAAGA | 3605 |
| | aAcUgUaGc | | | GcUaCaGuUcUu | | | ACUGUAGCAA | |
| | AaU*c*u | | | GaAg*a*c | | | UCU | |
| 828 | g*c*GaGcU | 2404 | 2699-2719 | (VPmA)*G*gCa | 830 | 2697-2719 | AUGCGAGCUG | 3606 |
| | gUgCaAcUa | | | UaGuUgCaCaGc | | | UGCAACUAUG | |
| | UgC*c*u | | | UcGc*a*u | | | CCU | |
| 829 | a*u*CcAaU | 2405 | 1295-1315 | (VPmG)*A*gGc | 831 | 1293-1315 | GAAUCCAAUG | 3607 |
| | gGcUaUgGa | | | UcCaUaGcCaUu | | | GCUAUGGAGC | |
| | GcC*u*c | | | GgAu*u*c | | | CUC | |
| 830 | g*c*CuUaU | 2406 | 2688-2708 | (VPmU)*A*cAg | 832 | 2686-2708 | AGGCCUUAUA | 3608 |
| | aAaUgCgAg | | | CuCgCaUuUaUa | | | AAUGCGAGCU | |
| | CuG*u*g | | | AgGc*c*u | | | GUG | |
| 831 | c*a*CuUaA | 2407 | 415-435 | (VPmG)*A*aUu | 833 | 413-435 | AGCACUUAAG | 3609 |
| | gCaAaCgGg | | | CcCgUuUgCuUa | | | CAAACGGGAA | |
| | AaU*u*c | | | AgUg*c*u | | | UUC | |
| 832 | c*a*AgUcC | 2408 | 1506-1526 | (VPmA)*A*cUc | 834 | 1504-1526 | GUCAAGUCCA | 3610 |
| | aAgUcAuGc | | | GcAuGaCuUgGa | | | AGUCAUGCGA | |
| | GaG*u*u | | | CuUg*a*c | | | GUU | |
| 833 | g*g*AuUaA | 2409 | 964-984 | (VPmU)*U*cUa | 835 | 962-984 | AUGGAUUAAG | 3611 |
| | gAaUcUaCu | | | AgUaGaUuCuUa | | | AAUCUACUUA | |
| | UaG*a*a | | | AuCc*a*u | | | GAA | |
| 834 | c*a*AuCuC | 2410 | 2649-2669 | (VPmU)*U*cCu | 836 | 2647-2669 | AGCAAUCUCA | 3612 |
| | aCuGuCcAc | | | GuGgAcAgUgAg | | | CUGUCCACAG | |
| | AgG*a*g | | | AuUg*c*u | | | GAG | |
| 835 | a*a*CcCgG | 2411 | 302-322 | (VPmU)*C*aCa | 837 | 300-322 | CUAACCCGGC | 3613 |
| | CUcUcCcGa | | | UcGgGaGaGcCg | | | UCUCCCGAUG | |
| | UgU*g*a | | | GgUu*a*g | | | UGA | |
| 836 | a*c*AcUcA | 2412 | 956-976 | (VPmA)*G*aUu | 838 | 954-976 | GAACACUCAU | 3553 |
| | uGgAuUaAg | | | CuUaAuCcAuGa | | | GGAUUAAGAA | |
| | AaU*c*u | | | GuGu*u*c | | | UCU | |
| 837 | c*a*UgAcG | 2413 | 187-207 | (VPmA)*A*uUg | 839 | 185-207 | GCCAUGACGG | 3554 |
| | gCuCuCcCa | | | UgGgAgAgCcGu | | | CUCUCCCACA | |
| | CaA*u*u | | | CaUg*g*c | | | AUU | |
| 838 | g*g*AcGuU | 2414 | 2775-2795 | (VPmA)*U*uUc | 840 | 2773-2795 | AAGGACGUUU | 3555 |
| | uAcAaAuGu | | | AcAuUuGuAaAc | | | ACAAAUGUGA | |
| | GaA*a*u | | | GuCc*u*u | | | AAU | |
| 839 | u*a*AgAaU | 2415 | 1106-1126 | (VPmA)*U*aCu | 841 | 1104-1126 | GCUAAGAAUA | 3556 |
| | aCcAgGaUc | | | GaUcCuGgUaUu | | | CCAGGAUCAG | |
| | AgU*a*u | | | CuUa*g*c | | | UAU | |
| 840 | a*u*GaCgG | 2416 | 188-208 | (VPmG)*A*aUu | 842 | 186-208 | CCAUGACGGC | 3557 |
| | cUcUcCcAc | | | GuGgGaGaGcCg | | | UCUCCCACAA | |
| | AaU*u*c | | | UcAu*g*g | | | UUC | |
| 841 | a*g*CaCaA | 2417 | 578-598 | (VPmU)*G*cAu | 843 | 576-598 | CGAGCACAAA | 3558 |
| | aCgGaAaCa | | | UgUuUcCgUuUg | | | CGGAAACAAU | |
| | AuG*c*a | | | UgCu*c*g | | | GCA | |
| 842 | g*u*UuCuC | 2418 | 933-953 | (VPmU)*G*uGc | 844 | 931-953 | UGGUUUCUCU | 3559 |
| | uUgCaAcAc | | | GuGuUgCaAgAg | | | UGCAACACGC | |
| | GcA*c*a | | | AaAc*c*a | | | ACA | |
| 843 | c*u*GuGcA | 2419 | 2704-2724 | (VPmG)*G*cAc | 845 | 2702-2724 | AGCUGUGCAA | 3560 |
| | aCuAuGcCu | | | AgGcAuAgUuGc | | | CUAUGCCUGU | |
| | GuG*c*c | | | AcAg*c*u | | | GCC | |
| 844 | u*g*CaAaG | 2420 | 1400-1420 | (VPmA)*U*gGu | 846 | 1398-1420 | UAUGCAAAGG | 3561 |
| | gUuAcUgCa | | | UgCaGuAaCcUu | | | UUACUGCAAC | |
| | AcC*a*u | | | UgCa*u*a | | | CAU | |
| 845 | u*c*GcCgC | 2421 | 390-410 | (VPmG)*G*uUu | 847 | 388-410 | UCUCGCCGCA | 3562 |
| | aAgCaAgGc | | | GcCuUgCuUgCg | | | AGCAAGGCAA | |
| | AaA*c*c | | | GcGa*g*a | | | ACC | |
| 846 | c*c*UuCaG | 2422 | 1024-1044 | (VPmU)*U*cUg | 848 | 1022-1044 | UCCCUUCAGG | 3563 |
| | gAcUaGgUg | | | CaCcUaGuCcUg | | | ACUAGGUGCA | |
| | CaG*a*a | | | AaGg*g*a | | | GAA | |
| 847 | u*c*UuGcA | 2423 | 938-958 | (VPmU)*G*uUc | 849 | 936-958 | UCUCUUGCAA | 3564 |
| | aCaCgCaCa | | | UgUgCgUgUuGc | | | CACGCACAGA | |
| | GaA*c*a | | | AaGa*g*a | | | ACA | |
| 848 | a*c*GuCaU | 2424 | 727-747 | (VPmG)*C*aAa | 850 | 725-747 | CAACGUCAUC | 3565 |
| | cUaGaGgAa | | | UuCcUcUaGaUg | | | UAGAGGAAUU | |
| | UuU*g*c | | | AcGu*u*g | | | UGC | |
| 849 | c*a*CaGaA | 2425 | 950-970 | (VPmU)*U*aAu | 851 | 948-970 | CGCACAGAAC | 3566 |
| | cAcUcAuGg | | | CcAuGaGuGuUc | | | ACUCAUGGAU | |
| | AuU*a*a | | | UgUg*c*g | | | UAA | |
| 850 | u*c*UgGaG | 2426 | 282-302 | (VPmU)*A*gAa | 852 | 280-302 | UCUCUGGAGU | 3567 |
| | uCuCcUuCu | | | AgAaGgAgAcUc | | | CUCCUUCUUU | |
| | UuC*u*a | | | CaGa*g*a | | | CUA | |
| 851 | u*a*AcCcG | 2427 | 301-321 | (VPmU)*A*cAu | 853 | 299-321 | UCUAACCCGG | 3568 |
| | gCuCuCcCg | | | CgGgAgAgCcGg | | | CUCUCCCGAU | |
| | AuG*u*g | | | GuUa*g*a | | | GUG | |
| 852 | a*g*CaCuU | 2428 | 413-433 | (VPmA)*U*uCc | 854 | 411-433 | CCAGCACUUA | 3569 |
| | aAgCaAaCg | | | CgUuUgCuUaAg | | | AGCAAACGGG | |
| | GgA*a*u | | | UgCu*g*g | | | AAU | |
| 853 | a*a*AcGgA | 2429 | 583-603 | (VPmG)*C*cAu | 855 | 581-603 | ACAAACGGAA | 3570 |
| | aAcAaUgCa | | | UgCaUuGuUuCc | | | ACAAUGCAAU | |
| | AuG*g*c | | | GuUu*g*u | | | GGC | |
| 854 | a*u*GgAuU | 2430 | 962-982 | (VPmU)*U*aAg | 856 | 960-982 | UCAUGGAUUA | 3571 |
| | aAgAaUcUa | | | UaGaUuCuUaAu | | | AGAAUCUACU | |
| | CuU*a*g | | | CcAu*g*a | | | UAG | |
| 855 | c*c*UgCuA | 2431 | 1101-1121 | (VPmG)*A*uCc | 857 | 1099-1121 | AACCUGCUAA | 3572 |
| | aGaAuAcCa | | | UgGuAuUcUuAg | | | GAAUACCAGG | |
| | GgA*u*c | | | CaGg*u*u | | | AUC | |
| 856 | a*c*GuCcG | 2432 | 47-67 | (VPmU)*G*cAa | 858 | 45-67 | UCACGUCCGC | 3573 |
| | cAcUuGaAc | | | GuUcAaGuGcGg | | | ACUUGAACUU | |
| | UuG*c*a | | | AcGu*g*a | | | GCA | |
| 857 | c*a*CaUaG | 2433 | 760-780 | (VPmU)*A*gAa | 859 | 758-780 | AACACAUAGC | 3574 |
| | cAgAuAaAc | | | GuUuAuCuGcUa | | | AGAUAAACUU | |
| | UuC*u*g | | | UgUg*u*u | | | CUG | |
| 858 | u*g*CuCaG | 2434 | 2036-2056 | (VPmA)*G*uGc | 860 | 2034-2056 | GGUGCUCAGC | 3575 |
| | cUcCaUgCa | | | UgCaUgGaGcUg | | | UCCAUGCAGC | |
| | GcA*c*u | | | AgCa*c*c | | | ACU | |
| 859 | a*c*AuAgC | 2435 | 761-781 | (VPmG)*C*aGa | 861 | 759-781 | ACACAUAGCA | 3576 |
| | aGaUaAaCu | | | AgUuUaUcUgCu | | | GAUAAACUUC | |
| | UcU*g*c | | | AuGu*g*u | | | UGC | |
| 860 | a*a*CaCgC | 2436 | 944-964 | (VPmU)*A*uGa | 862 | 942-964 | GCAACACGCA | 3577 |
| | aCaGaAcAc | | | GuGuUcUgUgCg | | | CAGAACACUC | |
| | UcA*u*g | | | UgUu*g*c | | | AUG | |
| 861 | g*c*UgCgG | 2437 | 1284-1304 | (VPmG)*C*cAu | 863 | 1282-1304 | GUGCUGCGGU | 3578 |
| | uUgAaUcCa | | | UgGaUuCaAcCg | | | UGAAUCCAAU | |
| | AuG*g*c | | | CaGc*a*c | | | GGC | |
| 862 | u*c*CgCaC | 2438 | 50-70 | (VPmA)*G*cUg | 864 | 48-70 | CGUCCGCACU | 3579 |
| | uUgAaCuUg | | | CaAgUuCaAgUg | | | UGAACUUGCA | |
| | CaG*c*u | | | CgGa*c*g | | | GCU | |
| 863 | g*u*UgAaU | 2439 | 1290-1310 | (VPmU)*C*cAu | 865 | 1288-1310 | CGGUUGAAUC | 3580 |
| | cCaAuGgCu | | | AgCcAuUgGaUu | | | CAAUGGCUAU | |
| | AuG*g*a | | | CaAc*c*g | | | GGA | |
| 864 | a*a*CuGuA | 2440 | 2641-2661 | (VPmG)*A*cAg | 866 | 2639-2661 | AGAACUGUAG | 3581 |
| | gCaAuCuCa | | | UgAgAuUgCuAc | | | CAAUCUCACU | |
| | CuG*u*c | | | AgUu*c*u | | | GUC | |
| 865 | c*c*GgCuC | 2441 | 305-325 | (VPmG)*G*uUc | 867 | 303-325 | ACCCGGCUCU | 3582 |
| | uCcCgAuGu | | | AcAuCgGgAgAg | | | CCCGAUGUGA | |
| | GaA*c*c | | | CcGg*g*u | | | ACC | |
| 866 | c*u*UcCcU | 2442 | 211-231 | (VPmU)*A*cAa | 868 | 209-231 | AUCUUCCCUG | 3583 |
| | gCgCcAuCu | | | AgAuGgCgCaGg | | | CGCCAUCUUU | |
| | UuG*u*a | | | GaAg*a*u | | | GUA | |
| 867 | g*c*AaAcA | 2443 | 908-928 | (VPmU)*A*cUg | 869 | 906-928 | UUGCAAACAG | 3584 |
| | gCcAuUcAc | | | GuGaAuGgCuGu | | | CCAUUCACCA | |
| | CaG*u*g | | | UuGc*a*a | | | GUG | |
| 868 | a*a*UgGcA | 2444 | 598-618 | (VPmU)*U*cUa | 870 | 596-618 | GCAAUGGCAG | 3585 |
| | gCcUcUgCu | | | AgCaGaGgCuGc | | | CCUCUGCUUA | |
| | UaG*a*a | | | CaUu*g*c | | | GAA | |
| 869 | c*a*AgAcG | 2445 | 1533-1553 | (VPmU)*U*cUg | 871 | 1531-1553 | GGCAAGACGU | 3586 |
| | uUcAaAuUu | | | AaAuUuGaAcGu | | | UCAAAUUUCA | |
| | CaG*a*g | | | CuUg*c*c | | | GAG | |
| 870 | u*c*GgAgA | 2446 | 2411-2431 | (VPmG)*C*gAu | 872 | 2409-2431 | CUUCGGAGAC | 3587 |
| | cUcCaGaCa | | | UgUcUgGaGuCu | | | UCCAGACAAU | |
| | AuC*g*c | | | CcGa*a*g | | | CGC | |
| 871 | c*c*CgGgC | 2447 | 2571-2591 | (VPmU)*U*uGa | 873 | 2569-2591 | GGCCCGGGCA | 3588 |
| | aGgCcCaGc | | | GcUgGgCcUgCc | | | GGCCCAGCUC | |
| | UcA*a*a | | | CgGg*c*c | | | AAA | |
| 872 | c*g*GaGaC | 2448 | 2412-2432 | (VPmG)*G*cGa | 874 | 2410-2432 | UUCGGAGACU | 3589 |
| | uCcAgAcAa | | | UuGuCuGgAgUc | | | CCAGACAAUC | |
| | UcG*c*c | | | UcCg*a*a | | | GCC | |
| 873 | c*g*AgCuG | 2449 | 2700-2720 | (VPmU)*A*gGc | 875 | 2698-2720 | UGCGAGCUGU | 3590 |
| | uGcAaCuAu | | | AuAgUuGcAcAg | | | GCAACUAUGC | |
| | GcC*u*g | | | CuCg*c*a | | | CUG | |
| 874 | g*a*CaGgG | 2450 | 1276-1296 | (VPmA)*U*uCa | 876 | 1274-1296 | UUGACAGGGU | 3591 |
| | uGcUgCgGu | | | AcCgCaGcAcCc | | | GCUGCGGUUG | |
| | UgA*a*u | | | UgUc*a*a | | | AAU | |
| 875 | g*g*UcAaG | 2451 | 1503-1523 | (VPmU)*C*gCa | 877 | 1501-1523 | CCGGUCAAGU | 3592 |
| | uCcAaGuCa | | | UgAcUuGgAcUu | | | CCAAGUCAUG | |
| | UgC*g*a | | | GaCc*g*g | | | CGA | |
| 876 | g*a*AuCcA | 2452 | 1293-1313 | (VPmG)*G*cUc | 878 | 1291-1313 | UUGAAUCCAA | 3593 |
| | aUgGcUaUg | | | CaUaGcCaUuGg | | | UGGCUAUGGA | |
| | GaG*c*c | | | AuUc*a*a | | | GCC | |
| 877 | u*g*CaAcU | 2453 | 2707-2727 | (VPmU)*U*gGg | 879 | 2705-2727 | UGUGCAACUA | 3594 |
| | aUgCcUgUg | | | CaCaGgCaUaGu | | | UGCCUGUGCC | |
| | CcC*a*g | | | UgCa*c*a | | | CAG | |
| 878 | a*g*GcCuU | 2454 | 2686-2706 | (VPmU)*A*gCu | 880 | 2684-2706 | AAAGGCCUUA | 3595 |
| | aUaAaUgCg | | | CgCaUuUaUaAg | | | UAAAUGCGAG | |
| | AgC*u*g | | | GcCu*u*u | | | CUG | |
| 879 | a*u*CaCcC | 2455 | 1259-1279 | (VPmU)*G*uCa | 881 | 1257-1279 | CCAUCACCCG | 3596 |
| | gAgUgCcUu | | | AaGgCaCuCgGg | | | AGUGCCUUUG | |
| | UgA*c*a | | | UgAu*g*g | | | ACA | |
| 880 | c*c*UgGcC | 2456 | 1248-1268 | (VPmU)*U*cGg | 882 | 1246-1268 | GCCCUGGCCA | 3597 |
| | aCcCaUcAc | | | GuGaUgGgUgGc | | | CCCAUCACCC | |
| | CcG*a*g | | | CaGg*g*c | | | GAG | |
| 881 | a*a*UuCaU | 2457 | 204-224 | (VPmA)*U*gGc | 883 | 202-224 | ACAAUUCAUC | 3598 |
| | cUuCcCuGc | | | GcAgGgAaGaUg | | | UUCCCUGCGC | |
| | GcC*a*u | | | AaUu*g*u | | | CAU | |
| 882 | c*c*CuGcG | 2458 | 214-234 | (VPmU)*A*aUa | 884 | 212-234 | UUCCCUGCGC | 3599 |
| | cCaUcUuUg | | | CaAaGaUgGcGc | | | CAUCUUUGUA | |
| | UaU*u*a | | | AgGg*a*a | | | UUA | |
| 883 | c*c*AcCcA | 2459 | 1253-1273 | (VPmA)*G*gCa | 885 | 1251-1273 | GGCCACCCAU | 3600 |
| | uCaCcCgAg | | | CuCgGgUgAuGg | | | CACCCGAGUG | |
| | UgC*c*u | | | GuGg*c*c | | | CCU | |
| 884 | u*g*GuUuC | 2460 | 931-951 | (VPmU)*G*cGu | 886 | 929-951 | CAUGGUUUCU | 3601 |
| | uCuUgCaAc | | | GuUgCaAgAgAa | | | CUUGCAACAC | |
| | AcG*c*a | | | AcCa*u*g | | | GCA | |
| 885 | g*g*CcUcC | 2461 | 2376-2396 | (VPmU)*C*uUu | 887 | 2374-2396 | GCGGCCUCCA | 3602 |
| | aGgCaGcUc | | | GaGcUgCcUgGa | | | GGCAGCUCAA | |
| | AaA*g*a | | | GgCc*g*c | | | AGA | |
| 886 | c*a*GcCaU | 2462 | 913-933 | (VPmU)*C*aUg | 888 | 911-933 | AACAGCCAUU | 3603 |
| | uCaCcAgUg | | | CaCuGgUgAaUg | | | CACCAGUGCA | |
| | CaU*g*g | | | GcUg*u*u | | | UGG | |
| 887 | g*u*CuCgC | 2463 | 387-407 | (VPmU)*U*gCc | 889 | 385-407 | AUGUCUCGCC | 3604 |
| | cGcAaGcAa | | | UuGcUuGcGgCg | | | GCAAGCAAGG | |
| | GgC*a*a | | | AgAc*a*u | | | CAA | |
| 888 | c*a*AaGgU | 2464 | 1402-1422 | (VPmG)*A*aUg | 890 | 1400-1422 | UGCAAAGGUU | 3605 |
| | uAcUgCaAc | | | GuUgCaGuAaCc | | | ACUGCAACCA | |
| | CaU*u*c | | | UuUg*c*a | | | UUC | |
| 889 | c*u*UuGaC | 2465 | 1272-1292 | (VPmA)*A*cCg | 891 | 1270-1292 | GCCUUUGACA | 3606 |
| | aGgGuGcUg | | | CaGcAcCcUgUc | | | GGGUGCUGCG | |
| | CgG*u*u | | | AaAg*g*c | | | GUU | |
| 890 | u*u*CaUcU | 2466 | 206-226 | (VPmA)*G*aUg | 892 | 204-226 | AAUUCAUCUU | 3607 |
| | uCcCuGcGc | | | GcGcAgGgAaGa | | | CCCUGCGCCA | |
| | CaU*c*u | | | UgAa*u*u | | | UCU | |
| 891 | g*g*UaUcC | 2467 | 1018-1038 | (VPmA)*C*cUa | 893 | 1016-1038 | UUGGUAUCCC | 3608 |
| | cUuCaGgAc | | | GuCcUgAaGgGa | | | UUCAGGACUA | |
| | UaG*g*u | | | UaCc*a*a | | | GGU | |
| 892 | g*c*UgUgC | 2468 | 2703-2723 | (VPmG)*C*aCa | 894 | 2701-2723 | GAGCUGUGCA | 3609 |
| | aAcUaUgCc | | | GgCaUaGuUgCa | | | ACUAUGCCUG | |
| | UgU*g*c | | | CaGc*u*c | | | UGC | |
| 893 | a*a*AgAuG | 2469 | 874-894 | (VPmG)*U*aGc | 895 | 872-894 | GUAAAGAUGA | 3610 |
| | aGcCcAgCa | | | UgCuGgGcUcAu | | | GCCCAGCAGC | |
| | GcU*a*c | | | CuUu*a*c | | | UAC | |
| 894 | g*a*GuGcC | 2470 | 1266-1286 | (VPmA)*G*cAc | 896 | 1264-1286 | CCGAGUGCCU | 3611 |
| | uUuGaCaGg | | | CcUgUcAaAgGc | | | UUGACAGGGU | |
| | GuG*c*u | | | AcUc*g*g | | | GCU | |
| 895 | a*g*AgGgC | 2471 | 2592-2612 | (VPmG)*U*gUc | 897 | 2590-2612 | AAAGAGGGCA | 3612 |
| | aGaCgCaGc | | | GcUgCgUcUgCc | | | GACGCAGCGA | |
| | GaC*a*c | | | CuCu*u*u | | | CAC | |
| 896 | a*u*CuUcC | 2472 | 209-229 | (VPmU)*A*aAg | 898 | 207-229 | UCAUCUUCCC | 3613 |
| | cUgCgCcAu | | | AuGgCgCaGgGa | | | UGCGCCAUCU | |
| | CuU*u*g | | | AgAu*g*a | | | UUG | |
| 897 | a*u*UcUuA | 2473 | 457-477 | (VPmU)*G*gUu | 899 | 455-477 | CCAUUCUUAC | 3614 |
| | cAgAuGaUg | | | CaUcAuCuGuAa | | | AGAUGAUGAA | |
| | AaC*c*a | | | GaAu*g*g | | | CCA | |
| 898 | c*c*UaUgC | 2474 | 1396-1416 | (VPmU)*U*gCa | 900 | 1394-1416 | GCCCUAUGCA | 3615 |
| | aAaGgUuAc | | | GuAaCcUuUgCa | | | AAGGUUACUG | |
| | UgC*a*a | | | UaGg*g*c | | | CAA | |
| 899 | g*u*CaAgU | 2475 | 1504-1524 | (VPmU)*U*cGc | 901 | 1502-1524 | CGGUCAAGUC | 3616 |
| | cCaAgUcAu | | | AuGaCuUgGaCu | | | CAAGUCAUGC | |
| | GcG*a*g | | | UgAc*c*g | | | GAG | |
| 900 | u*c*AcCcG | 2476 | 1260-1280 | (VPmU)*U*gUc | 902 | 1258-1280 | CAUCACCCGA | 3617 |
| | aGuGcCuUu | | | AaAgGcAcUcGg | | | GUGCCUUUGA | |
| | GaC*a*g | | | GuGa*u*g | | | CAG | |
| 901 | g*u*CcAcC | 2477 | 1184-1204 | (VPmA)*G*uGa | 903 | 1182-1204 | UAGUCCACCA | 3618 |
| | aCcGaGaCa | | | UgUcUcGgUgGu | | | CCGAGACAUC | |
| | UcA*c*u | | | GgAc*u*a | | | ACU | |
| 902 | c*g*UcAuC | 2478 | 728-748 | (VPmG)*G*cAa | 904 | 726-748 | AACGUCAUCU | 3619 |
| | uAgAgGaAu | | | AuUcCuCuAgAu | | | AGAGGAAUUU | |
| | UuG*c*c | | | GaCg*u*u | | | GCC | |
| 903 | g*u*GcAaC | 2479 | 2706-2726 | (VPmU)*G*gGc | 905 | 2704-2726 | CUGUGCAACU | 3620 |
| | uAuGcCuGu | | | AcAgGcAuAgUu | | | AUGCCUGUGC | |
| | GcC*c*a | | | GcAc*a*g | | | CCA | |
| 904 | g*g*CuCuC | 2480 | 193-213 | (VPmA)*A*gAu | 906 | 251-213 | ACGGCUCUCC | 3621 |
| | cCaCaAuUc | | | GaAuUgUgGgAg | | | CACAAUUCAU | |
| | AuC*u*u | | | AgCc*g*u | | | CUU | |
| 905 | u*a*AgCaA | 2481 | 419-439 | (VPmG)*C*gAg | 907 | 417-439 | CUUAAGCAAA | 3622 |
| | aCgGgAaUu | | | AaUuCcCgUuUg | | | CGGGAAUUCU | |
| | CuC*g*c | | | CuUa*a*g | | | CGC | |
| 906 | g*g*CcCuG | 2482 | 1245-1265 | (VPmG)*G*gUg | 908 | 1243-1265 | AUGGCCCUGG | 3623 |
| | gCcAcCcAu | | | AuGgGuGgCcAg | | | CCACCCAUCA | |
| | CaC*c*c | | | GgCc*a*u | | | CCC | |
| 907 | a*g*AaGcC | 2483 | 2668-2688 | (VPmU)*C*uUu | 909 | 2666-2688 | GGAGAAGCCA | 3624 |
| | aCaCgGgCg | | | CgCcCgUgUgGc | | | CACGGGCGAA | |
| | AaA*g*g | | | UuCu*c*c | | | AGG | |
| 908 | c*c*CgGcU | 2484 | 304-324 | (VPmG)*U*uCa | 910 | 302-324 | AACCCGGCUC | 3625 |
| | cUcCcGaUg | | | CaUcGgGaGaGc | | | UCCCGAUGUG | |
| | UgA*a*c | | | CgGg*u*u | | | AAC | |
| 909 | g*g*AgAaG | 2485 | 2666-2686 | (VPmU)*U*uCg | 911 | 2664-2686 | CAGGAGAAGC | 3626 |
| | cCaCaCgGg | | | CcCgUgUgGcUu | | | CACACGGGCG | |
| | CgA*a*a | | | CuCc*u*g | | | AAA | |
| 910 | u*g*CaAuG | 2486 | 595-615 | (VPmU)*A*aGc | 912 | 593-615 | AAUGCAAUGG | 3627 |
| | gCaGcCuCu | | | AgAgGcUgCcAu | | | CAGCCUCUGC | |
| | GcU*u*a | | | UgCa*u*u | | | UUA | |
| 911 | g*c*AcUcC | 2487 | 2451-2471 | (VPmU)*U*cCc | 913 | 2449-2471 | GAGCACUCCU | 3628 |
| | uCgGaGaAc | | | GuUcUcCgAgGa | | | CGGAGAACGG | |
| | GgG*a*g | | | GuGc*u*c | | | GAG | |
| 912 | u*u*GuUuA | 2488 | 717-737 | (VPmU)*U*aGa | 914 | 715-737 | GAUUGUUUAU | 3629 |
| | uCaAcGuCa | | | UgAcGuUgAuAa | | | CAACGUCAUC | |
| | UcU*a*g | | | AcAa*u*c | | | UAG | |
| 913 | c*a*GgGuG | 2489 | 1278-1298 | (VPmG)*G*aUu | 915 | 1276-1298 | GACAGGGUGC | 3630 |
| | cUgCgGuUg | | | CaAcCgCaGcAc | | | UGCGGUUGAA | |
| | AaU*c*c | | | CcUg*u*c | | | UCC | |
| 914 | u*a*UcGaG | 2490 | 573-593 | (VPmU)*G*uUu | 916 | 571-593 | UUUAUCGAGC | 3631 |
| | cAcAaAcGg | | | CcGuUuGuGcUc | | | ACAAACGGAA | |
| | AaA*c*a | | | GaUa*a*a | | | ACA | |
| 915 | c*u*CcCuC | 2491 | 1462-1482 | (VPmG)*G*cGg | 917 | 1460-1482 | CCCUCCCUCC | 3632 |
| | cUcUgCaAu | | | AuUgCaGaGgAg | | | UCUGCAAUCC | |
| | CcG*c*c | | | GgAg*g*g | | | GCC | |
| 916 | c*a*AgAaC | 2492 | 2637-2657 | (VPmG)*U*gAg | 918 | 2635-2657 | UUCAAGAACU | 3633 |
| | uGuAgCaAu | | | AuUgCuAcAgUu | | | GUAGCAAUCU | |
| | CuC*a*c | | | CuUg*a*a | | | CAC | |
| 917 | a*a*GuCcA | 2493 | 1507-1527 | (VPmG)*A*aCu | 919 | 1505-1527 | UCAAGUCCAA | 3634 |
| | aGuCaUgCg | | | CgCaUgAcUuGg | | | GUCAUGCGAG | |
| | AgU*u*c | | | AcUu*g*a | | | UUC | |
| 918 | g*u*AuCcC | 2494 | 1019-1039 | (VPmU)*A*cCu | 920 | 1017-1039 | UGGUAUCCCU | 3635 |
| | uUcAgGaCu | | | AgUcCuGaAgGg | | | UCAGGACUAG | |
| | AgG*u*g | | | AuAc*c*a | | | GUG | |
| 919 | u*c*CuUcU | 2495 | 291-311 | (VPmG)*A*gCc | 921 | 289-311 | UCUCCUUCUU | 3636 |
| | uUcUaAcCc | | | GgGuUaGaAaGa | | | UCUAACCCGG | |
| | GgC*u*c | | | AgGa*g*a | | | CUC | |
| 920 | c*c*AuGaC | 2496 | 186-206 | (VPmA)*U*uGu | 922 | 184-206 | AGCCAUGACG | 3637 |
| | gGcUcUcCc | | | GgGaGaGcCgUc | | | GCUCUCCCAC | |
| | AcA*a*u | | | AuGg*c*u | | | AAU | |
| 921 | u*u*UgAcA | 2497 | 1273-1293 | (VPmU)*A*aCc | 923 | 1271-1293 | CCUUUGACAG | 3638 |
| | gGgUgCuGc | | | GcAgCaCcCuGu | | | GGUGCUGCGG | |
| | GgU*u*g | | | CaAa*g*g | | | UUG | |
| 922 | g*c*GgGuU | 2498 | 1011-1031 | (VPmU)*C*uGa | 924 | 1009-1031 | CCGCGGGUUG | 3639 |
| | gGuAuCcCu | | | AgGgAuAcCaAc | | | GUAUCCCUUC | |
| | UcA*g*g | | | CcGc*g*g | | | AGG | |
| 923 | u*g*UgCaA | 2499 | 2705-2725 | (VPmG)*G*gCa | 925 | 2703-2725 | GCUGUGCAAC | 3640 |
| | cUaUgCcUg | | | CaGgCaUaGuUg | | | UAUGCCUGUG | |
| | UgC*c*c | | | CaCa*g*c | | | CCC | |
| 924 | g*u*GcUgC | 2500 | 1282-1302 | (VPmU)*A*uUg | 926 | 1280-1302 | GGGUGCUGCG | 3641 |
| | gGuUgAaUc | | | GaUuCaAcCgCa | | | GUUGAAUCCA | |
| | CaA*u*g | | | GcAc*c*c | | | AUG | |
| 925 | c*a*GcAcU | 2501 | 412-432 | (VPmU)*U*cCc | 927 | 410-432 | CCCAGCACUU | 3642 |
| | uAaGcAaAc | | | GuUuGcUuAaGu | | | AAGCAAACGG | |
| | GgG*a*a | | | GcUg*g*g | | | GAA | |
| 926 | u*u*GaAuC | 2502 | 1291-1311 | (VPmU)*U*cCa | 928 | 1289-1311 | GGUUGAAUCC | 3643 |
| | cAaUgGcUa | | | UaGcCaUuGgAu | | | AAUGGCUAUG | |
| | UgG*a*g | | | UcAa*c*c | | | GAG | |
| 927 | a*a*GaAcU | 2503 | 2638-2658 | (VPmA)*G*uGa | 929 | 2636-2658 | UCAAGAACUG | 3644 |
| | gUaGcAaUc | | | GaUuGcUaCaGu | | | UAGCAAUCUC | |
| | UcA*c*u | | | UcUu*g*a | | | ACU | |
| 928 | a*u*UcAcC | 2504 | 918-938 | (VPmA)*G*aAa | 930 | 916-938 | CCAUUCACCA | 3645 |
| | aGuGcAuGg | | | CcAuGcAcUgGu | | | GUGCAUGGUU | |
| | UuU*c*u | | | GaAu*g*g | | | UCU | |
| 929 | c*u*GgCaG | 2505 | 1144-1164 | (VPmU)*G*gAa | 931 | 1142-1164 | GCCUGGCAGA | 3646 |
| | aAgGgCgCu | | | AgCgCcCuUcUg | | | AGGGCGCUUU | |
| | UuC*c*a | | | CcAg*g*c | | | CCA | |
| 930 | g*g*AuGaG | 2506 | 839-859 | (VPmG)*G*gCa | 932 | 837-859 | UGGGAUGAGU | 3647 |
| | uGcAgAaUa | | | UaUuCuGcAcUc | | | GCAGAAUAUG | |
| | UgC*c*c | | | AuCc*c*a | | | CCC | |
| 931 | u*c*UcCuU | 2507 | 289-309 | (VPmG)*C*cGg | 933 | 287-309 | AGUCUCCUUC | 3648 |
| | CUuUcUaAc | | | GuUaGaAaGaAg | | | UUUCUAACCC | |
| | CcG*g*c | | | GaGa*c*u | | | GGC | |
| 932 | u*g*CuGcG | 2508 | 1283-1303 | (VPmU)*C*aUu | 934 | 1281-1303 | GGUGCUGCGG | 3649 |
| | gUuGaAuCc | | | GgAuUcAaCcGc | | | UUGAAUCCAA | |
| | AaU*g*g | | | AgCa*c*c | | | UGG | |
| 933 | g*g*AgUCU | 2509 | 285-305 | (VPmG)*G*uUa | 935 | 283-305 | CUGGAGUCUC | 3650 |
| | cCuUcUuUc | | | GaAaGaAgGaGa | | | CUUCUUUCUA | |
| | UaA*c*c | | | CuCc*a*g | | | ACC | |
| 934 | g*c*CcUgG | 2510 | 1246-1266 | (VPmU)*G*gGu | 936 | 1244-1266 | UGGCCCUGGC | 3651 |
| | cCaCcCaUc | | | GaUgGgUgGcCa | | | CACCCAUCAC | |
| | Acc*c*g | | | GgGc*c*a | | | CCG | |
| 935 | c*g*GcUcU | 2511 | 192-212 | (VPmA)*G*aUg | 937 | 190-212 | GACGGCUCUC | 3652 |
| | cCcAcAaUu | | | AaUuGuGgGaGa | | | CCACAAUUCA | |
| | CaU*c*u | | | GcCg*u*c | | | UCU | |
| 936 | g*a*GaAgC | 2512 | 2667-2687 | (VPmU)*U*uUc | 938 | 2665-2687 | AGGAGAAGCC | 3653 |
| | cAcAcGgGc | | | GcCcGuGuGgCu | | | ACACGGGCGA | |
| | GaA*a*g | | | UcUc*c*u | | | AAG | |
| 937 | g*u*UuAgU | 2513 | 1179-1199 | (VPmU)*G*uCu | 939 | 1177-1199 | CUGUUUAGUC | 3654 |
| | cCaCcAcCg | | | CgGuGgUgGaCu | | | CACCACCGAG | |
| | AgA*c*a | | | AaAc*a*g | | | ACA | |
| 938 | u*g*GcCcU | 2514 | 1244-1264 | (VPmG)*G*uGa | 940 | 1242-1264 | GAUGGCCCUG | 3655 |
| | gGcCaCcCa | | | UgGgUgGcCaGg | | | GCCACCCAUC | |
| | UcA*c*c | | | GcCa*u*c | | | ACC | |
| 939 | a*u*AaAcU | 2515 | 770-790 | (VPmU)*C*cUc | 941 | 768-790 | AGAUAAACUU | 3656 |
| | uCuGcAcUg | | | CaGuGcAgAaGu | | | CUGCACUGGA | |
| | GaG*g*g | | | UuAu*c*u | | | GGG | |
| 940 | c*u*AaCcC | 2516 | 300-320 | (VPmA)*C*aUc | 942 | 298-320 | UUCUAACCCG | 3657 |
| | gGcUcUcCc | | | GgGaGaGcCgGg | | | GCUCUCCCGA | |
| | GaU*g*u | | | UuAg*a*a | | | UGU | |
| 941 | g*a*AcAcU | 2517 | 954-974 | (VPmA)*U*uCu | 943 | 952-974 | CAGAACACUC | 3658 |
| | cAuGgAuUa | | | UaAuCcAuGaGu | | | AUGGAUUAAG | |
| | AgA*a*u | | | GuUc*u*g | | | AAU | |
| 942 | u*u*AuAaA | 2518 | 2691-2711 | (VPmU)*U*gCa | 944 | 2689-2711 | CCUUAUAAAU | 3659 |
| | uGcGaGcUg | | | CaGcUcGcAuUu | | | GCGAGCUGUG | |
| | UgC*a*a | | | AuAa*g*g | | | CAA | |
| 943 | a*u*UuCuC | 2519 | 1325-1345 | (VPmU)*U*cUa | 945 | 1323-1345 | GGAUUUCUCU | 3660 |
| | uAgGaGaCu | | | AgUcUcCuAgAg | | | AGGAGACUUA | |
| | UaG*a*g | | | AaAu*c*c | | | GAG | |
| 944 | u*u*CuUuC | 2520 | 294-314 | (VPmG)*G*aGa | 946 | 292-314 | CCUUCUUUCU | 3661 |
| | uAaCcCgGc | | | GcCgGgUuAgAa | | | AACCCGGCUC | |
| | UcU*c*c | | | AgAa*g*g | | | UCC | |
| 945 | u*u*GaCaG | 2521 | 1274-1294 | (VPmU)*C*aAc | 947 | 1272-1294 | CUUUGACAGG | 3662 |
| | gGuGcUgCg | | | CgCaGcAcCcUg | | | GUGCUGCGGU | |
| | GuU*g*a | | | UcAa*a*g | | | UGA | |
| 946 | a*g*CaCuC | 2522 | 2450-2470 | (VPmU)*C*cCg | 948 | 2448-2470 | GGAGCACUCC | 3663 |
| | cUcGgAgAa | | | UuCuCcGaGgAg | | | UCGGAGAACG | |
| | CgG*g*a | | | UgCu*c*c | | | GGA | |
| 947 | u*c*UcUuG | 2523 | 936-956 | (VPmU)*U*cUg | 949 | 934-956 | UUUCUCUUGC | 3664 |
| | cAaCaCgCa | | | UgCgUgUuGcAa | | | AACACGCACA | |
| | CaG*a*a | | | GaGa*a*a | | | GAA | |
| 948 | c*c*CuGgC | 2524 | 1247-1267 | (VPmU)*C*gGg | 950 | 1245-1267 | GGCCCUGGCC | 3665 |
| | CAcCcAuCa | | | UgAuGgGuGgCc | | | ACCCAUCACC | |
| | CcC*g*a | | | AgGg*c*c | | | CGA | |
| 949 | a*g*CaAaC | 2525 | 421-441 | (VPmG)*G*gCg | 951 | 419-441 | UAAGCAAACG | 3666 |
| | gGgAaUuCu | | | AgAaUuCcCgUu | | | GGAAUUCUCG | |
| | CgC*c*c | | | UgCu*u*a | | | CCC | |
| 950 | g*c*UgGcA | 2526 | 1347-1367 | (VPmU)*U*aGa | 952 | 1345-1367 | GAGCUGGCAG | 3667 |
| | gGgAaCaCg | | | CgUgUuCcCuGc | | | GGAACACGUC | |
| | UcU*a*g | | | CaGc*u*c | | | UAG | |
| 951 | g*a*GaCuC | 2527 | 2414-2434 | (VPmA)*A*gGc | 953 | 2412-2434 | CGGAGACUCC | 3668 |
| | cAgAcAaUc | | | GaUuGuCuGgAg | | | AGACAAUCGC | |
| | GcC*u*u | | | UcUc*c*g | | | CUU | |
| 952 | c*c*CuAuG | 2528 | 1395-1415 | (VPmU)*G*cAg | 954 | 1393-1415 | AGCCCUAUGC | 3669 |
| | cAaAgGuUa | | | UaAcCuUuGcAu | | | AAAGGUUACU | |
| | CuG*c*a | | | AgGg*c*u | | | GCA | |
| 953 | a*a*GaAuA | 2529 | 1107-1127 | (VPmG)*A*uAc | 955 | 1105-1127 | CUAAGAAUAC | 3670 |
| | cCaGgAuCa | | | UgAuCcUgGuAu | | | CAGGAUCAGU | |
| | GuA*u*c | | | UcUu*a*g | | | AUC | |
| 954 | u*c*AuCuU | 2530 | 207-227 | (VPmA)*A*gAu | 956 | 205-227 | AUUCAUCUUC | 3671 |
| | cCcUgCgCc | | | GgCgCaGgGaAg | | | CCUGCGCCAU | |
| | AuC*u*u | | | AuGa*a*u | | | CUU | |
| 955 | c*u*UcUuU | 2531 | 293-313 | (VPmG)*A*gAg | 957 | 291-313 | UCCUUCUUUC | 3672 |
| | cUaAcCcGg | | | CcGgGuUaGaAa | | | UAACCCGGCU | |
| | CuC*u*c | | | GaAg*g*a | | | CUC | |
| 956 | c*c*AcCaC | 2532 | 1186-1206 | (VPmU)*A*aGu | 958 | 1184-1206 | GUCCACCACC | 3673 |
| | cGaGaCaUc | | | GaUgUcUcGgUg | | | GAGACAUCAC | |
| | AcU*u*g | | | GuGg*a*c | | | UUG | |
| 957 | a*a*CcAuU | 2533 | 1415-1435 | (VPmU)*G*cUa | 959 | 1413-1435 | GCAACCAUUC | 3674 |
| | cCaGcCaGg | | | CcUgGcUgGaAu | | | CAGCCAGGUA | |
| | UaG*c*a | | | GgUu*g*c | | | GCA | |
| 958 | u*c*UuCcC | 2534 | 210-230 | (VPmA)*C*aAa | 960 | 208-230 | CAUCUUCCCU | 3675 |
| | uGcGcCaUc | | | GaUgGcGcAgGg | | | GCGCCAUCUU | |
| | UuU*g*u | | | AaGa*u*g | | | UGU | |
| 959 | c*u*GgCcA | 2535 | 1249-1269 | (VPmA)*C*uCg | 961 | 1247-1269 | CCCUGGCCAC | 3676 |
| | cCcAuCaCc | | | GgUgAuGgGuGg | | | CCAUCACCCG | |
| | CgA*g*u | | | CcAg*g*g | | | AGU | |
| 960 | g*a*GgGcA | 2536 | 2593-2613 | (VPmA)*G*uGu | 962 | 2591-2613 | AAGAGGGCAG | 3677 |
| | gAcGcAgCg | | | CgCuGcGuCuGc | | | ACGCAGCGAC | |
| | AcA*c*u | | | CcUc*u*u | | | ACU | |
| 961 | c*a*CaAuU | 2537 | 201-221 | (VPmG)*C*gCa | 963 | 199-221 | CCCACAAUUC | 3678 |
| | cAuCuUcCc | | | GgGaAgAuGaAu | | | AUCUUCCCUG | |
| | UgC*g*c | | | UgUg*g*g | | | CGC | |
| 962 | c*c*AuCaC | 2538 | 1257-1277 | (VPmU)*C*aAa | 964 | 1255-1277 | ACCCAUCACC | 3679 |
| | cCgAgUgCc | | | GgCaCuCgGgUg | | | CGAGUGCCUU | |
| | UuU*g*a | | | AuGg*g*u | | | UGA | |
| 963 | a*c*AcGcA | 2539 | 945-965 | (VPmU)*C*aUg | 965 | 943-965 | CAACACGCAC | 3680 |
| | cAgAaCaCu | | | AgUgUuCuGuGc | | | AGAACACUCA | |
| | CaU*g*g | | | GuGu*u*g | | | UGG | |
| 964 | g*a*AgCcA | 2540 | 2669-2689 | (VPmG)*C*cUu | 966 | 2667-2689 | GAGAAGCCAC | 3681 |
| | cAcGgGcGa | | | UcGcCcGuGuGg | | | ACGGGCGAAA | |
| | AaG*g*c | | | CuUc*u*c | | | GGC | |
| 965 | c*a*UcACC | 2541 | 1258-1278 | (VPmG)*U*cAa | 967 | 1256-1278 | CCCAUCACCC | 3682 |
| | cGaGuGcCu | | | AgGcAcUcGgGu | | | GAGUGCCUUU | |
| | UuG*a*c | | | GaUg*g*g | | | GAC | |
| 966 | u*c*AaGuU | 2542 | 28-48 | (VPmG)*U*gAc | 968 | 26-48 | GUUCAAGUUC | 3683 |
| | cGcAgGgAc | | | GuCcCuGcGaAc | | | GCAGGGACGU | |
| | GuC*a*c | | | UuGa*a*c | | | CAC | |
| 967 | u*c*UaAcC | 2543 | 299-319 | (VPmU)*A*uCg | 969 | 297-319 | UUUCUAACCC | 3684 |
| | cGgCuCuCc | | | GgAgAgCcGgGu | | | GGCUCUCCCG | |
| | CgA*u*g | | | UaGa*a*a | | | AUG | |
| 968 | g*g*GaAgU | 2544 | 2532-2552 | (VPmG)*G*cGu | 970 | 2530-2552 | ACGGGAAGUG | 3685 |
| | gGaGgGaGc | | | GcUcCcUcCaCu | | | GAGGGAGCAC | |
| | AcG*c*c | | | UcCc*g*u | | | GCC | |
| 969 | c*c*UgGcA | 2545 | 1143-1163 | (VPmG)*G*aAa | 971 | 1141-1163 | GGCCUGGCAG | 3686 |
| | gAaGgGcGc | | | GcGcCcUuCuGc | | | AAGGGCGCUU | |
| | UuU*c*c | | | CaGg*c*c | | | UCC | |
| 970 | c*u*CgCcG | 2546 | 389-409 | (VPmG)*U*uUg | 972 | 387-409 | GUCUCGCCGC | 3687 |
| | cAaGcAaGg | | | CcUuGcUuGcGg | | | AAGCAAGGCA | |
| | CaA*a*c | | | CgAg*a*c | | | AAC | |
| 971 | g*a*GcUgG | 2547 | 1345-1365 | (VPmA)*G*aCg | 973 | 1343-1365 | GAGAGCUGGC | 3688 |
| | cAgGgAaCa | | | UgUuCcCuGcCa | | | AGGGAACACG | |
| | CgU*c*u | | | GcUc*u*c | | | UCU | |
| 972 | a*c*CaGuG | 2548 | 922-942 | (VPmU)*A*aGa | 974 | 920-942 | UCACCAGUGC | 3689 |
| | cAuGgUuUc | | | GaAaCcAuGcAc | | | AUGGUUUCUC | |
| | UcU*u*g | | | UgGu*g*a | | | UUG | |
| 973 | g*c*AuCaA | 2549 | 2288-2308 | (VPmA)*C*uCc | 975 | 2286-2308 | GCGCAUCAAG | 3690 |
| | gCuCgAgAa | | | UuCuCgAgCuUg | | | CUCGAGAAGG | |
| | GgA*g*u | | | AuGc*g*c | | | AGU | |
| 974 | c*u*UcCuU | 2550 | 2400-2420 | (VPmG)*A*gUc | 976 | 2398-2420 | CCCUUCCUUA | 3691 |
| | aGcUuCgGa | | | UcCgAaGcUaAg | | | GCUUCGGAGA | |
| | GaC*u*c | | | GaAg*g*g | | | CUC | |
| 975 | g*a*GgAuG | 2551 | 706-726 | (VPmU)*G*aUa | 977 | 704-726 | CAGAGGAUGA | 3692 |
| | aCgAuUgUu | | | AaCaAuCgUcAu | | | CGAUUGUUUA | |
| | Uau*c*a | | | CcUc*u*g | | | UCA | |
| 976 | c*a*UcCaG | 2552 | 10-30 | (VPmU)*G*aAc | 978 | 8-30 | UCCAUCCAGA | 3693 |
| | aCuCcUgAc | | | GuCaGgAgUcUg | | | CUCCUGACGU | |
| | GuU*c*a | | | GaUg*g*a | | | UCA | |
| 977 | c*a*GgGaC | 2553 | 2127-2147 | (VPmU)*C*uUc | 979 | 2125-2147 | CACAGGGACA | 3694 |
| | aCuUgCgAc | | | GuCgCaAgUgUc | | | CUUGCGACGA | |
| | GaA*g*a | | | CcUg*u*g | | | AGA | |
| 978 | a*c*CaAaG | 2554 | 5939-5959 | (VPmU)*A*gGu | 980 | 5937-5959 | UGACCAAAGG | 3695 |
| | gUcAuUaCa | | | UgUaAuGaCcUu | | | UCAUUACAAC | |
| | AcC*u*g | | | UgGu*c*a | | | CUG | |
| 979 | c*g*UuCaA | 2555 | 1538-1558 | (VPmG)*G*uUg | 981 | 1536-1558 | GACGUUCAAA | 3696 |
| | aUuUcAgAg | | | CuCuGaAaUuUg | | | UUUCAGAGCA | |
| | CaA*c*c | | | AaCg*u*c | | | ACC | |
| 980 | c*u*CcAuG | 2556 | 1063-1083 | (VPmU)*G*cAa | 982 | 1061-1083 | CUCUCCAUGG | 3697 |
| | gGaUuCaUa | | | UaUgAaUcCcAu | | | GAUUCAUAUU | |
| | UuG*c*a | | | GgAg*a*g | | | GCA | |
| 981 | c*a*GcCcU | 2557 | 1392-1412 | (VPmA)*G*uAa | 983 | 1390-1412 | CCCAGCCCUA | 3698 |
| | aUgCaAaGg | | | CcUuUgCaUaGg | | | UGCAAAGGUU | |
| | UuA*c*u | | | GcUg*g*g | | | ACU | |
| 982 | c*a*CaGgG | 2558 | 2125-2145 | (VPmU)*U*cGu | 984 | 2123-2145 | GCCACAGGGA | 3699 |
| | aCaCuUgCg | | | CgCaAgUgUcCc | | | CACUUGCGAC | |
| | AcG*a*a | | | UgUg*g*c | | | GAA | |
| 983 | a*u*AcCaG | 2559 | 1111-1131 | (VPmU)*C*uCg | 985 | 1109-1131 | GAAUACCAGG | 3700 |
| | gAuCaGuAu | | | AuAcUgAuCcUg | | | AUCAGUAUCG | |
| | CgA*g*a | | | GuAu*u*c | | | AGA | |
| 984 | g*c*AuCcA | 2560 | 667-687 | (VPmA)*A*cCu | 986 | 665-687 | AAGCAUCCAA | 3701 |
| | aUcCcGuGg | | | CcAcGgGaUuGg | | | UCCCGUGGAG | |
| | AgG*u*u | | | AuGc*u*u | | | GUU | |
| 985 | g*c*CcAaC | 2561 | 2331-2351 | (VPmU)*A*cAc | 987 | 2329-2351 | AUGCCCAACA | 3702 |
| | aCgGaGaAc | | | GuUcUcCgUgUu | | | CGGAGAACGU | |
| | GuG*u*a | | | GgGc*a*u | | | GUA | |
| 986 | c*c*AgCcA | 2562 | 1053-1073 | (VPmA)*U*cCc | 988 | 1051-1073 | UCCCAGCCAC | 3703 |
| | cCuCuCcAu | | | AuGgAgAgGuGg | | | CUCUCCAUGG | |
| | GgG*a*u | | | CuGg*g*a | | | GAU | |
| 987 | a*g*UgAuC | 2563 | 2854-2874 | (VPmA)*U*uAu | 989 | 2852-2874 | ACAGUGAUCG | 3704 |
| | gAgUgUuGa | | | UcAaCaCuCgAu | | | AGUGUUGAAU | |
| | AuA*a*u | | | CaCu*g*u | | | AAU | |
| 988 | c*c*AcCuC | 2564 | 1057-1077 | (VPmA)*U*gAa | 990 | 1055-1077 | AGCCACCUCU | 3705 |
| | uCcAuGgGa | | | UcCcAuGgAgAg | | | CCAUGGGAUU | |
| | UuC*a*u | | | GuGg*c*u | | | CAU | |
| 989 | g*a*AuAcC | 2565 | 1109-1129 | (VPmU)*C*gAu | 991 | 1107-1129 | AAGAAUACCA | 3706 |
| | aGgAuCaGu | | | AcUgAuCcUgGu | | | GGAUCAGUAU | |
| | AuC*g*a | | | AuUc*u*u | | | CGA | |
| 990 | c*a*CaGuG | 2566 | 2851-2871 | (VPmA)*U*uCa | 992 | 2849-2871 | GGCACAGUGA | 3707 |
| | aUcGaGuGu | | | AcAcUcGaUcAc | | | UCGAGUGUUG | |
| | UgA*a*u | | | UgUg*c*c | | | AAU | |
| 991 | c*g*GcCcA | 2567 | 1387-1407 | (VPmU)*C*uUu | 993 | 1385-1407 | GCCGGCCCAG | 3708 |
| | gCcCuAuGc | | | GcAuAgGgCuGg | | | CCCUAUGCAA | |
| | AaA*g*g | | | GcCg*g*c | | | AGG | |
| 992 | g*g*CaCaG | 2568 | 2849-2869 | (VPmU)*C*aAc | 994 | 2847-2869 | AUGGCACAGU | 3709 |
| | uGaUcGaGu | | | AcUcGaUcAcUg | | | GAUCGAGUGU | |
| | GuU*g*a | | | UgCc*a*u | | | UGA | |
| 993 | c*c*UgGgC | 2569 | 2079-2099 | (VPmU)*G*cUu | 995 | 2077-2099 | GUCCUGGGCG | 3710 |
| | gAgAaGcAu | | | AuGcUuCuCgCc | | | AGAAGCAUAA | |
| | AaG*c*g | | | CaGg*a*c | | | GCG | |
| 994 | u*c*CuGaC | 2570 | 19-39 | (VPmU)*U*gCg | 996 | 17-39 | ACUCCUGACG | 3711 |
| | gUuCaAgUu | | | AaCuUgAaCgUc | | | UUCAAGUUCG | |
| | CgC*a*g | | | AgGa*g*u | | | CAG | |
| 995 | g*a*UcGaG | 2571 | 2857-2877 | (VPmA)*U*cAu | 997 | 2855-2877 | GUGAUCGAGU | 3712 |
| | uGuUgAaUa | | | UaUuCaAcAcUc | | | GUUGAAUAAU | |
| | AuG*a*u | | | GaUc*a*c | | | GAU | |
| 996 | a*c*GcCaG | 2572 | 700-720 | (VPmA)*C*aAu | 998 | 698-720 | UCACGCCAGA | 3713 |
| | aGgAuGaCg | | | CgUcAuCcUcUg | | | GGAUGACGAU | |
| | AuU*g*u | | | GcGu*g*a | | | UGU | |
| 997 | a*u*UcAuA | 2573 | 1072-1092 | (VPmG)*U*uAu | 999 | 1070-1092 | GGAUUCAUAU | 3714 |
| | uUgCaGaCa | | | UgUcUgCaAuAu | | | UGCAGACAAU | |
| | AuA*a*c | | | GaAu*c*c | | | AAC | |
| 998 | g*g*UuGgC | 2574 | 684-704 | (VPmG)*G*cGu | 1000 | 682-704 | GAGGUUGGCA | 3715 |
| | aUcCaGgUc | | | GaCcUgGaUgCc | | | UCCAGGUCAC | |
| | AcG*c*c | | | AaCc*u*c | | | GCC | |
| 999 | g*u*GgCcA | 2575 | 1783-1803 | (VPmU)*U*cGc | 1001 | 1781-1803 | UGGUGGCCAA | 3716 |
| | aGuUcAaGa | | | UcUuGaAcUuGg | | | GUUCAAGAGC | |
| | GcG*a*g | | | CcAc*c*a | | | GAG | |
| 1000 | a*u*GgCaC | 2576 | 2847-2867 | (VPmA)*A*cAc | 1002 | 2845-2867 | AAAUGGCACA | 3717 |
| | aGuGaUcGa | | | UcGaUcAcUgUg | | | GUGAUCGAGU | |
| | GuG*u*u | | | CcAu*u*u | | | GUU | |
| 1001 | u*a*CaAgU | 2577 | 1597-1617 | (VPmG)*U*cGc | 1003 | 1595-1617 | CCUACAAGUG | 3718 |
| | gCaAcCuGu | | | AcAgGuUgCaCu | | | CAACCUGUGC | |
| | GcG*a*c | | | UgUa*g*g | | | GAC | |
| 1002 | a*g*AuCcC | 2578 | 2394-2414 | (VPmU)*C*gAa | 1004 | 2392-2414 | AAAGAUCCCU | 3719 |
| | uUcCuUaGc | | | GcUaAgGaAgGg | | | UCCUUAGCUU | |
| | UuC*g*g | | | AuCu*u*u | | | CGG | |
| 1003 | c*a*UcAaG | 2579 | 2289-2309 | (VPmA)*A*cUc | 1005 | 2287-2309 | CGCAUCAAGC | 3720 |
| | CUcGaGaAg | | | CuUcUcGaGcUu | | | UCGAGAAGGA | |
| | GaG*u*u | | | GaUg*c*g | | | GUU | |
| 1004 | u*c*CaGaC | 2580 | 12-32 | (VPmU)*U*uGa | 1006 | 10-32 | CAUCCAGACU | 3721 |
| | uCcUgAcGu | | | AcGuCaGgAgUc | | | CCUGACGUUC | |
| | UcA*a*g | | | UgGa*u*g | | | AAG | |
| 1005 | g*a*GcUgG | 2581 | 2497-2517 | (VPmU)*G*aGa | 1007 | 2495-2517 | GGGAGCUGGA | 3722 |
| | aCgGaGgGa | | | UcCcUcCgUcCa | | | CGGAGGGAUC | |
| | UcU*c*g | | | GcUc*c*c | | | UCG | |
| 1006 | a*c*AgGgA | 2582 | 2126-2146 | (VPmU)*U*uCg | 1008 | 2124-2146 | CCACAGGGAC | 3723 |
| | cAcUuGcGa | | | UcGcAaGuGuCc | | | ACUUGCGACG | |
| | CgA*a*g | | | CuGu*g*g | | | AAG | |
| 1007 | c*c*UuCcU | 2583 | 2399-2419 | (VPmA)*G*uCu | 1009 | 2397-2419 | UCCCUUCCUU | 3724 |
| | uAgCuUcGg | | | CcGaAgCuAaGg | | | AGCUUCGGAG | |
| | AgA*c*u | | | AaGg*g*a | | | ACU | |
| 1008 | a*g*GuCcU | 2584 | 2075-2095 | (VPmU)*A*uGc | 1010 | 2073-2095 | CCAGGUCCUG | 3725 |
| | gGgCgAgAa | | | UuCuCgCcCaGg | | | GGCGAGAAGC | |
| | GcA*u*a | | | AcCu*g*g | | | AUA | |
| 1009 | a*u*UuCaG | 2585 | 1545-1565 | (VPmA)*C*cAc | 1011 | 1543-1565 | AAAUUUCAGA | 3726 |
| | aGcAaCcUg | | | CaGgUuGcUcUg | | | GCAACCUGGU | |
| | GuG*g*u | | | AaAu*u*u | | | GGU | |
| 1010 | a*g*AgGaU | 2586 | 705-725 | (VPmG)*A*uAa | 1012 | 703-725 | CCAGAGGAUG | 3727 |
| | gAcGaUuGu | | | AcAaUcGuCaUc | | | ACGAUUGUUU | |
| | UuA*u*c | | | CuCu*g*g | | | AUC | |
| 1011 | u*g*GuGgC | 2587 | 1781-1801 | (VPmU)*G*cUc | 1013 | 1779-1801 | CGUGGUGGCC | 3728 |
| | cAaGuUcAa | | | UuGaAcUuGgCc | | | AAGUUCAAGA | |
| | GaG*c*g | | | AcCa*c*g | | | GCG | |
| 1012 | g*c*CgGcC | 2588 | 1385-1405 | (VPmU)*U*uGc | 1014 | 1383-1405 | AGGCCGGCCC | 3729 |
| | cAgCcCuAu | | | AuAgGgCuGgGc | | | AGCCCUAUGC | |
| | GcA*a*a | | | CgGc*c*u | | | AAA | |
| 1013 | u*c*AuAuU | 2589 | 1074-1094 | (VPmG)*G*gUu | 1015 | 1072-1094 | AUUCAUAUUG | 3730 |
| | gCaGaCaAu | | | AuUgUcUgCaAu | | | CAGACAAUAA | |
| | AaC*c*c | | | AuGa*a*u | | | CCC | |
| 1014 | a*g*CcAcC | 2590 | 1055-1075 | (VPmG)*A*aUc | 1016 | 1053-1075 | CCAGCCACCU | 3731 |
| | uCuCcAuGg | | | CcAuGgAgAgGu | | | CUCCAUGGGA | |
| | GaU*u*c | | | GgCu*g*g | | | UUC | |
| 1015 | u*c*UaAgC | 2591 | 2281-2301 | (VPmU)*U*cGa | 1017 | 2279-2301 | UCUCUAAGCG | 3732 |
| | gCaUcAaGc | | | GcUuGaUgCgCu | | | CAUCAAGCUC | |
| | UcG*a*g | | | UaGa*g*a | | | GAG | |
| 1016 | a*g*GgAaC | 2592 | 1353-1373 | (VPmG)*G*uGg | 1018 | 1351-1373 | GCAGGGAACA | 3733 |
| | aCgUcUaGc | | | GcUaGaCgUgUu | | | CGUCUAGCCC | |
| | CcA*c*c | | | CcCu*g*c | | | ACC | |
| 1017 | c*c*UcUcC | 2593 | 1060-1080 | (VPmA)*A*uAu | 1019 | 1058-1080 | CACCUCUCCA | 3734 |
| | aUgGgAuUc | | | GaAuCcCaUgGa | | | UGGGAUUCAU | |
| | AuA*u*u | | | GaGg*u*g | | | AUU | |
| 1018 | c*a*CcUcU | 2594 | 1058-1078 | (VPmU)*A*uGa | 1020 | 1056-1078 | GCCACCUCUC | 3735 |
| | cCaUgGgAu | | | AuCcCaUgGaGa | | | CAUGGGAUUC | |
| | UcA*u*a | | | GgUg*g*c | | | AUA | |
| 1019 | g*g*AuUcA | 2595 | 1070-1090 | (VPmU)*A*uUg | 1021 | 1068-1090 | UGGGAUUCAU | 3736 |
| | uAuUgCaGa | | | UcUgCaAuAuGa | | | AUUGCAGACA | |
| | CaA*u*a | | | AuCc*c*a | | | AUA | |
| 1020 | u*g*UgGgC | 2596 | 526-546 | (VPmG)*U*uCa | 1022 | 524-546 | CCUGUGGGCA | 3737 |
| | aGuGcCaGa | | | UcUgGcAcUgCc | | | GUGCCAGAUG | |
| | UgA*a*c | | | CaCa*g*g | | | AAC | |
| 1021 | g*c*CaCcU | 2597 | 1056-1076 | (VPmU)*G*aAu | 1023 | 1054-1076 | CAGCCACCUC | 3738 |
| | cUcCaUgGg | | | CcCaUgGaGaGg | | | UCCAUGGGAU | |
| | AuU*c*a | | | UgGc*u*g | | | UCA | |
| 1022 | c*c*AaCaC | 2598 | 2333-2353 | (VPmA)*G*uAc | 1024 | 2331-2353 | GCCCAACACG | 3739 |
| | gGaGaAcGu | | | AcGuUcUcCgUg | | | GAGAACGUGU | |
| | GuA*c*u | | | UuGg*g*c | | | ACU | |
| 1023 | a*a*UaCcA | 2599 | 1110-1130 | (VPmU)*U*cGa | 1025 | 1108-1130 | AGAAUACCAG | 3740 |
| | gGaUcAgUa | | | UaCuGaUcCuGg | | | GAUCAGUAUC | |
| | UcG*a*g | | | UaUu*c*u | | | GAG | |
| 1024 | c*c*UcCuC | 2600 | 516-536 | (VPmU)*A*cUg | 1026 | 514-536 | GACCUCCUCA | 3741 |
| | aCcUgUgGg | | | CcCaCaGgUgAg | | | CCUGUGGGCA | |
| | CaG*u*g | | | GaGg*u*c | | | GUG | |
| 1025 | c*u*UcUcU | 2601 | 2277-2297 | (VPmA)*G*cUu | 1027 | 2275-2297 | CCCUUCUCUA | 3742 |
| | aAgCgCaUc | | | GaUgCgCuUaGa | | | AGCGCAUCAA | |
| | AaG*c*u | | | GaAg*g*g | | | GCU | |
| 1026 | g*c*AgUgC | 2602 | 531-551 | (VPmG)*G*gAa | 1028 | 529-551 | GGGCAGUGCC | 3743 |
| | cAgAuGaAc | | | GuUcAuCuGgCa | | | AGAUGAACUU | |
| | UuC*c*c | | | CuGc*c*c | | | CCC | |
| 1027 | u*u*CaUaU | 2603 | 1073-1093 | (VPmG)*G*uUa | 1029 | 1071-1093 | GAUUCAUAUU | 3744 |
| | uGcAgAcAa | | | UuGuCuGcAaUa | | | GCAGACAAUA | |
| | UaA*c*c | | | UgAa*u*c | | | ACC | |
| 1028 | g*a*AgAcG | 2604 | 1656-1676 | (VPmG)*A*uUu | 1030 | 1654-1676 | AUGAAGACGC | 3745 |
| | cAcAuGcAc | | | GuGcAuGuGcGu | | | ACAUGCACAA | |
| | AaA*u*c | | | CuUc*a*u | | | AUC | |
| 1029 | u*g*GcAgG | 2605 | 1349-1369 | (VPmG)*G*cUa | 1031 | 1347-1369 | GCUGGCAGGG | 3746 |
| | gAaCaCgUc | | | GaCgUgUuCcCu | | | AACACGUCUA | |
| | UaG*c*c | | | GcCa*g*c | | | GCC | |
| 1030 | c*u*AuGgA | 2606 | 1304-1324 | (VPmU)*C*aUg | 1032 | 1302-1324 | GGCUAUGGAG | 3747 |
| | gCcUcCcGc | | | GcGgGaGgCuCc | | | CCUCCCGCCA | |
| | CaU*g*g | | | AuAg*c*c | | | UGG | |
| 1031 | c*a*CgCcA | 2607 | 699-719 | (VPmU)*A*aUc | 1033 | 697-719 | GUCACGCCAG | 3748 |
| | gAgGaUgAc | | | GuCaUcCuCuGg | | | AGGAUGACGA | |
| | GaU*u*g | | | CgUg*a*c | | | UUG | |
| 1032 | c*c*AgCcC | 2608 | 1391-1411 | (VPmG)*U*aAc | 1034 | 1389-1411 | GCCCAGCCCU | 3749 |
| | uAuGcAaAg | | | CuUuGcAuAgGg | | | AUGCAAAGGU | |
| | GuU*a*c | | | CuGg*g*c | | | UAC | |
| 1033 | c*c*AgAcC | 2609 | 475-495 | (VPmU)*C*cCa | 1035 | 473-495 | AACCAGACCA | 3750 |
| | aCgGcCcGu | | | AcGgGcCgUgGu | | | CGGCCCGUUG | |
| | UgG*g*a | | | CuGg*u*u | | | GGA | |
| 1034 | c*u*CuAaG | 2610 | 2280-2300 | (VPmU)*C*gAg | 1036 | 2278-2300 | UUCUCUAAGC | 3751 |
| | cGcAuCaAg | | | CuUgAuGcGcUu | | | GCAUCAAGCU | |
| | CuC*g*a | | | AgAg*a*a | | | CGA | |
| 1035 | g*g*AcAcU | 2611 | 2130-2150 | (VPmG)*A*gUc | 1037 | 2128-2150 | AGGGACACUU | 3752 |
| | uGcGaCgAa | | | UuCgUcGcAaGu | | | GCGACGAAGA | |
| | GaC*u*c | | | GuCc*c*u | | | CUC | |
| 1036 | g*c*CaCaG | 2612 | 2123-2143 | (VPmU)*G*uCg | 1038 | 2121-2143 | GGGCCACAGG | 3753 |
| | gGaCaCuUg | | | CaAgUgUcCcUg | | | GACACUUGCG | |
| | CgA*c*g | | | UgGc*c*c | | | ACG | |
| 1037 | u*c*CcGuG | 2613 | 675-695 | (VPmU)*G*gAu | 1039 | 673-695 | AAUCCCGUGG | 3754 |
| | gAgGuUgGc | | | GcCaAcCuCcAc | | | AGGUUGGCAU | |
| | AuC*c*a | | | GgGa*u*u | | | CCA | |
| 1038 | c*u*GgGcG | 2614 | 2080-2100 | (VPmG)*C*gCu | 1040 | 2078-2100 | UCCUGGGCGA | 3755 |
| | aGaAgCaUa | | | UaUgCuUcUcGc | | | GAAGCAUAAG | |
| | AgC*g*c | | | CcAg*g*a | | | CGC | |
| 1039 | c*a*AcAcG | 2615 | 2334-2354 | (VPmG)*A*gUa | 1041 | 2332-2354 | CCCAACACGG | 3756 |
| | gAgAaCgUg | | | CaCgUuCuCcGu | | | AGAACGUGUA | |
| | UaC*u*c | | | GuUg*g*g | | | CUC | |
| 1040 | a*c*CaCgG | 2616 | 479-499 | (VPmG)*A*gCu | 1042 | 477-499 | AGACCACGGC | 3757 |
| | cCcGuUgGg | | | CcCaAcGgGcCg | | | CCGUUGGGAG | |
| | AgC*u*c | | | UgGu*c*u | | | CUC | |
| 1041 | u*c*CaGgU | 2617 | 692-712 | (VPmU)*A*uCc | 1043 | 690-712 | CAUCCAGGUC | 3758 |
| | CAcGcCaGa | | | UcUgGcGuGaCc | | | ACGCCAGAGG | |
| | GgA*u*g | | | UgGa*u*g | | | AUG | |
| 1042 | u*a*GaUgA | 2618 | 5933-5953 | (VPmG)*U*aAu | 1044 | 5931-5953 | UUUAGAUGAC | 3759 |
| | cCaAaGgUc | | | GaCcUuUgGuCa | | | CAAAGGUCAU | |
| | AuU*a*c | | | UcUa*a*a | | | UAC | |
| 1043 | g*a*AgCaU | 2619 | 2088-2108 | (VPmA)*G*gUg | 1045 | 2086-2108 | GAGAAGCAUA | 3760 |
| | aAgCgCgGc | | | GcCgCgCuUaUg | | | AGCGCGGCCA | |
| | CaC*c*u | | | CuUc*u*c | | | CCU | |
| 1044 | a*a*GuGcA | 2620 | 1600-1620 | (VPmG)*U*gGu | 1046 | 1598-1620 | ACAAGUGCAA | 3761 |
| | aCcUgUgCg | | | CgCaCaGgUuGc | | | CCUGUGCGAC | |
| | AcC*a*c | | | AcUu*g*u | | | CAC | |
| 1045 | a*g*UgCaA | 2621 | 1601-1621 | (VPmU)*G*uGg | 1047 | 1599-1621 | CAAGUGCAAC | 3762 |
| | cCuGuGcGa | | | UcGcAcAgGuUg | | | CUGUGCGACC | |
| | CcA*c*g | | | CaCu*u*g | | | ACG | |
| 1046 | c*c*UgCcC | 2622 | 2010-2030 | (VPmU)*C*cUg | 1048 | 2008-2030 | GCCCUGCCCG | 3763 |
| | gAcGuCaUg | | | CaUgAcGuCgGg | | | ACGUCAUGCA | |
| | CaG*g*g | | | CaGg*g*c | | | GGG | |
| 1047 | c*u*CcUgA | 2623 | 18-38 | (VPmU)*G*cGa | 1049 | 16-38 | GACUCCUGAC | 3764 |
| | cGuUcAaGu | | | AcUuGaAcGuCa | | | GUUCAAGUUC | |
| | UcG*c*a | | | GgAg*u*c | | | GCA | |
| 1048 | g*u*GcAaC | 2624 | 1602-1622 | (VPmG)*C*gUg | 1050 | 1600-1622 | AAGUGCAACC | 3765 |
| | cUgUgCgAc | | | GuCgCaCaGgUu | | | UGUGCGACCA | |
| | CaC*g*c | | | GcAc*u*u | | | CGC | |
| 1049 | g*g*UcCuG | 2625 | 2076-2096 | (VPmU)*U*aUg | 1051 | 2074-2096 | CAGGUCCUGG | 3766 |
| | gGcGaGaAg | | | CuUcUcGcCcAg | | | GCGAGAAGCA | |
| | CaU*a*a | | | GaCc*u*g | | | UAA | |
| 1050 | g*g*CcAcA | 2626 | 2122-2142 | (VPmG)*U*cGc | 1052 | 2120-2142 | AGGGCCACAG | 3767 |
| | gGgAcAcUu | | | AaGuGuCcCuGu | | | GGACACUUGC | |
| | GcG*a*c | | | GgCc*c*u | | | GAC | |
| 1051 | a*g*AaUaC | 2627 | 1108-1128 | (VPmU)*G*aUa | 1053 | 1106-1128 | UAAGAAUACC | 3768 |
| | cAgGaUcAg | | | CuGaUcCuGgUa | | | AGGAUCAGUA | |
| | UaU*c*g | | | UuCu*u*a | | | UCG | |
| 1052 | g*a*AcCaG | 2628 | 472-492 | (VPmU)*A*aCg | 1054 | 470-492 | AUGAACCAGA | 3769 |
| | aCcAcGgCc | | | GgCcGuGgUcUg | | | CCACGGCCCG | |
| | CgU*u*g | | | GuUc*a*u | | | UUG | |
| 1053 | g*g*AgCcU | 2629 | 1308-1328 | (VPmA)*A*aUc | 1055 | 1306-1328 | AUGGAGCCUC | 3770 |
| | cCcGcCaUg | | | CaUgGcGgGaGg | | | CCGCCAUGGA | |
| | GaU*u*u | | | CuCc*a*u | | | UUU | |
| 1054 | u*g*AaCcA | 2630 | 471-491 | (VPmA)*A*cGg | 1056 | 469-491 | GAUGAACCAG | 3552 |
| | gAcCaCgGc | | | GcCgUgGuCuGg | | | ACCACGGCCC | |
| | CcG*u*u | | | UuCa*u*c | | | GUU | |
| 1055 | a*g*CcAgG | 2631 | 1424-1444 | (VPmA)*G*gGc | 1057 | 1422-1444 | CCAGCCAGGU | 3771 |
| | uAgCaAgCc | | | GgCuUgCuAcCu | | | AGCAAGCCGC | |
| | GcC*c*u | | | GgCu*g*g | | | CCU | |
| 1056 | a*g*AcUcC | 2632 | 15-35 | (VPmG)*A*aCu | 1058 | 13-35 | CCAGACUCCU | 3772 |
| | uGaCgUuCa | | | UgAaCgUcAgGa | | | GACGUUCAAG | |
| | AgU*u*c | | | GuCu*g*g | | | UUC | |
| 1057 | u*c*AcGcC | 2633 | 698-718 | (VPmA)*A*uCg | 1059 | 696-718 | GGUCACGCCA | 3773 |
| | aGaGgAuGa | | | UcAuCcUcUgGc | | | GAGGAUGACG | |
| | CgA*u*u | | | GuGa*c*c | | | AUU | |
| 1058 | g*u*CaCgC | 2634 | 697-717 | (VPmA)*U*cGu | 1060 | 695-717 | AGGUCACGCC | 3774 |
| | cAgAgGaUg | | | CaUcCuCuGgCg | | | AGAGGAUGAC | |
| | AcG*a*u | | | UgAc*c*u | | | GAU | |
| 1059 | u*c*CaAuC | 2635 | 670-690 | (VPmG)*C*cAa | 1061 | 668-690 | CAUCCAAUCC | 3775 |
| | cCgUgGaGg | | | CcUcCaCgGgAu | | | CGUGGAGGUU | |
| | UuG*g*c | | | UgGa*u*g | | | GGC | |
| 1060 | c*a*GaCcA | 2636 | 476-496 | (VPmU)*U*cCc | 1062 | 474-496 | ACCAGACCAC | 3776 |
| | cGgCcCgUu | | | AaCgGgCcGuGg | | | GGCCCGUUGG | |
| | GgG*a*g | | | UcUg*g*u | | | GAG | |
| 1061 | g*c*CaAgU | 2637 | 1786-1806 | (VPmG)*U*uCu | 1063 | 1784-1806 | UGGCCAAGUU | 3556 |
| | uCaAgAgCg | | | CgCuCuUgAaCu | | | CAAGAGCGAG | |
| | AgA*a*c | | | UgGc*c*a | | | AAC | |
| 1062 | a*g*AuGaC | 2638 | 5934-5954 | (VPmU)*G*uAa | 1064 | 5932-5954 | UUAGAUGACC | 3778 |
| | cAaAgGuCa | | | UgAcCuUuGgUc | | | AAAGGUCAUU | |
| | UuA*c*a | | | AuCu*a*a | | | ACA | |
| 1063 | u*c*CcUuC | 2639 | 2397-2417 | (VPmU)*C*uCc | 1065 | 2395-2417 | GAUCCCUUCC | 3779 |
| | CUuAgCuUc | | | GaAgCuAaGgAa | | | UUAGCUUCGG | |
| | GgA*g*a | | | GgGa*u*c | | | AGA | |
| 1064 | a*c*AcGuC | 2640 | 1358-1378 | (VPmA)*C*aGc | 1066 | 1356-1378 | GAACACGUCU | 3780 |
| | uAgCcCaCc | | | GgUgGgCuAgAc | | | AGCCCACCGC | |
| | GcU*g*u | | | GuGu*u*c | | | UGU | |
| 1065 | g*u*GgUgG | 2641 | 1780-1800 | (VPmG)*C*uCu | 1067 | 1778-1800 | CCGUGGUGGC | 3551 |
| | cCaAgUuCa | | | UgAaCuUgGcCa | | | CAAGUUCAAG | |
| | AgA*g*c | | | CcAc*g*g | | | AGC | |
| 1066 | c*c*CuUcC | 2642 | 2398-2418 | (VPmG)*U*cUc | 1068 | 2396-2418 | AUCCCUUCCU | 3781 |
| | uUaGcUuCg | | | CgAaGcUaAgGa | | | UAGCUUCGGA | |
| | GaG*a*c | | | AgGg*a*u | | | GAC | |
| 1067 | u*g*CcCaA | 2643 | 2330-2350 | (VPmA)*C*aCg | 1069 | 2328-2350 | GAUGCCCAAC | 3782 |
| | cAcGgAgAa | | | UuCuCcGuGuUg | | | ACGGAGAACG | |
| | CgU*g*u | | | GgCa*u*c | | | UGU | |
| 1068 | g*u*AuCgA | 2644 | 1123-1143 | (VPmG)*C*cGg | 1070 | 1121-1143 | CAGUAUCGAG | 3783 |
| | gAgAgGcUu | | | AaGcCuCuCuCg | | | AGAGGCUUCC | |
| | CcG*g*c | | | AuAc*u*g | | | GGC | |
| 1069 | c*g*UcUaG | 2645 | 1361-1381 | (VPmG)*G*gAc | 1071 | 1359-1381 | CACGUCUAGC | 3784 |
| | cCcAcCgCu | | | AgCgGuGgGcUa | | | CCACCGCUGU | |
| | GuC*c*c | | | GaCg*u*g | | | CCC | |
| 1070 | a*g*GuUgG | 2646 | 683-703 | (VPmG)*C*gUg | 1072 | 681-703 | GGAGGUUGGC | 3785 |
| | CAuCcAgGu | | | AcCuGgAuGcCa | | | AUCCAGGUCA | |
| | CaC*g*c | | | AcCu*c*c | | | CGC | |
| 1071 | u*a*UgGaG | 2647 | 1305-1325 | (VPmU)*C*cAu | 1073 | 1303-1325 | GCUAUGGAGC | 3786 |
| | cCuCcCgCc | | | GgCgGgAgGcUc | | | CUCCCGCCAU | |
| | AuG*g*a | | | CaUa*g*c | | | GGA | |
| 1072 | a*a*UcCcG | 2648 | 673-693 | (VPmG)*A*uGc | 1074 | 671-693 | CCAAUCCCGU | 3787 |
| | uGgAgGuUg | | | CaAcCuCcAcGg | | | GGAGGUUGGC | |
| | GcA*u*c | | | GaUu*g*g | | | AUC | |
| 1073 | u*u*GgCaU | 2649 | 686-706 | (VPmU)*U*gGc | 1075 | 684-706 | GGUUGGCAUC | 3788 |
| | cCaGgUcAc | | | GuGaCcUgGaUg | | | CAGGUCACGC | |
| | GcC*a*g | | | CcAa*c*c | | | CAG | |
| 1074 | c*u*UaGcU | 2650 | 2404-2424 | (VPmU)*C*uGg | 1076 | 2402-2424 | UCCUUAGCUU | 3789 |
| | uCgGaGaCu | | | AgUcUcCgAaGc | | | CGGAGACUCC | |
| | CcA*g*a | | | UaAg*g*a | | | AGA | |
| 1075 | c*a*CgUcU | 2651 | 1359-1379 | (VPmG)*A*cAg | 1077 | 1357-1379 | AACACGUCUA | 3790 |
| | aGcCcAcCg | | | CgGuGgGcUaGa | | | GCCCACCGCU | |
| | CuG*u*c | | | CgUg*u*u | | | GUC | |
| 1076 | a*a*CcAgA | 2652 | 473-493 | (VPmU)*C*aAc | 1078 | 471-493 | UGAACCAGAC | 3791 |
| | cCaCgGcCc | | | GgGcCgUgGuCu | | | CACGGCCCGU | |
| | GuU*g*g | | | GgUu*c*a | | | UGG | |
| 1077 | a*a*CaCgU | 2653 | 1357-1377 | (VPmU)*A*gCg | 1079 | 1355-1377 | GGAACACGUC | 3792 |
| | cUaGcCcAc | | | GuGgGcUaGaCg | | | UAGCCCACCG | |
| | CgC*u*g | | | UgUu*c*c | | | CUG | |
| 1078 | g*u*CcAuC | 2654 | 7-27 | (VPmA)*C*gUc | 1080 | 5-27 | CUGUCCAUCC | 3793 |
| | cAgAcUcCu | | | AgGaGuCuGgAu | | | AGACUCCUGA | |
| | GaC*g*u | | | GgAc*a*g | | | CGU | |
| 1079 | a*g*CuGgA | 2655 | 2498-2518 | (VPmU)*C*gAg | 1081 | 2496-2518 | GGAGCUGGAC | 3794 |
| | cGgAgGgAu | | | AuCcCuCcGuCc | | | GGAGGGAUCU | |
| | CuC*g*g | | | AgCu*c*c | | | CGG | |
| 1080 | c*u*AaGcG | 2656 | 2282-2302 | (VPmU)*C*uCg | 1082 | 2280-2302 | CUCUAAGCGC | 3795 |
| | cAuCaAgCu | | | AgCuUgAuGcGc | | | AUCAAGCUCG | |
| | CgA*g*a | | | UuAg*a*g | | | AGA | |
| 1081 | g*u*UgGcA | 2657 | 685-705 | (VPmU)*G*gCg | 1083 | 683-705 | AGGUUGGCAU | 3796 |
| | uCcAgGuCa | | | UgAcCuGgAuGc | | | CCAGGUCACG | |
| | CgC*c*a | | | CaAc*c*u | | | CCA | |
| 1082 | c*c*AgGuA | 2658 | 1426-1446 | (VPmG)*A*aGg | 1084 | 1424-1446 | AGCCAGGUAG | 3797 |
| | gCaAgCcGc | | | GcGgCuUgCuAc | | | CAAGCCGCCC | |
| | CcU*u*c | | | CuGg*c*u | | | UUC | |
| 1083 | a*c*CuCuC | 2659 | 1059-1079 | (VPmA)*U*aUg | 1085 | 1057-1079 | CCACCUCUCC | 3798 |
| | cAuGgGaUu | | | AaUcCcAuGgAg | | | AUGGGAUUCA | |
| | CaU*a*u | | | AgGu*g*g | | | UAU | |
| 1084 | c*c*AgCcA | 2660 | 1422-1442 | (VPmG)*G*cGg | 1086 | 1420-1442 | UUCCAGCCAG | 3799 |
| | gGuAgCaAg | | | CuUgCuAcCuGg | | | GUAGCAAGCC | |
| | CcG*c*c | | | CuGg*a*a | | | GCC | |
| 1085 | a*g*GgAcA | 2661 | 2128-2148 | (VPmG)*U*cUu | 1087 | 2126-2148 | ACAGGGACAC | 3800 |
| | cUuGcGaCg | | | CgUcGcAaGuGu | | | UUGCGACGAA | |
| | AaG*a*c | | | CcCu*g*u | | | GAC | |
| 1086 | a*c*AaGuG | 2662 | 1598-1618 | (VPmG)*G*uCg | 1088 | 1596-1618 | CUACAAGUGC | 3801 |
| | cAaCcUgUg | | | CaCaGgUuGcAc | | | AACCUGUGCG | |
| | CgA*c*c | | | UuGu*a*g | | | ACC | |
| 1087 | g*c*UgGaC | 2663 | 2499-2519 | (VPmU)*C*cGa | 1089 | 2497-2519 | GAGCUGGACG | 3802 |
| | gGaGgGaUc | | | GaUcCcUcCgUc | | | GAGGGAUCUC | |
| | UcG*g*g | | | CaGc*u*c | | | GGG | |
| 1088 | c*a*AaUuU | 2664 | 1542-1562 | (VPmA)*C*cAg | 1090 | 1540-1562 | UUCAAAUUUC | 3803 |
| | cAgAgCaAc | | | GuUgCuCuGaAa | | | AGAGCAACCU | |
| | CuG*g*u | | | UuUg*a*a | | | GGU | |
| 1089 | c*u*GuCcA | 2665 | 5-25 | (VPmG)*U*cAg | 1091 | 3-25 | CUCUGUCCAU | 3804 |
| | uCcAgAcUc | | | GaGuCuGgAuGg | | | CCAGACUCCU | |
| | CuG*a*c | | | AcAg*a*g | | | GAC | |
| 1090 | a*u*CcCgU | 2666 | 674-694 | (VPmG)*G*aUg | 1092 | 672-694 | CAAUCCCGUG | 3805 |
| | gGaGgUuGg | | | CcAaCcUcCaCg | | | GAGGUUGGCA | |
| | CaU*c*c | | | GgAu*u*g | | | UCC | |
| 1091 | u*c*CuGgG | 2667 | 2078-2098 | (VPmG)*C*uUa | 1093 | 2076-2098 | GGUCCUGGGC | 3557 |
| | cGaGaAgCa | | | UgCuUcUcGcCc | | | GAGAAGCAUA | |
| | UaA*g*c | | | AgGa*c*c | | | AGC | |
| 1092 | u*a*GcUuC | 2668 | 2406-2426 | (VPmU)*G*uCu | 1094 | 2404-2426 | CUUAGCUUCG | 3806 |
| | gGaGaCuCc | | | GgAgUcUcCgAa | | | GAGACUCCAG | |
| | AgA*c*a | | | GcUa*a*g | | | ACA | |
| 1093 | u*a*UcGaG | 2669 | 1124-1144 | (VPmG)*G*cCg | 1095 | 1122-1144 | AGUAUCGAGA | 3807 |
| | aGaGgCuUc | | | GaAgCcUcUcUc | | | GAGGCUUCCG | |
| | CgG*c*c | | | GaUa*c*u | | | GCC | |
| 1094 | c*c*GaCgU | 2670 | 2015-2035 | (VPmU)*C*aUg | 1096 | 2013-2035 | GCCCGACGUC | 3808 |
| | cAuGcAgGg | | | CcCuGcAuGaCg | | | AUGCAGGGCA | |
| | CaU*g*g | | | UcGg*g*c | | | UGG | |
| 1095 | u*g*UcCaU | 2671 | 6-26 | (VPmU)*G*uCa | 1097 | 4-26 | UCUGUCCAUC | 3809 |
| | cCaGaCuCc | | | GgAgUcUgGaUg | | | CAGACUCCUG | |
| | UgA*c*g | | | GaCa*g*a | | | ACG | |
| 1096 | a*g*GgCcA | 2672 | 2120-2140 | (VPmU)*G*cAa | 1098 | 2118-2140 | CGAGGGCCAC | 3810 |
| | cAgGgAcAc | | | GuGuCcCuGuGg | | | AGGGACACUU | |
| | UuG*c*g | | | CcCu*c*g | | | GCG | |
| 1097 | a*c*CaGaC | 2673 | 474-494 | (VPmU)*C*cAa | 1099 | 472-494 | GAACCAGACC | 3811 |
| | cAcGgCcCg | | | CgGgCcGuGgUc | | | ACGGCCCGUU | |
| | UuG*g*g | | | UgGu*u*c | | | GGG | |
| 1098 | g*c*AuAaG | 2674 | 2091-2111 | (VPmG)*C*cAg | 1100 | 2089-2111 | AAGCAUAAGC | 3812 |
| | cGcGgCcAc | | | GuGgCcGcGcUu | | | GCGGCCACCU | |
| | CuG*g*c | | | AuGc*u*u | | | GGC | |
| 1099 | a*u*GgCuA | 2675 | 1300-1320 | (VPmG)*G*cGg | 1101 | 1298-1320 | CAAUGGCUAU | 3813 |
| | uGgAgCcUc | | | GaGgCuCcAuAg | | | GGAGCCUCCC | |
| | CcG*c*c | | | CcAu*u*g | | | GCC | |
| 1100 | C*a*GgAaC | 2676 | 754-774 | (VPmU)*U*uAu | 1102 | 752-774 | AACAGGAACA | 3814 |
| | aCaUaGcAg | | | CuGcUaUgUgUu | | | CAUAGCAGAU | |
| | AuA*a*A | | | CcUg*U*u | | | AAA | |
| 1101 | A*g*GaAcA | 2677 | 755-775 | (VPmG)*U*uUa | 1103 | 753-775 | ACAGGAACAC | 3815 |
| | cAuAgCaGa | | | UcUgCuAuGuGu | | | AUAGCAGAUA | |
| | UaA*a*C | | | UcCu*G*u | | | AAC | |
| 1102 | G*g*AaCaC | 2678 | 756-776 | (VPmA)*G*uUu | 1104 | 754-776 | CAGGAACACA | 3816 |
| | aUaGcAgAu | | | AuCuGcUaUgUg | | | UAGCAGAUAA | |
| | AaA*c*U | | | UuCc*U*g | | | ACU | |
| 1103 | G*a*AcAcA | 2679 | 757-777 | (VPmA)*A*gUu | 1105 | 755-777 | AGGAACACAU | 3817 |
| | uAgCaGaUa | | | UaUcUgCuAuGu | | | AGCAGAUAAA | |
| | AaC*u*U | | | GuUc*C*u | | | CUU | |
| 1104 | A*a*CaCaU | 2680 | 758-778 | (VPmG)*A*aGu | 1106 | 756-778 | GGAACACAUA | 3818 |
| | aGcAgAuAa | | | UuAuCuGcUaUg | | | GCAGAUAAAC | |
| | AcU*u*C | | | UgUu*C*c | | | UUC | |
| 1105 | C*c*CaGcA | 2681 | 883-903 | (VPmU)*G*uAc | 1107 | 881-903 | AGCCCAGCAG | 3819 |
| | gCuAcAcAu | | | AuGuGuAgCuGc | | | CUACACAUGU | |
| | GuA*c*A | | | UgGg*C*u | | | ACA | |
| 1106 | C*a*GcAgC | 2682 | 885-905 | (VPmG)*U*uGu | 1108 | 883-905 | CCCAGCAGCU | 3820 |
| | uAcAcAuGu | | | AcAuGuGuAgCu | | | ACACAUGUAC | |
| | AcA*a*C | | | GcUg*G*g | | | AAC | |
| 1107 | G*c*AgCuA | 2683 | 887-907 | (VPmA)*A*gUu | 1109 | 885-907 | CAGCAGCUAC | 3821 |
| | CACAuGuAc | | | GuAcAuGuGuAg | | | ACAUGUACAA | |
| | AaC*u*U | | | CuGc*U*g | | | CUU | |
| 1108 | A*g*CuAcA | 2684 | 889-909 | (VPmG)*C*aAg | 1110 | 887-909 | GCAGCUACAC | 3822 |
| | cAuGuAcAa | | | UuGuAcAuGuGu | | | AUGUACAACU | |
| | CuU*g*C | | | AgCu*G*c | | | UGC | |
| 1109 | C*u*AcAcA | 2685 | 891-911 | (VPmU)*U*gCa | 1111 | 889-911 | AGCUACACAU | 3823 |
| | uGuAcAaCu | | | AgUuGuAcAuGu | | | GUACAACUUG | |
| | UgC*a*A | | | GuAg*C*u | | | CAA | |
| 1110 | U*a*CaCaU | 2686 | 892-912 | (VPmU)*U*uGc | 1112 | 890-912 | GCUACACAUG | 3824 |
| | gUaCaAcUu | | | AaGuUgUaCaUg | | | UACAACUUGC | |
| | GcA*a*A | | | UgUa*G*c | | | AAA | |
| 1111 | A*c*AuGuA | 2687 | 895-915 | (VPmA)*U*gUu | 1113 | 893-915 | ACACAUGUAC | 3825 |
| | cAaCuUgCa | | | UgCaAgUuGuAc | | | AACUUGCAAA | |
| | AaC*a*U | | | AuGu*G*u | | | CAG | |
| 1112 | C*a*UgUaC | 2688 | 896-916 | (VPmG)*C*uGu | 1114 | 894-916 | CACAUGUACA | 3826 |
| | aAcUuGcAa | | | UuGcAaGuUgUa | | | ACUUGCAAAC | |
| | AcA*g*C | | | CaUg*U*g | | | AGC | |
| 1113 | A*u*GuAcA | 2689 | 897-917 | (VPmG)*G*cUg | 1115 | 895-917 | ACAUGUACAA | 3827 |
| | aCuUgCaAa | | | UuUgCaAgUuGu | | | CUUGCAAACA | |
| | CaG*c*C | | | AcAu*G*u | | | GCC | |
| 1114 | U*g*UaCaA | 2690 | 898-918 | (VPmU)*G*gCu | 1116 | 896-918 | CAUGUACAAC | 3828 |
| | CUuGcAaAc | | | GuUuGcAaGuUg | | | UUGCAAACAG | |
| | AgC*c*A | | | UaCa*U*g | | | CCA | |
| 1115 | G*u*AcAaC | 2691 | 899-919 | (VPmA)*U*gGc | 1117 | 897-919 | AUGUACAACU | 3829 |
| | uUgCaAaCa | | | UgUuUgCaAgUu | | | UGCAAACAGC | |
| | GcC*a*U | | | GuAc*A*u | | | CAU | |
| 1116 | U*a*CaAcU | 2692 | 900-920 | (VPmA)*A*uGg | 1118 | 898-920 | UGUACAACUU | 3830 |
| | uGcAaAcAg | | | CuGuUuGcAaGu | | | GCAAACAGCC | |
| | CcA*u*U | | | UgUa*C*a | | | AUU | |
| 1117 | A*c*AaCuU | 2693 | 901-921 | (VPmG)*A*aUg | 1119 | 899-921 | GUACAACUUG | 3831 |
| | gCaAaCaGc | | | GcUgUuUgCaAg | | | CAAACAGCCA | |
| | CaU*u*C | | | UuGu*A*c | | | UUC | |
| 1118 | C*a*AcUuG | 2694 | 902-922 | (VPmU)*G*aAu | 1120 | 900-922 | UACAACUUGC | 3832 |
| | CAaAcAgCc | | | GgCuGuUuGcAa | | | AAACAGCCAU | |
| | AuU*c*A | | | GuUg*U*a | | | UCA | |
| 1119 | A*a*CuUgC | 2695 | 903-923 | (VPmG)*U*gAa | 1121 | 901-923 | ACAACUUGCA | 3833 |
| | aAaCaGcCa | | | UgGcUgUuUgCa | | | AACAGCCAUU | |
| | UuC*a*C | | | AgUu*G*u | | | CAC | |
| 1120 | A*c*UuGcA | 2696 | 904-924 | (VPmG)*G*uGa | 1122 | 902-924 | CAACUUGCAA | 3834 |
| | aAcAgCcAu | | | AuGgCuGuUuGc | | | ACAGCCAUUC | |
| | UcA*c*C | | | AaGu*U*g | | | ACC | |
| 1121 | C*u*UgCaA | 2697 | 905-925 | (VPmU)*G*gUg | 1123 | 903-925 | AACUUGCAAA | 3835 |
| | aCaGcCaUu | | | AaUgGcUgUuUg | | | CAGCCAUUCA | |
| | CaC*c*A | | | CaAg*U*u | | | CCA | |
| 1122 | U*u*GcAaA | 2698 | 906-926 | (VPmA)*U*gGu | 1124 | 904-926 | ACUUGCAAAC | 3836 |
| | cAgCcAuUc | | | GaAuGgCuGuUu | | | AGCCAUUCAC | |
| | AcC*a*U | | | GcAa*G*u | | | CAG | |
| 1123 | U*g*CaAaC | 2699 | 907-927 | (VPmA)*C*uGg | 1125 | 905-927 | CUUGCAAACA | 3837 |
| | aGcCaUuCa | | | UgAaUgGcUgUu | | | GCCAUUCACC | |
| | CcA*g*U | | | UgCa*A*g | | | AGU | |
| 1124 | G*c*AaAcA | 2700 | 908-928 | (VPmA)*A*cUg | 1126 | 906-928 | UUGCAAACAG | 3838 |
| | gCcAuUcAc | | | GuGaAuGgCuGu | | | CCAUUCACCA | |
| | CaG*u*U | | | UuGc*A*a | | | GUG | |
| 1125 | C*a*AaCaG | 2701 | 909-929 | (VPmG)*C*aCu | 1127 | 907-929 | UGCAAACAGC | 3839 |
| | cCaUuCaCc | | | GgUgAaUgGcUg | | | CAUUCACCAG | |
| | AgU*g*C | | | UuUg*C*a | | | UGC | |
| 1126 | A*a*AcAgC | 2702 | 910-930 | (VPmU)*G*cAc | 1128 | 908-930 | GCAAACAGCC | 3840 |
| | cAuUcAcCa | | | UgGuGaAuGgCu | | | AUUCACCAGU | |
| | GuG*c*A | | | GuUu*G*c | | | GCA | |
| 1127 | A*a*CaGcC | 2703 | 911-931 | (VPmA)*U*gCa | 1129 | 909-931 | CAAACAGCCA | 3841 |
| | aUuCaCcAg | | | CuGgUgAaUgGc | | | UUCACCAGUG | |
| | UgC*a*U | | | UgUu*U*g | | | CAU | |
| 1128 | A*c*AgCcA | 2704 | 912-932 | (VPmA)*A*uGc | 1130 | 910-932 | AAACAGCCAU | 3842 |
| | uUcAcCaGu | | | AcUgGuGaAuGg | | | UCACCAGUGC | |
| | GcA*u*U | | | CuGu*U*u | | | AUG | |
| 1129 | C*a*GcCaU | 2705 | 913-933 | (VPmA)*C*aUg | 1131 | 911-933 | AACAGCCAUU | 3843 |
| | uCaCcAgUg | | | CaCuGgUgAaUg | | | CACCAGUGCA | |
| | CaU*g*U | | | GcUg*U*u | | | UGG | |
| 1130 | A*g*CcAuU | 2706 | 914-934 | (VPmA)*C*cAu | 1132 | 912-934 | ACAGCCAUUC | 3844 |
| | cAcCaGuGc | | | GcAcUgGuGaAu | | | ACCAGUGCAU | |
| | AuG*g*U | | | GgCu*G*u | | | GGU | |
| 1131 | G*c*CaUuC | 2707 | 915-935 | (VPmA)*A*cCa | 1133 | 913-935 | CAGCCAUUCA | 3845 |
| | aCcAgUgCa | | | UgCaCuGgUgAa | | | CCAGUGCAUG | |
| | UgG*u*U | | | UgGc*U*g | | | GUU | |
| 1132 | C*c*AuUcA | 2708 | 916-936 | (VPmA)*A*aCc | 1134 | 914-936 | AGCCAUUCAC | 3846 |
| | cCaGuGcAu | | | AuGcAcUgGuGa | | | CAGUGCAUGG | |
| | GgU*u*U | | | AuGg*C*u | | | UUU | |
| 1133 | C*a*UuCaC | 2709 | 917-937 | (VPmG)*A*aAc | 1135 | 915-937 | GCCAUUCACC | 3847 |
| | cAgUgCaUg | | | CaUgCaCuGgUg | | | AGUGCAUGGU | |
| | GuU*u*C | | | AaUg*G*c | | | UUC | |
| 1134 | A*u*UcAcC | 2710 | 918-938 | (VPmA)*G*aAa | 1136 | 916-938 | CCAUUCACCA | 3848 |
| | aGuGcAuGg | | | CcAuGcAcUgGu | | | GUGCAUGGUU | |
| | UuU*c*U | | | GaAu*G*g | | | UCU | |
| 1135 | U*u*CaCcA | 2711 | 919-939 | (VPmG)*A*gAa | 1137 | 917-939 | CAUUCACCAG | 3849 |
| | gUgCaUgGu | | | AcCaUgCaCuGg | | | UGCAUGGUUU | |
| | UuC*u*C | | | UgAa*U*g | | | CUC | |
| 1136 | U*c*AcCaG | 2712 | 920-940 | (VPmA)*G*aGa | 1138 | 918-940 | AUUCACCAGU | 3850 |
| | uGcAuGgUu | | | AaCcAuGcAcUg | | | GCAUGGUUUC | |
| | UcU*c*U | | | GuGa*A*u | | | UCU | |
| 1137 | C*a*CcAgU | 2713 | 921-941 | (VPmA)*A*gAg | 1139 | 919-941 | UUCACCAGUG | 3851 |
| | gCaUgGuUu | | | AaAcCaUgCaCu | | | CAUGGUUUCU | |
| | CuC*u*U | | | GgUg*A*a | | | CUU | |
| 1138 | A*c*CaGuG | 2714 | 922-942 | (VPmA)*A*aGa | 1140 | 920-942 | UCACCAGUGC | 3852 |
| | cAuGgUuUc | | | GaAaCcAuGcAc | | | AUGGUUUCUC | |
| | UcU*u*U | | | UgGu*G*a | | | UUG | |
| 1139 | A*g*UgCaU | 2715 | 925-945 | (VPmU)*U*gCa | 1141 | 923-945 | CCAGUGCAUG | 3853 |
| | gGuUuCuCu | | | AgAgAaAcCaUg | | | GUUUCUCUUG | |
| | UgC*a*A | | | CaCu*G*g | | | CAA | |
| 1140 | G*g*UuUcU | 2716 | 932-952 | (VPmG)*U*gCg | 1142 | 930-952 | AUGGUUUCUC | 3854 |
| | CUuGcAaCa | | | UgUuGcAaGaGa | | | UUGCAACACG | |
| | CgC*a*C | | | AaCc*A*u | | | CAC | |
| 1141 | G*u*UuCuC | 2717 | 933-953 | (VPmU)*G*uGc | 1143 | 931-953 | UGGUUUCUCU | 3855 |
| | uUgCaAcAc | | | GuGuUgCaAgAg | | | UGCAACACGC | |
| | GcA*C*A | | | AaAc*C*a | | | ACA | |
| 1142 | U*u*CuCuU | 2718 | 935-955 | (VPmU)*C*uGu | 1144 | 933-955 | GUUUCUCUUG | 3856 |
| | gCaAcAcGc | | | GcGuGuUgCaAg | | | CAACACGCAC | |
| | AcA*g*A | | | AgAa*A*c | | | AGA | |
| 1143 | U*c*UcUuG | 2719 | 936-956 | (VPmU)*U*cUg | 1145 | 934-956 | UUUCUCUUGC | 3857 |
| | cAaCaCgCa | | | UgCgUgUuGcAa | | | AACACGCACA | |
| | CaG*a*A | | | GaGa*A*a | | | GAA | |
| 1144 | C*u*UgCaA | 2720 | 939-959 | (VPmG)*U*gUu | 1146 | 937-959 | CUCUUGCAAC | 3858 |
| | CAcGcAcAg | | | CuGuGcGuGuUg | | | ACGCACAGAA | |
| | AaC*a*C | | | CaAg*A*g | | | CAC | |
| 1145 | U*u*GcAaC | 2721 | 940-960 | (VPmA)*G*uGu | 1147 | 938-960 | UCUUGCAACA | 3859 |
| | aCgCaCaGa | | | UcUgUgCgUgUu | | | CGCACAGAAC | |
| | AcA*c*U | | | GcAa*G*a | | | ACU | |
| 1146 | U*g*CaAcA | 2722 | 941-961 | (VPmG)*A*gUg | 1148 | 939-961 | CUUGCAACAC | 3860 |
| | cGcAcAgAa | | | UuCuGuGcGuGu | | | GCACAGAACA | |
| | CaC*u*C | | | UgCa*A*g | | | CUC | |
| 1147 | G*c*AaCaC | 2723 | 942-962 | (VPmU)*G*aGu | 1149 | 940-962 | UUGCAACACG | 3861 |
| | gCaCaGaAc | | | GuUcUgUgCgUg | | | CACAGAACAC | |
| | AcU*c*A | | | UuGc*A*a | | | UCA | |
| 1148 | C*a*AcAcG | 2724 | 943-963 | (VPmA)*U*gAg | 1150 | 941-963 | UGCAACACGC | 3862 |
| | cAcAgAaCa | | | UgUuCuGuGcGu | | | ACAGAACACU | |
| | CuC*a*U | | | GuUg*C*a | | | CAU | |
| 1149 | A*c*AcGcA | 2725 | 945-965 | (VPmA)*C*aUg | 1151 | 943-965 | CAACACGCAC | 3863 |
| | cAgAaCaCu | | | AgUgUuCuGuGc | | | AGAACACUCA | |
| | CaU*g*U | | | GuGu*U*g | | | UGG | |
| 1150 | C*a*CgCaC | 2726 | 946-966 | (VPmU)*C*cAu | 1152 | 944-966 | AACACGCACA | 3864 |
| | aGaAcAcUc | | | GaGuGuUcUgUg | | | GAACACUCAU | |
| | AuG*g*A | | | CgUg*U*u | | | GGA | |
| 1151 | A*c*GcAcA | 2727 | 947-967 | (VPmA)*U*cCa | 1153 | 945-967 | ACACGCACAG | 3865 |
| | gAaCaCuCa | | | UgAgUgUuCuGu | | | AACACUCAUG | |
| | UgG*a*U | | | GcGu*G*u | | | GAU | |
| 1152 | C*g*CaCaG | 2728 | 948-968 | (VPmA)*A*uCc | 1154 | 946-968 | CACGCACAGA | 3866 |
| | aAcAcUcAu | | | AuGaGuGuUcUg | | | ACACUCAUGG | |
| | GgA*u*U | | | UgCg*U*g | | | AUU | |
| 1153 | G*c*AcAgA | 2729 | 949-969 | (VPmU)*A*aUc | 1155 | 947-969 | ACGCACAGAA | 3867 |
| | aCaCuCaUg | | | CaUgAgUgUuCu | | | CACUCAUGGA | |
| | GaU*u*A | | | GuGc*G*u | | | UUA | |
| 1154 | C*a*CaGaA | 2730 | 950-970 | (VPmU)*U*aAu | 1156 | 948-970 | CGCACAGAAC | 3868 |
| | cAcUcAuGg | | | CcAuGaGuGuUc | | | ACUCAUGGAU | |
| | AuU*a*A | | | UgUg*C*g | | | UAA | |
| 1155 | A*c*AgAaC | 2731 | 951-971 | (VPmA)*U*uAa | 1157 | 949-971 | GCACAGAACA | 3869 |
| | aCuCaUgGa | | | UcCaUgAgUgUu | | | CUCAUGGAUU | |
| | UuA*a*U | | | CuGu*G*c | | | AAG | |
| 1156 | C*a*GaAcA | 2732 | 952-972 | (VPmU)*C*uUa | 1158 | 950-972 | CACAGAACAC | 3870 |
| | cUcAuGgAu | | | AuCcAuGaGuGu | | | UCAUGGAUUA | |
| | UaA*g*A | | | UcUg*U*g | | | AGA | |
| 1157 | A*g*AaCaC | 2733 | 953-973 | (VPmU)*U*cUu | 1159 | 951-973 | ACAGAACACU | 3871 |
| | uCaUgGaUu | | | AaUcCaUgAgUg | | | CAUGGAUUAA | |
| | AaG*a*A | | | UuCu*G*u | | | GAA | |
| 1158 | G*a*AcAcU | 2734 | 954-974 | (VPmA)*U*uCu | 1160 | 952-974 | CAGAACACUC | 3872 |
| | cAuGgAuUa | | | UaAuCcAuGaGu | | | AUGGAUUAAG | |
| | AgA*a*U | | | GuUc*U*g | | | AAU | |
| 1159 | A*a*CaCuC | 2735 | 955-975 | (VPmG)*A*uUc | 1161 | 953-975 | AGAACACUCA | 3873 |
| | aUgGaUuAa | | | UuAaUcCaUgAg | | | UGGAUUAAGA | |
| | GaA*u*C | | | UgUu*C*u | | | AUC | |
| 1160 | U*u*AaGaA | 2736 | 967-987 | (VPmG)*C*uUu | 1162 | 965-987 | GAUUAAGAAU | 3874 |
| | uCuAcUuAg | | | CuAaGuAgAuUc | | | CUACUUAGAA | |
| | AaA*g*C | | | UuAa*U*c | | | AGC | |
| 1161 | G*g*UuGgU | 2737 | 1014-1034 | (VPmA)*G*uCc | 1163 | 1012-1034 | CGGGUUGGUA | 3875 |
| | aUcCcUuCa | | | UgAaGgGaUaCc | | | UCCCUUCAGG | |
| | GgA*c*U | | | AaCc*C*g | | | ACU | |
| 1162 | G*u*UgGuA | 2738 | 1015-1035 | (VPmU)*A*gUc | 1164 | 1013-1035 | GGGUUGGUAU | 3876 |
| | uCcCuUcAg | | | CuGaAgGgAuAc | | | CCCUUCAGGA | |
| | GaC*u*A | | | CaAc*C*c | | | CUA | |
| 1163 | U*u*GgUaU | 2739 | 1016-1036 | (VPmA)*U*aGu | 1165 | 1014-1036 | GGUUGGUAUC | 3877 |
| | cCcUuCaGg | | | CcUgAaGgGaUa | | | CCUUCAGGAC | |
| | AcU*a*U | | | CcAa*C*c | | | UAG | |
| 1164 | U*g*GuAuC | 2740 | 1017-1037 | (VPmA)*C*uAg | 1166 | 1015-1037 | GUUGGUAUCC | 3878 |
| | cCuUcAgGa | | | UcCuGaAgGgAu | | | CUUCAGGACU | |
| | CuA*g*U | | | AcCa*A*c | | | AGG | |
| 1165 | G*g*UaUcC | 2741 | 1018-1038 | (VPmA)*C*cUa | 1167 | 1016-1038 | UUGGUAUCCC | 3879 |
| | cUuCaGgAc | | | GuCcUgAaGgGa | | | UUCAGGACUA | |
| | UaG*g*U | | | UaCc*A*a | | | GGU | |
| 1166 | A*u*CcCuU | 2742 | 1021-1041 | (VPmU)*G*cAc | 1168 | 1019-1041 | GUAUCCCUUC | 3880 |
| | cAgGaCuAg | | | CuAgUcCuGaAg | | | AGGACUAGGU | |
| | GuG*c*A | | | GgAu*A*c | | | GCA | |
| 1167 | C*c*UuCaG | 2743 | 1024-1044 | (VPmU)*U*cUg | 1169 | 1022-1044 | UCCCUUCAGG | 3881 |
| | gAcUaGgUg | | | CaCcUaGuCcUg | | | ACUAGGUGCA | |
| | CaG*a*A | | | AaGg*G*a | | | GAA | |
| 1168 | U*u*CaGgA | 2744 | 1026-1046 | (VPmA)*A*uUc | 1170 | 1024-1046 | CCUUCAGGAC | 3882 |
| | cUaGgUgCa | | | UgCaCcUaGuCc | | | UAGGUGCAGA | |
| | GaA*u*U | | | UgAa*G*g | | | AUG | |
| 1169 | U*c*AgGaC | 2745 | 1027-1047 | (VPmA)*C*aUu | 1171 | 1025-1047 | CUUCAGGACU | 3883 |
| | uAgGuGcAg | | | CuGcAcCuAgUc | | | AGGUGCAGAA | |
| | AaU*g*U | | | CuGa*A*g | | | UGU | |
| 1170 | C*a*GgAcU | 2746 | 1028-1048 | (VPmG)*A*cAu | 1172 | 1026-1048 | UUCAGGACUA | 3884 |
| | aGgUgCaGa | | | UcUgCaCcUaGu | | | GGUGCAGAAU | |
| | AuG*u*C | | | CcUg*A*a | | | GUC | |
| 1171 | A*g*GaCuA | 2747 | 1029-1049 | (VPmG)*G*aCa | 1173 | 1027-1049 | UCAGGACUAG | 3885 |
| | gGuGcAgAa | | | UuCuGcAcCuAg | | | GUGCAGAAUG | |
| | UgU*c*C | | | UcCu*G*a | | | UCC | |
| 1172 | G*g*AcUaG | 2748 | 1030-1050 | (VPmA)*G*gAc | 1174 | 1028-1050 | CAGGACUAGG | 3886 |
| | gUgCaGaAu | | | AuUcUgCaCcUa | | | UGCAGAAUGU | |
| | GuC*c*U | | | GuCc*U*g | | | CCU | |
| 1173 | G*a*CuAgG | 2749 | 1031-1051 | (VPmA)*A*gGa | 1175 | 1029-1051 | AGGACUAGGU | 3887 |
| | uGcAgAaUg | | | CaUuCuGcAcCu | | | GCAGAAUGUC | |
| | UcC*u*U | | | AgUc*C*u | | | CUU | |
| 1174 | C*a*CcUcU | 2750 | 1058-1078 | (VPmU)*A*uGa | 1176 | 1056-1078 | GCCACCUCUC | 3888 |
| | cCaUgGgAu | | | AuCcCaUgGaGa | | | CAUGGGAUUC | |
| | UcA*u*A | | | GgUg*G*c | | | AUA | |
| 1175 | A*c*CuCuC | 2751 | 1059-1079 | (VPmA)*U*aUg | 1177 | 1057-1079 | CCACCUCUCC | 3889 |
| | cAuGgGaUu | | | AaUcCcAuGgAg | | | AUGGGAUUCA | |
| | CaU*a*U | | | AgGu*G*g | | | UAU | |
| 1176 | C*c*UcUcC | 2752 | 1060-1080 | (VPmA)*A*uAu | 1178 | 1058-1080 | CACCUCUCCA | 3890 |
| | aUgGgAuUc | | | GaAuCcCaUgGa | | | UGGGAUUCAU | |
| | AuA*u*U | | | GaGg*U*g | | | AUU | |
| 1177 | C*u*CuCcA | 2753 | 1061-1081 | (VPmA)*A*aUa | 1179 | 1059-1081 | ACCUCUCCAU | 3891 |
| | uGgGaUuCa | | | UgAaUcCcAuGg | | | GGGAUUCAUA | |
| | UaU*u*U | | | AgAg*G*u | | | UUG | |
| 1178 | U*c*UcCaU | 2754 | 1062-1082 | (VPmG)*C*aAu | 1180 | 1060-1082 | CCUCUCCAUG | 3892 |
| | gGgAuUcAu | | | AuGaAuCcCaUg | | | GGAUUCAUAU | |
| | AuU*g*C | | | GaGa*G*g | | | UGC | |
| 1179 | C*u*CcAuG | 2755 | 1063-1083 | (VPmU)*G*cAa | 1181 | 1061-1083 | CUCUCCAUGG | 3893 |
| | gGaUuCaUa | | | UaUgAaUcCcAu | | | GAUUCAUAUU | |
| | UuG*c*A | | | GgAg*A*g | | | GCA | |
| 1180 | U*c*CaUgG | 2756 | 1064-1084 | (VPmA)*U*gCa | 1182 | 1062-1084 | UCUCCAUGGG | 3894 |
| | gAuUcAuAu | | | AuAuGaAuCcCa | | | AUUCAUAUUG | |
| | UgC*a*U | | | UgGa*G*a | | | CAG | |
| 1181 | C*c*AuGgG | 2757 | 1065-1085 | (VPmU)*C*uGc | 1183 | 1063-1085 | CUCCAUGGGA | 3895 |
| | aUuCaUaUu | | | AaUaUgAaUcCc | | | UUCAUAUUGC | |
| | GcA*g*A | | | AuGg*A*g | | | AGA | |
| 1182 | C*a*UgGgA | 2758 | 1066-1086 | (VPmG)*U*cUg | 1184 | 1064-1086 | UCCAUGGGAU | 3896 |
| | uUcAuAuUg | | | CaAuAuGaAuCc | | | UCAUAUUGCA | |
| | CaG*a*C | | | CaUg*G*a | | | GAC | |
| 1183 | A*u*GgGaU | 2759 | 1067-1087 | (VPmU)*G*uCu | 1185 | 1065-1087 | CCAUGGGAUU | 3897 |
| | uCaUaUuGc | | | GcAaUaUgAaUc | | | CAUAUUGCAG | |
| | AgA*c*A | | | CcAu*G*g | | | ACA | |
| 1184 | U*g*GgAuU | 2760 | 1068-1088 | (VPmU)*U*gUc | 1186 | 1066-1088 | CAUGGGAUUC | 3898 |
| | cAuAuUgCa | | | UgCaAuAuGaAu | | | AUAUUGCAGA | |
| | GaC*a*A | | | CcCa*U*g | | | CAA | |
| 1185 | G*g*GaUuC | 2761 | 1069-1089 | (VPmA)*U*uGu | 1187 | 1067-1089 | AUGGGAUUCA | 3899 |
| | aUaUuGcAg | | | CuGcAaUaUgAa | | | UAUUGCAGAC | |
| | AcA*a*U | | | UcCc*A*u | | | AAU | |
| 1186 | G*g*AuUcA | 2762 | 1070-1090 | (VPmU)*A*uUg | 1188 | 1068-1090 | UGGGAUUCAU | 3900 |
| | uAuUgCaGa | | | UcUgCaAuAuGa | | | AUUGCAGACA | |
| | CaA*u*A | | | AuCc*C*a | | | AUA | |
| 1187 | G*a*UuCaU | 2763 | 1071-1091 | (VPmU)*U*aUu | 1189 | 1069-1091 | GGGAUUCAUA | 3901 |
| | aUuGcAgAc | | | GuCuGcAaUaUg | | | UUGCAGACAA | |
| | AaU*a*A | | | AaUc*C*c | | | UAA | |
| 1188 | A*u*UcAuA | 2764 | 1072-1092 | (VPmG)*U*uAu | 1190 | 1070-1092 | GGAUUCAUAU | 3902 |
| | uUgCaGaCa | | | UgUcUgCaAuAu | | | UGCAGACAAU | |
| | AuA*a*C | | | GaAu*C*c | | | AAC | |
| 1189 | U*u*CaUaU | 2765 | 1073-1093 | (VPmG)*G*uUa | 1191 | 1071-1093 | GAUUCAUAUU | 3903 |
| | uGcAgAcAa | | | UuGuCuGcAaUa | | | GCAGACAAUA | |
| | UaA*c*C | | | UgAa*U*c | | | ACC | |
| 1190 | U*c*AuAuU | 2766 | 1074-1094 | (VPmG)*G*gUu | 1192 | 1072-1094 | AUUCAUAUUG | 3904 |
| | gCaGaCaAu | | | AuUgUcUgCaAu | | | CAGACAAUAA | |
| | AaC*c*C | | | AuGa*A*u | | | CCC | |
| 1191 | C*u*UuAaC | 2767 | 1095-1115 | (VPmG)*G*uAu | 1193 | 1093-1115 | CCCUUUAACC | 3905 |
| | cUgCuAaGa | | | UcUuAgCaGgUu | | | UGCUAAGAAU | |
| | AuA*c*C | | | AaAg*G*g | | | ACC | |
| 1192 | U*u*UaAcC | 2768 | 1096-1116 | (VPmU)*G*gUa | 1194 | 1094-1116 | CCUUUAACCU | 3906 |
| | uGcUaAgAa | | | UuCuUaGcAgGu | | | GCUAAGAAUA | |
| | UaC*c*A | | | UaAa*G*g | | | CCA | |
| 1193 | U*u*AaCcU | 2769 | 1097-1117 | (VPmA)*U*gGu | 1195 | 1095-1117 | CUUUAACCUG | 3907 |
| | gCuAaGaAu | | | AuUcUuAgCaGg | | | CUAAGAAUAC | |
| | AcC*a*U | | | UuAa*A*g | | | CA | |
| 1194 | U*a*AcCuG | 2770 | 1098-1118 | (VPmA)*C*uGg | 1196 | 1096-1118 | UUUAACCUGC | 3908 |
| | cUaAgAaUa | | | UaUuCuUaGcAg | | | UAAGAAUACC | |
| | CcA*g*U | | | GuUa*A*a | | | AGG | |
| 1195 | A*a*CcUgC | 2771 | 1099-1119 | (VPmU)*C*cUg | 1197 | 1097-1119 | UUAACCUGCU | 3909 |
| | uAaGaAuAc | | | GuAuUcUuAgCa | | | AAGAAUACCA | |
| | CaG*g*A | | | GgUu*A*a | | | GGA | |
| 1196 | A*c*CuGcU | 2772 | 1100-1120 | (VPmA)*U*cCu | 1198 | 1098-1120 | UAACCUGCUA | 3910 |
| | aAgAaUaCc | | | GgUaUuCuUaGc | | | AGAAUACCAG | |
| | AgG*a*U | | | AgGu*U*a | | | GAU | |
| 1197 | C*c*UgCuA | 2773 | 1101-1121 | (VPmG)*A*uCc | 1199 | 1099-1121 | AACCUGCUAA | 3911 |
| | aGaAuAcCa | | | UgGuAuUcUuAg | | | GAAUACCAGG | |
| | GgA*u*C | | | CaGg*U*u | | | AUC | |
| 1198 | C*u*GcUaA | 2774 | 1102-1122 | (VPmU)*G*aUc | 1200 | 1100-1122 | ACCUGCUAAG | 3912 |
| | gAaUaCcAg | | | CuGgUaUuCuUa | | | AAUACCAGGA | |
| | GaU*c*A | | | GcAg*G*u | | | UCA | |
| 1199 | U*g*CuAaG | 2775 | 1103-1123 | (VPmA)*U*gAu | 1201 | 1101-1123 | CCUGCUAAGA | 3913 |
| | aAuAcCaGg | | | CcUgGuAuUcUu | | | AUACCAGGAU | |
| | AuC*a*U | | | AgCa*G*g | | | CAG | |
| 1200 | G*c*UaAgA | 2776 | 1104-1124 | (VPmA)*C*uGa | 1202 | 1102-1124 | CUGCUAAGAA | 3914 |
| | aUaCcAgGa | | | UcCuGgUaUuCu | | | UACCAGGAUC | |
| | UcA*g*U | | | UaGc*A*g | | | AGU | |
| 1201 | C*u*AaGaA | 2777 | 1105-1125 | (VPmU)*A*cUg | 1203 | 1103-1125 | UGCUAAGAAU | 3915 |
| | uAcCaGgAu | | | AuCcUgGuAuUc | | | ACCAGGAUCA | |
| | CaG*u*A | | | UuAg*C*a | | | GUA | |
| 1202 | U*a*AgAaU | 2778 | 1106-1126 | (VPmA)*U*aCu | 1204 | 1104-1126 | GCUAAGAAUA | 3916 |
| | aCcAgGaUc | | | GaUcCuGgUaUu | | | CCAGGAUCAG | |
| | AgU*a*U | | | CuUa*G*c | | | UAU | |
| 1203 | A*a*GaAuA | 2779 | 1107-1127 | (VPmG)*A*uAc | 1205 | 1105-1127 | CUAAGAAUAC | 3917 |
| | cCaGgAuCa | | | UgAuCcUgGuAu | | | CAGGAUCAGU | |
| | GuA*u*C | | | UcUu*A*g | | | AUC | |
| 1204 | A*g*AaUaC | 2780 | 1108-1128 | (VPmA)*G*aUa | 1206 | 1106-1128 | UAAGAAUACC | 3918 |
| | cAgGaUcAg | | | CuGaUcCuGgUa | | | AGGAUCAGUA | |
| | UaU*c*U | | | UuCu*U*a | | | UCG | |
| 1205 | G*a*AuAcC | 2781 | 1109-1129 | (VPmU)*C*gAu | 1207 | 1107-1129 | AAGAAUACCA | 3919 |
| | aGgAuCaGu | | | AcUgAuCcUgGu | | | GGAUCAGUAU | |
| | AuC*g*A | | | AuUc*U*u | | | CGA | |
| 1206 | A*a*UaCcA | 2782 | 1110-1130 | (VPmA)*U*cGa | 1208 | 1108-1130 | AGAAUACCAG | 3920 |
| | gGaUcAgUa | | | UaCuGaUcCuGg | | | GAUCAGUAUC | |
| | UcG*a*U | | | UaUu*C*u | | | GAG | |
| 1207 | A*u*AcCaG | 2783 | 1111-1131 | (VPmU)*C*uCg | 1209 | 1109-1131 | GAAUACCAGG | 3921 |
| | gAuCaGuAu | | | AuAcUgAuCcUg | | | AUCAGUAUCG | |
| | CgA*g*A | | | GuAu*U*c | | | AGA | |
| 1208 | U*a*CcAgG | 2784 | 1112-1132 | (VPmA)*U*cUc | 1210 | 1110-1132 | AAUACCAGGA | 3922 |
| | aUcAgUaUc | | | GaUaCuGaUcCu | | | UCAGUAUCGA | |
| | GaG*a*U | | | GgUa*U*u | | | GAG | |
| 1209 | A*c*CaGgA | 2785 | 1113-1133 | (VPmU)*C*uCu | 1211 | 1111-1133 | AUACCAGGAU | 3923 |
| | uCaGuAuCg | | | CgAuAcUgAuCc | | | CAGUAUCGAG | |
| | AgA*g*A | | | UgGu*A*u | | | AGA | |
| 1210 | C*c*AgGaU | 2786 | 1114-1134 | (VPmA)*U*cUc | 1212 | 1112-1134 | UACCAGGAUC | 3924 |
| | cAgUaUcGa | | | UcGaUaCuGaUc | | | AGUAUCGAGA | |
| | GaG*a*U | | | CuGg*U*a | | | GAG | |
| 1211 | C*a*GgAuC | 2787 | 1115-1135 | (VPmA)*C*uCu | 1213 | 1113-1135 | ACCAGGAUCA | 3925 |
| | aGuAuCgAg | | | CuCgAuAcUgAu | | | GUAUCGAGAG | |
| | AgA*g*U | | | CcUg*G*u | | | AGG | |
| 1212 | A*g*GaUcA | 2788 | 1116-1136 | (VPmG)*C*cUc | 1214 | 1114-1136 | CCAGGAUCAG | 3926 |
| | gUaUcGaGa | | | UcUcGaUaCuGa | | | UAUCGAGAGA | |
| | GaG*g*C | | | UcCu*G*g | | | GGC | |
| 1213 | C*c*UgGcA | 2789 | 1143-1163 | (VPmG)*G*aAa | 1215 | 1141-1163 | GGCCUGGCAG | 3927 |
| | gAaGgGcGc | | | GcGcCcUuCuGc | | | AAGGGCGCUU | |
| | UuU*c*C | | | CaGg*C*c | | | UCC | |
| 1214 | A*g*AaGgG | 2790 | 1149-1169 | (VPmG)*U*gGg | 1216 | 1147-1169 | GCAGAAGGGC | 3928 |
| | cGcUuUcCa | | | UgGaAaGcGcCc | | | GCUUUCCACC | |
| | CcC*a*C | | | UuCu*G*c | | | CAC | |
| 1215 | G*a*AgGgC | 2791 | 1150-1170 | (VPmA)*G*uGg | 1217 | 1148-1170 | CAGAAGGGCG | 3929 |
| | gCuUuCcAc | | | GuGgAaAgCgCc | | | CUUUCCACCC | |
| | CcA*c*U | | | CuUc*U*g | | | ACU | |
| 1216 | C*u*GuUuA | 2792 | 1177-1197 | (VPmU)*C*uCg | 1218 | 1175-1197 | CCCUGUUUAG | 3930 |
| | gUcCaCcAc | | | GuGgUgGaCuAa | | | UCCACCACCG | |
| | CgA*g*A | | | AcAg*G*g | | | AGA | |
| 1217 | U*g*UuUaG | 2793 | 1178-1198 | (VPmG)*U*cUc | 1219 | 1176-1198 | CCUGUUUAGU | 3931 |
| | uCcAcCaCc | | | GgUgGuGgAcUa | | | CCACCACCGA | |
| | GaG*a*C | | | AaCa*G*g | | | GAC | |
| 1218 | G*u*UuAgU | 2794 | 1179-1199 | (VPmU)*G*uCu | 1220 | 1177-1199 | CUGUUUAGUC | 3932 |
| | cCaCcAcCg | | | CgGuGgUgGaCu | | | CACCACCGAG | |
| | AgA*c*A | | | AaAc*A*g | | | ACA | |
| 1219 | U*u*UaGuC | 2795 | 1180-1200 | (VPmA)*U*gUc | 1221 | 1178-1200 | UGUUUAGUCC | 3933 |
| | cAcCaCcGa | | | UcGgUgGuGgAc | | | ACCACCGAGA | |
| | GaC*a*U | | | UaAa*C*a | | | CAU | |
| 1220 | U*u*AgUcC | 2796 | 1181-1201 | (VPmG)*A*uGu | 1222 | 1179-1201 | GUUUAGUCCA | 3934 |
| | aCcAcCgAg | | | CuCgGuGgUgGa | | | CCACCGAGAC | |
| | AcA*u*C | | | CuAa*A*c | | | AUC | |
| 1221 | U*a*GuCcA | 2797 | 1182-1202 | (VPmU)*G*aUg | 1223 | 1180-1202 | UUUAGUCCAC | 3935 |
| | cCaCcGaGa | | | UcUcGgUgGuGg | | | CACCGAGACA | |
| | CaU*c*A | | | AcUa*A*a | | | UCA | |
| 1222 | A*g*UcCaC | 2798 | 1183-1203 | (VPmG)*U*gAu | 1224 | 1181-1203 | UUAGUCCACC | 3936 |
| | cAcCgAgAc | | | GuCuCgGuGgUg | | | ACCGAGACAU | |
| | AuC*a*C | | | GaCu*A*a | | | CAC | |
| 1223 | G*u*CcAcC | 2799 | 1184-1204 | (VPmA)*G*uGa | 1225 | 1182-1204 | UAGUCCACCA | 3937 |
| | aCcGaGaCa | | | UgUcUcGgUgGu | | | CCGAGACAUC | |
| | UcA*c*U | | | GgAc*U*a | | | ACU | |
| 1224 | C*c*AcCaC | 2800 | 1186-1206 | (VPmA)*A*aGu | 1226 | 1184-1206 | GUCCACCACC | 3938 |
| | cGaGaCaUc | | | GaUgUcUcGgUg | | | GAGACAUCAC | |
| | AcU*u*U | | | GuGg*A*c | | | UUG | |
| 1225 | C*a*CcAcC | 2801 | 1187-1207 | (VPmA)*C*aAg | 1227 | 1185-1207 | UCCACCACCG | 3939 |
| | gAgAcAuCa | | | UgAuGuCuCgGu | | | AGACAUCACU | |
| | CuU*g*U | | | GgUg*G*a | | | UGG | |
| 1226 | A*c*CaCcG | 2802 | 1188-1208 | (VPmU)*C*cAa | 1228 | 1186-1208 | CCACCACCGA | 3940 |
| | aGaCaUcAc | | | GuGaUgUcUcGg | | | GACAUCACUU | |
| | UuG*g*A | | | UgGu*G*g | | | GGA | |
| 1227 | C*c*AcCgA | 2803 | 1189-1209 | (VPmG)*U*cCa | 1229 | 1187-1209 | CACCACCGAG | 3941 |
| | gAcAuCaCu | | | AgUgAuGuCuCg | | | ACAUCACUUG | |
| | UgG*a*C | | | GuGg*U*g | | | GAC | |
| 1228 | U*g*CuGcG | 2804 | 1283-1303 | (VPmA)*C*aUu | 1230 | 1281-1303 | GGUGCUGCGG | 3942 |
| | gUuGaAuCc | | | GgAuUcAaCcGc | | | UUGAAUCCAA | |
| | AaU*g*U | | | AgCa*C*c | | | UGG | |
| 1229 | A*g*CcUcC | 2805 | 1310-1330 | (VPmA)*G*aAa | 1231 | 1308-1330 | GGAGCCUCCC | 3943 |
| | cGcCaUgGa | | | UcCaUgGcGgGa | | | GCCAUGGAUU | |
| | UuU*c*U | | | GgCu*C*c | | | UCU | |
| 1230 | G*c*CuCcC | 2806 | 1311-1331 | (VPmG)*A*gAa | 1232 | 1309-1331 | GAGCCUCCCG | 3944 |
| | gCcAuGgAu | | | AuCcAuGgCgGg | | | CCAUGGAUUU | |
| | UuC*u*C | | | AgGc*U*c | | | CUC | |
| 1231 | C*u*CcCgC | 2807 | 1313-1333 | (VPmU)*A*gAg | 1233 | 1311-1333 | GCCUCCCGCC | 3945 |
| | cAuGgAuUu | | | AaAuCcAuGgCg | | | AUGGAUUUCU | |
| | CuC*u*A | | | GgAg*G*c | | | CUA | |
| 1232 | U*c*CcGcC | 2808 | 1314-1334 | (VPmA)*U*aGa | 1234 | 1312-1334 | CCUCCCGCCA | 3946 |
| | aUgGaUuUc | | | GaAaUcCaUgGc | | | UGGAUUUCUC | |
| | UcU*a*U | | | GgGa*G*g | | | UAG | |
| 1233 | C*c*CgCcA | 2809 | 1315-1335 | (VPmA)*C*uAg | 1235 | 1313-1335 | CUCCCGCCAU | 3947 |
| | uGgAuUuCu | | | AgAaAuCcAuGg | | | GGAUUUCUCU | |
| | CuA*g*U | | | CgGg*A*g | | | AGG | |
| 1234 | C*g*CcAuG | 2810 | 1317-1337 | (VPmA)*U*cCu | 1236 | 1315-1337 | CCCGCCAUGG | 3948 |
| | gAuUuCuCu | | | AgAgAaAuCcAu | | | AUUUCUCUAG | |
| | AgG*a*U | | | GgCg*G*g | | | GAG | |
| 1235 | U*a*GgAgA | 2811 | 1332-1352 | (VPmG)*C*cAg | 1237 | 1330-1352 | UCUAGGAGAC | 3949 |
| | cUuAgAgAg | | | CuCuCuAaGuCu | | | UUAGAGAGCU | |
| | CuG*g*C | | | CcUa*G*a | | | GGC | |
| 1236 | A*g*GaGaC | 2812 | 1333-1353 | (VPmU)*G*cCa | 1238 | 1331-1353 | CUAGGAGACU | 3950 |
| | uUaGaGaGc | | | GcUcUcUaAgUc | | | UAGAGAGCUG | |
| | UgG*c*A | | | UcCu*A*g | | | GCA | |
| 1237 | G*g*AaCaC | 2813 | 1334-1354 | (VPmG)*C*gGu | 1239 | 1332-1354 | AGGGAACACG | 3951 |
| | gUcUaGcCc | | | GgGcUaGaCgUg | | | UCUAGCCCAC | |
| | AcC*g*C | | | UuCc*C*u | | | CGC | |
| 1238 | C*c*UaUgC | 2814 | 1396-1416 | (VPmU)*U*gCa | 1240 | 1394-1416 | GCCCUAUGCA | 3952 |
| | aAaGgUuAc | | | GuAaCcUuUgCa | | | AAGGUUACUG | |
| | UgC*a*A | | | UaGg*G*c | | | CAA | |
| 1239 | C*u*AuGcA | 2815 | 1397-1417 | (VPmG)*U*uGc | 1241 | 1395-1417 | CCCUAUGCAA | 3953 |
| | aAgGuUaCu | | | AgUaAcCuUuGc | | | AGGUUACUGC | |
| | GcA*a*C | | | AuAg*G*g | | | AAC | |
| 1240 | U*a*UgCaA | 2816 | 1398-1418 | (VPmG)*G*uUg | 1242 | 1396-1418 | UAUGCAAAGG | 3954 |
| | aGgUuAcUg | | | CaGuAaCcUuUg | | | UUACUGCAAC | |
| | CaA*c*C | | | CaUa*G*g | | | C | |
| 1241 | U*g*CaAaG | 2817 | 1400-1420 | (VPmA)*U*gGu | 1243 | 1398-1420 | UAUGCAAAGG | 3955 |
| | gUuAcUgCa | | | UgCaGuAaCcUu | | | UUACUGCAAC | |
| | AcC*a*U | | | UgCa*U*a | | | CAU | |
| 1242 | G*c*AaAgG | 2818 | 1411-1421 | (VPmA)*A*uGg | 1244 | 1399-1421 | AUGCAAAGGU | 3956 |
| | uUaCuGcAa | | | UuGcAgUaAcCu | | | UACUGCAACC | |
| | CcA*u*U | | | UuGc*A*u | | | AUU | |
| 1243 | C*a*AaGgU | 2819 | 1402-1422 | (VPmG)*A*aUg | 1245 | 1400-1422 | UGCAAAGGUU | 3957 |
| | uAcUgCaAc | | | GuUgCaGuAaCc | | | ACUGCAACCA | |
| | CaU*u*C | | | UuUg*C*a | | | UUC | |
| 1244 | A*a*AgGuU | 2820 | 1403-1423 | (VPmG)*G*aAu | 1246 | 1401-1423 | GCAAAGGUUA | 3958 |
| | aCuGcAaCc | | | GgUuGcAgUaAc | | | CUGCAACCAU | |
| | AuU*c*C | | | CuUu*G*c | | | UCC | |
| 1245 | A*a*GgUuA | 2821 | 1404-1424 | (VPmU)*G*gAa | 1247 | 1402-1424 | CAAAGGUUAC | 3959 |
| | cUgCaAcCa | | | UgGuUgCaGuAa | | | UGCAACCAUU | |
| | UuC*c*A | | | CcUu*U*g | | | CCA | |
| 1246 | A*g*GuUaC | 2822 | 1405-1425 | (VPmA)*U*gGa | 1248 | 1403-1425 | AAAGGUUACU | 3960 |
| | uGcAaCcAu | | | AuGgUuGcAgUa | | | GCAACCAUUC | |
| | UcC*a*U | | | AcCu*U*u | | | CAG | |
| 1247 | G*g*UuAcU | 2823 | 1406-1426 | (VPmG)*C*uGg | 1249 | 1404-1426 | AAGGUUACUG | 3961 |
| | gCaAcCaUu | | | AaUgGuUgCaGu | | | CAACCAUUCC | |
| | CcA*g*C | | | AaCc*U*u | | | AGC | |
| 1248 | U*a*CuGcA | 2824 | 1409-1429 | (VPmA)*U*gGc | 1250 | 1407-1429 | GUUACUGCAA | 3962 |
| | aCcAuUcCa | | | UgGaAuGgUuGc | | | CCAUUCCAGC | |
| | GcC*a*U | | | AgUa*A*c | | | CA | |
| 1249 | C*g*GuCaA | 2825 | 1502-1522 | (VPmA)*G*cAu | 1251 | 1500-1522 | CCCGGUCAAG | 3963 |
| | gUcCaAgUc | | | GaCuUgGaCuUg | | | UCCAAGUCAU | |
| | AuG*c*U | | | AcCg*G*g | | | GC | |
| 1250 | G*g*UcAaG | 2826 | 1503-1523 | (VPmU)*C*gCa | 1252 | 1501-1523 | CCGGUCAAGU | 3964 |
| | uCcAaGuCa | | | UgAcUuGgAcUu | | | CCAAGUCAUG | |
| | UgC*g*A | | | GaCc*G*g | | | CGA | |
| 1251 | G*u*CaAgU | 2827 | 1504-1524 | (VPmA)*U*cGc | 1253 | 1502-1524 | CGGUCAAGUC | 3965 |
| | cCaAgUcAu | | | AuGaCuUgGaCu | | | CAAGUCAUGC | |
| | GcG*a*U | | | UgAc*C*g | | | GAG | |
| 1252 | U*c*AaGuC | 2828 | 1505-1525 | (VPmA)*C*uCg | 1254 | 1503-1525 | GGUCAAGUCC | 3966 |
| | cAaGuCaUg | | | CaUgAcUuGgAc | | | AAGUCAUGCG | |
| | CgA*g*U | | | UuGa*C*c | | | AGU | |
| 1253 | C*a*AgUcC | 2829 | 1506-1526 | (VPmA)*A*cUc | 1255 | 1504-1526 | GUCAAGUCCA | 3967 |
| | aAgUcAuGc | | | GcAuGaCuUgGa | | | AGUCAUGCGA | |
| | GaG*u*U | | | CuUg*A*c | | | GUU | |
| 1254 | A*a*GuCcA | 2830 | 1507-1527 | (VPmG)*A*aCu | 1256 | 1505-1527 | UCAAGUCCAA | 3968 |
| | aGuCaUgCg | | | CgCaUgAcUuGg | | | GUCAUGCGAG | |
| | AgU*u*C | | | AcUu*G*a | | | UUC | |
| 1255 | A*g*UcCaA | 2831 | 1508-1528 | (VPmA)*G*aAc | 1257 | 1506-1528 | CAAGUCCAAG | 3969 |
| | gUcAuGcGa | | | UcGcAuGaCuUg | | | UCAUGCGAGU | |
| | GuU*c*U | | | GaCu*U*g | | | UCU | |
| 1256 | G*u*CcAaG | 2832 | 1509-1529 | (VPmA)*A*gAa | 1258 | 1507-1529 | AAGUCCAAGU | 3970 |
| | uCaUgCgAg | | | CuCgCaUgAcUu | | | CAUGCGAGUU | |
| | UuC*u*U | | | GgAc*U*u | | | CUG | |
| 1257 | U*c*CaAgU | 2833 | 1510-1530 | (VPmG)*C*aGa | 1259 | 1508-1530 | AGUCCAAGUC | 3971 |
| | cAuGcGaGu | | | AcUcGcAuGaCu | | | AUGCGAGUUC | |
| | UcU*g*C | | | UgGa*C*u | | | UGC | |
| 1258 | C*c*AaGuC | 2834 | 1511-1531 | (VPmA)*G*cAg | 1260 | 1509-1531 | GUCCAAGUCA | 3972 |
| | aUgCgAgUu | | | AaCuCgCaUgAc | | | UGCGAGUUCU | |
| | CuG*c*U | | | UuGg*A*c | | | GCG | |
| 1259 | C*a*AgUcA | 2835 | 1512-1532 | (VPmA)*C*gCa | 1261 | 1510-1532 | UCCAAGUCAU | 3973 |
| | uGcGaGuUc | | | GaAcUcGcAuGa | | | GCGAGUUCUG | |
| | UgC*g*U | | | CuUg*G*a | | | CGG | |
| 1260 | A*g*UcAuG | 2836 | 1514-1534 | (VPmU)*G*cCg | 1262 | 1512-1534 | CAAGUCAUGC | 3974 |
| | cGaGuUcUg | | | CaGaAcUcGcAu | | | GAGUUCUGCG | |
| | CgG*c*A | | | GaCu*U*g | | | GCA | |
| 1261 | G*u*CaUgC | 2837 | 1515-1535 | (VPmU)*U*gCc | 1263 | 1513-1535 | AAGUCAUGCG | 3975 |
| | gAgUuCuGc | | | GcAgAaCuCgCa | | | AGUUCUGCGG | |
| | GgC*a*A | | | UgAc*U*u | | | CAA | |
| 1262 | U*c*AuGcG | 2838 | 1516-1536 | (VPmA)*U*uGc | 1264 | 1514-1536 | AGUCAUGCGA | 3976 |
| | aGuUcUgCg | | | CgCaGaAcUcGc | | | GUUCUGCGGC | |
| | GcA*a*U | | | AuGa*C*u | | | AAG | |
| 1263 | G*c*GaGuU | 2839 | 1520-1540 | (VPmA)*C*gUc | 1265 | 1518-1540 | AUGCGAGUUC | 3977 |
| | cUgCgGcAa | | | UuGcCgCaGaAc | | | UGCGGCAAGA | |
| | GaC*g*U | | | UcGc*A*u | | | CGU | |
| 1264 | C*g*AgUuC | 2840 | 1521-1541 | (VPmA)*A*cGu | 1266 | 1519-1541 | UGCGAGUUCU | 3978 |
| | uGcGgCaAg | | | CuUgCcGcAgAa | | | GCGGCAAGAC | |
| | AcG*u*U | | | CuCg*C*a | | | GUU | |
| 1265 | G*a*GuUcU | 2841 | 1522-1542 | (VPmG)*A*aCg | 1267 | 1520-1542 | GCGAGUUCUG | 3979 |
| | gCgGcAaGa | | | UcUuGcCgCaGa | | | CGGCAAGACG | |
| | CgU*u*C | | | AcUc*G*c | | | UUC | |
| 1266 | A*g*UuCuG | 2842 | 1523-1543 | (VPmU)*G*aAc | 1268 | 1521-1543 | CGAGUUCUGC | 3980 |
| | cGgCaAgAc | | | GuCuUgCcGcAg | | | GGCAAGACGU | |
| | GuU*c*A | | | AaCu*C*g | | | UCA | |
| 1267 | G*u*UcUgC | 2843 | 1524-1544 | (VPmU)*U*gAa | 1269 | 1522-1544 | GAGUUCUGCG | 3981 |
| | gGcAaGaCg | | | CgUcUuGcCgCa | | | GCAAGACGUU | |
| | UuC*a*A | | | GaAc*U*c | | | CAA | |
| 1268 | U*u*CuGcG | 2844 | 1525-1545 | (VPmU)*U*uGa | 1270 | 1523-1545 | AGUUCUGCGG | 3982 |
| | gCaAgAcGu | | | AcGuCuUgCcGc | | | CAAGACGUUC | |
| | UcA*a*A | | | AgAa*C*u | | | AAA | |
| 1269 | U*c*UgCgG | 2845 | 1526-1546 | (VPmA)*U*uUg | 1271 | 1524-1546 | GUUCUGCGGC | 3983 |
| | cAaGaCgUu | | | AaCgUcUuGcCg | | | AAGACGUUCA | |
| | CaA*a*U | | | CaGa*A*c | | | AAU | |
| 1270 | C*u*GcGgC | 2846 | 1527-1547 | (VPmA)*A*uUu | 1272 | 1525-1547 | UUCUGCGGCA | 3984 |
| | aAgAcGuUc | | | GaAcGuCuUgCc | | | AGACGUUCAA | |
| | AaA*u*U | | | GcAg*A*a | | | AUU | |
| 1271 | U*g*CgGcA | 2847 | 1528-1548 | (VPmA)*A*aUu | 1273 | 1526-1548 | UCUGCGGCAA | 3985 |
| | aGaCgUuCa | | | UgAaCgUcUuGc | | | GACGUUCAAA | |
| | AaU*u*U | | | CgCa*G*a | | | UUU | |
| 1272 | G*c*GgCaA | 2848 | 1529-1549 | (VPmG)*A*aAu | 1274 | 1527-1549 | CUGCGGCAAG | 3986 |
| | gAcGuUcAa | | | UuGaAcGuCuUg | | | ACGUUCAAAU | |
| | AuU*u*C | | | CcGc*A*g | | | UUC | |
| 1273 | C*a*UgAcG | 2849 | 1683-1703 | (VPmU)*C*gUc | 1275 | 1681-1703 | CCCAUGACGG | 3987 |
| | gUcAaGuCc | | | GgAcUuGaCcGu | | | UCAAGUCCGA | |
| | GaC*g*A | | | CaUg*G*g | | | CGA | |
| 1274 | C*a*AgUcC | 2850 | 1773-1793 | (VPmA)*A*cUu | 1276 | 1771-1793 | CUCAAGUCCG | 3988 |
| | gUgGuGgCc | | | GgCcAcCaCgGa | | | UGGUGGCCAA | |
| | AaG*u*U | | | CuUg*A*g | | | GUU | |
| 1275 | A*a*GuCcG | 2851 | 1774-1794 | (VPmG)*A*aCu | 1277 | 1772-1794 | UCAAGUCCGU | 3989 |
| | uGgUgGcCa | | | UgGcCaCcAcGg | | | GGUGGCCAAG | |
| | AgU*u*C | | | AcUu*G*a | | | UUC | |
| 1276 | U*c*CgUgG | 2852 | 1777-1797 | (VPmA)*U*uGa | 1278 | 1775-1797 | AGUCCGUGGU | 3990 |
| | uGgCcAaGu | | | AcUuGgCcAcCa | | | GGCCAAGUUC | |
| | UcA*a*U | | | CgGa*C*u | | | AAG | |
| 1277 | A*g*AgGaG | 2853 | 1845-1865 | (VPmU)*C*uUc | 1279 | 1843-1865 | GAAGAGGAGG | 3991 |
| | gAcGaCgAg | | | CuCgUcGuCcUc | | | ACGACGAGGA | |
| | GaA*g*A | | | CuCu*U*c | | | AGA | |
| 1278 | G*a*GgAgG | 2854 | 1846-1866 | (VPmA)*U*cUu | 1280 | 1844-1866 | AAGAGGAGGA | 3992 |
| | aCgAcGaGg | | | CcUcGuCgUcCu | | | CGACGAGGAA | |
| | AaG*a*U | | | CcUc*U*u | | | GAG | |
| 1279 | G*g*AgCuG | 2855 | 1893-1913 | (VPmA)*U*cUc | 1281 | 1891-1913 | GAGGAGCUGA | 3993 |
| | aCgGaGaGc | | | GcUcUcCgUcAg | | | CGGAGAGCGA | |
| | GaG*a*U | | | CuCc*U*c | | | GAG | |
| 1280 | A*g*CuGaC | 2856 | 1895-1915 | (VPmA)*C*cUc | 1282 | 1893-1915 | GGAGCUGACG | 3994 |
| | gGaGaGcGa | | | UcGcUcUcCgUc | | | GAGAGCGAGA | |
| | GaG*g*U | | | AgCu*C*c | | | GGG | |
| 1281 | G*c*UgAcG | 2857 | 1896-1916 | (VPmA)*C*cCu | 1283 | 1894-1916 | GAGCUGACGG | 3995 |
| | gAgAgCgAg | | | CuCgCuCuCcGu | | | AGAGCGAGAG | |
| | AgG*g*U | | | CaGc*U*c | | | GGU | |
| 1282 | C*u*GaCgG | 2858 | 1897-1917 | (VPmA)*A*cCc | 1284 | 1895-1917 | AGCUGACGGA | 3996 |
| | aGaGcGaGa | | | UcUcGcUcUcCg | | | GAGCGAGAGG | |
| | GgG*u*U | | | UcAg*C*u | | | GUG | |
| 1283 | C*a*UgCaG | 2859 | 2046-2066 | (VPmG)*C*cUc | 1285 | 2044-2066 | UCCAUGCAGC | 3997 |
| | cAcUuCaGc | | | GcUgAaGuGcUg | | | ACUUCAGCGA | |
| | GaG*g*C | | | CaUg*G*a | | | GGC | |
| 1284 | U*g*CaGcA | 2860 | 2048-2068 | (VPmA)*G*gCc | 1286 | 2046-2068 | CAUGCAGCAC | 3998 |
| | cUuCaGcGa | | | UcGcUgAaGuGc | | | UUCAGCGAGG | |
| | GgC*c*U | | | UgCa*U*g | | | CCU | |
| 1285 | U*c*AgCgA | 2861 | 2057-2077 | (VPmA)*C*uGg | 1287 | 2055-2077 | CUUCAGCGAG | 3999 |
| | gGcCuUcCa | | | UgGaAgGcCuCg | | | GCCUUCCACC | |
| | CcA*g*U | | | CuGa*A*g | | | AGG | |
| 1286 | A*c*CgCaU | 2862 | 2168-2188 | (VPmA)*A*gUg | 1288 | 2166-2188 | GGACCGCAUA | 4000 |
| | aGaCgAuGg | | | CcAuCgUcUaUg | | | GACGAUGGCA | |
| | CaC*u*U | | | CgGu*C*c | | | CU | |
| 1287 | C*g*CaUaG | 2863 | 2170-2190 | (VPmA)*A*cAg | 1289 | 2168-2190 | ACCGCAUAGA | 4001 |
| | aCgAuGgCa | | | UgCcAuCgUcUa | | | CGAUGGCACU | |
| | CuG*u*U | | | UgCg*G*u | | | GUU | |
| 1288 | C*a*UaGaC | 2864 | 2172-2192 | (VPmU)*U*aAc | 1290 | 2170-2192 | CGCAUAGACG | 4002 |
| | gAuGgCaCu | | | AgUgCcAuCgUc | | | AUGGCACUGU | |
| | GuU*a*A | | | UaUg*C*g | | | UAA | |
| 1289 | A*g*GcAgC | 2865 | 2383-2403 | (VPmG)*A*aGg | 1291 | 2381-2403 | CCAGGCAGCU | 4003 |
| | uCaAaGaUc | | | GaUcUuUgAgCu | | | CAAAGAUCCC | |
| | CcU*u*C | | | GcCu*G*g | | | UUC | |
| 1290 | G*g*CaGcU | 2866 | 2384-2404 | (VPmG)*G*aAg | 1292 | 2382-2404 | CAGGCAGCUC | 4004 |
| | cAaAgAuCc | | | GgAuCuUuGaGc | | | AAAGAUCCCU | |
| | CuU*c*C | | | UgCc*U*g | | | UCC | |
| 1291 | G*c*AgCuC | 2867 | 2385-2405 | (VPmA)*G*gAa | 1293 | 2383-2405 | AGGCAGCUCA | 3562 |
| | aAaGaUcCc | | | GgGaUcUuUgAg | | | AAGAUCCCUU | |
| | UuC*c*U | | | CuGc*C*u | | | CCU | |
| 1292 | U*c*GgAgA | 2868 | 2411-2431 | (VPmG)*C*gAu | 1294 | 2409-2431 | CUUCGGAGAC | 4005 |
| | cUcCaGaCa | | | UgUcUgGaGuCu | | | UCCAGACAAU | |
| | AuC*g*C | | | CcGa*A*g | | | CGC | |
| 1293 | C*g*GaGaC | 2869 | 2412-2432 | (VPmG)*G*cGa | 1295 | 2410-2432 | UUCGGAGACU | 4006 |
| | uCcAgAcAa | | | UuGuCuGgAgUc | | | CCAGACAAUC | |
| | UcG*c*C | | | UcCg*A*a | | | GCC | |
| 1294 | G*g*AgAcU | 2870 | 2413-2433 | (VPmA)*G*gCg | 1296 | 2411-2433 | UCGGAGACUC | 4007 |
| | cCaGaCaAu | | | AuUgUcUgGaGu | | | CAGACAAUCG | |
| | CgC*c*U | | | CuCc*G*a | | | CCU | |
| 1295 | G*a*GaCuC | 2871 | 2414-2434 | (VPmA)*A*gGc | 1297 | 2412-2434 | CGGAGACUCC | 4008 |
| | cAgAcAaUc | | | GaUuGuCuGgAg | | | AGACAAUCGC | |
| | GcC*u*U | | | UcUc*C*g | | | CUU | |
| 1296 | A*g*AcUcC | 2872 | 2415-2435 | (VPmA)*A*aGg | 1298 | 2413-2435 | GGAGACUCCA | 4009 |
| | aGaCaAuCg | | | CgAuUgUcUgGa | | | GACAAUCGCC | |
| | CcU*u*U | | | GuCu*C*c | | | UUU | |
| 1297 | G*a*CuCcA | 2873 | 2416-2436 | (VPmA)*A*aAg | 1299 | 2414-2436 | GAGACUCCAG | 4010 |
| | gAcAaUcGc | | | GcGaUuGuCuGg | | | ACAAUCGCCU | |
| | CuU*u*U | | | AgUc*U*c | | | UUU | |
| 1298 | A*c*UcCaG | 2874 | 2417-2437 | (VPmA)*A*aAa | 1300 | 2415-2437 | AGACUCCAGA | 4011 |
| | aCaAuCgCc | | | GgCgAuUgUcUg | | | CAAUCGCCUU | |
| | UuU*u*U | | | GaGu*C*u | | | UUG | |
| 1299 | C*u*CcAgA | 2875 | 2418-2438 | (VPmG)*C*aAa | 1301 | 2416-2438 | GACUCCAGAC | 4012 |
| | cAaUcGcCu | | | AgGcGaUuGuCu | | | AAUCGCCUUU | |
| | UuU*g*C | | | GgAg*U*c | | | UGC | |
| 1300 | C*c*AgAcA | 2876 | 2420-2440 | (VPmA)*G*gCa | 1302 | 2418-2440 | CUCCAGACAA | 4013 |
| | aUcGcCuUu | | | AaAgGcGaUuGu | | | UCGCCUUUUG | |
| | UgC*c*U | | | CuGg*A*g | | | CCU | |
| 1301 | C*a*GaCaA | 2877 | 2421-2441 | (VPmG)*A*gGc | 1303 | 2419-2441 | UCCAGACAAU | 4014 |
| | uCgCcUuUu | | | AaAaGgCgAuUg | | | CGCCUUUUGC | |
| | GcC*u*C | | | UcUg*G*a | | | CUC | |
| 1302 | G*a*CgCaG | 2878 | 2600-2620 | (VPmA)*C*uCa | 1304 | 2598-2620 | CAGACGCAGC | 4015 |
| | cGaCaCuUg | | | CaAgUgUcGcUg | | | GACACUUGUG | |
| | UgA*g*U | | | CgUc*U*g | | | AGU | |
| 1303 | C*g*CaGcG | 2879 | 2602-2622 | (VPmG)*U*aCu | 1305 | 2600-2622 | GACGCAGCGA | 4016 |
| | aCaCuUgUg | | | CaCaAgUgUcGc | | | CACUUGUGAG | |
| | AgU*a*C | | | UgCg*U*c | | | UAC | |
| 1304 | G*c*AgCgA | 2880 | 2603-2623 | (VPmA)*G*uAc | 1306 | 2601-2623 | ACGCAGCGAC | 4017 |
| | cAcUuGuGa | | | UcAcAaGuGuCg | | | ACUUGUGAGU | |
| | GuA*c*U | | | CuGc*G*u | | | ACU | |
| 1305 | C*a*GcGaC | 2881 | 2604-2624 | (VPmA)*A*gUa | 1307 | 2602-2624 | CGCAGCGACA | 4018 |
| | aCuUgUgAg | | | CuCaCaAgUgUc | | | CUUGUGAGUA | |
| | UaC*u*U | | | GcUg*C*g | | | CUG | |
| 1306 | G*a*CaCuU | 2882 | 2608-2628 | (VPmA)*C*cAc | 1308 | 2606-2628 | GCGACACUUG | 4019 |
| | gUgAgUaCu | | | AgUaCuCaCaAg | | | UGAGUACUGU | |
| | GuG*g*U | | | UgUc*G*c | | | GGG | |
| 1307 | A*c*AcUuG | 2883 | 2609-2629 | (VPmU)*C*cCa | 1309 | 2607-2629 | CGACACUUGU | 4020 |
| | uGaGuAcUg | | | CaGuAcUcAcAa | | | GAGUACUGUG | |
| | UgG*g*A | | | GuGu*C*g | | | GGA | |
| 1308 | C*a*CuUgU | 2884 | 2610-2630 | (VPmU)*U*cCc | 1310 | 2608-2630 | GACACUUGUG | 4021 |
| | gAgUaCuGu | | | AcAgUaCuCaCa | | | AGUACUGUGG | |
| | GgG*a*A | | | AgUg*U*c | | | GAA | |
| 1309 | A*c*UuGuG | 2885 | 2611-2631 | (VPmU)*U*uCc | 1311 | 2609-2631 | ACACUUGUGA | 4022 |
| | aGuAcUgUg | | | CaCaGuAcUcAc | | | GUACUGUGGG | |
| | GgA*a*A | | | AaGu*G*u | | | AA | |
| 1310 | C*u*UgUgA | 2886 | 2612-2632 | (VPmA)*U*uUc | 1312 | 2610-2632 | CACUUGUGAG | 4023 |
| | gUaCuGuGg | | | CcAcAgUaCuCa | | | UACUGUGGGA | |
| | GaA*a*U | | | CaAg*U*g | | | AAG | |
| 1311 | U*u*GuGaG | 2887 | 2613-2633 | (VPmA)*C*uUu | 1313 | 2611-2633 | ACUUGUGAGU | 4024 |
| | uAcUgUgGg | | | CcCaCaGuAcUc | | | ACUGUGGGAA | |
| | AaA*g*U | | | AcAa*G*u | | | AGU | |
| 1312 | U*g*UgAgU | 2888 | 2614-2634 | (VPmG)*A*cUu | 1314 | 2612-2634 | CUUGUGAGUA | 4025 |
| | aCuGuGgGa | | | UcCcAcAgUaCu | | | CUGUGGGAAA | |
| | AaG*u*C | | | CaCa*A*g | | | GUC | |
| 1313 | G*u*GaGuA | 2889 | 2615-2635 | (VPmA)*G*aCu | 1315 | 2613-2635 | UUGUGAGUAC | 4026 |
| | cUgUgGgAa | | | UuCcCaCaGuAc | | | UGUGGGAAAG | |
| | AgU*c*U | | | UcAc*A*a | | | UCU | |
| 1314 | G*u*CuUcA | 2890 | 2632-2652 | (VPmA)*U*uGc | 1316 | 2630-2652 | AAGUCUUCAA | 4027 |
| | aGaAcUgUa | | | UaCaGuUcUuGa | | | GAACUGUAGC | |
| | GcA*a*U | | | AgAc*U*u | | | AAU | |
| 1315 | U*c*UuCaA | 2891 | 2633-2653 | (VPmG)*A*uUg | 1317 | 2631-2653 | AGUCUUCAAG | 4028 |
| | gAaCuGuAg | | | CuAcAgUuCuUg | | | AACUGUAGCA | |
| | CaA*u*C | | | AaGa*C*u | | | AUC | |
| 1316 | C*u*UcAaG | 2892 | 2634-2654 | (VPmA)*G*aUu | 1318 | 2632-2654 | GUCUUCAAGA | 4029 |
| | aAcUgUaGc | | | GcUaCaGuUcUu | | | ACUGUAGCAA | |
| | AaU*c*U | | | GaAg*A*c | | | UCU | |
| 1317 | U*u*CaAgA | 2893 | 2635-2655 | (VPmG)*A*gAu | 1319 | 2633-2655 | UCUUCAAGAA | 4030 |
| | aCuGuAgCa | | | UgCuAcAgUuCu | | | CUGUAGCAAU | |
| | AuC*u*C | | | UgAa*G*a | | | CUC | |
| 1318 | U*c*AaGaA | 2894 | 2636-2656 | (VPmU)*G*aGa | 1320 | 2634-2656 | CUUCAAGAAC | 4031 |
| | cUgUaGcAa | | | UuGcUaCaGuUc | | | UGUAGCAAUC | |
| | UCU*c*A | | | UuGa*A*g | | | UCA | |
| 1319 | C*a*AgAaC | 2895 | 2637-2657 | (VPmG)*U*gAg | 1321 | 2635-2657 | UUCAAGAACU | 4032 |
| | uGuAgCaAu | | | AuUgCuAcAgUu | | | GUAGCAAUCU | |
| | CuC*a*C | | | CuUg*A*a | | | CAC | |
| 1320 | A*a*GaAcU | 2896 | 2638-2658 | (VPmA)*G*uGa | 1322 | 2636-2658 | UCAAGAACUG | 4033 |
| | gUaGcAaUc | | | GaUuGcUaCaGu | | | UAGCAAUCUC | |
| | UcA*c*U | | | UcUu*G*a | | | ACU | |
| 1321 | G*a*GaAgC | 2897 | 2667-2687 | (VPmA)*U*uUc | 1323 | 2665-2687 | AGGAGAAGCC | 4034 |
| | CAcAcGgGc | | | GcCcGuGuGgCu | | | ACACGGGCGA | |
| | GaA*a*U | | | UcUc*C*u | | | AAG | |
| 1322 | A*g*CcAcA | 2898 | 2671-2691 | (VPmA)*G*gCc | 1324 | 2669-2691 | GAAGCCACAC | 4035 |
| | cGgGcGaAa | | | UuUcGcCcGuGu | | | GGGCGAAAGG | |
| | GgC*c*U | | | GgCu*U*c | | | CCU | |
| 1323 | G*c*CaCaC | 2899 | 2672-2692 | (VPmA)*A*gGc | 1325 | 2670-2692 | AAGCCACACG | 4036 |
| | gGgCgAaAg | | | CuUuCgCcCgUg | | | GGCGAAAGGC | |
| | GcC*u*U | | | UgGc*U*u | | | CUU | |
| 1324 | A*c*AcGgG | 2900 | 2674-2695 | (VPmU)*A*uAa | 1326 | 2673-2695 | CCACACGGGC | 4037 |
| | cGaAaGgCc | | | GgCcUuUcGcCc | | | GAAAGGCCUU | |
| | UuA*u*A | | | GuGu*G*g | | | AUA | |
| 1325 | C*a*CgGgC | 2901 | 2676-2696 | (VPmU)*U*aUa | 1327 | 2674-2696 | CACACGGGCG | 4038 |
| | gAaAgGcCu | | | AgGcCuUuCgCc | | | AAAGGCCUUA | |
| | UaU*a*A | | | CgUg*U*g | | | UAA | |
| 1326 | A*c*GgGcG | 2902 | 2677-2697 | (VPmU)*U*uAu | 1328 | 2675-2697 | ACACGGGCGA | 4039 |
| | aAaGgCcUu | | | AaGgCcUuUcGc | | | AAGGCCUUAU | |
| | AuA*a*A | | | CcGu*G*u | | | AAA | |
| 1327 | C*g*GgCgA | 2903 | 2678-2698 | (VPmA)*U*uUa | 1329 | 2676-2698 | CACGGGCGAA | 4040 |
| | aAgGcCuUa | | | UaAgGcCuUuCg | | | AGGCCUUAUA | |
| | UaA*a*U | | | CcCg*U*g | | | AAU | |
| 1328 | G*g*GcGaA | 2904 | 2679-2699 | (VPmA)*A*uUu | 1330 | 2677-2699 | ACGGGCGAAA | 4041 |
| | aGgCcUuAu | | | AuAaGgCcUuUc | | | GGCCUUAUAA | |
| | AaA*u*U | | | GcCc*G*u | | | AUG | |
| 1329 | G*g*CgAaA | 2905 | 2680-2700 | (VPmG)*C*aUu | 1331 | 2678-2700 | CGGGCGAAAG | 4042 |
| | gGcCuUaUa | | | UaUaAgGcCuUu | | | GCCUUAUAAA | |
| | AaU*g*C | | | CgCc*C*g | | | UGC | |
| 1330 | G*c*GaAaG | 2906 | 2681-2701 | (VPmA)*G*cAu | 1332 | 2679-2701 | GGGCGAAAGG | 4043 |
| | gCcUuAuAa | | | UuAuAaGgCcUu | | | CCUUAUAAAU | |
| | AuG*c*U | | | UcGc*C*c | | | GCG | |
| 1331 | G*a*AaGgC | 2907 | 2683-2703 | (VPmA)*U*cGc | 1333 | 2681-2703 | GCGAAAGGCC | 4044 |
| | cUuAuAaAu | | | AuUuAuAaGgCc | | | UUAUAAAUGC | |
| | GcG*a*U | | | UuUc*G*C | | | GAG | |
| 1332 | A*a*AgGcC | 2908 | 2684-2704 | (VPmG)*C*uCg | 1334 | 2682-2704 | CGAAAGGCCU | 4045 |
| | uUaUaAaUg | | | CaUuUaUaAgGc | | | UAUAAAUGCG | |
| | CgA*g*C | | | CuUu*C*g | | | AGG | |
| 1333 | A*a*GgCcU | 2909 | 2685-2705 | (VPmA)*G*cUc | 1335 | 2683-2705 | GAAAGGCCUU | 4046 |
| | uAuAaAuGc | | | GcAuUuAuAaGg | | | AUAAAUGCGA | |
| | GaG*c*U | | | CcUu*U*c | | | GCU | |
| 1334 | A*g*GcCuU | 2910 | 2686-2706 | (VPmA)*A*gCu | 1336 | 2684-2706 | AAAGGCCUUA | 4047 |
| | aUaAaUgCg | | | CgCaUuUaUaAg | | | UAAAUGCGAG | |
| | AgC*u*U | | | GcCu*U*u | | | CUG | |
| 1335 | G*g*CcUuA | 2911 | 2687-2707 | (VPmA)*C*aGc | 1337 | 2685-2707 | AAGGCCUUAU | 4048 |
| | uAaAuGcGa | | | UcGcAuUuAuAa | | | AAAUGCGAGC | |
| | GcU*g*U | | | GgCc*U*u | | | UG | |
| 1336 | G*c*CuUaU | 2912 | 2688-2708 | (VPmA)*A*cAg | 1338 | 2686-2708 | AGGCCUUAUA | 4049 |
| | aAaUgCgAg | | | CuCgCaUuUaUa | | | AAUGCGAGCU | |
| | CuG*u*U | | | AgGc*C*u | | | GUG | |
| 1337 | C*c*UuAuA | 2913 | 2689-2709 | (VPmG)*C*aCa | 1339 | 2687-2709 | GGCCUUAUAA | 4249 |
| | aAuGcGaGc | | | GcUcGcAuUuAu | | | AUGCGAGCUG | |
| | UgU*g*C | | | AaGg*C*c | | | UGC | |
| 1338 | C*u*UaUaA | 2914 | 2690-2710 | (VPmU)*G*cAc | 1340 | 2688-2710 | GCCUUAUAAA | 4250 |
| | aUgCgAgCu | | | AgCuCgCaUuUa | | | UGCGAGCUGU | |
| | GuG*c*A | | | UaAg*G*c | | | GCA | |
| 1339 | U*u*AuAaA | 2915 | 2691-2711 | (VPmU)*U*gCa | 1341 | 2689-2711 | GCCUUAUAAA | 4251 |
| | uGcGaGcUg | | | CaGcUcGcAuUu | | | UGCGAGCUGU | |
| | UgC*a*A | | | AuAa*G*g | | | GCAA | |
| 1340 | U*a*UaAaU | 2916 | 2692-2712 | (VPmG)*U*uGc | 1342 | 2690-2712 | CUUAUAAAUG | 4252 |
| | gCgAgCuGu | | | AcAgCuCgCaUu | | | CGAGCUGUGC | |
| | GcA*a*C | | | UaUa*A*g | | | AACU | |
| 1341 | A*u*AaAuG | 2917 | 2693-2713 | (VPmA)*G*uUg | 1343 | 2691-2713 | UUAUAAAUGC | 4253 |
| | cGaGcUgUg | | | CaCaGcUcGcAu | | | GAGCUGUGCA | |
| | CaA*c*U | | | UuAu*A*a | | | ACU | |
| 1342 | U*a*AaUgC | 2918 | 2694-2714 | (VPmU)*A*gUu | 1344 | 2692-2714 | UAUAAAUGCG | 4254 |
| | gAgCuGuGc | | | GcAcAgCuCgCa | | | AGCUGUGCAA | |
| | AaC*u*A | | | UuUa*U*a | | | CUA | |
| 1343 | A*a*AuGcG | 2919 | 2695-2715 | (VPmA)*U*aGu | 1345 | 2693-2715 | AUAAAUGCGA | 4255 |
| | aGcUgUgCa | | | UgCaCaGcUcGc | | | GCUGUGCAAC | |
| | AcU*a*U | | | AuUu*A*u | | | UAU | |
| 1344 | A*a*UgCgA | 2920 | 2696-2716 | (VPmA)*A*uAg | 1346 | 2694-2716 | UAAAUGCGAG | 4256 |
| | gCuGuGcAa | | | UuGcAcAgCuCg | | | CUGUGCAACU | |
| | CuA*u*U | | | CaUu*U*a | | | AUG | |
| 1345 | A*u*GcGaG | 2921 | 2697-2717 | (VPmG)*C*aUa | 1347 | 2695-2717 | AAAUGCGAGC | 4257 |
| | cUgUgCaAc | | | GuUgCaCaGcUc | | | UGUGCAACUA | |
| | UaU*g*C | | | GcAu*U*u | | | UGC | |
| 1346 | G*c*GaGcU | 2922 | 2699-2719 | (VPmA)*G*gCa | 1348 | 2697-2719 | AUGCGAGCUG | 4258 |
| | gUgCaAcUa | | | UaGuUgCaCaGc | | | UGCAACUAUG | |
| | UgC*c*U | | | UcGc*A*u | | | CCU | |
| 1347 | G*a*GcUgU | 2923 | 2701-2691 | (VPmA)*C*aGg | 1349 | 2669-2691 | GCGAGCUGUG | 4259 |
| | gCaAcUaUg | | | CaUaGuUgCaCa | | | CAACUAUGCC | |
| | CcU*g*U | | | GcUc*G*c | | | UGU | |
| 1348 | G*c*UgUgC | 2924 | 2703-2693 | (VPmG)*C*aCa | 1350 | 2671-2693 | GAGCUGUGCA | 4260 |
| | aAcUaUgCc | | | GgCaUaGuUgCa | | | ACUAUGCCUG | |
| | UgU*g*C | | | CaGc*U*c | | | UGC | |
| 1349 | G*g*GaAgG | 2925 | 2747-2767 | (VPmA)*C*aUu | 1351 | 2745-2767 | UGGGGAAGGA | 4261 |
| | aCgUuUaCa | | | UgUaAaCgUcCu | | | CGUUUACAAA | |
| | AaU*g*U | | | UcCc*C*a | | | UGU | |
| 1350 | G*g*AaGgA | 2926 | 2748-2768 | (VPmA)*A*cAu | 1352 | 2746-2768 | GGGGAAGGAC | 4262 |
| | cGuUuAcAa | | | UuGuAaAcGuCc | | | GUUUACAAAU | |
| | AuG*u*U | | | UuCc*C*c | | | GUG | |
| 1351 | U*u*GuAaG | 2927 | 2773-2793 | (VPmA)*C*gCu | 1353 | 2771-2793 | AUUUGUAAGA | 4263 |
| | aUgCcUuUu | | | AaAaGgCaUcUu | | | UGCCUUUUAG | |
| | AgC*g*U | | | AcAa*A*u | | | CGU | |
| 1352 | U*g*UaAgA | 2928 | 2774-2794 | (VPmA)*A*cGc | 1354 | 2772-2794 | UUUGUAAGAU | 4264 |
| | uGcCuUuUa | | | UaAaAgGcAuCu | | | GCCUUUUAGC | |
| | GcG*u*U | | | UaCa*A*a | | | GUG | |
| 1353 | G*u*AaGaU | 2929 | 2775-2795 | (VPmA)*C*aCg | 1355 | 2773-2795 | UUGUAAGAUG | 3562 |
| | gCcUuUuAg | | | CuAaAaGgCaUc | | | CCUUUUAGCG | |
| | CgU*g*U | | | UuAc*A*a | | | UGU | |
| 1354 | U*a*AgAuG | 2930 | 2776-2796 | (VPmU)*A*cAc | 1356 | 2774-2796 | UGUAAGAUGC | 4265 |
| | cCuUuUaGc | | | GcUaAaAgGcAu | | | CUUUUAGCGU | |
| | GuG*u*A | | | CuUa*C*a | | | GUA | |
| 1355 | A*a*GaUgC | 2931 | 2778-2798 | (VPmG)*U*aCa | 1357 | 2776-2798 | GUAAGAUGCC | 4266 |
| | cUuUuAgCg | | | CgCuAaAaGgCa | | | UUUUAGCGUG | |
| | UgU*a*C | | | UcUu*A*c | | | UAC | |
| 1356 | A*g*AuGcC | 2932 | 2779-2799 | (VPmU)*G*uAc | 1358 | 2777-2799 | UAAGAUGCCU | 4267 |
| | uUuUaGcGu | | | AcGcUaAaAgGc | | | UUUAGCGUGU | |
| | GuA*c*A | | | AuCu*U*a | | | ACA | |
| 1357 | A*u*GcCuU | 2933 | 2781-2801 | (VPmA)*C*uGu | 1359 | 2779-2801 | AGAUGCCUUU | 4268 |
| | uUaGcGuGu | | | AcAcGcUaAaAg | | | UAGCGUGUAC | |
| | AcA*g*U | | | GcAu*C*u | | | AGU | |
| 1358 | U*g*CcUuU | 2934 | 2782-2802 | (VPmU)*A*cUg | 1360 | 2780-2802 | GAUGCCUUUU | 4269 |
| | uAgCgUgUa | | | UaCaCgCuAaAa | | | AGCGUGUACA | |
| | CaG*u*A | | | GgCa*U*c | | | GUA | |
| 1359 | G*c*CuUuU | 2935 | 2783-2803 | (VPmG)*U*aCu | 1361 | 2781-2803 | AUGCCUUUUA | 4270 |
| | aGcGuGuAc | | | GuAcAcGcUaAa | | | GCGUGUACAG | |
| | AgU*a*C | | | AgGc*A*u | | | UAC | |
| 1360 | C*c*UuUuA | 2936 | 2784-2804 | (VPmG)*G*uAc | 1362 | 2782-2804 | UGCCUUUUAG | 4271 |
| | gCgUgUaCa | | | UgUaCaCgCuAa | | | CGUGUACAGU | |
| | GuA*c*C | | | AaGg*C*a | | | ACC | |
| 1361 | C*u*UuUaG | 2937 | 2785-2805 | (VPmG)*G*gUa | 1363 | 2783-2805 | GCCUUUUAGC | 4272 |
| | cGuGuAcAg | | | CuGuAcAcGcUa | | | GUGUACAGUA | |
| | UaC*c*C | | | AaAg*G*c | | | CCC | |
| 1362 | U*u*UuAgC | 2938 | 2786-2806 | (VPmA)*G*gGu | 1364 | 2784-2806 | CCUUUUAGCG | 4273 |
| | gUgUaCaGu | | | AcUgUaCaCgCu | | | UGUACAGUAC | |
| | AcC*c*U | | | AaAa*G*g | | | CCU | |
| 1363 | U*u*UaGcG | 2939 | 2787-2807 | (VPmA)*A*gGg | 1365 | 2785-2807 | CUUUUAGCGU | 4274 |
| | uGuAcAgUa | | | UaCuGuAcAcGc | | | GUACAGUACC | |
| | CcC*u*U | | | UaAa*A*g | | | CUG | |
| 1364 | U*u*AgCgU | 2940 | 2788-2808 | (VPmA)*C*aGg | 1366 | 2786-2808 | UUUUAGCGUG | 4275 |
| | gUaCaGuAc | | | GuAcUgUaCaCg | | | UACAGUACCC | |
| | CcU*g*U | | | CuAa*A*a | | | UGG | |
| 1365 | U*a*GcGuG | 2941 | 2789-2809 | (VPmU)*C*cAg | 1367 | 2787-2809 | UUUAGCGUGU | 4276 |
| | uAcAgUaCc | | | GgUaCuGuAcAc | | | ACAGUACCCU | |
| | CuG*g*A | | | GcUa*A*a | | | GGA | |
| 1366 | A*g*CgUgU | 2942 | 2790-2810 | (VPmA)*U*cCa | 1368 | 2788-2810 | UUAGCGUGUA | 4277 |
| | aCaGuAcCc | | | GgGuAcUgUaCa | | | CAGUACCCUG | |
| | UgG*a*U | | | CgCu*A*a | | | GAG | |
| 1367 | G*u*GuAcA | 2943 | 2792-2812 | (VPmU)*U*uCu | 1369 | 2790-2812 | UUAGCGUGUA | 4278 |
| | gUaCcCuGg | | | CcAgGgUaCuGu | | | CAGUACCCUG | |
| | AgA*a*A | | | AcAc*G*c | | | GAG | |
| 1368 | U*g*UaCaG | 2944 | 2793-2813 | (VPmG)*U*uUc | 1370 | 2791-2813 | CGUGUACAGU | 4279 |
| | uAcCcUgGa | | | UcCaGgGuAcUg | | | ACCCUGGAGA | |
| | GaA*a*C | | | UaCa*C*g | | | AAC | |
| 1369 | A*u*GgCaC | 2945 | 2824-2844 | (VPmA)*A*cAc | 1371 | 2822-2844 | AAAUGGCACA | 4280 |
| | aGuGaUcGa | | | UcGaUcAcUgUg | | | GUGAUCGAGU | |
| | GuG*u*U | | | CcAu*U*u | | | GUU | |
| 1370 | U*g*GcAcA | 2946 | 2825-2845 | (VPmA)*A*aCa | 1372 | 2823-2845 | AAUGGCACAG | 4281 |
| | gUgAuCgAg | | | CuCgAuCaCuGu | | | UGAUCGAGUG | |
| | UgU*u*U | | | GcCa*U*u | | | UUG | |
| 1371 | C*a*CaGuG | 2947 | 2828-2848 | (VPmA)*U*uCa | 1373 | 2826-2848 | GGCACAGUGA | 4282 |
| | aUcGaGuGu | | | AcAcUcGaUcAc | | | UCGAGUGUUG | |
| | UgA*a*U | | | UgUg*C*c | | | AAU | |
| 1372 | A*c*AgUgA | 2948 | 2829-2849 | (VPmU)*A*uUc | 1374 | 2827-2849 | GCACAGUGAU | 4283 |
| | uCgAgUgUu | | | AaCaCuCgAuCa | | | CGAGUGUUGA | |
| | GaA*u*A | | | CuGu*G*c | | | AUA | |
| 1373 | C*a*GuGaU | 2949 | 2830-2850 | (VPmU)*U*aUu | 1375 | 2828-2850 | CACAGUGAUC | 4284 |
| | cGaGuGuUg | | | CaAcAcUcGaUc | | | GAGUGUUGAA | |
| | AaU*a*A | | | AcUg*U*g | | | UAA | |
| 1374 | A*g*UgAuC | 2950 | 2831-2851 | (VPmA)*U*uAu | 1376 | 2829-2851 | ACAGUGAUCG | 4285 |
| | gAgUgUuGa | | | UcAaCaCuCgAu | | | AGUGUUGAAU | |
| | AuA*a*U | | | CaCu*G*u | | | AAU | |
| 1375 | G*u*GaUcG | 2951 | 2832-2852 | (VPmA)*A*uUa | 1377 | 2830-2852 | CAGUGAUCGA | 4286 |
| | aGuGuUgAa | | | UuCaAcAcUcGa | | | GUGUUGAAUA | |
| | UaA*u*U | | | UcAc*U*g | | | AUG | |
| 1376 | G*c*AgGgA | 2952 | 1351-1371 | (VPmU)*G*gGc | 1378 | 1349-1371 | UGGCAGGGAA | 4287 |
| | aCaCgUcUa | | | UaGaCgUgUuCc | | | CACGUCUAGC | |
| | GcC*c*A | | | CuGc*C*a | | | CCA | |
| 1377 | U*u*CaGaG | 2953 | 1547-1567 | (VPmG)*C*aCc | 1379 | 1545-1567 | AUUUCAGAGC | 4288 |
| | cAaCcUgGu | | | AcCaGgUuGcUc | | | AACCUGGUGG | |
| | GgU*g*C | | | UgAa*A*u | | | UGC | |
| 1378 | A*u*GaCgG | 2954 | 1684-1704 | (VPmG)*U*cGu | 1380 | 1682-1704 | CCAUGACGGU | 4289 |
| | uCaAgUcCg | | | CgGaCuUgAcCg | | | CAAGUCCGAC | |
| | AcG*a*C | | | UcAu*G*g | | | GAC | |
| 1379 | U*g*AcGgU | 2955 | 1685-1705 | (VPmA)*G*uCg | 1381 | 1683-1705 | CAUGACGGUC | 4290 |
| | cAaGuCcGa | | | UcGgAcUuGaCc | | | AAGUCCGACG | |
| | CgA*c*U | | | GuCa*U*g | | | ACG | |
| 1380 | A*c*GgUcA | 2956 | 1687-1707 | (VPmA)*C*cGu | 1382 | 1685-1707 | UGACGGUCAA | 4291 |
| | aGuCcGaCg | | | CgUcGgAcUuGa | | | GUCCGACGAC | |
| | AcG*g*U | | | CcGu*C*a | | | GGU | |
| 1381 | C*a*AgUcC | 2957 | 1692-1712 | (VPmG)*A*gAg | 1383 | 1690-1712 | GUCAAGUCCG | 4292 |
| | gAcGaCgGu | | | AcCgUcGuCgGa | | | ACGACGGUCU | |
| | CuC*u*C | | | CuUg*A*c | | | CUC | |
| 1382 | C*g*CuCaA | 2958 | 1769-1789 | (VPmU)*G*gCc | 1384 | 1767-1789 | CGCGCUCAAG | 4293 |
| | gUcCgUgGu | | | AcCaCgGaCuUg | | | UCCGUGGUGG | |
| | GgC*c*A | | | AgCg*C*g | | | CCA | |
| 1383 | U*c*AaGuC | 2959 | 1772-1792 | (VPmA)*C*uUg | 1385 | 1770-1792 | GCUCAAGUCC | 4294 |
| | cGuGgUgGc | | | GcCaCcAcGgAc | | | GUGGUGGCCA | |
| | CaA*g*U | | | UuGa*G*c | | | AGU | |
| 1384 | U*g*GuGgC | 2960 | 1781-1801 | (VPmA)*G*cUc | 1386 | 1779-1801 | CGUGGUGGCC | 4295 |
| | cAaGuUcAa | | | UuGaAcUuGgCc | | | AAGUUCAAGA | |
| | GaG*c*U | | | AcCa*C*g | | | GCG | |
| 1385 | G*g*UgGcC | 2961 | 1782-1802 | (VPmU)*C*gCu | 1387 | 1780-1802 | GUGGUGGCCA | 4296 |
| | aAgUuCaAg | | | CuUgAaCuUgGc | | | AGUUCAAGAG | |
| | AgC*g*A | | | CaCc*A*c | | | CGA | |
| 1386 | A*g*GaGgA | 2962 | 1847-1867 | (VPmA)*C*uCu | 1388 | 1845-1867 | AGAGGAGGAC | 4297 |
| | cGaCgAgGa | | | UcCuCgUcGuCc | | | GACGAGGAAG | |
| | AgA*g*U | | | UcCu*C*u | | | AGG | |
| 1387 | G*a*GgAcG | 2963 | 1849-1869 | (VPmU)*U*cCu | 1389 | 1847-1869 | AGGAGGACGA | 4298 |
| | aCgAgGaAg | | | CuUcCuCgUcGu | | | CGAGGAAGAG | |
| | AgG*a*A | | | CcUc*C*u | | | GAA | |
| 1388 | C*a*UcAaG | 2964 | 2289-2309 | (VPmA)*A*cUc | 1390 | 2287-2309 | CGCAUCAAGC | 4299 |
| | cUcGaGaAg | | | CuUcUcGaGcUu | | | UCGAGAAGGA | |
| | GaG*u*U | | | GaUg*C*g | | | GUU | |
| 1389 | A*u*CaAgC | 2965 | 2290-2310 | (VPmG)*A*aCu | 1391 | 2288-2310 | GCAUCAAGCU | 4300 |
| | uCgAgAaGg | | | CcUuCuCgAgCu | | | CGAGAAGGAG | |
| | AgU*u*C | | | UgAu*G*c | | | UUC | |
| 1390 | C*a*AgCuC | 2966 | 2292-2312 | (VPmU)*C*gAa | 1392 | 2290-2312 | AUCAAGCUCG | 4301 |
| | gAgAaGgAg | | | CuCcUuCuCgAg | | | AGAAGGAGUU | |
| | UuC*g*A | | | CuUg*A*u | | | CGA | |
| 1391 | U*c*CuUaG | 2967 | 2402-2422 | (VPmU)*G*gAg | 1393 | 2400-2422 | CUUCCUUAGC | 4302 |
| | cUuCgGaGa | | | UcUcCgAaGcUa | | | UUCGGAGACU | |
| | CuC*c*A | | | AgGa*A*g | | | CCA | |
| 1392 | C*c*UuAgC | 2968 | 2403-2423 | (VPmA)*U*gGa | 1394 | 2401-2423 | UUCCUUAGCU | 4303 |
| | uUcGgAgAc | | | GuCuCcGaAgCu | | | UCGGAGACUC | |
| | UcC*a*U | | | AaGg*A*a | | | CAG | |
| 1393 | U*a*GcUuC | 2969 | 2406-2426 | (VPmU)*G*uCu | 1395 | 2404-2426 | CUUAGCUUCG | 4304 |
| | gGaGaCuCc | | | GgAgUcUcCgAa | | | GAGACUCCAG | |
| | AgA*c*A | | | GcUa*A*g | | | ACA | |
| 1394 | A*g*CuUcG | 2970 | 2407-2427 | (VPmU)*U*gUc | 1396 | 2405-2427 | UUAGCUUCGG | 4305 |
| | gAgAcUcCa | | | UgGaGuCuCcGa | | | AGACUCCAGA | |
| | GaC*a*A | | | AgCu*A*a | | | CAA | |
| 1395 | G*c*UuCgG | 2971 | 2408-2428 | (VPmA)*U*uGu | 1397 | 2406-2428 | UAGCUUCGGA | 4306 |
| | aGaCuCcAg | | | CuGgAgUcUcCg | | | GACUCCAGAC | |
| | AcA*a*U | | | AaGc*U*a | | | AAU | |
| 1396 | C*u*UcGgA | 2972 | 2409-2429 | (VPmG)*A*uUg | 1398 | 2407-2429 | AGCUUCGGAG | 4307 |
| | gAcUcCaGa | | | UcUgGaGuCuCc | | | ACUCCAGACA | |
| | CaA*u*C | | | GaAg*C*u | | | AUC | |
| 1397 | U*u*GcCuC | 2973 | 2410-2430 | (VPmA)*G*uGc | 1399 | 2408-2430 | UUUUGCCUCC | 4308 |
| | cUcGuCgGa | | | UcCgAcGaGgAg | | | UCGUCGGAGC | |
| | GcA*c*U | | | GcAa*A*a | | | ACU | |
| 1398 | U*g*CcUcC | 2974 | 2411-2431 | (VPmG)*A*gUg | 1400 | 2409-2431 | UUUGCCUCCU | 4309 |
| | uCgUcGgAg | | | CuCcGaCgAgGa | | | CGUCGGAGCA | |
| | CaC*u*C | | | GgCa*A*a | | | CUC | |

| | | | | | | |
|---|---|---|---|---|---|---|
| 1399 | a*a*ccagA | 2975 | — | (VPmU)*C*aac | 1401 | See Table 2. |
| | cCACggccc | | | GggccgugGuCu | | |
| | guu*g*a | | | gguu*c*a | | |
| 1400 | a*c*cagaC | 2976 | — | (VPmU)*C*caa | 1402 | See Table 2. |
| | cACGgcccg | | | CgggccguGgUc | | |
| | uug*g*a | | | uggu*u*c | | |
| 1401 | g*g*acauU | 2977 | — | (VPmU)*C*gau | 1403 | See Table 2. |
| | cUUAuuuuu | | | AaaaauaaGaAu | | |
| | auc*g*a | | | gucc*c*c | | |
| 1402 | g*a*cauuC | 2978 | — | (VPmU)*U*cga | 1404 | See Table 2. |
| | uUAUuuuua | | | UaaaaauaAgAa | | |
| | ucg*a*a | | | uguc*c*c | | |
| 1403 | c*a*uucuU | 2979 | — | (VPmU)*G*cuc | 1405 | See Table 2. |
| | aUUUuuauc | | | GauaaaaaUaAg | | |
| | gag*c*a | | | aaug*u*c | | |
| 1404 | u*u*cuuaU | 2980 | — | (VPmU)*G*ugc | 1406 | See Table 2. |
| | uUUUaucga | | | UcgauaaaAaUa | | |
| | gca*c*a | | | agaa*u*g | | |
| 1405 | u*c*uuauU | 2981 | — | (VPmU)*U*gug | 1407 | See Table 2. |
| | uUUAucgag | | | CucgauaaAaAu | | |
| | cac*a*a | | | aaga*a*u | | |
| 1406 | c*u*uauuU | 2982 | — | (VPmU)*U*ugu | 1408 | See Table 2. |
| | uUAUcgagc | | | GcucgauaAaAa | | |
| | aca*a*a | | | uaag*a*a | | |
| 1407 | u*u*auuuU | 2983 | — | (VPmU)*U*uug | 1409 | See Table 2. |
| | uAUCgagca | | | UgcucgauAaAa | | |
| | caa*a*a | | | auaa*g*a | | |
| 1408 | u*a*uuuuU | 2984 | — | (VPmU)*G*uuu | 1410 | See Table 2. |
| | aUCGagcac | | | GugcucgaUaAa | | |
| | aaa*c*a | | | aaua*a*g | | |
| 1409 | a*u*uuuuA | 2985 | — | (VPmU)*C*guu | 1411 | See Table 2. |
| | uCGAgcaca | | | UgugcucgAuAa | | |
| | aac*g*a | | | aaau*a*a | | |
| 1410 | u*u*uuuaU | 2986 | — | (VPmU)*C*cgu | 1412 | See Table 2. |
| | cGAGcacaa | | | UugugcucGaUa | | |
| | acg*g*a | | | aaaa*u*a | | |
| 1411 | u*u*uuauC | 2987 | — | (VPmU)*U*ccg | 1413 | See Table 2. |
| | gAGCacaaa | | | UuugugcuCgAu | | |
| | cgg*a*a | | | aaaa*a*u | | |
| 1412 | u*u*uaucG | 2988 | — | (VPmU)*U*ucc | 1414 | See Table 2. |
| | aGCAcaaac | | | GuuugugcUcGa | | |
| | gga*a*a | | | uaaa*a*a | | |
| 1413 | u*u*aucgA | 2989 | — | (VPmU)*U*uuc | 1415 | See Table 2. |
| | gCACaaacg | | | CguuugugCuCg | | |
| | gaa*a*a | | | auaa*a*a | | |
| 1414 | c*c*uuccC | 2990 | — | (VPmU)*U*cga | 1416 | See Table 2. |
| | cUUCaccaa | | | UuggugaaGgGg | | |
| | ucg*a*a | | | aagg*u*g | | |
| 1415 | c*u*ucacC | 2991 | — | (VPmU)*U*uuc | 1417 | See Table 2. |
| | aAUCgagau | | | AucucgauUgGu | | |
| | gaa*a*a | | | gaag*g*g | | |
| 1416 | a*a*agcaU | 2992 | — | (VPmU)*U*cca | 1418 | See Table 2. |
| | cCAAucccg | | | CgggauugGaUg | | |
| | ugg*a*a | | | cuuu*u*u | | |
| 1417 | g*c*auccA | 2993 | — | (VPmU)*A*ccu | 1419 | See Table 2. |
| | aUCCcgugg | | | CcacgggaUuGg | | |
| | agg*u*a | | | augc*u*u | | |
| 1418 | u*c*acgcC | 2994 | — | (VPmU)*A*ucg | 1420 | See Table 2. |
| | aGAGgauga | | | UcauccucUgGc | | |
| | cga*u*a | | | guga*c*c | | |
| 1419 | a*u*gacgA | 2995 | — | (VPmU)*C*guu | 1421 | See Table 2. |
| | uUGUuuauc | | | GauaaacaAuCg | | |
| | aac*g*a | | | ucau*c*c | | |
| 1420 | u*g*acgaU | 2996 | — | (VPmU)*A*cgu | 1422 | See Table 2. |
| | uGUUuauca | | | UgauaaacAaUc | | |
| | acg*u*a | | | guca*u*c | | |
| 1421 | u*u*guuuA | 2997 | — | (VPmU)*U*aga | 1423 | See Table 2. |
| | uCAAcguca | | | UgacguugAuAa | | |
| | ucu*a*a | | | acaa*u*c | | |
| 1422 | u*a*ugccC | 2998 | — | (VPmU)*C*aaa | 1424 | See Table 2. |
| | cGCAgggua | | | UacccugcGgGg | | |
| | uuu*g*a | | | caua*u*u | | |
| 1423 | c*g*caggG | 2999 | — | (VPmU)*A*ucu | 1425 | See Table 2. |
| | uAUUuguaa | | | UuacaaauAcCc | | |
| | aga*u*a | | | ugcg*g*g | | |
| 1424 | g*c*agggU | 3000 | — | (VPmU)*C*auc | 1426 | See Table 2. |
| | aUUUguaaa | | | UuuacaaaUaCc | | |
| | gau*g*a | | | cugc*g*g | | |
| 1425 | c*a*ggguA | 3001 | — | (VPmU)*U*cau | 1427 | See Table 2. |
| | uUUGuaaag | | | CuuuacaaAuAc | | |
| | aug*a*a | | | ccug*c*g | | |
| 1426 | a*g*gguaU | 3002 | — | (VPmU)*C*uca | 1428 | See Table 2. |
| | uUGUaaaga | | | UcuuuacaAaUa | | |
| | uga*g*a | | | cccu*g*c | | |
| 1427 | g*g*uauuU | 3003 | — | (VPmU)*G*gcu | 1429 | See Table 2. |
| | gUAAagaug | | | CaucuuuaCaAa | | |
| | agc*c*a | | | uacc*u*g | | |
| 1428 | g*u*auuuG | 3004 | — | (VPmU)*G*ggc | 1430 | See Table 2. |
| | uAAAgauga | | | UcaucuuuAcAa | | |
| | gcc*c*a | | | auaccu | | |
| 1429 | u*a*uuugU | 3005 | — | (VPmU)*U*ggg | 1431 | See Table 2. |
| | aAAGaugag | | | CucaucuuUaCa | | |
| | ccc*a*a | | | aaua*c*c | | |
| 1430 | a*u*uuguA | 3006 | — | (VPmU)*C*ugg | 1432 | See Table 2. |
| | aAGAugagc | | | GcucaucuUuAc | | |
| | cca*g*a | | | aaau*a*c | | |
| 1431 | u*u*uguaA | 3007 | — | (VPmU)*G*cug | 1433 | See Table 2. |
| | aGAUgagcc | | | GgcucaucUuUa | | |
| | cag*c*a | | | caaa*u*a | | |
| 1432 | u*u*guaaA | 3008 | — | (VPmU)*U*gcu | 1434 | See Table 2. |
| | gAUGagccc | | | GggcucauCuUu | | |
| | agc*a*a | | | acaa*a*u | | |
| 1433 | u*g*uaaaG | 3009 | — | (VPmU)*C*ugc | 1435 | See Table 2. |
| | aUGAgccca | | | UgggcucaUcUu | | |
| | gca*g*a | | | uaca*a*a | | |
| 1434 | g*u*aaagA | 3010 | — | (VPmU)*G*cug | 1436 | See Table 2. |
| | uGAGcccag | | | CugggcucAuCu | | |
| | cag*c*a | | | uuac*a*a | | |
| 1435 | u*a*aagaU | 3011 | — | (VPmU)*A*gcu | 1437 | See Table 2. |
| | gAGCccagc | | | GcugggcuCaUc | | |
| | agc*u*a | | | uuua*c*a | | |
| 1436 | a*a*gaugA | 3012 | — | (VPmU)*G*uag | 1438 | See Table 2. |
| | gCCCagcag | | | CugcugggCuCa | | |
| | cua*c*a | | | ucuu*u*a | | |
| 1437 | a*g*augaG | 3013 | — | (VPmU)*U*gua | 1439 | See Table 2. |
| | cCCAgcagc | | | GcugcuggGcUc | | |
| | uac*a*a | | | aucu*u*u | | |
| 1438 | g*a*ugagC | 3014 | — | (VPmU)*G*ugu | 1440 | See Table 2. |
| | cCAGcagcu | | | AgcugcugGgCu | | |
| | aca*c*a | | | cauc*u*u | | |
| 1439 | a*u*gagcC | 3015 | — | (VPmU)*U*gug | 1441 | See Table 2. |
| | cAGCagcua | | | UagcugcuGgGc | | |
| | cac*a*a | | | ucau*c*u | | |
| 1440 | u*g*agccC | 3016 | — | (VPmU)*A*ugu | 1442 | See Table 2. |
| | aGCAgcuac | | | GuagcugcUgGg | | |
| | aca*u*a | | | cuca*u*c | | |
| 1441 | a*c*acauG | 3017 | — | (VPmU)*U*uug | 1443 | See Table 2. |
| | uACAacuug | | | CaaguuguAcAu | | |
| | caa*a*a | | | gugu*a*g | | |
| 1442 | a*c*auguA | 3018 | — | (VPmU)*U*guu | 1444 | See Table 2. |
| | cAACuugca | | | UgcaaguuGuAc | | |
| | aac*a*a | | | augu*g*u | | |
| 1443 | u*g*caacA | 3019 | — | (VPmU)*A*gug | 1445 | See Table 2. |
| | cGCAcagaa | | | UucugugcGuGu | | |
| | cac*u*a | | | ugca*a*g | | |
| 1444 | g*c*aacaC | 3020 | — | (VPmU)*G*agu | 1446 | See Table 2. |
| | gCACagaac | | | GuucugugCgUg | | |
| | acu*c*a | | | uugc*a*a | | |
| 1445 | c*a*acacG | 3021 | — | (VPmU)*U*gag | 1447 | See Table 2. |
| | cACAgaaca | | | UguucuguGcGu | | |
| | cuc*a*a | | | guug*c*a | | |
| 1446 | a*a*cacgC | 3022 | — | (VPmU)*A*uga | 1448 | See Table 2. |
| | aCAGaacac | | | GuguucugUgCg | | |
| | uca*u*a | | | uguu*g*c | | |
| 1447 | a*c*acgcA | 3023 | — | (VPmU)*C*aug | 1449 | See Table 2. |
| | cAGAacacu | | | AguguucuGuGc | | |
| | cau*g*a | | | gugu*u*g | | |
| 1448 | c*a*cgcaC | 3024 | — | (VPmU)*C*cau | 1450 | See Table 2. |
| | aGAAcacuc | | | GaguguucUgUg | | |
| | aug*g*a | | | cgug*u*u | | |
| 1449 | c*c*cugaC | 3025 | — | (VPmU)*A*cca | 1451 | See Table 2. |
| | cCCGcgggu | | | AcccgcggGgUc | | |
| | ugg*u*a | | | aggg*g*a | | |
| 1450 | c*u*gaccC | 3026 | — | (VPmU)*A*uac | 1452 | See Table 2. |
| | cGCGgguug | | | CaacccgcGgGg | | |
| | gua*u*a | | | ucag*g*g | | |
| 1451 | g*a*ccccG | 3027 | — | (VPmU)*G*gau | 1453 | See Table 2. |
| | cGGGuuggu | | | AccaacccGcGg | | |
| | auc*c*a | | | gguc*a*g | | |
| 1452 | a*c*cccgC | 3028 | — | (VPmU)*G*gga | 1454 | See Table 2. |
| | gGGUuggua | | | UaccaaccCgCg | | |
| | ucc*c*a | | | gggu*c*a | | |
| 1453 | g*u*auccC | 3029 | — | (VPmU)*A*ccu | 1455 | See Table 2. |
| | uUCAggacu | | | AguccugaAgGg | | |
| | agg*u*a | | | auac*c*a | | |
| 1454 | c*a*gacaA | 3030 | — | (VPmU)*G*uua | 1456 | See Table 2. |
| | uAACcccuu | | | AagggguuAuUg | | |
| | uaa*c*a | | | ucug*c*a | | |
| 1455 | a*g*acaaU | 3031 | — | (VPmU)*G*guu | 1457 | See Table 2. |
| | aACCccuuu | | | AaagggguUaUu | | |
| | aac*c*a | | | gucu*g*c | | |
| 1456 | a*a*uaccA | 3032 | — | (VPmU)*U*cga | 1458 | See Table 2. |
| | gGAUcagua | | | UacugaucCuGg | | |
| | ucg*a*a | | | uauu*c*u | | |
| 1457 | c*c*uguuU | 3033 | — | (VPmU)*U*cgg | 1459 | See Table 2. |
| | aGUCcacca | | | UgguggacUaAa | | |
| | ccg*a*a | | | cagg*g*g | | |
| 1458 | c*a*agucC | 3034 | — | (VPmU)*A*cuc | 1460 | See Table 2. |
| | aAGUcaugc | | | GcaugacuUgGa | | |
| | gag*u*a | | | cuug*a*c | | |
| 1459 | a*a*guccA | 3035 | — | (VPmU)*A*acu | 1461 | See Table 2. |
| | aGUCaugcg | | | CgcaugacUuGg | | |
| | agu*u*a | | | acuu*g*a | | |
| 1460 | g*u*gcgaC | 3036 | — | (VPmU)*G*ggu | 1462 | See Table 2. |
| | cACGcgugc | | | GcacgcguGgUc | | |
| | acc*c*a | | | gcac*a*g | | |
| 1461 | c*c*augaC | 3037 | — | (VPmU)*G*ucg | 1463 | See Table 2. |
| | gGUCaaguc | | | GacuugacCgUc | | |
| | cga*c*a | | | augg*g*g | | |
| 1462 | a*u*gacgG | 3038 | — | (VPmU)*U*cgu | 1464 | See Table 2. |
| | uCAAguccg | | | CggacuugAcCg | | |
| | acg*a*a | | | ucau*g*g | | |
| 1463 | u*g*acggU | 3039 | — | (VPmU)*G*ucg | 1465 | See Table 2. |
| | cAAGuccga | | | UcggacuuGaCc | | |
| | cga*c*a | | | guca*u*g | | |
| 1464 | g*a*cgguC | 3040 | — | (VPmU)*C*guc | 1466 | See Table 2. |
| | aAGUccgac | | | GucggacuUgAc | | |
| | gac*g*a | | | cguc*a*u | | |
| 1465 | a*c*ggucA | 3041 | — | (VPmU)*C*cgu | 1467 | See Table 2. |
| | aGUCcgacg | | | CgucggacUuGa | | |
| | acg*g*a | | | ccgu*c*a | | |
| 1466 | c*g*gucaA | 3042 | — | (VPmU)*A*ccg | 1468 | See Table 2. |
| | gUCCgacga | | | UcgucggaCuUg | | |
| | cgg*u*a | | | accg*u*c | | |
| 1467 | g*g*ucaaG | 3043 | — | (VPmU)*G*acc | 1469 | See Table 2. |
| | uCCGacgac | | | GucgucggAcUu | | |
| | ggu*c*a | | | gacc*g*u | | |
| 1468 | c*a*agucC | 3044 | — | (VPmU)*A*gag | 1470 | See Table 2. |
| | gACGacggu | | | AccgucguCgGa | | |
| | cuc*u*a | | | cuug*a*c | | |
| 1469 | a*g*cagcG | 3045 | — | (VPmU)*A*cgg | 1471 | See Table 2. |
| | cGCUcaagu | | | AcuugagcGcGc | | |
| | ccg*u*a | | | ugcu*g*g | | |
| 1470 | g*c*agcgC | 3046 | — | (VPmU)*C*acg | 1472 | See Table 2. |
| | gCUCaaguc | | | GacuugagCgCg | | |
| | cgu*g*a | | | cugc*u*g | | |
| 1471 | g*a*gaacG | 3047 | — | (VPmU)*A*uca | 1473 | See Table 2. |
| | aCCCcaacc | | | GguuggggUcGu | | |
| | uga*u*a | | | ucuc*g*c | | |
| 1472 | c*u*gacgG | 3048 | — | (VPmU)*A*ccc | 1474 | See Table 2. |
| | aGAGcgaga | | | UcucgcucUcCg | | |
| | ggg*u*a | | | ucag*c*u | | |
| 1473 | a*g*agcgA | 3049 | — | (VPmU)*G*uag | 1475 | See Table 2. |
| | gAGGgugga | | | UccacccuCuCg | | |
| | cua*c*a | | | cucu*c*c | | |
| 1474 | g*c*gagaG | 3050 | — | (VPmU)*G*ccg | 1476 | See Table 2. |
| | gGUGgacua | | | UaguccacCcUc | | |
| | cgg*c*a | | | ucgc*u*c | | |
| 1475 | c*g*agagG | 3051 | — | (VPmU)*A*gcc | 1477 | See Table 2. |
| | gUGGacuac | | | GuaguccaCcCu | | |
| | ggc*u*a | | | cucg*c*u | | |
| 1476 | g*a*ggguG | 3052 | — | (VPmU)*C*gaa | 1478 | See Table 2. |
| | gACUacggc | | | GccguaguCcAc | | |
| | uuc*g*a | | | ccuc*u*c | | |
| 1477 | c*a*cgagA | 3053 | — | (VPmU)*C*ccc | 1479 | See Table 2. |
| | aCAGcucgc | | | GcgagcugUuCu | | |
| | ggg*g*a | | | cgug*g*u | | |
| 1478 | g*g*gcgaG | 3054 | — | (VPmU)*C*gcg | 1480 | See Table 2. |
| | aAGCauaag | | | CuuaugcuUcUc | | |
| | cgc*g*a | | | gccc*a*g | | |
| 1479 | g*a*gaagC | 3055 | — | (VPmU)*U*ggc | 1481 | See Table 2. |
| | aUAAgcgcg | | | CgcgcuuaUgCu | | |
| | gcc*a*a | | | ucuc*g*c | | |
| 1480 | c*a*caggG | 3056 | — | (VPmU)*U*cgu | 1482 | See Table 2. |
| | aCACuugcg | | | CgcaagugUcCc | | |
| | acg*a*a | | | ugug*g*c | | |
| 1481 | u*g*cgacG | 3057 | — | (VPmU)*G*cca | 1483 | See Table 2. |
| | aAGAcucgg | | | CcgagucuUcGu | | |
| | ugg*c*a | | | cgca*a*g | | |
| 1482 | g*a*cucgG | 3058 | — | (VPmU)*G*acu | 1484 | See Table 2. |
| | uGGCcggcg | | | CgccggccAcCg | | |
| | agu*c*a | | | aguc*u*u | | |
| 1483 | g*c*cggcG | 3059 | — | (VPmU)*A*ugc | 1485 | See Table 2. |
| | aGUCggacc | | | GguccgacUcGc | | |
| | gca*u*a | | | cggc*c*a | | |
| 1484 | c*g*gcgaG | 3060 | — | (VPmU)*C*uau | 1486 | See Table 2. |
| | uCGGaccgc | | | GcgguccgAcUc | | |
| | aua*g*a | | | gccg*g*c | | |
| 1485 | g*g*cgagU | 3061 | — | (VPmU)*U*cua | 1487 | See Table 2. |
| | cGGAccgca | | | UgcgguccGaCu | | |
| | uag*a*a | | | cgcc*g*g | | |
| 1486 | g*a*gucgG | 3062 | — | (VPmU)*U*cgu | 1488 | See Table 2. |
| | aCCGcauag | | | CuaugcggUcCg | | |
| | acg*a*a | | | acuc*g*c | | |
| 1487 | a*g*ucggA | 3063 | — | (VPmU)*A*ucg | 1489 | See Table 2. |
| | cCGCauaga | | | UcuaugcgGuCc | | |
| | cga*u*a | | | gacu*c*g | | |
| 1488 | g*u*cggaC | 3064 | — | (VPmU)*C*auc | 1490 | See Table 2. |
| | cGCAuagac | | | GucuaugcGgUc | | |
| | gau*g*a | | | cgac*u*c | | |
| 1489 | g*a*gacuC | 3065 | — | (VPmU)*A*ggc | 1491 | See Table 2. |
| | cAGAcaauc | | | GauugucuGgAg | | |
| | gcc*u*a | | | ucuc*c*g | | |
| 1490 | g*c*cuuuU | 3066 | — | (VPmU)*C*cga | 1492 | See Table 2. |
| | gCCUccucg | | | CgaggaggCaAa | | |
| | ucg*g*a | | | aggc*g*a | | |
| 1491 | c*u*cgucG | 3067 | — | (VPmU)*C*cga | 1493 | See Table 2. |
| | gAGCacucc | | | GgagugcuCcGa | | |
| | ucg*g*a | | | cgag*g*a | | |
| 1492 | c*g*ucggA | 3068 | — | (VPmU)*C*ucc | 1494 | See Table 2. |
| | gCACuccuc | | | GaggagugCuCc | | |
| | gga*g*a | | | gacg*a*g | | |
| 1493 | g*a*gcacU | 3069 | — | (VPmU)*C*cgu | 1495 | See Table 2. |
| | cCUCggaga | | | UcuccgagGaGu | | |
| | acg*g*a | | | gcuc*c*g | | |
| 1494 | g*a*gcacG | 3070 | — | (VPmU)*C*acu | 1496 | See Table 2. |
| | cCCCauauu | | | AauaugggGcGu | | |
| | agu*g*a | | | gcuc*c*c | | |
| 1495 | a*g*cacgC | 3071 | — | (VPmU)*C*cac | 1497 | See Table 2. |
| | cCCAuauua | | | UaauauggGgCg | | |
| | gug*g*a | | | ugcu*c*c | | |
| 1496 | c*a*cgccC | 3072 | — | (VPmU)*G*acc | 1498 | See Table 2. |
| | cAUAuuagu | | | AcuaauauGgGg | | |
| | ggu*c*a | | | cgug*c*u | | |
| 1497 | c*c*cauaU | 3073 | — | (VPmU)*G*ccc | 1499 | See Table 2. |
| | uAGUggucc | | | GgaccacuAaUa | | |
| | ggg*c*a | | | uggg*g*c | | |
| 1498 | u*a*uuagU | 3074 | — | (VPmU)*C*cgg | 1500 | See Table 2. |
| | gGUCcgggc | | | GcccggacCaCu | | |
| | ccg*g*a | | | aaua*u*g | | |
| 1499 | u*u*uguaA | 3075 | — | (VPmU)*G*cua | 1501 | See Table 2. |
| | gAUGccuuu | | | AaaggcauCuUa | | |
| | uag*c*a | | | caaa*u*u | | |
| 1500 | u*u*guaaG | 3076 | — | (VPmU)*C*gcu | 1502 | See Table 2. |
| | aUGCcuuuu | | | AaaaggcaUcUu | | |
| | agc*g*a | | | acaa*a*u | | |
| 1501 | u*g*uaagA | 3077 | — | (VPmU)*A*cgc | 1503 | See Table 2. |
| | uGCCuuuua | | | UaaaaggcAuCu | | |
| | gcg*u*a | | | uaca*a*a | | |
| 1502 | a*a*gaugC | 3078 | — | (VPmU)*U*aca | 1504 | See Table 2. |
| | cUUUuagcg | | | CgcuaaaaGgCa | | |
| | ugu*a*a | | | ucuu*a*c | | |
| 1503 | c*u*uuuaG | 3079 | — | (VPmU)*G*gua | 1505 | See Table 2. |
| | cGUGuacag | | | CuguacacGcUa | | |
| | uac*c*a | | | aaag*g*c | | |
| 1504 | u*u*uuagC | 3080 | — | (VPmU)*G*ggu | 1506 | See Table 2. |
| | gUGUacagu | | | AcuguacaCgCu | | |
| | acc*c*a | | | aaaa*g*g | | |
| 1505 | g*u*acagU | 3081 | — | (VPmU)*G*uuu | 1507 | See Table 2. |
| | aCCCuggag | | | CuccagggUaCu | | |
| | aaa*c*a | | | guac*a*c | | |
| 1506 | u*a*caguA | 3082 | — | (VPmU)*U*guu | 1508 | See Table 2. |
| | cCCUggaga | | | UcuccaggGuAc | | |
| | aac*a*a | | | ugua*c*a | | |
| 1507 | a*c*aguaC | 3083 | — | (VPmU)*G*ugu | 1509 | See Table 2. |
| | cCUGgagaa | | | UucuccagGgUa | | |
| | aca*c*a | | | cugu*a*c | | |
| 1508 | c*a*guacC | 3084 | — | (VPmU)*U*gug | 1510 | See Table 2. |
| | cUGGagaaa | | | UuucuccaGgGu | | |
| | cac*a*a | | | acug*u*a | | |
| 1509 | a*g*uaccC | 3085 | — | (VPmU)*A*ugu | 1511 | See Table 2. |
| | uGGAgaaac | | | GuuucuccAgGg | | |
| | aca*u*a | | | uacu*g*u | | |
| 1510 | g*u*acccU | 3086 | — | (VPmU)*C*aug | 1512 | See Table 2. |
| | gGAGaaaca | | | UguuucucCaGg | | |
| | cau*g*a | | | guac*u*g | | |
| 1511 | u*a*cccuG | 3087 | — | (VPmU)*U*cau | 1513 | See Table 2. |
| | gAGAaacac | | | GuguuucuCcAg | | |
| | aug*a*a | | | ggua*c*u | | |
| 1512 | a*c*ccugG | 3088 | — | (VPmU)*U*uca | 1514 | See Table 2. |
| | aGAAacaca | | | UguguuucUcCa | | |
| | uga*a*a | | | gggu*a*c | | |
| 1513 | c*c*cuggA | 3089 | — | (VPmU)*U*uuc | 1515 | See Table 2. |
| | gAAAcacau | | | AuguguuuCuCc | | |
| | gaa*a*a | | | aggg*u*a | | |
| 1514 | c*c*uggaG | 3090 | — | (VPmU)*U*uuu | 1516 | See Table 2. |
| | aAACacaug | | | CauguguuUcUc | | |
| | aaa*a*a | | | cagg*g*u | | |
| 1515 | c*u*ggagA | 3091 | — | (VPmU)*U*uuu | 1517 | See Table 2. |
| | aACAcauga | | | UcauguguUuCu | | |
| | aaa*a*a | | | ccag*g*g | | |
| 1516 | u*g*gagaA | 3092 | — | (VPmU)*U*uuu | 1518 | See Table 2. |
| | aCACaugaa | | | UucaugugUuUc | | |
| | aaa*a*a | | | ucca*g*g | | |
| 1517 | g*g*agaaA | 3093 | — | (VPmU)*A*uuu | 1519 | See Table 2. |
| | cACAugaaa | | | UuucauguGuUu | | |
| | aaa*u*a | | | cucc*a*g | | |
| 1518 | a*u*ggcaC | 3094 | — | (VPmU)*A*cac | 1520 | See Table 2. |
| | aGUGaucga | | | UcgaucacUgUg | | |
| | gug*u*a | | | ccau*u*u | | |
| 1519 | a*a*caguC | 3095 | — | (VPmU)*G*ggu | 1521 | See Table 2. |
| | uUUGgauua | | | UaauccaaAgAc | | |
| | acc*c*a | | | uguu*u*u | | |
| 1520 | g*g*auuaA | 3096 | — | (VPmU)*U*guc | 1522 | See Table 2. |
| | cCCUcuaua | | | UauagaggGuUa | | |
| | gac*a*a | | | aucc*a*a | | |
| 1521 | a*u*agacA | 3097 | — | (VPmU)*G*ugc | 1523 | See Table 2. |
| | gAAUagaua | | | UaucuauuCuGu | | |
| | gca*c*a | | | cuau*a*g | | |
| 1522 | u*a*auaaA | 3098 | — | (VPmU)*C*uag | 1524 | See Table 2. |
| | cCUUaggaa | | | UuccuaagGuUu | | |
| | cua*g*a | | | auua*c*c | | |
| 1523 | a*u*gaccC | 3099 | — | (VPmU)*A*cua | 1525 | See Table 2. |
| | aUUAugucc | | | GgacauaaUgGg | | |
| | uag*u*a | | | ucau*c*u | | |
| 1524 | u*a*uaccA | 3100 | — | (VPmU)*G*uag | 1526 | See Table 2. |
| | gUAUaaaag | | | CuuuuauaCuGg | | |
| | cua*c*a | | | uaua*a*u | | |
| 1525 | a*a*agccC | 3101 | — | (VPmU)*U*aau | 1527 | See Table 2. |
| | uGGAacgca | | | UgcguuccAgGg | | |
| | auu*a*a | | | cuuu*u*g | | |
| 1526 | a*a*uuaaA | 3102 | — | (VPmU)*C*cuu | 1528 | See Table 2. |
| | uACAcuagu | | | AcuaguguAuUu | | |
| | aag*g*a | | | aauu*g*c | | |
| 1527 | a*u*uaaaU | 3103 | — | (VPmU)*U*ccu | 1529 | See Table 2. |
| | aCACuagua | | | UacuagugUaUu | | |
| | agg*a*a | | | uaau*u*g | | |
| 1528 | u*a*ugauU | 3104 | — | (VPmU)*C*guu | 1530 | See Table 2. |
| | uAUUagcac | | | GugcuaauAaAu | | |
| | aac*g*a | | | caua*u*u | | |
| 1529 | a*u*gauuU | 3105 | — | (VPmU)*A*cgu | 1531 | See Table 2. |
| | aUUAgcaca | | | UgugcuaaUaAa | | |
| | acg*u*a | | | ucau*a*u | | |
| 1530 | g*a*uuuaU | 3106 | — | (VPmU)*C*cac | 1532 | See Table 2. |
| | uAGCacaac | | | GuugugcuAaUa | | |
| | gug*g*a | | | aauc*a*u | | |
| 1531 | a*u*uuauU | 3107 | — | (VPmU)*A*cca | 1533 | See Table 2. |
| | aGCAcaacg | | | CguugugcUaAu | | |
| | ugg*u*a | | | aaau*c*a | | |
| 1532 | u*u*auuaG | 3108 | — | (VPmU)*G*uac | 1534 | See Table 2. |
| | cACAacgug | | | CacguuguGcUa | | |
| | gua*c*a | | | auaa*a*u | | |
| 1533 | u*a*gcacA | 3109 | — | (VPmU)*A*aua | 1535 | See Table 2. |
| | aCGUgguac | | | GuaccacgUuGu | | |
| | uau*u*a | | | gcua*a*u | | |
| 1534 | u*u*uuuuA | 3110 | — | (VPmU)*G*aug | 1536 | See Table 2. |
| | uUAAgcuag | | | CuagcuuaAuAa | | |
| | cau*c*a | | | aaaa*g*a | | |
| 1535 | u*u*uauuA | 3111 | — | (VPmU)*G*cag | 1537 | See Table 2. |
| | aGCUagcau | | | AugcuagcUuAa | | |
| | cug*c*a | | | uaaa*a*a | | |
| 1536 | u*u*uucuC | 3112 | — | (VPmU)*G*uau | 1538 | See Table 2. |
| | uAAUcagag | | | CucugauuAgAg | | |
| | aua*c*a | | | aaaa*g*a | | |
| 1537 | g*a*uacaG | 3113 | — | (VPmU)*U*uau | 1539 | See Table 2. |
| | aGGUugagu | | | AcucaaccUcUg | | |
| | aua*a*a | | | uauc*u*c | | |
| 1538 | c*a*gauaG | 3114 | — | (VPmU)*G*cac | 1540 | See Table 2. |
| | gACAauuaa | | | UuaauuguCcUa | | |
| | gug*c*a | | | ucug*a*g | | |
| 1539 | g*a*uaggA | 3115 | — | (VPmU)*G*ugc | 1541 | See Table 2. |
| | cAAUuaagu | | | AcuuaauuGuCc | | |
| | gca*c*a | | | uauc*u*g | | |
| 1540 | c*c*caguU | 3116 | — | (VPmU)*G*uau | 1542 | See Table 2. |
| | uACAggucu | | | AgaccuguAaAc | | |
| | aua*c*a | | | uggg*a*a | | |
| 1541 | u*u*gagcU | 3117 | — | (VPmU)*G*ucc | 1543 | See Table 2. |
| | uACUuacuu | | | AaguaaguAaGc | | |
| | gga*c*a | | | ucaa*u*a | | |
| 1542 | a*g*cuuaC | 3118 | — | (VPmU)*U*gcg | 1544 | See Table 2. |
| | uUACuugga | | | UccaaguaAgUa | | |
| | cgc*a*a | | | agcu*c*a | | |
| 1543 | u*g*gacgC | 3119 | — | (VPmU)*C*gcu | 1545 | See Table 2. |
| | aACAuugca | | | UgcaauguUgCg | | |
| | agc*g*a | | | ucca*a*g | | |
| 1544 | g*g*acgcA | 3120 | — | (VPmU)*G*cgc | 1546 | See Table 2. |
| | aCAUugcaa | | | UugcaaugUuGc | | |
| | gcg*c*a | | | gucc*a*a | | |
| 1545 | g*a*cgcaA | 3121 | — | (VPmU)*A*gcg | 1547 | See Table 2. |
| | cAUUgcaag | | | CuugcaauGuUg | | |
| | cgc*u*a | | | cguc*c*a | | |
| 1546 | g*c*aacaU | 3122 | — | (VPmU)*C*aca | 1548 | See Table 2. |
| | uGCAagcgc | | | GcgcuugcAaUg | | |
| | ugu*g*a | | | uugc*g*u | | |
| 1547 | a*a*augaA | 3123 | — | (VPmU)*G*cga | 1549 | See Table 2. |
| | uGAUugcuu | | | AagcaaucAuUc | | |
| | ucg*c*a | | | auuu*c*u | | |
| 1548 | a*a*ugaaU | 3124 | — | (VPmU)*A*gcg | 1550 | See Table 2. |
| | gAUUgcuuu | | | AaagcaauCaUu | | |
| | cgc*u*a | | | cauu*u*c | | |
| 1549 | a*a*ugauU | 3125 | — | (VPmU)*U*aga | 1551 | See Table 2. |
| | gCUUucgcu | | | AgcgaaagCaAu | | |
| | ucu*a*a | | | cauu*c*a | | |
| 1550 | a*u*gauuG | 3126 | — | (VPmU)*G*uag | 1552 | See Table 2. |
| | cUUUcgcuu | | | AagcgaaaGcAa | | |
| | cua*c*a | | | ucau*u*c | | |
| 1551 | u*g*auugC | 3127 | — | (VPmU)*U*gua | 1553 | See Table 2. |
| | uUUCgcuuc | | | GaagcgaaAgCa | | |
| | uac*a*a | | | auca*u*u | | |
| 1552 | a*u*uuuaG | 3128 | — | (VPmU)*A*gac | 1554 | See Table 2. |
| | gGUUccauu | | | AauggaacCcUa | | |
| | guc*u*a | | | aaau*g*c | | |
| 1553 | a*u*ugucU | 3129 | — | (VPmU)*U*gua | 1555 | See Table 2. |
| | uGGUggugu | | | AcaccaccAaGa | | |
| | uac*a*a | | | caau*g*g | | |
| 1554 | u*g*guagU | 3130 | — | (VPmU)*G*cau | 1556 | See Table 2. |
| | gGAAauucu | | | AgaauuucCaCu | | |
| | aug*c*a | | | acca*u*u | | |
| 1555 | a*c*cgcuC | 3131 | — | (VPmU)*U*uua | 1557 | See Table 2. |
| | uUCAgguug | | | CaaccugaAgAg | | |
| | uaa*a*a | | | cggu*g*u | | |
| 1556 | c*a*ucuaG | 3132 | — | (VPmU)*A*uag | 1558 | See Table 2. |
| | uGUUaggca | | | UgccuaacAcUa | | |
| | cua*u*a | | | gaug*a*a | | |
| 1557 | a*u*cuagU | 3133 | — | (VPmU)*U*aua | 1559 | See Table 2. |
| | gUUAggcac | | | GugccuaaCaCu | | |
| | uau*a*a | | | agau*g*a | | |
| 1558 | g*u*uaggC | 3134 | — | (VPmU)*U*aaa | 1560 | See Table 2. |
| | aCUAuagua | | | UacuauagUgCc | | |
| | uuu*a*a | | | uaac*a*c | | |
| 1559 | u*a*aaagG | 3135 | — | (VPmU)*A*ggu | 1561 | See Table 2. |
| | uAUCaaugu | | | AcauugauAcCu | | |
| | acc*u*a | | | uuua*a*g | | |
| 1560 | c*a*ggauA | 3136 | — | (VPmU)*A*uuu | 1562 | See Table 2. |
| | aUAUagugc | | | GcacuauaUuAu | | |
| | aaa*u*a | | | ccug*c*c | | |
| 1561 | g*a*gaagC | 3137 | — | (VPmU)*C*cgc | 1563 | See Table 2. |
| | cAUAuaaug | | | CauuauauGgCu | | |
| | gcg*g*a | | | ucuc*a*u | | |
| 1562 | g*a*agccA | 3138 | — | (VPmU)*A*acc | 1564 | See Table 2. |
| | uAUAauggc | | | GccauuauAuGg | | |
| | ggu*u*a | | | cuuc*u*c | | |
| 1563 | u*g*caguA | 3139 | — | (VPmU)*U*auu | 1565 | See Table 2. |
| | cUGCaagcu | | | AgcuugcaGuAc | | |
| | aau*a*a | | | ugca*u*a | | |
| 1564 | c*u*gcaaG | 3140 | — | (VPmU)*C*caa | 1566 | See Table 2. |
| | cUAAuaacg | | | CguuauuaGcUu | | |
| | uug*g*a | | | gcag*u*a | | |
| 1565 | u*g*caagC | 3141 | — | (VPmU)*A*cca | 1567 | See Table 2. |
| | uAAUaacgu | | | AcguuauuAgCu | | |
| | ugg*u*a | | | ugca*g*u | | |
| 1566 | g*c*aagcU | 3142 | — | (VPmU)*A*acc | 1568 | See Table 2. |
| | aAUAacguu | | | AacguuauUaGc | | |
| | ggu*u*a | | | uugc*a*g | | |
| 1567 | u*a*auaaC | 3143 | — | (VPmU)*A*uaa | 1569 | See Table 2. |
| | gUUGguuug | | | CaaaccaaCgUu | | |
| | uua*u*a | | | auua*g*c | | |
| 1568 | a*g*aaagC | 3144 | — | (VPmU)*U*uga | 1570 | See Table 2. |
| | cCGCuuuag | | | CuaaagcgGgCu | | |
| | uca*a*a | | | uucu*c*u | | |
| 1569 | g*a*aagcC | 3145 | — | (VPmU)*A*uug | 1571 | See Table 2. |
| | cGCUuuagu | | | AcuaaagcGgGc | | |
| | caa*u*a | | | uuuc*u*c | | |
| 1570 | a*a*agccC | 3146 | — | (VPmU)*U*auu | 1572 | See Table 2. |
| | gCUUuaguc | | | GacuaaagCgGg | | |
| | aau*a*a | | | cuuu*c*u | | |
| 1571 | g*c*ccgcU | 3147 | — | (VPmU)*A*agu | 1573 | See Table 2. |
| | uUAGucaau | | | AuugacuaAaGc | | |
| | acu*u*a | | | gggc*u*u | | |
| 1572 | g*u*ugucU | 3148 | — | (VPmU)*A*aca | 1574 | See Table 2. |
| | gCAUuaacc | | | GguuaaugCaGa | | |
| | ugu*u*a | | | caac*u*g | | |
| 1573 | g*u*ucauA | 3149 | — | (VPmU)*G*aca | 1575 | See Table 2. |
| | cACCcauuu | | | AaauggguGuAu | | |
| | ugu*c*a | | | gaac*a*g | | |
| 1574 | u*c*auacA | 3150 | — | (VPmU)*G*gga | 1576 | See Table 2. |
| | cCCAuuuug | | | CaaaauggGuGu | | |
| | ucc*c*a | | | auga*a*c | | |

[0320] The nucleotide sequence of exemplary preferred modified versions of the dsRNA agents set forth in Table 4 are set forth in Table 5. More specifically, Table 5 sets forth the nucleotide sequence of exemplary modified sense strands, antisense strands, and dsRNA agent pairs of sense and antisense strands that may be preferred in some embodiments.

TABLE 5
Modified Sense and Antisense Strand Sequences of Exemplary Preferred
BCL11A dsRNA Agents.

| | | | | | | | Exemplary | |
|---|---|---|---|---|---|---|---|---|
| | | | | | | | mRNA | |
| | | | | | | Range | Target | |
| dsRNA | Sense | SEQ | Range in | Antisense | SEQ | in | Sequence | SEQ |
| Agent | Sequence | ID | NM_0228 | Sequence | ID | NM_ | in NM_ | ID |
| ID | 5′ to 3′ | NO | 93.4 | 5′ to 3′ | NO | 022893.4 | 022893.4 | NO |
| 770 | u*g*gauuAa | 2346 | 963-983 | (VPmU)*C*u | 772 | 961-983 | CAUGGAUUA | 3548 |
| | GAAucuaCUu | | | aaGuAGauuc | | | AGAAUCUAC | |
| | a*g*a | | | UuAa(y)cca | | | UUAGA | |
| | | | | *u*g | | | | |
| 771 | c*a*caaaCg | 2347 | 580-600 | (VPmA)*U*u | 773 | 578-600 | AGCACAAAC | 3549 |
| | GAAacaaUGc | | | gcAuUGuuuc | | | GGAAACAAU | |
| | a*a*u | | | CgUuug(y)g | | | GCAAU | |
| | | | | *c*u | | | | |
| 772 | a*c*auucUu | 2348 | 560-580 | (VPmU)*C*u | 774 | 558-580 | GGACAUUCU | 3550 |
| | AUUuuuaucg | | | cgAuaaaaau | | | UAUUUUUAU | |
| | a*g*a | | | AaGaaugu*c | | | CGAGC | |
| | | | | *C | | | | |
| 773 | g*c*aaacAg | 2349 | 908-928 | (VPmA)*A*c | 775 | 906-928 | UUGCAAACA | 3551 |
| | CCAuucaCCa | | | ugGuGAaugX | | | GCCAUUCAC | |
| | X*u*u | | | CuGu(y)ugc | | | CAGUG | |
| | | | | *a*a | | | | |
| 774 | a*u*guacAa | 2350 | 897-917 | (VPmU)*G*c | 776 | 895-917 | ACAUGUACA | 3552 |
| | CUUgcaaACa | | | ugUuUGcaag | | | ACUUGCAAA | |
| | X*c*a | | | UuGuacau*g | | | CAGCC | |
| | | | | *u | | | | |
| 775 | a*a*cacgCa | 2351 | 944-964 | (VPmA)*A*u | 777 | 942-964 | GCAACACGC | 3553 |
| | CAGaacaCUc | | | gaGuGUucug | | | ACAGAACAC | |
| | a*u*u | | | UgCguguu*g | | | UCAUG | |
| | | | | *C | | | | |
| 776 | g*c*uacaCa | 2352 | 890-910 | (VPmU)*G*c | 778 | 888-910 | CAGCUACAC | 3554 |
| | UGUacaaCUu | | | aaGuUGuaca | | | AUGUACAAC | |
| | g*c*a | | | UgUg(y)agc | | | UUGCA | |
| | | | | *u*g | | | | |
| 777 | c*a*caugUa | 2353 | 894-914 | (VPmU)*G*u | 779 | 892-914 | UACACAUGU | 3555 |
| | CAAcuugcaa | | | uuGcaaguug | | | ACAACUUGC | |
| | a*c*a | | | UaCaugug*u | | | AAACA | |
| | | | | *a | | | | |
| 778 | a*c*uugcAa | 2354 | 904-924 | (VPmU)*G*u | 780 | 902-924 | CAACUUGCA | 3556 |
| | ACAgccaUUc | | | gaAuGGcugu | | | AACAGCCAU | |
| | a*c*a | | | UuGcaag(y) | | | UCACC | |
| | | | | *u*g | | | | |
| 779 | c*g*cacaGa | 2355 | 948-968 | (VPmU)*A*u | 781 | 946-968 | CACGCACAG | 3557 |
| | ACAcucaugg | | | ccAugagugu | | | AACACUCAU | |
| | a*u*a | | | UcUgugcg*u | | | GGAUU | |
| | | | | *g | | | | |
| 780 | a*u*ucuuAu | 2356 | 562-582 | (VPmU)*U*g | 782 | 560-582 | ACAUUCUUA | 3558 |
| | UUUuaucgag | | | cuCgauaaaa | | | UUUUUAUCG | |
| | c*a*a | | | AuAagaau*g | | | AGCAC | |
| | | | | *u | | | | |
| 781 | a*g*ugcaUg | 2357 | 925-945 | (VPmU)*U*g | 783 | 923-945 | CCAGUGCAU | 3559 |
| | GUUucucUUX | | | caAgAGaaac | | | GGUUUCUCU | |
| | c*a*a | | | CaUgcac(y) | | | UGCAA | |
| | | | | *g*g | | | | |
| 782 | u*c*aucuAg | 2358 | 730-750 | (VPmU)*G*g | 784 | 728-750 | CGUCAUCUA | 3560 |
| | AGGaauuugc | | | gcAaauuccu | | | GAGGAAUUU | |
| | c*c*a | | | CuAgauga*c | | | GCCCC | |
| | | | | *g | | | | |
| 783 | g*g*cgagAa | 2359 | 2083-2103 | (VPmU)*C*c | 785 | 2081-2103 | UGGGCGAGA | 3561 |
| | GCAuaagcgc | | | gcGcuuaugc | | | AGCAUAAGC | |
| | g*g*a | | | UuCucgcc*c | | | GCGGC | |
| | | | | *a | | | | |
| 784 | g*u*aagaUg | 2360 | 2798-2818 | (VPmU)*C*a | 786 | 2796-2818 | UUGUAAGAU | 3562 |
| | CCUuuuagcg | | | cgCuaaaagg | | | GCCUUUUAG | |
| | u*g*a | | | CaUcuuac*a | | | CGUGU | |
| | | | | *a | | | | |
| 785 | g*g*gauuCa | 2361 | 1069-1089 | (VPmA)*U*u | 787 | 1067-1089 | AUGGGAUUC | 3563 |
| | UAUugcaGAc | | | guCuGCaaua | | | AUAUUGCAG | |
| | a*a*u | | | UgAa(y)ccc | | | ACAAU | |
| | | | | *a*u | | | | |
| 1575 | (NH2C6)u*g | 3151 | 963-983 | (VPmU)*C*u | 772 | 961-983 | CAUGGAUUA | 3548 |
| | *gauuAaGAA | | | aaGuAGauuc | | | AGAAUCUAC | |
| | ucuaCUua*g | | | UuAa(y)cca | | | UUAGA | |
| | *a | | | *u*g | | | | |
| 1576 | (NH2C6)c*a | 3152 | 580-600 | (VPmA)*U*u | 773 | 578-600 | AGCACAAAC | 3549 |
| | *caaaCgGAA | | | gcAuUGuuuc | | | GGAAACAAU | |
| | acaaUGca*a | | | CgUuug(y)g | | | GCAAU | |
| | *u | | | *c*u | | | | |
| 1577 | (NH2C6)a*c | 3153 | 560-580 | (VPmU)*C*u | 774 | 558-580 | GGACAUUCU | 3550 |
| | *auucUuAUU | | | cgAuaaaaau | | | UAUUUUUAU | |
| | uuuaucga*g | | | AaGaaugu*c | | | CGAGC | |
| | *a | | | *C | | | | |
| 1578 | (NH2C6)g*c | 3154 | 908-928 | (VPmA)*A*c | 775 | 906-928 | UUGCAAACA | 3551 |
| | *aaacAgCCA | | | ugGuGAaugX | | | GCCAUUCAC | |
| | uucaCCaX*u | | | CuGu(y)ugc | | | CAGUG | |
| | *u | | | *a*a | | | | |
| 1579 | (NH2C6)a*u | 3155 | 897-917 | (VPmU)*G*c | 776 | 895-917 | ACAUGUACA | 3552 |
| | *guacAaCUU | | | ugUuUGcaag | | | ACUUGCAAA | |
| | gcaaACaX*c | | | UuGuacau*g | | | CAGCC | |
| | *a | | | *u | | | | |
| 1580 | (NH2C6)a*a | 3156 | 944-964 | (VPmA)*A*u | 777 | 942-964 | GCAACACGC | 3553 |
| | *cacgCaCAG | | | gaGuGUucug | | | ACAGAACAC | |
| | aacaCUca*u | | | UgCguguu*g | | | UCAUG | |
| | *u | | | *C | | | | |
| 1581 | (NH2C6)g*c | 3157 | 890-910 | (VPmU)*G*C | 778 | 888-910 | CAGCUACAC | 3554 |
| | *uacaCaUGU | | | aaGuUGuaca | | | AUGUACAAC | |
| | acaaCUug*c | | | UgUg(y)agc | | | UUGCA | |
| | *a | | | *u*g | | | | |
| 1582 | (NH2C6)c*a | 3158 | 894-914 | (VPmU)*G*u | 779 | 892-914 | UACACAUGU | 3555 |
| | *caugUaCAA | | | uuGcaaguug | | | ACAACUUGC | |
| | cuugcaaa*c | | | UaCaugug*u | | | AAACA | |
| | *a | | | *a | | | | |
| 1583 | (NH2C6)a*c | 3159 | 904-924 | (VPmU)*G*u | 780 | 902-924 | CAACUUGCA | 3556 |
| | *uugcAaACA | | | gaAuGGcugu | | | AACAGCCAU | |
| | gccaUUca*c | | | UuGcaag(y) | | | UCACC | |
| | *a | | | *u*g | | | | |
| 1584 | (NH2C6)c*g | 3160 | 948-968 | (VPmU)*A*u | 781 | 946-968 | CACGCACAG | 3557 |
| | *cacaGaACA | | | ccAugagugu | | | AACACUCAU | |
| | cucaugga*u | | | UcUgugcg*u | | | GGAUU | |
| | *a | | | *g | | | | |
| 1585 | (NH2C6)a*u | 3161 | 562-582 | (VPmU)*U*g | 782 | 560-582 | ACAUUCUUA | 3558 |
| | *ucuuAuUUU | | | cuCgauaaaa | | | UUUUUAUCG | |
| | uaucgagc*a | | | AuAagaau*g | | | AGCAC | |
| | *a | | | *u | | | | |
| 1586 | (NH2C6)a*g | 3162 | 925-945 | (VPmU)*U*g | 783 | 923-945 | CCAGUGCAU | 3559 |
| | *ugcaUgGUU | | | caAgAGaaac | | | GGUUUCUCU | |
| | ucucUUXc*a | | | CaUgcac(y) | | | UGCAA | |
| | *a | | | *g*g | | | | |
| 1587 | (NH2C6)u*c | 3163 | 730-750 | (VPmU)*G*g | 784 | 728-750 | CGUCAUCUA | 3560 |
| | *aucuAgAGG | | | gcAaauuccu | | | GAGGAAUUU | |
| | aauuugcc*c | | | CuAgauga*c | | | GCCCC | |
| | *a | | | *g | | | | |
| 1588 | (NH2C6)g*g | 3164 | 2083-2103 | (VPmU)*C*c | 785 | 2081-2103 | UGGGCGAGA | 3561 |
| | *cgagAaGCA | | | gcGcuuaugc | | | AGCAUAAGC | |
| | uaagcgcg*g | | | UuCucgcc*c | | | GCGGC | |
| | *a | | | *a | | | | |
| 1589 | (NH2C6)g*u | 3165 | 2798-2818 | (VPmU)*C*a | 786 | 2796-2818 | UUGUAAGAU | 3562 |
| | *aagaUgCCU | | | cgCuaaaagg | | | GCCUUUUAG | |
| | uuuagcgu*g | | | CaUcuuac*a | | | CGUGU | |
| | *a | | | *a | | | | |
| 1590 | (NH2C6)g*g | 3166 | 1069-1089 | (VPmA)*U*u | 787 | 1067-1089 | AUGGGAUUC | 3563 |
| | *gauuCaUAU | | | guCuGCaaua | | | AUAUUGCAG | |
| | ugcaGAca*a | | | UgAa(y)ccc | | | ACAAU | |
| | *u | | | *a*u | | | | |

[0321] The nucleotide sequences presented in Table 4 and Table 5, utilize the following abbreviations set forth in Table 6.

TABLE 6
Abbreviations of Nucleotide Modifications
Utilized in Table 4 and Table 5.

| Abbreviation | Nucleotide/Linkage |
|---|---|
| a | 2′-O-methyladenosine |
| c | 2′-O-methylcytidine |
| g | 2′-O-methylguanosine |
| u | 2′-O-methyluridine |
| A | 2′-fluoroadenosine |
| C | 2′-fluorocytidine |
| G | 2′-fluoroguanosine |
| U | 2′-fluorouridine |
| * | Phosphorothioate Bond |
| (VPmX) | 5′-(E)-vinylphosphonate 2′-O-methylated |
| | (2′-Ome) nucleotide |
| X | Any nucleotide (A, G, C, U, T) modified or unmodified |
| Z | 2′-Fluoroguanosine unlocked nucleic acid |
| (y) | 1-N-Methylpseudouridine 2′-O-methylated (2′-Ome) |
| Nb | LNA RNA |
| Nm | 2′MOE RNA |
| dN | DNA |
| 5MCb | 5-Methylcytosine LNA RNA |
| 5MCm | 5-Methylcytosine 2′MOE RNA |
| 5MdC | 5-Methylcytosine DNA |
| (NH2C6) | aminohexyl spacer |

[0322] Various salts, mixed salts and free acid forms of the dsRNA agents are also provided herein. In some embodiments, the dsRNA agent is in a free acid form. In some embodiments, the dsRNA agent is in a salt form. In some embodiments, the dsRNA agent is in a sodium salt form. In some embodiments, wherein the dsRNA agent is in the sodium salt form, sodium ions are present in the composition comprising the dsRNA agent as counterions for substantially all of the phosphodiester or phosphorothioate groups present in the dsRNA agent. In some embodiments, wherein the dsRNA agent is in the sodium salt form, sodium ions are present in the agent as counterions for all of the phosphodiester or phosphorothioate groups present in the dsRNA agent.

### 4.3 Antisense Oligonucleotides

[0323] Provided herein are, inter alia, antisense oligonucleotides (ASOs), useful in, inter alia, inhibiting expression of BCL11 transcription factor A (BCL11A) (e.g., human BCL11A (hBCL11A)) (e.g., within a cell, e.g., within a cell in a subject, e.g., a mammalian subject, e.g., a human subject) (e.g., through the degradation of BCL11A (e.g., hBCL11A) mRNA).

[0324] Antisense oligonucleotides inhibit expression of a target gene through various mechanisms, including, e.g., cleavage of target mRNA (e.g., through the recruitment of RNAse H), blocking the association of ribosomes or other factors (steric hindrance). Antisense oligonucleotides can also modulate gene expression through modulating mRNA splicing.

[0325] In some embodiments, the antisense oligonucleotide is an RNA molecule. In some embodiments, the antisense oligonucleotide is an DNA molecule. In some embodiments, the antisense oligonucleotide is an RNA/DNA hybrid molecule. In some embodiments, the antisense oligonucleotide is a single stranded RNA molecule. In some embodiments, the antisense oligonucleotide is a single stranded DNA molecule. In some embodiments, the antisense oligonucleotide is a single stranded RNA/DNA hybrid molecule.

### 4.3.1 Targeting Region

[0326] In some embodiments, the antisense oligonucleotides comprise a region of complementarity that comprises a nucleotide sequence that is at least partially (e.g., substantially, fully) complementary to the nucleotide sequence of a target nucleic acid molecule (e.g., a target mRNA (e.g., a BCL11A mRNA), a portion of a target mRNA (e.g., a BCL11A mRNA)). In some embodiments, the nucleotide sequence of the region of complementarity is at least substantially complementary to the nucleotide sequence of the target nucleic acid molecule (e.g., a target mRNA (e.g., a BCL11A mRNA), a portion of a target mRNA (e.g., a BCL11A mRNA)). In some embodiments, the nucleotide sequence of the region of complementarity is fully complementary to the nucleotide sequence of the target nucleic acid molecule (e.g., a target mRNA (e.g., a BCL11A mRNA), a portion of a target mRNA (e.g., a BCL11A mRNA)).

[0327] In some embodiments, the nucleotide sequence of the region of complementarity is at least 70%, 75%, 80%, 85%, 90%, 91%, 92%, 93%, 94%, 95%, 96%, 97%, 98%, 99%, or 100% complementary to the nucleotide sequence of the target nucleic acid molecule (e.g., a target mRNA (e.g., a BCL11A mRNA), a portion of a target mRNA (e.g., a BCL11A mRNA)). For example, the nucleotide sequence of the region of complementarity may be at least 70% complementary to the nucleotide sequence of the target nucleic acid molecule (e.g., a target mRNA (e.g., a BCL11A mRNA), a portion of a target mRNA (e.g., a BCL11A mRNA)). The nucleotide sequence of the region of complementarity may be at least 75% complementary to the nucleotide sequence of the target nucleic acid molecule (e.g., a target mRNA (e.g., a BCL11A mRNA), a portion of a target mRNA (e.g., a BCL11A mRNA)). The nucleotide sequence of the region of complementarity may be at least 80% complementary to the nucleotide sequence of the target nucleic acid molecule (e.g., a target mRNA (e.g., a BCL11A mRNA), a portion of a target mRNA (e.g., a BCL11A mRNA)). The nucleotide sequence of the region of complementarity may be at least 85% complementary to the nucleotide sequence of the target nucleic acid molecule (e.g., a target mRNA (e.g., a BCL11A mRNA), a portion of a target mRNA (e.g., a BCL11A mRNA)). The nucleotide sequence of the region of complementarity may be at least 90% complementary to the nucleotide sequence of the target nucleic acid molecule (e.g., a target mRNA (e.g., a BCL11A mRNA), a portion of a target mRNA (e.g., a BCL11A mRNA)). The nucleotide sequence of the region of complementarity may be at least 95% complementary to the nucleotide sequence of the target nucleic acid molecule (e.g., a target mRNA (e.g., a BCL11A mRNA), a portion of a target mRNA (e.g., a BCL11A mRNA)). In some embodiments, the nucleotide sequence of the region of complementarity is at least 80%, 85%, 90%, 91%, 92%, 93%, 94%, 95%, 96%, 97%, 98%, 99%, or 100% complementary to the nucleotide sequence of the target nucleic acid molecule (e.g., a target mRNA (e.g., a BCL11A mRNA), a portion of a target mRNA (e.g., a BCL11A mRNA)). In some embodiments, the nucleotide sequence of the region of complementarity is at least 95%, 96%, 97%, 98%, 99%, or 100% (e.g., in some embodiments, preferably at least 95%, more preferably at least 98%) complementary to the nucleotide sequence of the target nucleic acid molecule (e.g., a target mRNA (e.g., a BCL11A mRNA), a portion of a target mRNA (e.g., a BCL11A mRNA)). In some embodiments, the nucleotide sequence of the region of complementarity is 100% complementary to the nucleotide sequence of the target nucleic acid molecule (e.g., a target mRNA (e.g., a BCL11A mRNA), a portion of a target mRNA (e.g., a BCL11A mRNA)).

[0328] In some embodiments, the nucleotide sequence of the region of complementarity comprises or consists of one or more non-complementary nucleotide mismatches relative to the nucleotide sequence of the target nucleic acid molecule (e.g., a target mRNA (e.g., a BCL11A mRNA), a portion of a target mRNA (e.g., a BCL11A mRNA)). In some embodiments, the nucleotide sequence of the region of complementarity comprises or consists of no more than 5 (e.g., 4, 3, 2, 1, or 0) non-complementary nucleotide mismatches relative to the nucleotide sequence of the target nucleic acid molecule. In some embodiments, the nucleotide sequence of the region of complementarity comprises or consists of no more than 3 (e.g., 2, 1, or 0) non-complementary nucleotide mismatches relative to the nucleotide sequence of the target nucleic acid molecule. In some embodiments, the nucleotide sequence of the region of complementarity comprises or consists of no more than 2 (e.g., 1 or 0) non-complementary nucleotide mismatches relative to the nucleotide sequence of the target nucleic acid molecule. In some embodiments, the nucleotide sequence of the region of complementarity comprises or consists of no more than 1 (e.g., 0) non-complementary nucleotide mismatch relative to the nucleotide sequence of the target nucleic acid molecule. In some embodiments, the nucleotide sequence of the region of complementarity comprises 0 non-complementary nucleotide mismatches relative to the nucleotide sequence of the target nucleic acid molecule. In some embodiments, the region of complementarity comprises one or more (e.g., 2, 3, or more) non-complementary nucleotide mismatches relative to the nucleotide sequence of the target nucleic acid molecule, wherein the one or more non-complementary nucleotide mismatches are within the last 5 (e.g., 4, 3, 2, or 1) nucleotides from either the 5′- and/or 3′-end of the region of complementarity. In some embodiments, the region of complementarity comprises at least one but not more than 3 non-complementary nucleotide mismatches relative to the nucleotide sequence of the target nucleic acid molecule, wherein the one or more non-complementary nucleotide mismatches are within the last 5 (e.g., 4, 3, 2, or 1) nucleotides from either the 5′- and/or 3′-end of the region of complementarity. In some embodiments, the region of complementarity comprises one or more (e.g., 2, 3, or more) non-complementary nucleotide mismatches relative to the nucleotide sequence of the target nucleic acid molecule, wherein the one or more non-complementary nucleotide mismatches are within the last 3 (e.g., 2 or 1) nucleotides from either the 5′- and/or 3′-end of the region of complementarity. In some embodiments, the region of complementarity comprises at least one but not more than 3 non-complementary nucleotide mismatches relative to the nucleotide sequence of the target nucleic acid molecule, wherein the one or more non-complementary nucleotide mismatches are within the last 3 (e.g., 2 or 1) nucleotides from either the 5′- and/or 3′-end of the region of complementarity. Methods known in the art and described herein can be utilized to evaluate the effect of any non-complementary mismatches between an antisense oligonucleotide and a target nucleic acid molecule on functional properties (e.g., inhibition of expression of the target nucleic acid molecule (e.g., a target mRNA (e.g., a BCL11A mRNA), a portion of a target mRNA (e.g., a BCL11A mRNA))).

[0329] In some embodiments, the region of complementarity comprises or consists of from about 10-30 nucleotides, e.g., 15-29, 15-28, 15-27, 15-26, 15-25, 15-24, 15-23, 15-22, 15-21, 15-20, 15-19, 15-18, 15-17, 15-16, 16-29, 16-28, 16-27, 16-26, 16-25, 16-24, 16-23, 16-22, 16-21, 16-20, 16-19, 16-18, 16-17, 17-29, 17-28, 17-27, 17-26, 17-25, 17-24, 17-23, 17-22, 17-21, 17-20, 17-19, 17-18, 18-30, 18-29, 18-28, 18-27, 18-26, 18-25, 18-24, 18-23, 18-22, 18-21, 18-20, 19-30, 19-29, 19-28, 19-27, 19-26, 19-25, 19-24, 19-23, 19-22, 19-21, 19-20, nucleotides. In some embodiments, the region of complementarity comprises from about 15-25, 15-14, 15-23, 15-22, 15-21, 15-20, 15-19, 15-18, 15-17, 15-16, 16-25, 16-14, 16-23, 16-22, 16-21, 16-20, 16-19, 16-18, 16-17, 17-25, 17-14, 17-23, 17-22, 17-21, 17-20, 17-19, 17-18, 18-25, 18-14, 18-23, 18-22, 18-21, 18-20, 18-19, 19-25, 19-14, 19-23, 19-22, 19-21, or 19-20 nucleotides. In some embodiments, the region of complementarity comprises from about 19-21 (e.g., 19-20) nucleotides. In some embodiments, the region of complementarity comprises or consists of about 15, 16, 17, 18, 19, 20, 21, 22, 23, 24, 25, 26, 27, 28, 29, or 30 nucleotides. In some embodiments, the region of complementarity comprises or consists of about 15, 16, 17, 18, 19, 20, 21, 22, 23, 24, or 25 nucleotides. In some embodiments, the region of complementarity comprises or consists of about 15, 16, 17, 18, 19, or 20 nucleotides. In some embodiments, the region of complementarity comprises or consists of about 15, 16, 17, 18, 19, 20, 21, 22, 23, 24, 25, 26, 27, 28, 29, or 30 nucleotides. In some embodiments, the region of complementarity comprises or consists of about 15, 16, 17, 18, 19, or 20 nucleotides. In some embodiments, the region of complementarity consists of about 15, 16, 17, 18, 19, or 20 nucleotides. In some embodiments, the region of complementarity consists of about 15 nucleotides. In some embodiments, the region of complementarity consists of about 16 nucleotides. In some embodiments, the region of complementarity consists of about 17 nucleotides. In some embodiments, the region of complementarity consists of about 18 nucleotides. In some embodiments, the region of complementarity consists of about 19 nucleotides. In some embodiments, the region of complementarity consists of about 20 nucleotides. Ranges and lengths intermediate to the above recited ranges and lengths are also contemplated to be part of the disclosure.

[0330] In some embodiments, the target nucleic acid molecule is part (e.g., a contiguous portion) of a larger nucleic acid molecule. For example, in some embodiments, the target nucleic acid molecule is a portion (e.g., a contiguous portion) of a target mRNA (e.g., a BCL11A mRNA). In some embodiments, the target nucleic acid molecule is a contiguous nucleotide sequence of a target mRNA (e.g., a BCL11A mRNA) of sufficient length to allow it to be a substrate for cleavage directed by an RNAi agent (e.g., an RNAi agent described herein, e.g., a dsRNA agent (e.g., described herein)) (i.e., cleavage through a RISC pathway).

[0331] In some embodiments, the target nucleic acid molecule is a target mRNA (e.g., a BCL11A mRNA). In some embodiments, the target nucleic acid molecule is at least a portion (e.g., a portion) of a target mRNA (e.g., a BCL11A mRNA). In some embodiments, the target nucleic acid molecule is at least a portion (e.g., a portion) of an mRNA (e.g., a BCL11A mRNA) formed in the expression of a target gene (e.g., a mammalian, primate, human, non-human primate, mouse, and/or rat gene) (e.g., a BCL11A gene). In some embodiments, the target nucleic acid molecule is at least a portion (e.g., a portion) of a BCL11A (e.g., hBCL11A) mRNA. In some embodiments, the target nucleic acid molecule is at least a portion (e.g., a portion) of an mRNA formed in the expression of a BCL11A (e.g., hBCL11A) gene. In some embodiments, the target nucleic acid molecule comprises at least a portion (e.g., a portion) of the nucleotide sequence set forth in SEQ ID NO: 1 (or a variant or fragment thereof). In some embodiments, the target nucleic acid molecule comprises at least a portion (e.g., a portion) of an mRNA encoding a target protein. In some embodiments, the target nucleic acid molecule comprises at least a portion (e.g., a portion) of an mRNA encoding a BCL11A (e.g., hBCL11A) protein. In some embodiments, the target nucleic acid molecule comprises at least a portion (e.g., a portion) of an mRNA sequence encoding a protein comprising the amino acid sequence set forth in SEQ ID NO: 3 (or a variant or fragment thereof).

[0332] In some embodiments, the target nucleic acid molecule comprises or consists of from about 10-30 nucleotides, e.g., 15-29, 15-28, 15-27, 15-26, 15-25, 15-24, 15-23, 15-22, 15-21, 15-20, 15-19, 15-18, 15-17, 15-16, 16-29, 16-28, 16-27, 16-26, 16-25, 16-24, 16-23, 16-22, 16-21, 16-20, 16-19, 16-18, 16-17, 17-29, 17-28, 17-27, 17-26, 17-25, 17-24, 17-23, 17-22, 17-21, 17-20, 17-19, 17-18, 18-30, 18-29, 18-28, 18-27, 18-26, 18-25, 18-24, 18-23, 18-22, 18-21, 18-20, 19-30, 19-29, 19-28, 19-27, 19-26, 19-25, 19-24, 19-23, 19-22, 19-21, 19-20, nucleotides. In some embodiments, the target nucleic acid molecule comprises from about 15-25, 15-14, 15-23, 15-22, 15-21, 15-20, 15-19, 15-18, 15-17, 15-16, 16-25, 16-14, 16-23, 16-22, 16-21, 16-20, 16-19, 16-18, 16-17, 17-25, 17-14, 17-23, 17-22, 17-21, 17-20, 17-19, 17-18, 18-25, 18-14, 18-23, 18-22, 18-21, 18-20, 18-19, 19-25, 19-14, 19-23, 19-22, 19-21, or 19-20 nucleotides. In some embodiments, the target nucleic acid molecule comprises from about 19-21 (e.g., 19-20) nucleotides. In some embodiments, the target nucleic acid molecule comprises or consists of about 15, 16, 17, 18, 19, 20, 21, 22, 23, 24, 25, 26, 27, 28, 29, or 30 nucleotides. In some embodiments, the target nucleic acid molecule comprises or consists of about 15, 16, 17, 18, 19, 20, 21, 22, 23, 24, or 25 nucleotides. In some embodiments, the target nucleic acid molecule comprises or consists of about 15, 16, 17, 18, 19, or 20 nucleotides. In some embodiments, the target nucleic acid molecule comprises or consists of about 15, 16, 17, 18, 19, 20, 21, 22, 23, 24, 25, 26, 27, 28, 29, or 30 nucleotides. In some embodiments, the target nucleic acid molecule comprises or consists of about 15, 16, 17, 18, 19, or 20 nucleotides. In some embodiments, the target nucleic acid molecule consists of about 15, 16, 17, 18, 19, or 20 nucleotides. In some embodiments, the target nucleic acid molecule consists of about 15 nucleotides. In some embodiments, the target nucleic acid molecule consists of about 16 nucleotides. In some embodiments, the target nucleic acid molecule consists of about 17 nucleotides. In some embodiments, the target nucleic acid molecule consists of about 18 nucleotides. In some embodiments, the target nucleic acid molecule consists of about 19 nucleotides. In some embodiments, the target nucleic acid molecule consists of about 20 nucleotides.

### 4.3.2 Overall Length

[0333] In some embodiments, the antisense oligonucleotide comprises or consists of from about 10-30 nucleotides, e.g., 15-29, 15-28, 15-27, 15-26, 15-25, 15-24, 15-23, 15-22, 15-21, 15-20, 15-19, 15-18, 15-17, 15-16, 16-29, 16-28, 16-27, 16-26, 16-25, 16-24, 16-23, 16-22, 16-21, 16-20, 16-19, 16-18, 16-17, 17-29, 17-28, 17-27, 17-26, 17-25, 17-24, 17-23, 17-22, 17-21, 17-20, 17-19, 17-18, 18-30, 18-29, 18-28, 18-27, 18-26, 18-25, 18-24, 18-23, 18-22, 18-21, 18-20, 19-30, 19-29, 19-28, 19-27, 19-26, 19-25, 19-24, 19-23, 19-22, 19-21, or 19-20, nucleotides. In some embodiments, the antisense oligonucleotide comprises from about 15-25, 15-14, 15-23, 15-22, 15-21, 15-20, 15-19, 15-18, 15-17, 15-16, 16-25, 16-14, 16-23, 16-22, 16-21, 16-20, 16-19, 16-18, 16-17, 17-25, 17-14, 17-23, 17-22, 17-21, 17-20, 17-19, 17-18, 18-25, 18-14, 18-23, 18-22, 18-21, 18-20, 18-19, 19-25, 19-14, 19-23, 19-22, 19-21, or 19-20 nucleotides. In some embodiments, the antisense oligonucleotide comprises or consists of about 15, 16, 17, 18, 19, 20, 21, 22, 23, 24, 25, 26, 27, 28, 29, or 30 nucleotides. In some embodiments, the antisense oligonucleotide comprises or consists of about 15, 16, 17, 18, 19, 20, 21, 22, 23, 24, or 25 nucleotides. In some embodiments, the antisense oligonucleotide comprises or consists of about 15, 16, 17, 18, 19, or 20 nucleotides. In some embodiments, the antisense oligonucleotide comprises or consists of about 15, 16, 17, 18, 19, 20, 21, 22, 23, 24, 25, 26, 27, 28, 29, or 30 nucleotides. In some embodiments, the antisense oligonucleotide comprises or consists of about 15, 16, 17, 18, 19, or 20 nucleotides. In some embodiments, the antisense oligonucleotide consists of about 15, 16, 17, 18, 19, or 20 nucleotides. In some embodiments, the antisense oligonucleotide consists of about 15 nucleotides. In some embodiments, the antisense oligonucleotide consists of about 16 nucleotides. In some embodiments, the antisense oligonucleotide consists of about 17 nucleotides. In some embodiments, the antisense oligonucleotide consists of about 18 nucleotides. In some embodiments, the antisense oligonucleotide consists of about 19 nucleotides. In some embodiments, the antisense oligonucleotide consists of about 20 nucleotides. Ranges and lengths intermediate to the above recited ranges and lengths are also contemplated to be part of the disclosure.

### 4.3.3 Exemplary Antisense Oligonucleotides

[0334] In some embodiments, the antisense oligonucleotide comprises at least 15 (e.g., 15, 16, 17, 18, 19, 20, 21, 22, 23, 24, 25, 26, 27, 28, 29, 30 (e.g., 15, 16, 17, 18, 19, or 20)) contiguous nucleotides differing by no more than 3 (e.g., 0, 1, 2, or 3) nucleotides from the nucleotide sequence of any one of the antisense oligonucleotides set forth in Table 7 or 9 (e.g., Table 9). In some embodiments, the antisense oligonucleotide comprises at least 16 (e.g., 16, 17, 18, 19, or 20) contiguous nucleotides differing by no more than 3 (e.g., 0, 1, 2, or 3) nucleotides from the nucleotide sequence of any one of the antisense oligonucleotides set forth in Table 7 or 9 (e.g., Table 9). In some embodiments, the antisense oligonucleotide comprises at least 17 (e.g., 17, 18, 19, or 20) contiguous nucleotides differing by no more than 3 (e.g., 0, 1, 2, or 3) nucleotides from the nucleotide sequence of any one of the antisense oligonucleotides set forth in Table 7 or 9 (e.g., Table 9). In some embodiments, the antisense oligonucleotide comprises at least 20 (e.g., 20) contiguous nucleotides differing by no more than 3 (e.g., 0, 1, 2, or 3) nucleotides from the nucleotide sequence of any one of the antisense oligonucleotides set forth in Table 7 or 9 (e.g., Table 9).

[0335] In some embodiments, the antisense oligonucleotide comprises from about 10-30 nucleotides, e.g., 15-29, 15-28, 15-27, 15-26, 15-25, 15-24, 15-23, 15-22, 15-21, 15-20, 15-19, 15-18, 15-17, 15-16, 16-29, 16-28, 16-27, 16-26, 16-25, 16-24, 16-23, 16-22, 16-21, 16-20, 16-19, 16-18, 16-17, 17-29, 17-28, 17-27, 17-26, 17-25, 17-24, 17-23, 17-22, 17-21, 17-20, 17-19, 17-18, 18-30, 18-29, 18-28, 18-27, 18-26, 18-25, 18-24, 18-23, 18-22, 18-21, 18-20, 19-30, 19-29, 19-28, 19-27, 19-26, 19-25, 19-24, 19-23, 19-22, 19-21, or 19-20 contiguous nucleotides differing by no more than 3 (e.g., 0, 1, 2, or 3) nucleotides from the nucleotide sequence of any one of the antisense oligonucleotides set forth in Table 7 or 9 (e.g., Table 9). In some embodiments, the antisense oligonucleotide comprises from about 15-25, 15-14, 15-23, 15-22, 15-21, 15-20, 15-19, 15-18, 15-17, 15-16, 16-25, 16-14, 16-23, 16-22, 16-21, 16-20, 16-19, 16-18, 16-17, 17-25, 17-14, 17-23, 17-22, 17-21, 17-20, 17-19, 17-18, 18-25, 18-14, 18-23, 18-22, 18-21, 18-20, 18-19, 19-25, 19-14, 19-23, 19-22, 19-21, or 19-20 contiguous nucleotides differing by no more than 3 (e.g., 0, 1, 2, or 3) nucleotides from the nucleotide sequence of any one of the antisense oligonucleotides set forth in Table 7 or 9 (e.g., Table 9).

[0336] In some embodiments, the nucleotide sequence of the antisense oligonucleotide comprises the nucleotide sequence of any one of the antisense oligonucleotides set forth in Table 7 or 9 (e.g., Table 9) differing by no more than 3 (e.g., 0, 1, 2, or 3) nucleotides from the antisense oligonucleotide set forth in Table 7 or 9 (e.g., Table 9). In some embodiments, the nucleotide sequence of the antisense oligonucleotide comprises the nucleotide sequence of any one of the antisense oligonucleotides set forth in Table 7 or 9 (e.g., Table 9).

[0337] In some embodiments, the antisense oligonucleotide comprises or consists of about 15, 16, 17, 18, 19, 20, 21, 22, 23, 24, 25, 26, 27, 28, 29, or 30 contiguous nucleotides differing by no more than 3 (e.g., 0, 1, 2, or 3) nucleotides from the nucleotide sequence of any one of the antisense oligonucleotides set forth in Table 7 or 9 (e.g., Table 9). In some embodiments, the antisense oligonucleotide comprises or consists of about 15, 16, 17, 18, 19, 20, 21, 22, 23, 24, or 25 contiguous nucleotides differing by no more than 3 (e.g., 0, 1, 2, or 3) nucleotides from the nucleotide sequence of any one of the antisense oligonucleotides set forth in Table 7 or 9 (e.g., Table 9). In some embodiments, the antisense oligonucleotide comprises or consists of about 15, 16, 17, 18, 19, or 20 contiguous nucleotides differing by no more than 3 (e.g., 0, 1, 2, or 3) nucleotides from the nucleotide sequence of any one of the antisense oligonucleotides set forth in Table 7 or 9 (e.g., Table 9). In some embodiments, the antisense oligonucleotide comprises or consists of about 15, 16, 17, 18, 19, 20, 21, 22, 23, 24, 25, 26, 27, 28, 29, or 30 contiguous nucleotides differing by no more than 3 (e.g., 0, 1, 2, or 3) nucleotides from the nucleotide sequence of any one of the antisense oligonucleotides set forth in Table 7 or 9 (e.g., Table 9). In some embodiments, the antisense oligonucleotide comprises or consists of about 15, 16, 17, 18, 19, or 20 contiguous nucleotides differing by no more than 3 (e.g., 0, 1, 2, or 3) nucleotides from the nucleotide sequence of any one of the antisense oligonucleotides set forth in Table 7 or 9 (e.g., Table 9). In some embodiments, the antisense oligonucleotide consists of about 15, 16, 17, 18, 19, or 20 contiguous nucleotides differing by no more than 3 (e.g., 0, 1, 2, or 3) nucleotides from the nucleotide sequence of any one of the antisense oligonucleotides set forth in Table 7 or 9 (e.g., Table 9). In some embodiments, the antisense oligonucleotide consists of about 15 contiguous nucleotides differing by no more than 3 (e.g., 0, 1, 2, or 3) nucleotides from the nucleotide sequence of any one of the antisense oligonucleotides set forth in Table 7 or 9 (e.g., Table 9). In some embodiments, the antisense oligonucleotide consists of about 16 contiguous nucleotides differing by no more than 3 (e.g., 0, 1, 2, or 3) nucleotides from the nucleotide sequence of any one of the antisense oligonucleotides set forth in Table 7 or 9 (e.g., Table 9). In some embodiments, the antisense oligonucleotide consists of about 17 contiguous nucleotides differing by no more than 3 (e.g., 0, 1, 2, or 3) nucleotides from the nucleotide sequence of any one of the antisense oligonucleotides set forth in Table 7 or 9 (e.g., Table 9). In some embodiments, the antisense oligonucleotide consists of about 18 contiguous nucleotides differing by no more than 3 (e.g., 0, 1, 2, or 3) nucleotides from the nucleotide sequence of any one of the antisense oligonucleotides set forth in Table 7 or 9 (e.g., Table 9). In some embodiments, the antisense oligonucleotide consists of about 19 contiguous nucleotides differing by no more than 3 (e.g., 0, 1, 2, or 3) nucleotides from the nucleotide sequence of any one of the antisense oligonucleotides set forth in Table 7 or 9 (e.g., Table 9). In some embodiments, the antisense oligonucleotide consists of about 20 contiguous nucleotides differing by no more than 3 (e.g., 0, 1, 2, or 3) nucleotides from the nucleotide sequence of any one of the antisense oligonucleotides set forth in Table 7 or 9 (e.g., Table 9).

[0338] In some embodiments, the antisense oligonucleotide comprises at least 15 (e.g., 15, 16, 17, 18, 19, 20, 21, 22, 23, 24, 25, 26, 27, 28, 29, 30 (e.g., 15, 16, 17, 18, 19, or 20)) contiguous nucleotides differing by no more than 3 (e.g., 0, 1, 2, or 3) nucleotides from the nucleotide sequence of any one of the antisense oligonucleotides set forth in SEQ ID NOS: 3167-3280. In some embodiments, the antisense oligonucleotide comprises at least 16 (e.g., 16, 17, 18, 19, or 20) contiguous nucleotides differing by no more than 3 (e.g., 0, 1, 2, or 3) nucleotides from the nucleotide sequence of any one of the antisense oligonucleotides set forth in SEQ ID NOS: 3167-3280. In some embodiments, the antisense oligonucleotide comprises at least 17 (e.g., 17, 18, 19, or 20) contiguous nucleotides differing by no more than 3 (e.g., 0, 1, 2, or 3) nucleotides from the nucleotide sequence of any one of the antisense oligonucleotides set forth in SEQ ID NOS: 3167-3280. In some embodiments, the antisense oligonucleotide comprises at least 20 (e.g., 20) contiguous nucleotides differing by no more than 3 (e.g., 0, 1, 2, or 3) nucleotides from the nucleotide sequence of any one of the antisense oligonucleotides set forth in SEQ ID NOS: 3167-3280.

[0339] In some embodiments, the antisense oligonucleotide comprises from about 10-30 nucleotides, e.g., 15-29, 15-28, 15-27, 15-26, 15-25, 15-24, 15-23, 15-22, 15-21, 15-20, 15-19, 15-18, 15-17, 15-16, 16-29, 16-28, 16-27, 16-26, 16-25, 16-24, 16-23, 16-22, 16-21, 16-20, 16-19, 16-18, 16-17, 17-29, 17-28, 17-27, 17-26, 17-25, 17-24, 17-23, 17-22, 17-21, 17-20, 17-19, 17-18, 18-30, 18-29, 18-28, 18-27, 18-26, 18-25, 18-24, 18-23, 18-22, 18-21, 18-20, 19-30, 19-29, 19-28, 19-27, 19-26, 19-25, 19-24, 19-23, 19-22, 19-21, or 19-20 contiguous nucleotides differing by no more than 3 (e.g., 0, 1, 2, or 3) nucleotides from the nucleotide sequence of any one of the antisense oligonucleotides set forth in SEQ ID NOS: 3167-3280. In some embodiments, the antisense oligonucleotide comprises from about 15-25, 15-14, 15-23, 15-22, 15-21, 15-20, 15-19, 15-18, 15-17, 15-16, 16-25, 16-14, 16-23, 16-22, 16-21, 16-20, 16-19, 16-18, 16-17, 17-25, 17-14, 17-23, 17-22, 17-21, 17-20, 17-19, 17-18, 18-25, 18-14, 18-23, 18-22, 18-21, 18-20, 18-19, 19-25, 19-14, 19-23, 19-22, 19-21, or 19-20 contiguous nucleotides differing by no more than 3 (e.g., 0, 1, 2, or 3) nucleotides from the nucleotide sequence of any one of the antisense oligonucleotides set forth in SEQ ID NOS: 3167-3280.

[0340] In some embodiments, the nucleotide sequence of the antisense oligonucleotide comprises the nucleotide sequence of any one of the antisense oligonucleotides set forth in SEQ ID NOS: 3167-3280 differing by no more than 3 (e.g., 0, 1, 2, or 3) nucleotides from the antisense oligonucleotide set forth in SEQ ID NOS: 3167-3280. In some embodiments, the nucleotide sequence of the antisense oligonucleotide comprises the nucleotide sequence of any one of the antisense oligonucleotides set forth in SEQ ID NOS: 3167-3280.

[0341] In some embodiments, the antisense oligonucleotide comprises or consists of about 15, 16, 17, 18, 19, 20, 21, 22, 23, 24, 25, 26, 27, 28, 29, or 30 contiguous nucleotides differing by no more than 3 (e.g., 0, 1, 2, or 3) nucleotides from the nucleotide sequence of any one of the antisense oligonucleotides set forth in SEQ ID NOS: 3167-3280. In some embodiments, the antisense oligonucleotide comprises or consists of about 15, 16, 17, 18, 19, 20, 21, 22, 23, 24, or 25 contiguous nucleotides differing by no more than 3 (e.g., 0, 1, 2, or 3) nucleotides from the nucleotide sequence of any one of the antisense oligonucleotides set forth in SEQ ID NOS: 3167-3280. In some embodiments, the antisense oligonucleotide comprises or consists of about 15, 16, 17, 18, 19, or 20 contiguous nucleotides differing by no more than 3 (e.g., 0, 1, 2, or 3) nucleotides from the nucleotide sequence of any one of the antisense oligonucleotides set forth in SEQ ID NOS: 3167-3280. In some embodiments, the antisense oligonucleotide comprises or consists of about 15, 16, 17, 18, 19, 20, 21, 22, 23, 24, 25, 26, 27, 28, 29, or 30 contiguous nucleotides differing by no more than 3 (e.g., 0, 1, 2, or 3) nucleotides from the nucleotide sequence of any one of the antisense oligonucleotides set forth in SEQ ID NOS: 3167-3280. In some embodiments, the antisense oligonucleotide comprises or consists of about 15, 16, 17, 18, 19, or 20 contiguous nucleotides differing by no more than 3 (e.g., 0, 1, 2, or 3) nucleotides from the nucleotide sequence of any one of the antisense oligonucleotides set forth in SEQ ID NOS: 3167-3280. In some embodiments, the antisense oligonucleotide consists of about 15, 16, 17, 18, 19, or 20 contiguous nucleotides differing by no more than 3 (e.g., 0, 1, 2, or 3) nucleotides from the nucleotide sequence of any one of the antisense oligonucleotides set forth in SEQ ID NOS: 3167-3280. In some embodiments, the antisense oligonucleotide consists of about 15 contiguous nucleotides differing by no more than 3 (e.g., 0, 1, 2, or 3) nucleotides from the nucleotide sequence of any one of the antisense oligonucleotides set forth in SEQ ID NOS: 3167-3280. In some embodiments, the antisense oligonucleotide consists of about 16 contiguous nucleotides differing by no more than 3 (e.g., 0, 1, 2, or 3) nucleotides from the nucleotide sequence of any one of the antisense oligonucleotides set forth in SEQ ID NOS: 3167-3280. In some embodiments, the antisense oligonucleotide consists of about 17 contiguous nucleotides differing by no more than 3 (e.g., 0, 1, 2, or 3) nucleotides from the nucleotide sequence of any one of the antisense oligonucleotides set forth in SEQ ID NOS: 3167-3280. In some embodiments, the antisense oligonucleotide consists of about 18 contiguous nucleotides differing by no more than 3 (e.g., 0, 1, 2, or 3) nucleotides from the nucleotide sequence of any one of the antisense oligonucleotides set forth in SEQ ID NOS: 3167-3280. In some embodiments, the antisense oligonucleotide consists of about 19 contiguous nucleotides differing by no more than 3 (e.g., 0, 1, 2, or 3) nucleotides from the nucleotide sequence of any one of the antisense oligonucleotides set forth in SEQ ID NOS: 3167-3280. In some embodiments, the antisense oligonucleotide consists of about 20 contiguous nucleotides differing by no more than 3 (e.g., 0, 1, 2, or 3) nucleotides from the nucleotide sequence of any one of the antisense oligonucleotides set forth in SEQ ID NOS: 3167-3280.

[0342] In some embodiments, the nucleotide sequence of the antisense oligonucleotide comprises the nucleotide sequence set forth in any one of SEQ ID NOS: 3167-3280 differing by no more than 3 (e.g., 0, 1, 2, or 3) nucleotides from the nucleotide sequence set forth in any one of SEQ ID NOS: 3167-3280. In some embodiments, the nucleotide sequence of the antisense oligonucleotide comprises the nucleotide sequence set forth in any one of SEQ ID NOS: 3167-3280.

[0343] The disclosure further provides antisense oligonucleotides comprising at least 10-30 nucleotides, e.g., 15-29, 15-28, 15-27, 15-26, 15-25, 15-24, 15-23, 15-22, 15-21, 15-20, 15-19, 15-18, 15-17, 15-16, 16-29, 16-28, 16-27, 16-26, 16-25, 16-24, 16-23, 16-22, 16-21, 16-20, 16-19, 16-18, 16-17, 17-29, 17-28, 17-27, 17-26, 17-25, 17-24, 17-23, 17-22, 17-21, 17-20, 17-19, 17-18, 18-30, 18-29, 18-28, 18-27, 18-26, 18-25, 18-24, 18-23, 18-22, 18-21, 18-20, 19-30, 19-29, 19-28, 19-27, 19-26, 19-25, 19-24, 19-23, 19-22, 19-21, or 19-20 contiguous nucleotides differing by no more than 3 (e.g., 0, 1, 2, or 3) nucleotides from the nucleotide sequence set forth in any one of SEQ ID NOS: 3167-3280 and further comprising additional nucleotide sequences (e.g., comprising from about 1-10, 1-9, 1-8, 1-7, 1-6, 1-5, 1-4, 1-3, or 1-2 nucleotides) at least partially complementary to the region contiguous (e.g., either at the 3′ end, the 5′ end, or both the 3′ and 5′ end) of the BCL11A mRNA transcript targeted by the select antisense oligonucleotide.

[0344] In some embodiments, the antisense oligonucleotide comprises at least 15, 16, 17, 18, 19, 20, 21, 22, 23, 24, 25, 26, 27, 28, 29, or 30 contiguous nucleotides differing by no more than 3 (e.g., 0, 1, 2, or 3) nucleotides from the nucleotide sequence of any one of the antisense oligonucleotides of any one of ASOs 1-63 set forth in Table 7 or 9 (e.g., Table 9). In some embodiments, the antisense oligonucleotide comprises at least 16 (e.g., 16, 17, 18, 19, or 20) contiguous nucleotides differing by no more than 3 (e.g., 0, 1, 2, or 3) nucleotides from the nucleotide sequence of any one of the antisense oligonucleotides of any one of ASOs 1-63 set forth in Table 7 or 9 (e.g., Table 9). In some embodiments, the antisense oligonucleotide comprises at least 17 (e.g., 17, 18, 19, or 20) contiguous nucleotides differing by no more than 3 (e.g., 0, 1, 2, or 3) nucleotides from the nucleotide sequence of any one of the antisense oligonucleotides of any one of ASOs 1-63 set forth in Table 7 or 9 (e.g., Table 9). In some embodiments, the antisense oligonucleotide comprises at least 20 (e.g., 20) contiguous nucleotides differing by no more than 3 (e.g., 0, 1, 2, or 3) nucleotides from the nucleotide sequence of any one of the antisense oligonucleotides of any one of ASOs 1-63 set forth in Table 7 or 9 (e.g., Table 9).

[0345] In some embodiments, the antisense oligonucleotide comprises from about 10-30 nucleotides, e.g., 15-29, 15-28, 15-27, 15-26, 15-25, 15-24, 15-23, 15-22, 15-21, 15-20, 15-19, 15-18, 15-17, 15-16, 16-29, 16-28, 16-27, 16-26, 16-25, 16-24, 16-23, 16-22, 16-21, 16-20, 16-19, 16-18, 16-17, 17-29, 17-28, 17-27, 17-26, 17-25, 17-24, 17-23, 17-22, 17-21, 17-20, 17-19, 17-18, 18-30, 18-29, 18-28, 18-27, 18-26, 18-25, 18-24, 18-23, 18-22, 18-21, 18-20, 19-30, 19-29, 19-28, 19-27, 19-26, 19-25, 19-24, 19-23, 19-22, 19-21, or 19-20 contiguous nucleotides differing by no more than 3 (e.g., 0, 1, 2, or 3) nucleotides from the nucleotide sequence of any one of the antisense oligonucleotides of any one of ASOs 1-63 set forth in Table 7 or 9 (e.g., Table 9). In some embodiments, the antisense oligonucleotide comprises from about 16 (e.g., 16, 17, 18, 19, or 20) contiguous nucleotides differing by no more than 3 (e.g., 0, 1, 2, or 3) nucleotides from the nucleotide sequence of any one of the antisense oligonucleotides of any one of ASOs 1-63 set forth in Table 7 or 9 (e.g., Table 9). In some embodiments, the antisense oligonucleotide comprises from about 17 (e.g., 17, 18, 19, or 20) contiguous nucleotides differing by no more than 3 (e.g., 0, 1, 2, or 3) nucleotides from the nucleotide sequence of any one of the antisense oligonucleotides of any one of ASOs 1-63 set forth in Table 7 or 9 (e.g., Table 9). In some embodiments, the antisense oligonucleotide comprises from about 20 (e.g., 17, 18, 19, or 20) contiguous nucleotides differing by no more than 3 (e.g., 0, 1, 2, or 3) nucleotides from the nucleotide sequence of any one of the antisense oligonucleotides of any one of ASOs 1-63 set forth in Table 7 or 9 (e.g., Table 9).

[0346] In some embodiments, the nucleotide sequence of the antisense oligonucleotide comprises the nucleotide sequence of any one of the antisense oligonucleotides of any one of ASOs 1-63 set forth in Table 7 or 9 (e.g., Table 9) differing by no more than 3 (e.g., 0, 1, 2, or 3) nucleotides from the antisense oligonucleotide set forth in Table 7 or 9 (e.g., Table 9). In some embodiments, the nucleotide sequence of the antisense oligonucleotide comprises the nucleotide sequence of any one of the antisense oligonucleotides of any one of ASOs 1-63 set forth in Table 7 or 9 (e.g., Table 9).

[0347] As described above, Table 7 or 9 (e.g., Table 9) further identifies the target nucleic acid molecule within the cited reference BCL11A mRNA transcript (SEQ ID NO: 1) targeted by each of the antisense oligonucleotides. The disclosure further provides antisense oligonucleotides comprising at least 15, 16, 17, 18, 19, 20, 21, 22, 23, 24, 25, 26, 27, 28, 29, or 30 contiguous nucleotides differing by no more than 3 (e.g., 0, 1, 2, or 3) nucleotides from the nucleotide sequence of any one of the antisense oligonucleotides of any one of ASOs 1-63 set forth in Table 7 or 9 (e.g., Table 9) and further comprising additional nucleotide sequences (e.g., comprising from about 1-10, 1-9, 1-8, 1-7, 1-6, 1-5, 1-4, 1-3, or 1-2 nucleotides) at least partially complementary to the region contiguous (e.g., either at the 3′ end, the 5′ end, or both the 3′ and 5′ end) of the BCL11A mRNA transcript targeted by the select antisense oligonucleotide.

[0348] It is to be understood, that although the antisense oligonucleotides set forth in Table 7 are not described as being modified (e.g., comprising chemically modified nucleotides), conjugated, etc., the disclosure includes any antisense oligonucleotide set forth in Table 7 that is unmodified, unconjugated, modified (e.g., as described herein), or conjugated (e.g., as described herein).

### 4.3.4 Antisense Oligonucleotides

[0349] The nucleotide sequence of exemplary unmodified and modified ASOs (e.g., suitable for targeting hBCL11A, suitable for inhibiting hBCL11A expression)) are set forth in Table 7.

TABLE 7
Exemplary Unmodified and Modified BCL11A Targeting ASOs.

| ASO | ASO | SEQ | | SEQ | | |
|---|---|---|---|---|---|---|
| Agent | 5′ to 3′ | ID | ASO 5′to 3′ | ID | Modification | Modification |
| ID | (Unmodified) | NO | (Modified) | NO | Pattern | Description |
| 1 | CCACCUCUGG | 3167 | InaCsmoeClnaAmo | 3218 | lQLQdddddd | Alternating terminal |
| | CACCUG | | eCdCsdTsdCsdTsd | | ddQlqL | LNA/MOE w 8 internal |
| | | | GsdGsdCsdAsmoeC | | | DNA PS + 1 PS @ 5′ and |
| | | | InaCsmoeTslnaG | | | 2 PS @ 3′ |
| 2 | CAUACCCACU | 3168 | InaCslnaAlnaTln | 3219 | lLLLdddddd | Terminal LNA w 8 |
| | UCCCUU | | aAdCsdCsdCsdAsd | | ddLllL | internal DNA PS + 1 PS |
| | | | CsdTsdTsdCslnaC | | | @ 5′ and 2 PS @ 3′ |
| | | | lnaCslnaTslnaT | | | |
| 3 | UUUCUGGGCU | 3169 | lnaTslnaTlnaTln | 3220 | lLLLdddddd | Terminal LNA w 10 |
| | GCCAUUA | | aCdTsdGsdGsdGsd | | ddddllL | internal DNA PS + 1 PS |
| | | | CsdTsdGsdCsdCsd | | | @ 5′ and 2 PS @ 3′ |
| | | | AslnaTslnaTslna | | | |
| | | | A | | | |
| 4 | AGAACAGGAA | 3170 | InaAsmoeGlnaAdA | 3221 | lQLddddddd | Alternating terminal |
| | GCAGGU | | sdCsdAsdGsdGsdA | | dddlqL | LNA/MOE w 10 internal |
| | | | sdAsdGsdCsdAsln | | | DNA PS + 1 PS @ 5′ and |
| | | | aGsmoeGslnaT | | | 2 PS @ 3′ |
| 5 | CUAGAAUUGG | 3171 | InaCslnaTlnaAln | 3222 | lLLLLddddd | Terminal LNA w 10 |
| | CCUGGGACAU | | aGlnaAdAsdTsdTs | | dddddLLllL | internal DNA PS + 1 PS |
| | | | dGsdGsdCsdCsdTs | | | @ 5′ and 2 PS @ 3′ |
| | | | dGsdGslnaGlnaAl | | | |
| | | | naCslnaAslnaT | | | |
| 6 | ACCCACUUCC | 3172 | InaAslnaClnaCln | 3223 | lLLLdddddd | Terminal LNA w 8 |
| | CUUCCU | | aCdAsdCsdTsdTsd | | ddLllL | internal DNA PS + 1 PS |
| | | | CsdCsdCsdTslnaT | | | @ 5′ and 2 PS @ 3′ |
| | | | InaCslnaCslnaT | | | |
| 7 | CCAAGCAUUG | 3173 | InaCsmoeClnaAmo | 3224 | lQLQLddddd | Alternating terminal |
| | CAUCAUCCUG | | eAlnaGdCsdAsdTs | | ddddQLQlqL | LNA/MOE w 9 internal |
| | | | dTsdGsdCsdAsdTs | | | DNA PS + 1 PS @ 5′ and |
| | | | dCsmoeAlnaTmoeC | | | 2 PS @ 3′ |
| | | | InaCsmoeTslnaG | | | |
| 8 | UCCAAGCAUU | 3174 | lnaTslnaClnaCln | 3225 | lLLLLddddd | Terminal LNA w 10 |
| | GCAUCAUCCU | | aAlnaAdGsdCsdAs | | dddddLLllL | internal DNA PS + 1 PS |
| | | | dTsdTsdGsdCsdAs | | | @ 5′ and 2 PS @ 3′ |
| | | | dTsdCslnaAlnaTl | | | |
| | | | naCslnaCsInaT | | | |
| 9 | CUCCAAGCAU | 3175 | InaCslnaTlnaCln | 3226 | lLLLLLdddd | Terminal LNA w 8 |
| | UGCAUCAUCC | | aClnaAlnaAdGsdC | | ddddLLLllL | internal DNA PS + 1 PS |
| | | | sdAsdTsdTsdGsdC | | | @ 5′ and 2 PS @ 3′ |
| | | | sdAslnaTlnaClna | | | |
| | | | AlnaTslnaCslnaC | | | |
| 10 | CCUAAGAAAC | 3176 | InaCslnaClnaTdA | 3227 | lLLddddddd | Terminal LNA w 9 |
| | AUACUG | | sdAsdGsdAsdAsdA | | ddLllL | internal DNA PS + 1 PS |
| | | | sdCsdAsdTslnaAl | | | @ 5′ and 2 PS @ 3′ |
| | | | naCslnaTslnaG | | | |
| 11 | UAUUGACCCU | 3177 | InaTsmoeAlnaImo | 3228 | lQLQLddddd | Alternating terminal |
| | GGUGUGU | | eTlnaGdAsdCsdCs | | dddQlqL | LNA/MOE w 8 internal |
| | | | dCsdTsdGsdGsdTs | | | DNA PS + 1 PS @ 5′ and |
| | | | moeGlnaTsmoeGsl | | | 2 PS @ 3′ |
| | | | naT | | | |
| 12 | UAGAAUUGGC | 3178 | lnaTsmoeAlnaGmo | 3229 | lQLQLddddd | Alternating terminal |
| | CUGGGACAU | | eAlnaAdTsdTsdGs | | dddddQlqL | LNA/MOE w 10 internal |
| | | | dGsdCsdCsdTsdGs | | | DNA PS + 1 PS @ 5′ and |
| | | | dGsdGsmoeAlnaCs | | | 2 PS @ 3′ |
| | | | moeAslnaT | | | |
| 13 | CUAGAAUUGG | 3179 | moeCsmoeTImoeAmo | 3230 | qQQQQQdddd | Terminal MOE w 8 |
| | CCUGGGACAU | | eGmoeAmoeAdTsdT | | ddddQQQqqQ | internal DNA PS + 1 PS |
| | | | sdGsdGsdCsdCsdT | | | @ 5′ and 2 PS @ 3′ |
| | | | sdGsmoeGmoeGmoe | | | |
| | | | AmoeCsmoeAsmoeT | | | |
| 14 | CUCCAAGCAU | 3180 | moeCsmoeTmoeCmo | 3231 | qQQQQddddd | Terminal MOE w 10 |
| | UGCAUCAUCC | | eCmoeAdAsdGsdCs | | dddddQQqqQ | internal DNA PS + 1 PS |
| | | | dAsdTsdTsdGsdCs | | | @ 5′ and 2 PS @ 3′ |
| | | | dAsdIsmoeCmoeAm | | | |
| | | | oeTsmoeCsmoeC | | | |
| 15 | UUGCACAUUC | 3181 | moeTsmoeTmoeGmo | 3232 | qQQQQddddd | Terminal MOE w 10 |
| | UGUAACUCCU | | eCmoeAdCsdAsdTs | | dddddQQqqQ | internal DNA PS + 1 PS |
| | | | dTsdCsdTsdGsdTs | | | @ 5′ and 2 PS @ 3′ |
| | | | dAsdAsmoeCmoeIm | | | |
| | | | oeCsmoeCsmoeT | | | |
| 16 | GGGAAAGGUU | 3182 | moeGsmoeGmoeGmo | 3233 | qQQQQddddd | Terminal MOE w 9 |
| | GCACAUUCUG | | eAmoeAdAsdGsdGs | | ddddQQQqqQ | internal DNA PS + 1 PS |
| | | | dTsdTsdGsdCsdAs | | | @ 5′ and 2 PS @ 3′ |
| | | | dCsmoeAmoeTmoeT | | | |
| | | | moeCsmoeTsmoeG | | | |
| 17 | UCGUGCCUUA | 3183 | lnaTsmoeClnaGmo | 3234 | lQLQLddddd | Alternating terminal |
| | UUCCUUCAGG | | eTlnaGdCsdCsdTs | | dddddLQlqL | LNA/MOE w 10 internal |
| | | | dTsdAsdTsdTsdCs | | | DNA PS + 1 PS @ 5′ and |
| | | | dCsdTslnaTmoeCl | | | 2 PS @ 3′ |
| | | | naAsmoeGslnaG | | | |
| 18 | CAAGCCAAAG | 3184 | lnaCsmoeAlnaAmo | 3235 | lQLQLddddd | Alternating terminal |
| | AGCUGGAGA | | eGlnaCdCsdAsdAs | | ddddLQlqL | LNA/MOE w 9 internal |
| | | | dAsdGsdAsdGsdCs | | | DNA PS + 1 PS @ 5′ and |
| | | | dTslnaGmoeGlnaA | | | 2 PS @ 3′ |
| | | | smoeGslnaA | | | |
| 19 | GGUUUCUGGG | 3185 | moeGsmoeGmoeTmo | 3236 | qQQQQddddd | Terminal MOE w 10 |
| | CUGCCAUUAU | | eTmoeTdCsdTsdGs | | dddddQQqqQ | internal DNA PS + 1 PS |
| | | | dGsdGsdCsdTsdGs | | | @ 5′ and 2 PS @ 3′ |
| | | | dCsdCsmoeAmoeTm | | | |
| | | | oeTsmoeAsmoeT | | | |
| 20 | UCUGGGAGAU | 3186 | InaTsmoeClnaImo | 3237 | lQLQLddddd | Alternating terminal |
| | CACCCUACA | | eGlnaGdGsdAsdGs | | dddddQlqL | LNA/MOE w 10 internal |
| | | | dAsdTsdCsdAsdCs | | | DNA PS + 1 PS @ 5′ and |
| | | | dCsdCsmoeTInaAs | | | 2 PS @ 3′ |
| | | | moeCslnaA | | | |
| 21 | AAAGGGAAGA | 3187 | moeAsmoeAmoeAmo | 3238 | qQQQQQdddd | Terminal MOE w 8 |
| | AUGCUACAGC | | eGmoeGmoeGdAsdA | | ddddQQQqqQ | internal DNA PS + 1 PS |
| | | | sdGsdAsdAsdTsdG | | | @ 5′ and 2 PS @ 3′ |
| | | | sdCsmoeTmoeAmoe | | | |
| | | | CmoeAsmoeGsmoeC | | | |
| 22 | CAUCCAGAAA | 3188 | lnaCsmoeAlnaImo | 3239 | lQLQLddddd | Alternating terminal |
| | CUACGUUUGU | | eClnaCdAsdGsdAs | | ddddQLQlqL | LNA/MOE w 9 internal |
| | | | dAsdAsdCsdTsdAs | | | DNA PS + 1 PS @ 5′ and |
| | | | dCsmoeGlnaTmoeT | | | 2 PS @ 3′ |
| | | | lnaTsmoeGslnaT | | | |
| 23 | UAAAUCUUGA | 3189 | lnaTsmoeAlnaAmo | 3240 | lQLQLddddd | Alternating terminal |
| | UCAAACUCAG | | eAlnaTdCsdTsdTs | | dddddLQlqL | LNA/MOE w 10 internal |
| | | | dGsdAsdTsdCsdAs | | | DNA PS + 1 PS @ 5′ and |
| | | | dAsdAslnaCmoeTl | | | 2 PS @ 3′ |
| | | | naCsmoeAslnaG | | | |
| 24 | AUCUAUAGGU | 3190 | moeAsmoeTmoeCmo | 3241 | qQQQQddddd | Terminal MOE w 10 |
| | CCAAGUUCGU | | eTmoeAdTsdAsdGs | | dddddQQqqQ | internal DNA PS + 1 PS |
| | | | dGsdTsdCsdCsdAs | | | @ 5′ and 2 PS @ 3′ |
| | | | dAsdGsmoeTmoeTm | | | |
| | | | oeCsmoeGsmoeT | | | |
| 25 | UUUAGCCACC | 3191 | moeTsmoeTmoeTmo | 3242 | qQQQQddddd | Terminal MOE w 10 |
| | UCUGGCACCU | | eAmoeGdCsdCsdAs | | dddddQQqqQ | internal DNA PS + 1 PS |
| | | | dCsdCsdTsdCsdTs | | | @ 5′ and 2 PS @ 3′ |
| | | | dGsdGsmoeCmoeAm | | | |
| | | | oeCsmoeCsmoeT | | | |
| 26 | CUAGAAUUGG | 3192 | InaCsmoeTInaAmo | 3243 | lQLQdddddd | Alternating terminal |
| | CCUGGGAC | | eGdAsdAsdTsdTsd | | ddddQlqL | LNA/MOE w 10 internal |
| | | | GsdGsdCsdCsdTsd | | | DNA PS + 1 PS @ 5′ and |
| | | | GsmoeGlnaGsmoeA | | | 2 PS @ 3′ |
| | | | slnaC | | | |
| 27 | UUGCAUCAUC | 3193 | lnaTsmoeTInaGmo | 3244 | lQLQLddddd | Alternating terminal |
| | CUGGUACCA | | eClnaAdTsdCsdAs | | dddddQlqL | LNA/MOE w 10 internal |
| | | | dTsdCsdCsdTsdGs | | | DNA PS + 1 PS @ 5′ and |
| | | | dGsdTsmoeAlnaCs | | | 2 PS @ 3′ |
| | | | moeCslnaA | | | |
| 28 | CCUCCAAGCA | 3194 | moeCsmoeCmoeTmo | 3245 | qQQQQddddd | Terminal MOE w 10 |
| | UUGCAUCAUC | | eCmoeCdAsdAsdGs | | dddddQQqqQ | internal DNA PS + 1 PS |
| | | | dCsdAsdTsdTsdGs | | | @ 5′ and 2 PS @ 3′ |
| | | | dCsdAsmoeTmoeCm | | | |
| | | | oeAsmoeTsmoeC | | | |
| 29 | GAGCUCACAG | 3195 | InaGsmoeAlnaGmo | 3246 | lQLQdddddd | Alternating terminal |
| | CCUCCAAG | | eCdTsdCsdAsdCsd | | ddddQlqL | LNA/MOE w 10 internal |
| | | | AsdGsdCsdCsdTsd | | | DNA PS + 1 PS @ 5′ and |
| | | | CsmoeClnaAsmoeA | | | 2 PS @ 3′ |
| | | | slnaG | | | |
| 30 | AACUGGAGCU | 3196 | InaAslnaAlnaCln | 3247 | lLLLLddddd | Terminal LNA w 10 |
| | UUGUGAAACC | | aTlnaGdGsdAsdGs | | dddddLLllL | internal DNA PS + 1 PS |
| | | | dCsdTsdTsdTsdGs | | | @ 5′ and 2 PS @ 3′ |
| | | | dTsdGslnaAlnaAl | | | |
| | | | naAslnaCslnaC | | | |
| 31 | CCAGGGCAGA | 3197 | moeCsmoeCmoeAmo | 3248 | qQQQQddddd | Terminal MOE w 10 |
| | ACUGGAGCUU | | eGmoeGdGsdCsdAs | | dddddQQqqQ | internal DNA PS + 1 PS |
| | | | dGsdAsdAsdCsdTs | | | @ 5′ and 2 PS @ 3′ |
| | | | dGsdGsmoeAmoeGm | | | |
| | | | oeCsmoeTsmoeT | | | |
| 32 | AAGGGAUAGC | 3198 | InaAsmoeAlnaGmo | 3249 | lQLQLddddd | Alternating terminal |
| | CCUAUGAGGC | | eGlnaGdAsdTsdAs | | dddddLQlqL | LNA/MOE w 10 internal |
| | | | dGsdCsdCsdCsdTs | | | DNA PS + 1 PS @ 5′ and |
| | | | dAsdTslnaGmoeAl | | | 2 PS @ 3′ |
| | | | naGsmoeGslnaC | | | |
| 33 | UUACAGAAUG | 3199 | lnaTslnaTlnaAln | 3250 | lLLLLddddd | Terminal LNA w 10 |
| | CCUUGUCCCA | | aClnaAdGsdAsdAs | | dddddLLllL | internal DNA PS + 1 PS |
| | | | dTsdGsdCsdCsdTs | | | @ 5′ and 2 PS @ 3′ |
| | | | dTsdGslnaTlnaCl | | | |
| | | | naCslnaCslnaA | | | |
| 34 | UAAGCAAUGG | 3200 | lnaTslnaAlnaAln | 3251 | lLLLdddddd | Terminal LNA w 10 |
| | AAGUCCAA | | aGdCsdAsdAsdTsd | | ddddLllL | internal DNA PS + 1 PS |
| | | | GsdGsdAsdAsdGsd | | | @ 5′ and 2 PS @ 3′ |
| | | | TslnaClnaCslnaA | | | |
| | | | slnaA | | | |
| 35 | CCCAGAAAAC | 3201 | InaCsmoeClnaCmo | 3252 | lQLQLQdddd | Alternating terminal |
| | CAGAACCGG | | eAlnaGmoeAdAsdA | | ddddLQlqL | LNA/MOE w 8 internal |
| | | | sdAsdCsdCsdAsdG | | | DNA PS + 1 PS @ 5′ and |
| | | | sdAslnaAmoeClna | | | 2 PS @ 3′ |
| | | | CsmoeGslnaG | | | |
| 36 | AUCCCAGAAA | 3202 | InaAslnaTlnaCln | 3253 | lLLLLddddd | Terminal LNA w 8 |
| | ACCAGAAC | | aClnaCdAsdGsdAs | | dddLLllL | internal DNA PS + 1 PS |
| | | | dAsdAsdAsdCsdCs | | | @ 5′ and 2 PS @ 3′ |
| | | | InaAlnaGlnaAsln | | | |
| | | | aAslnaC | | | |
| 37 | ACCUAAGAAA | 3203 | InaAslnaClnaCln | 3254 | lLLLdddddd | Terminal LNA w 10 |
| | CAUACUG | | aTdAsdAsdGsdAsd | | ddddllL | internal DNA PS + 1 PS |
| | | | AsdAsdCsdAsdTsd | | | @ 5′ and 2 PS @ 3′ |
| | | | AslnaCslnaTslna | | | |
| | | | G | | | |
| 38 | CUAAAUUACA | 3204 | lnaCsmoeTlnaAmo | 3255 | lQLQLddddd | Alternating terminal |
| | AGGGUGUU | | eAlnaAdTsdTsdAs | | dddLQlqL | LNA/MOE w 8 internal |
| | | | dCsdAsdAsdGsdGs | | | DNA PS + 1 PS @ 5′ and |
| | | | InaGmoeTlnaGsmo | | | 2 PS @ 3′ |
| | | | eTslnaT | | | |
| 39 | UCUAAAUUAC | 3205 | moeTsmoeCmoeTmo | 3256 | qQQQQddddd | Terminal MOE w 8 |
| | AAGGGUGU | | eAmoeAdAsdTsdTs | | dddQQqqQ | internal DNA PS + 1 PS |
| | | | dAsdCsdAsdAsdGs | | | @ 5′ and 2 PS @ 3′ |
| | | | moeGmoeGmoeTsmo | | | |
| | | | eGsmoeT | | | |
| 40 | UGUAAUUCCA | 3206 | lnaTsmoeGlnaTmo | 3257 | lQLQdddddd | Alternating terminal |
| | GGCUCUAA | | eAdAsdTsdTsdCsd | | ddddQlqL | LNA/MOE w 10 internal |
| | | | CsdAsdGsdGsdCsd | | | DNA PS + 1 PS @ 5′ and |
| | | | TsmoeClnaTsmoeA | | | 2 PS @ 3′ |
| | | | slnaA | | | |
| 41 | GUCUAGCUGC | 3207 | InaGslnaTlnaCln | 3258 | lLLLdddddd | Terminal LNA w 10 |
| | CUUCCUUA | | aTdAsdGsdCsdTsd | | ddddLllL | internal DNA PS + 1 PS |
| | | | GsdCsdCsdTsdTsd | | | @ 5′ and 2 PS @ 3′ |
| | | | CslnaClnaTslnaT | | | |
| | | | slnaA | | | |
| 42 | CCUGUCUAGC | 3208 | InaCslnaClnaTln | 3259 | lLLLdddddd | Terminal LNA w 10 |
| | UGCCUUCC | | aGdTsdCsdTsdAsd | | ddddLllL | internal DNA PS + 1 PS |
| | | | GsdCsdTsdGsdCsd | | | @ 5′ and 2 PS @ 3′ |
| | | | CslnaTlnaTslnaC | | | |
| | | | slnaC | | | |
| 43 | GCUAUCUGCU | 3209 | InaGsmoeClnaTmo | 3260 | lQLQLddddd | Alternating terminal |
| | CUUACUUAUG | | eAlnaTdCsdTsdGs | | dddddLQlqL | LNA/MOE w 10 internal |
| | | | dCsdTsdCsdTsdTs | | | DNA PS + 1 PS @ 5′ and |
| | | | dAsdCslnaTmoeTl | | | 2 PS @ 3′ |
| | | | naAsmoeTslnaG | | | |
| 44 | GCUAUCUGCU | 3210 | lnaGslnaClnaTln | 3261 | lLLLLddddd | Terminal LNA w 10 |
| | CUUACUUAU | | aAlnaTdCsdTsdGs | | dddddLllL | internal DNA PS + 1 PS |
| | | | dCsdTsdCsdTsdTs | | | @ 5′ and 2 PS @ 3′ |
| | | | dAsdCslnaTlnaTs | | | |
| | | | InaAslnaT | | | |
| 45 | UAUUACCUGU | 3211 | lnaTslnaAlnaTln | 3262 | lLLLdddddd | Terminal LNA w 9 |
| | AUGGACU | | aTdAsdCsdCsdTsd | | dddLllL | internal DNA PS + 1 PS |
| | | | GsdTsdAsdTsdGsl | | | @ 5′ and 2 PS @ 3′ |
| | | | naGlnaAslnaCsln | | | |
| | | | aT | | | |
| 46 | ACCCUGGUGU | 3212 | lnaAsmoeClnaCmo | 3263 | lQLQdddddd | Alternating terminal |
| | GUUAUGUC | | eCdTsdGsdGsdTsd | | ddddQlqL | LNA/MOE w 10 internal |
| | | | GsdTsdGsdTsdTsd | | | DNA PS + 1 PS @ 5′ and |
| | | | AsmoeTlnaGsmoeT | | | 2 PS @ 3′ |
| | | | slnaC | | | |
| 47 | UAGCUUCAAA | 3213 | lnaTsmoeAlnaGmo | 3264 | lQLQLddddd | Alternating terminal |
| | GUUGUAUUGA | | eClnaTdTsdCsdAs | | dddddLQlqL | LNA/MOE w 10 internal |
| | | | dAsdAsdGsdTsdTs | | | DNA PS + 1 PS @ 5′ and |
| | | | dGsdTslnaAmoeTl | | | 2 PS @ 3′ |
| | | | naTsmoeGslnaA | | | |
| 48 | AGAGGGAAUC | 3214 | lnaAsmoeGlnaAmo | 3265 | lQLQLddddd | Alternating terminal |
| | UGGAGAGGA | | eGlnaGdGsdAsdAs | | ddddLQlqL | LNA/MOE w 9 internal |
| | | | dTsdCsdTsdGsdGs | | | DNA PS + 1 PS @ 5′ and |
| | | | dAslnaGmoeAlnaG | | | 2 PS @ 3′ |
| | | | smoeGslnaA | | | |
| 49 | AAUUGAGAGG | 3215 | lnaAsmoeAlnaImo | 3266 | lQLQdddddd | Alternating terminal |
| | GAAUCUGG | | eTdGsdAsdGsdAsd | | ddddQlqL | LNA/MOE w 10 internal |
| | | | GsdGsdGsdAsdAsd | | | DNA PS + 1 PS @ 5′ and |
| | | | TsmoeClnaTsmoeG | | | 2 PS @ 3′ |
| | | | slnaG | | | |
| 50 | GUGGCCAGGU | 3216 | lnaGsmoeTInaGmo | 3267 | lQLQdddddd | Alternating terminal |
| | AGGACC | | eGdCsdCsdAsdGsd | | ddQlqL | LNA/MOE w 8 internal |
| | | | GsdTsdAsdGsmoeG | | | DNA PS + 1 PS @ 5′ and |
| | | | lnaAsmoeCslnaC | | | 2 PS @ 3′ |
| 51 | GUGGCCAGGU | 3217 | lnaGsmoeTInaGdG | 3268 | lQLddddddd | Alternating terminal |
| | AGGACC | | sdCsdCsdAsdGsdG | | ddQlqL | LNA/MOE w 9 internal |
| | | | sdTsdAsdGsmoeGl | | | DNA PS + 1 PS @ 5′ and |
| | | | naAsmoeCslnaC | | | 2 PS @ 3′ |

[0350] The nucleotide sequences presented in Table 7, utilize the following abbreviations set forth in Table 8.

TABLE 8
Abbreviations of Nucleotide Modifications Utilized in Table 7.

| Abbreviation | Nucleotide/Linkage |
|---|---|
| lna | Locked nucleic acid |
| s | Phosphorothioate Bond |
| moe | 2′-O-methoxyethyl |
| d | DNA nucleotide |

[0351] The nucleotide sequence of exemplary preferred unmodified and modified ASOs (e.g., suitable for targeting hBCL11A, suitable for inhibiting hBCL11A expression)) are set forth in Table 9. As described elsewhere herein, it is noted that the “T” nucleotides in the unmodified sequence may also be “U” nucleotides.

TABLE 9
Exemplary Preferred Unmodified and Modified BCL11A Targeting ASOs.

| | | |
|---|---|---|
| ASO | | |
| Agent | ASO | |
| ID | 5′ to 3′ | SEQ ID NO |

Unmodified

| | | |
|---|---|---|
| 52 | TCCGTTTGTGCTCGAT | 3269 |
| 53 | CCGTTTGTGCTCGATA | 3270 |
| 54 | CGITTGTGCTCGATAA | 3271 |
| 55 | TTCCGTTTGTGCTCGA | 3272 |

Modified

| | | |
|---|---|---|
| 56 | Tb*(5MCb)*(5MCm)*Gm*dT*dT*dT*dG*dT*dG*(5MdC)*dT*(5M | 3273 |
| | Cm)*Gm*Ab*Tb | |
| 57 | (NH2C6)Tb*(5MCb)*(5MCm)*Gm*dT*dT*dT*dG*dT*dG*(5MdC) | 3274 |
| | *dT*(5MCm)*Gm*Ab*Tb | |
| 58 | (5MCb)*(5MCb)*Gm*Tm*dT*dT*dG*dT*dG*(5MdC)*dT*(5MdC) | 3275 |
| | *Gm*Am*Tb*Ab | |
| 59 | (NH2C6)(5MCb)*(5MCb)*Gm*Tm*dT*dT*dG*dT*dG*(5MdC)*dT | 3276 |
| | *(5MdC)*Gm*Am*Tb*Ab | |
| 60 | Cb*Gb*Tm*Tm*dT*dG*dT*dG*(5MdC)*dT*(5MdC)*dG*Am*Im*A | 3277 |
| | b*Ab | |
| 61 | Cb*Cb*Gm*Tm*dT*dT*dG*dT*dG*(5MdC)*dT*(5MdC)*Gm*Am*T | 3278 |
| | b*Ab | |
| 62 | Tb*Cb*Cm*Gm*dT*dT*dT*dG*dT*dG*(5MdC)*dT*Cm*Gm*Ab*Tb | 3279 |
| 63 | Tb*Tb*Cm*Cm*dG*dT*dT*dT*dG*dT*dG*(5MdC)*Tm*Cm*Gb*Ab | 3280 |

[0352] The modified nucleotide sequences presented in Table 9, utilize the following abbreviations set forth in Table 10.

TABLE 10
Abbreviations of Nucleotide Modifications Utilized in Table 9.

| Abbreviation | Nucleotide/Linkage |
|---|---|
| a | 2′-O-methyladenosine |
| c | 2′-O-methylcytidine |
| g | 2′-O-methylguanosine |
| u | 2′-O-methyluridine |
| A | 2′-fluoroadenosine |
| C | 2′-fluorocytidine |
| G | 2′-fluoroguanosine |
| U | 2′-fluorouridine |
| * | Phosphorothioate Bond |
| VPmX | 5′-(E)-vinylphosphonate 2′-O-methylated |
| | (2′-Ome) nucleotide |
| X | Any nucleotide (A, G, C, U, T) modified or unmodified |
| Z | 2′-Fluoroguanosine unlocked nucleic acid |
| y | 1-N-Methylpseudouridine 2′-O-methylated (2′-Ome) |
| Nb | LNA RNA |
| Nm | 2′MOE RNA |
| dN | DNA |
| 5MCb | 5-Methylcytosine LNA RNA |
| 5MCm | 5-Methylcytosine 2′MOE RNA |
| 5MdC | 5-Methylcytosine DNA |
| (NH2C6) | aminohexyl spacer |

[0353] Various salts, mixed salts and free acid forms of the antisense oligonucleotides are also provided herein. In some embodiments, the antisense oligonucleotide is in a free acid form. In some embodiments, the antisense oligonucleotide is in a salt form. In some embodiments, the antisense oligonucleotide is in a sodium salt form. In some embodiments, wherein the antisense oligonucleotide is in the sodium salt form, sodium ions are present in the composition comprising the antisense oligonucleotide as counterions for substantially all of the phosphodiester or phosphorothioate groups present in the antisense oligonucleotide. In some embodiments, wherein the antisense oligonucleotide is in the sodium salt form, sodium ions are present in the agent as counterions for all of the phosphodiester or phosphorothioate groups present in the antisense oligonucleotide.

### 4.4 Modified Nucleic Acid Molecule Agents (e.g., dsRNA Agents, ASOs)

[0354] In some embodiments, a nucleic acid molecule agent described herein (or any component thereof (e.g., any nucleic acid molecule thereof)) (e.g., an antisense strand, a sense strand, a dsRNA agent, RNAi agent, an ASO, a ssRNA agent, etc.) comprises one or more modified nucleotide(s) (as defined herein). The modified agent may have one or more different (e.g., improved) properties relative to a corresponding unmodified agent. For example, the modified agent may exhibit decreased immunostimulatory activity (e.g., when administered to a subject), increased stability (e.g., in vivo, in a cell, when administered to a subject), and/or increased inhibition of expression of a target nucleic acid molecule (e.g., a target mRNA (e.g., a BCL11A mRNA)), or any combination thereof.

### 4.4.1 Nature of Nucleotide Modifications

[0355] Nucleotide modifications can include modification to any one of more of the nucleoside and/or the internucleoside linkage. Nucleoside modifications include modification to the sugar (e.g., ribose) moiety and/or the nucleobase. In some embodiments, the modified agent (or component thereof) (e.g., antisense strand, sense strand, dsRNA agent, ASO, ssRNA agent, etc.) comprises one or more nucleotides comprising a modified sugar moiety. In some embodiments, the modified agent (or component thereof) (e.g., antisense strand, sense strand, dsRNA agent, ASO, ssRNA agent, etc.) comprises one or more nucleotides comprising a modified nucleobase. In some embodiments, the modified agent (or component thereof) (e.g., antisense strand, sense strand, dsRNA agent, ASO, ssRNA agent, etc.) comprises one or more nucleotides comprising a modified internucleoside linkage. In some embodiments, the modified agent (or component thereof) (e.g., antisense strand, sense strand, dsRNA agent, ASO, ssRNA agent, etc.) comprises one or more nucleotides comprising one, two, or three of a modified sugar moiety, a modified nucleobase, and/or a modified internucleoside linkage.

[0356] Exemplary nucleotide modifications are described below and also known in the art, see, e.g., WO2021257782, WO2013075035, WO2022246251, and WO2022271573, the entire contents of each of which is incorporated by reference herein for all purposes. Exemplary modifications are further provided in Hu, B., Zhong, L., Weng, Y. et al. Therapeutic siRNA: state of the art. Sig Transduct Target Ther 5, 101 (2020). https://doi.org/10.1038/s41392-020-0207-x (e.g., Table 2), the entire contents of each of which is incorporated by reference herein for all purposes.

### 4.4.1.1 Modified Nucleosides

[0357] In some embodiments, the modified agent (or any component thereof) (e.g., antisense strand, sense strand, dsRNA agent, ASO, ssRNA agent, etc.) comprises one or more nucleotide comprising a modified nucleoside. As discussed above, nucleoside modifications can include modification of the sugar (e.g., ribose) moiety and/or modification of the nucleobase.

### (i) Sugar Modifications

[0358] In some embodiments, the modified agent (or any component thereof) (e.g., antisense strand, sense strand, dsRNA agent, ASO, ssRNA agent, etc.) comprises one or more nucleotides comprising a modified sugar (e.g., ribose, deoxyribose) moiety.

[0359] The modified sugar (e.g., ribose, deoxyribose) moiety can comprise, for example, a substituent at any one or more position of the sugar (e.g., ribose, deoxyribose), including e.g., positions 2′, 4′, and/or 5′. In some embodiments, the modified sugar (e.g., ribose, deoxyribose) comprises a substituent at 2′ position of the sugar (e.g., ribose, deoxyribose). In some embodiments, the modified sugar (e.g., ribose, deoxyribose) comprises a substituent at 5′ position of the sugar (e.g., ribose, deoxyribose). In some embodiments, the modified sugar (e.g., ribose, deoxyribose) comprises a substituent at 5′ position of the sugar (e.g., ribose, deoxyribose).

[0360] In some embodiments, the agent (or any component thereof) comprises any one or more of the following substituents (e.g., at any position of the sugar (e.g., ribose, deoxyribose) (e.g., at position 2′)): a group for improving the stability of the agent, a group for improving the pharmacokinetic properties of the agent, or a group for improving the pharmacodynamic properties of the agent, an RNA cleaving group, a reporter group, an intercalator, or other substituents having similar properties.

[0361] Exemplary substituents include, for example, but are not limited to, substitution (e.g., at any position of the sugar (e.g., ribose, deoxyribose) (e.g., at position 2′)) with any one of the following: OH; F; O-, S-, or N-alkyl; O-, S-, or N-alkenyl; O-, S- or N-alkynyl; or O-alkyl-O-alkyl, wherein the alkyl, alkenyl and alkynyl can be substituted or unsubstituted C₁ to C₁₀ alkyl or C₂ to C₁₀ alkenyl and alkynyl. Additional exemplary substitutions (e.g., at any position of the sugar (e.g., ribose, deoxyribose) (e.g., at position 2′)) include, for example, but are not limited to, substitution with any one of the following: O[(CH₂)ₙO]m, CH₃, O(CH₂)ₙOCH₃, O(CH₂)ₙNH₂, O(CH₂)ₙCH₃, O(CH₂)ₙONH₂, and O(CH₂)ₙON[(CH₂)ₙCH₃)]₂, where n and m are from 1 to about 10.

[0362] In some embodiments, the modified sugar (e.g., ribose, deoxyribose) comprises any one of the following modifications: 2′-O-methyl (2′-OMe), 2′O-methoxyethyl (2′-O-MOE), 2′deoxy-2′-fluoro (2′-F), 2′-arabino-fluoro (2′-Ara-F), 2′-O-benzyl, 2′-O-methyl-4-pyridine (2-O-methyl-4-pyridine (2′-O-CH2Py(4)).

[0363] In some embodiments, the agent (or any component thereof) comprises any of the following substituents at the 2′-position of the sugar (e.g., ribose, deoxyribose): C₁ to C₁₀ lower alkyl, substituted lower alkyl, alkaryl, aralkyl, O-alkaryl or O-aralkyl, SH, SCH₃, OCN, Cl, Br, CN, CF₃, OCF₃, SOCH₃, SO₂CH₃, ONO₂, NO₂, N₃, NH₂, heterocycloalkyl, heterocycloalkaryl, aminoalkylamino, polyalkylamino, or a substituted silyl. In some embodiments, the agent (or any component thereof) comprises a 2′-methoxyethoxy (2′-OCH₂CH₂OCH₃, also known as 2′-O-(2-methoxyethyl) or 2′-MOE) (see, e.g., Martin et al., Helv. Chim. Acta, 1995, 78:486-504, the entire contents of which is incorporated by reference herein for all purposes) (i.e., an alkoxy-alkoxy group). In some embodiments, the agent (or any component thereof) comprises a 2′-dimethylaminooxyethoxy, i.e., a O(CH₂)₂ON(CH₃)₂ group, also known as 2′-DMAOE; a 2′-dimethylaminoethoxyethoxy (also known in the art as 2′-O-dimethylaminoethoxyethyl or 2′-DMAEOE), i.e., 2′-OCH₂—O—CH₂—N(CH₃)₂; a 5′-Me-2′-F nucleotide, a 5′-Me-2′-OMe nucleotide, a 5′-Me-2′-deoxynucleotide, (both R and S isomers in these three families); a 2′-alkoxyalkyl; and 2′-NMA (N-methylacetamide).

[0364] Exemplary sugar (e.g., ribose, deoxyribose) modifications include, but are not limited to, 2′-O-methyl (2′-OMe), 2′-O-methoxyethyl (2′-O-MOE), 2′deoxy-2′-fluoro (2′-F), 2′-arabine-fluro (2′-Ara-F), 2′-O-benzyl, 2′-O-methyl-4-pyridine (2′-O-CH2Py(4)), Locked Nucleic Acid (LNA), (S)-cEt-BNA, Tricyclo-DNA (tcDNA), PMO, Unlocked Nucleic Acid (UNA), Glycol Nucleic Acid (also referred to as glycerol nucleic acid).

[0365] Exemplary US patents that describe the preparation of such modified sugar structures include, but are not limited to, U.S. Pat. Nos. 4,981,957; 5,118,800; 5,319,080; 5,359,044; 5,393,878; 5,446,137; 5,466,786; 5,514,785; 5,519,134; 5,567,811; 5,576,427; 5,591,722; 5,597,909; 5,610,300; 5,627,053; 5,639,873; 5,646,265; 5,658,873; 5,670,633; and 5,700,920; the entire contents of each of the foregoing are hereby incorporated herein by reference for all purposes. Exemplary sugar modifications are further provided in Hu, B., Zhong, L., Weng, Y. et al. Therapeutic siRNA: state of the art. Sig Transduct Target Ther 5, 101 (2020). https://doi.org/10.1038/s41392-020-0207-x (e.g., Table 2), the entire contents of each of which is incorporated by reference herein for all purposes.

### (a) Non-Bicyclic Sugar Modifications

[0366] In some embodiments, the modified sugar (e.g., ribose, deoxyribose) moiety comprises a non-bicyclic modified sugar (e.g., ribose, deoxyribose) moiety. In some embodiments, the modified sugar (e.g., ribose, deoxyribose) moiety comprises a furanosyl ring comprising one or more substituent groups none of which bridges two atoms of the furanosyl ring to form a bicyclic structure. In some embodiments one or more non-bridging substituent of a non-bicyclic modified sugar moiety is branched. Such non bridging substituents may be at any position of the furanosyl, including but not limited to substituents at the 2′, 4′, and/or 5′ positions.

[0367] In some embodiments, non-bicyclic modified sugar moiety comprises a substituent group at the 2′-position of the sugar (e.g., ribose, deoxyribose). Examples of 2′-substituent groups suitable for non-bicyclic modified sugar moieties include but are not limited to: 2′-O-methyl (2′-OMe), 2′O-methoxyethyl (2′-O-MOE), 2′deoxy-2′-fluoro (2′-F), 2′-arabino-fluoro (2′-Ara-F), 2′-O-benzyl, 2′-O-methyl-4-pyridine (2-O-methyl-4-pyridine (2′-O-CH2Py(4)), and 2′-O—N-alkyl acetamide (e.g., 2′-O—N-methyl acetamide (“NMA”), 2′-O—N-dimethyl acetamide, 2′-O—N-ethyl acetamide, and 2′-O—N-propyl acetamide). For example, see, e.g., U.S. Pat. No. 6,147,200, Prakash et al., 2003, Org. Lett., 5, 403-6, the entire contents of which is incorporated by reference herein for all purposes.

[0368] In some embodiments, the 2′-substituent group is a halo, allyl, amino, azido, SH, CN, OCN, CF₃, OCF₃, O—C₁-C₁₀ alkoxy, O—C₁-C₁₀ substituted alkoxy, O—C₁-C₁₀ alkyl, O—C₁-C₁₀ substituted alkyl, S-alkyl, N(Rₘ)-alkyl, O-alkenyl, S-alkenyl, N(Rₘ)-alkenyl, O-alkynyl, S-alkynyl, N(Rₘ)-alkynyl, O-alkylenyl-O-alkyl, alkynyl, alkaryl, aralkyl, O-alkaryl, O-aralkyl, O(CH2)2SCH3, 0(CH2)2ON(Rm)(Rn) or OCH2C(═O)—N(Rm)(Rn), where each Rₘ and Rₙ is, independently, H, an amino protecting group, or substituted or unsubstituted C₁-C₁₀ alkyl, or a 2′-substituent group described in any one of the following: Cook et al., U.S. Pat. No. 6,531,584; Cook et al., U.S. Pat. No. 5,859,221; and Cook et al., U.S. Pat. No. 6,005,087, the entire contents of which are incorporated herein by reference for all purposes. In some embodiments, these 2′-substituent groups can be further substituted with one or more substituent groups independently selected from among: hydroxyl, amino, alkoxy, carboxy, benzyl, phenyl, nitro (NO₂), thiol, thioalkoxy, thioalkyl, halogen, alkyl, aryl, alkenyl and alkynyl.

[0369] In some embodiments, a 2′-substituted non-bicyclic modified nucleoside comprises a sugar moiety comprising a non-bridging 2′-substituent group selected from: F, NH₂, N₃, OCF₃, OCH₃, O(CH2)₃NH₂, CH₂CH═CH₂, OCH₂CH═CH₂, OCH₂CH₂OCH₃, O(CH₂)₂SCH₃, O(CH₂)₂ON(Rₘ)(Rₙ), O(CH₂)₂O(CH₂)₂N(CH₃)₂, and N-substituted acetamide (OCH₂C(═O)—N(Rₘ)(Rₙ)), where each Rₘ and Rₙ is, independently, H, an amino protecting group, or substituted or unsubstituted C₁-C₁₀ alkyl. In some embodiments, a 2′-substituted non-bicyclic modified nucleoside comprises a sugar moiety comprising a non-bridging 2′-substituent group selected from: F, OCF, OCH₃, OCH₂CH₂OCH₃, O(CH₂)₂SCH₃, O(CH₂)₂ON(CH₃)₂, O(CH₂)₂O(CH₂)₂N(CH₃)₂, and OCH₂C(═O)—N(H)CH₃ (“NMA”). In some embodiments, a 2′-substituted non-bicyclic modified nucleoside comprises a sugar moiety comprising a non-bridging 2′-substituent group selected from: F, OCH₃, OCH₂CH₂OCH₃, and OCH₂C(═O)—N(H)CH₃.

[0370] In some embodiments, non-bicyclic modified sugar moiety comprises a substituent group at the 3′-position of the sugar (e.g., ribose, deoxyribose). Examples of substituent groups suitable for the 3′-position of modified sugar moieties include but are not limited to alkoxy (e.g., methoxy), alkyl (e.g., methyl, ethyl).

[0371] In some embodiments, non-bicyclic modified sugar moiety comprises a substituent group at the 4′-position of the sugar (e.g., ribose, deoxyribose). Examples of 4′-substituent groups suitable for non-bicyclic modified sugar moieties include but are not limited to alkoxy (e.g., methoxy), alkyl, and those described in Manoharan et al., WO 2015/106128.

[0372] In some embodiments, non-bicyclic modified sugar moiety comprises a substituent group at the 5′-position of the sugar (e.g., ribose, deoxyribose). Examples of substituent groups suitable for the 5′-position of modified sugar moieties include, but are not limited to, vinyl (e.g., 5′-vinyl), alkoxy (e.g., methoxy (e.g., 5′-methoxy)), and alkyl (e.g., methyl (R or S) (e.g., 5′-methyl (R or S)), ethyl).

[0373] In some embodiments, non-bicyclic modified sugar moieties comprise more than one non-bridging sugar substituent, for example, 2′-F-5′-methyl sugar moieties and the modified sugar moieties and modified nucleosides described in Migawa et al., WO 2008/101157 and Rajeev et al., US2013/0203836, the entire contents of each of which is incorporated herein by reference for all purposes.

[0374] In some embodiments, modified furanosyl sugar moieties and nucleosides incorporating such modified furanosyl sugar moieties are further defined by isomeric configuration. For example, a 2′-deoxyfuranosyl sugar moiety may be in seven isomeric configurations other than the naturally occurring β-D-deoxyribosyl configuration. Such modified sugar moieties are described in, e.g., WO 2019/157531, the entire contents of which are incorporated by reference herein for all purposes.

[0375] In some embodiments, the sugar (e.g., ribose, deoxyribose) modification comprises an unlocked nucleotide (UNA). UNA is unlocked acyclic nucleic acid, wherein any of the bonds of the sugar has been removed, forming an unlocked sugar (e.g., ribose, deoxyribose) residue. For example, in some embodiments, the bonds between C1′-C4′ have been removed (i.e., the covalent carbon-oxygen-carbon bond between the C1′ and C4′ carbons). In some embodiments, the C2′-C3′ bond (i.e., the covalent carbon-carbon bond between the C2′ and C3′ carbons) of the sugar (e.g., ribose, deoxyribose) have been removed. See, e.g., Nuc. Acids Symp. Series, 52, 133-134 (2008) and Fluiter et al., Mol. Biosyst., 2009, 10, 1039, the entire contents of which are incorporated herein by reference. UNAs and methods of making are known in the art. See, e.g., U.S. Pat. No. 8,314,227; and US2013/0096289; US2013/0011922; and US2011/0313020, the entire contents of each of which are hereby incorporated herein by reference.

### (b) Bicyclic Sugar Modifications

[0376] In some embodiments, the modified sugar (e.g., ribose, deoxyribose) moiety comprises a substituent that bridges two atoms of the furanosyl ring to form a second ring, resulting in a bicyclic sugar (e.g., ribose, deoxyribose) moiety (e.g., that locks the nucleic acid in one conformation) (locked nucleic acids (LNAs)). In some embodiments, the bicyclic sugar (e.g., ribose, deoxyribose) moiety comprises a bridge between the 4′ and the 2′ furanose ring atoms. Examples of such 4′ to 2′ bridging sugar substituents include but are not limited to: 4′-CH₂-2′, 4′-(CH₂)₂-2′, 4′-(CH₂)₃-2′, 4′-CH₂—O-2′ (“LNA”), 4′-CH₂—S-2′, 4′-(CH₂)₂—O-2′ (“ENA”), 4′-CH(CH₃)—O-2′ (referred to as “constrained ethyl” or “cEt”), 4′-CH₂—O—CH₂-2′, 4′-CH₂—N(R)-2′, 4′-CH(CH₂OCH₃)—O-2′ (“constrained MOE” or “cMOE”) and analogs thereof (see, e.g., Seth et al., U.S. Pat. No. 7,399,845, Bhat et al., U.S. Pat. No. 7,569,686, Swayze et al., U.S. Pat. No. 7,741,457, and Swayze et al., U.S. Pat. No. 8,022,193), 4′-C(CH₃)(CH₃)—O-2′ and analogs thereof (see, e.g., Seth et al., U.S. Pat. No. 8,278,283), 4′-CH₂—N(OCH₃)-2′ and analogs thereof (see, e.g., Prakash et al., U.S. Pat. No. 8,278,425), 4′-CH₂—O—N(CH₃)-2′ (see, e.g., Allerson et al., U.S. Pat. No. 7,696,345 and Allerson et al., U.S. Pat. No. 8,124,745), 4′-CH₂—C(H)(CH₃)-2′ (see, e.g., Zhou, et al., J. Org. Chem., 2QQ9, 74, 118-134), 4′-CH₂—C(═CH₂)-2′ and analogs thereof (see, e.g., Seth et al., U.S. Pat. No. 8,278,426), 4′-C(RₐR_{b})—N(R)—O-2′, 4′-C(RₐR_{b})—O—N(R)-2′, 4′-CH₂—O—N(R)-2′, and 4′-CH₂—N(R)—O-2′, wherein each R, Rₐ, and R_{b} is, independently, H, a protecting group, or C₁-C₁₂ alkyl (see, e.g. Imanishi et al., U.S. Pat. No. 7,427,672). The entire contents of all of the foregoing references is incorporated by reference herein for all purposes.

[0377] In some embodiments, such 4′ to 2′ bridges independently comprise from 1 to 4 linked groups independently selected from: —[C(Rₐ)(R_{b})]n-, —[C(Rₐ)(R_{b})]n-O—, —C(Rₐ)═C(R_{b})—, —C(Rₐ)═N—, —C(═NRₐ)—, —C(═O)—, —C(═S)—, —O—, —Si(Rₐ)₂—, —S(═O)X—, and —N(Rₐ)—; wherein: x is 0, 1, or 2; n is 1, 2, 3, or 4; each Rₐ and R_{b} is, independently, H, a protecting group, hydroxyl, C₁-C₁₂ alkyl, substituted C₁-C₁₂ alkyl, C₂-C₁₂ alkenyl, substituted C₂-C₁₂ alkenyl, C₂-C₁₂ alkynyl, substituted C₂-C₁₂ alkynyl, C₅-C₂₀ aryl, substituted C₅-C₂₀ aryl, heterocycle radical, substituted heterocycle radical, heteroaryl, substituted heteroaryl, C₅-C₇ alicyclic radical, substituted C₅-C₇ alicyclic radical, halogen, OJ1, NJ1J2, SJ1, N3, COOJ1, acyl (C(═O)—H), substituted acyl, CN, sulfonyl (S(=0)2-J1), or sulfoxyl (S(═O)-J1); and each J1 and J2 is, independently, H, C₁-C₁₂ alkyl, substituted C₁-C₁₂ alkyl, C₂-C₁₂ alkenyl, substituted C₂-C₁₂ alkenyl, C₂-C₁₂ alkynyl, substituted C₂-C₁₂ alkynyl, C₅-C₂₀ aryl, substituted C₅-C₂₀ aryl, acyl (C(═O)—H), substituted acyl, a heterocycle radical, a substituted heterocycle radical, C₁-C₁₂ aminoalkyl, substituted C₁-C₁₂ aminoalkyl, or a protecting group.

[0378] Additional bicyclic sugar moieties are known in the art, see, for example: Freier et al., Nucleic Acids Research, 1997, 25(22), 4429-4443, Albaek et al., J. Org. Chem., 2006, 71, 7731-7740, Singh et al., Chem. Commun., 1998, 4, 455-456; Koshkin et al., Tetrahedron, 1998, 54, 3607-3630; Kumar et al., Bioorg. Med. Chem. Lett., 1998, 8, 2219-2222; Singh et al., J. Org. Chem., 1998, 63, 10035-10039; Srivastava et al., J. Am. Chem. Soc., 2007,129, 8362-8379; Wengel et a., U.S. Pat. No. 7,053,207; Imanishi et al., U.S. Pat. No. 6,268,490; Imanishi et al. U.S. Pat. No. 6,770,748; Imanishi et al., U.S. RE44,779; Wengel et al., U.S. Pat. No. 6,794,499; Wengel et al., U.S. Pat. No. 6,670,461; Wengel et al., U.S. Pat. No. 7,034,133; Wengel et al., U.S. Pat. No. 8,080,644; Wengel et al., U.S. Pat. No. 8,034,909; Wengel et al., U.S. Pat. No. 8,153,365; Wengel et al., U.S. Pat. No. 7,572,582; Ramasamy et al., U.S. Pat. No. 6,525,191; Torsten et al., WO 2004/106356; Wengel et al., WO 1999/014226; Seth et al., WO 2007/134181; Seth et al., U.S. Pat. No. 7,547,684; Seth et al., U.S. Pat. No. 7,666,854; Seth et. al., U.S. Pat. No. 8,088,746; Seth et al., U.S. Pat. No. 7,750,131; Seth et al., U.S. Pat. No. 8,030,467; Seth et al., U.S. Pat. No. 8,268,980; Seth et al., U.S. Pat. No. 8,546,556; Seth et al., U.S. Pat. No. 8,530,640; Migawa et al., U.S. Pat. No. 9,012,421; Seth et al., U.S. Pat. No. 8,501,805; and U.S. Patent Publication Nos. Allerson et al., US2008/0039618 and Migawa et al., US2015/0191727. The entire contents of all of the foregoing references is incorporated by reference herein for all purposes.

[0379] In some embodiments, the modified sugar (e.g., ribose, deoxyribose) comprises a constrained ethyl nucleotide comprising a 4′-CH(CH₃)—O-2′ bridge. In some embodiments, the constrained ethyl nucleotide is in the S conformation (S-cEt). In some embodiments, the modified sugar (e.g., ribose, deoxyribose) comprises a conformationally restricted nucleotide (CRN). CRNs are nucleotide analogs with a linker connecting the C2′ and C4′ carbons of ribose or the C3 and —C5′ carbons of ribose. Representative publications that teach the preparation of certain of the above include, but are not limited to, US2013/0190383; and WO2013/036868, the entire contents of each of which are hereby incorporated herein by reference.

[0380] In some embodiments, bicyclic sugar moieties and nucleosides incorporating such bicyclic sugar moieties are further defined by isomeric configuration. For example, an LNA nucleoside (described herein) may be in the α-L configuration or in the β-D configuration. Herein, general descriptions of bicyclic nucleosides include both isomeric configurations. Any of the foregoing bicyclic nucleosides can be prepared having one or more stereochemical sugar configurations including for example α-L-ribofuranose and β-D-ribofuranose (see, e.g., WO 99/14226, the entire contents of which are incorporated herein by reference for all purposes).

[0381] Additional representative U.S. Patents and U.S. Patent Publications that teach the preparation of bicyclic nucleosides (e.g., locked nucleic acid) include, but are not limited to, the following: U.S. Pat. Nos. 6,268,490; 6,525,191; 6,670,461; 6,770,748; 6,794,499; 6,998,484; 7,053,207; 7,034,133; 7,084,125; 7,399,845; 7,427,672; 7,569,686; 7,741,457; 8,022,193; 8,030,467; 8,278,425; 8,278,426; 8,278,283; US 2008/0039618; and US 2009/0012281, the entire contents of each of which are hereby incorporated herein by reference.

### (ii) Nucleobase Modifications

[0382] In some embodiments, the modified agent (or any component thereof) (e.g., antisense strand, sense strand, dsRNA agent, ASO, ssRNA agent, etc.) comprises one or more nucleotides comprising a modified nucleobase.

[0383] As used herein, “unmodified” nucleobases refer to the purine bases adenine (A) and guanine (G), and the pyrimidine bases thymine (T), cytosine (C), and uracil (U). Modified nucleobases include other synthetic and natural nucleobases.

[0384] Exemplary nucleobase modifications, include, e.g., pseudouridine, 2′-thiouridine, N6′-methyladenosine, 5′-methylcytidine, 5′-fluoro-2′-deoxyuridine, N-ethylpiperidine 7′-EAA triazole modified adenine, N-ethylpiperidine 6′-EAA triazole modified adenine, 6′-phenylpyrrolo-cytosine, 2′,4′-difluorotoluyl ribonucleoside, and 5′-nitroindole.

[0385] Further modified nucleobases include, but are not limited to, 5-substituted pyrimidines, 6-azapyrimidines, alkyl or alkynyl substituted pyrimidines, alkyl substituted purines, and N-2, N-6 and 0-6 substituted purines. In certain embodiments, modified nucleobases are selected from: 5-methylcytosine, 2-aminopropyladenine, 5-hydroxymethyl cytosine, xanthine, hypoxanthine, deoxythimidine (dT), 2-aminoadenine, 6-N-methylguanine, 6-N-methyladenine, 2-propyladenine, 2-thiouracil, 2-thiothymine and 2-thiocytosine, 5-propynyl (—C═C—CH3) uracil, 5-propynylcytosine, 6-azauracil, 6-azocytosine, 6-azothymine, 5-ribosyluracil (pseudouracil), 4-thiouracil, 8-halo, 8-amino, 8-thiol, 8-thioalkyl, 8-hydroxyl, 8-aza and other 8-substituted purines, 5-halo, particularly 5-bromo, 5-trifluoromethyl, 5-halouracil, and 5-halocytosine, 7-methylguanine, 7-methyladenine, 2-F-adenine, 2-aminoadenine, 7-deazaguanine, 7-deazaadenine, 3-deazaguanine, 3-deazaadenine, 6-N-benzoyladenine, 2-N-isobutyrylguanine, 4-N-benzoylcytosine, 4-N-benzoyluracil, 5-methyl 4-Nbenzoylcytosine, 5-methyl 4-N-benzoyluracil, universal bases, hydrophobic bases, promiscuous bases, size-expanded bases, and fluorinated bases. Further modified nucleobases include tricyclic pyrimidines, such as 1,3-diazaphenoxazine-2-one, 1,3-diazaphenothiazine-2-one and 9-(2-aminoethoxy)-1,3-diazaphenoxazine-2-one (G-clamp). Modified nucleobases may also include those in which the purine or pyrimidine base is replaced with other heterocycles, for example 7-deaza-adenine, 7-deazaguanosine, 2-aminopyridine and 2-pyridone. Further nucleobases include those disclosed in Merigan et al., U.S. Pat. No. 3,687,808; The Concise Encyclopedia Of Polymer Science And Engineering, Kroschwitz, J. I., Ed., John Wiley & Sons, 1990, 858-859; Englisch et al., Angewandte Chemie, International Edition, 1991, 30, 613; Sanghvi, Y. S., Chapter 15, Antisense Research and Applications, Crooke, S. T. and Lebleu, B., Eds., CRC Press, 1993, 273-288; and those disclosed in Chapters 6 and 15, Antisense Drug Technology, Crooke S. T., Ed., CRC Press, 2008, 163-166 and 442-443; the entire contents of each of which is incorporated herein by reference for all purposes.

[0386] In some embodiments, the modified nucleobase comprises a pseudouridine, 2′thiouridine (s2U), N6′-methyladenosine, 5′methylcytidine (m⁵C), 5′fluoro-2′deoxyuridine, N-ethylpiperidine 7-EAA triazole modified adenine, N-ethylpiperidine 6′triazole modified adenine, 6-phenylpyrrolo-cytosine (PhpC), 2′,4′-difluorotoluyl ribonucleoside (rF), or 5′nitroindole. In some embodiments, the modified nucleobase comprises a 5-substituted pyrimidine; 6-azapyrimidine; or N-2, N-6 and 0-6 substituted purines (including 2-aminopropyladenine, 5-propynyluracil and 5-propynylcytosine). 5-methylcytosine substitutions have been shown to increase nucleic acid duplex stability by 0.6-1.2° C. (Sanghvi, Y. S., Crooke, S. T. and Lebleu, B., Eds., dsRNA Research and Applications, CRC Press, Boca Raton, 1993, pp. 276-278) and are exemplary base substitutions, even more particularly when combined with 2′-O-methoxyethyl sugar modifications.

[0387] Representative U.S. Patents an published applications that teach the preparation of certain of the above noted modified nucleobases as well as other modified nucleobases include, but are not limited to, U.S. Pat. Nos. 3,687,808, 4,845,205; 5,130,30; 5,134,066; 5,175,273; 5,367,066; 5,432,272; 5,457,187; 5,459,255; 5,484,908; 5,502,177; 5,525,711; 5,552,540; 5,587,469; 5,594,121, 5,596,091; 5,614,617; 5,681,941; 5,750,692; 6,015,886; 6,147,200; 6,166,197; 6,222,025; 6,235,887; 6,380,368; 6,528,640; 6,639,062; 6,617,438; 7,045,610; 7,427,672; 7,495,088; 5,130,302; 5,134,066; 5,175,273; 5,367,066; 5,432,272; 5,434,257; 5,457,187; 5,459,255; 5,484,908; 5,502,177; 5,525,711; 5,552,540; 5,587,469; 5,594,121; 5,596,091; 5,614,617; 5,645,985; 5,681,941; 5,811,534; 5,750,692; 5,948,903; 5,587,470; 5,457,191; 5,763,588; 5,830,653; 5,808,027; 6,166,199; and 6,005,096, the entire contents of each of which is hereby incorporated herein by reference for all purposes. Exemplary nucleobase modifications are further provided in Hu, B., Zhong, L., Weng, Y. et al. Therapeutic siRNA: state of the art. Sig Transduct Target Ther 5, 101 (2020). https://doi.org/10.1038/s41392-020-0207-x (e.g., Table 2), the entire contents of each of which is incorporated by reference herein for all purposes.

### 4.4.1.2 Internucleoside Linkage Modifications

[0388] In some embodiments, the modified agent (or any component thereof) (e.g., antisense strand, sense strand, dsRNA agent, etc.) comprises one or more modified internucleoside linkage. Modified internucleoside linkages, compared to naturally occurring phosphate linkages, can be used to alter, typically increase, nuclease resistance of an agent (e.g., described herein).

[0389] The naturally occurring internucleoside linkage of RNA and DNA is a 3′ to 5′ phosphodiester linkage. In some embodiments, the modified internucleoside linkage contains a normal 3′-5′ linkage. In some embodiments, the modified internucleoside linkage contains a 2′-5′ linkage. In some embodiments, the modified internucleoside linkage has an inverted polarity wherein the adjacent pairs of nucleoside units are linked e.g., 3′-5′ to 5′-3′ or 2′-5′ to 5′-2′.

[0390] The two main classes of modified internucleoside linking can be defined by the presence or absence of a phosphorous atom.

[0391] Exemplary internucleoside linkage modifications are further provided in Hu, B., Zhong, L., Weng, Y. et al. Therapeutic siRNA: state of the art. Sig Transduct Target Ther 5, 101 (2020). https://doi.org/10.1038/s41392-020-0207-x (e.g., Table 2), the entire contents of each of which is incorporated by reference herein for all purposes.

### (i) Modified Phosphorous Containing Internucleoside Linkages

[0392] In some embodiments, the modified internucleoside linkage comprises a phosphorous atom. Representative modified phosphorus-containing internucleoside linkages include but are not limited to phosphorothioates (PS (Rp isomer or Sp isomer)) (e.g., 5′phosphorothioate), phosphotriesters, phosphoramidates (e.g., 3′-amino phosphoramidate and aminoalkylphosphoramidates), chiral phosphorothioates, phosphorodithioates (PS2), aminoalkylphosphotriesters, methyl and other alkyl phosphonates (e.g., methylphosphonate (MP), 3′-alkylene phosphonates), methpxypropyl-phosphonates (MOP), 5′-(E)-vinylphosphonates, 5′methyl phosphonates, (S)-5′C-methyl with phosphates, phosphinates, thionophosphoramidates, thionoalkylphosphonates, thionoalkylphosphotriesters, boranophosphates, and peptide nucleic acids (PNAs).

[0393] In some embodiments, the modified internucleoside linkage comprises phosphorothioates (PS (Rp isomer or Sp isomer)) (e.g., 5′phosphorothioate), phosphorodithioates, methylphosphonate, methoxypropyl-phosphonate, 5′-(E)-vinylphosphonate, 5′methyl phosphonate, (S)-5′C-methyl with phosphate, phosphinate, or a peptide nucleic acid.

[0394] Methods of preparing polynucleotides containing one or more modified phosphorus-containing internucleoside linkage are known in the art. See, e.g., U.S. Pat. Nos. 3,687,808; 4,469,863; 4,476,301; 5,023,243; 5,177,195; 5,188,897; 5,264,423; 5,276,019; 5,278,302; 5,286,717; 5,321,131; 5,399,676; 5,405,939; 5,453,496; 5,455,233; 5,466,677; 5,476,925; 5,519,126; 5,536,821; 5,541,316; 5,550,111; 5,563,253; 5,571,799; 5,587,361; 5,625,050; 6,028,188; 6,124,445; 6,160,109; 6,169,170; 6,172,209; 6,239,265; 6,277,603; 6,326,199; 6,346,614; 6,444,423; 6,531,590; 6,534,639; 6,608,035; 6,683,167; 6,858,715; 6,867,294; 6,878,805; 7,015,315; 7,041,816; 7,273,933; 7,321,029; and U.S. Pat. RE39464, the entire contents of each of which are hereby incorporated herein by reference for all purposes. Exemplary modifications are further provided in Hu, B., Zhong, L., Weng, Y. et al. Therapeutic siRNA: state of the art. Sig Transduct Target Ther 5, 101 (2020). https://doi.org/10.1038/s41392-020-0207-x (e.g., Table 2), the entire contents of each of which is incorporated by reference herein for all purposes.

### (ii) Modified Non-Phosphorous Containing Internucleoside Linkages

[0395] In some embodiments, the modified internucleoside linkage does not contain a phosphorous atom. Modified internucleoside linkages that do not include a phosphorus atom therein have backbones that are formed by short chain alkyl or cycloalkyl internucleoside linkages, mixed heteroatoms and alkyl or cycloalkyl internucleoside linkages, or one or more short chain heteroatomic or heterocyclic internucleoside linkages. These include those having morpholino linkages (formed in part from the sugar portion of a nucleoside); siloxane backbones; sulfide, sulfoxide and sulfone backbones; formacetyl and thioformacetyl backbones; methylene formacetyl and thioformacetyl backbones; alkene containing backbones; sulfamate backbones; methyleneimino and methylenehydrazino backbones; sulfonate and sulfonamide backbones; amide backbones; and others having mixed N, O, S, and CH₂ component parts.

[0396] Representative non-phosphorous containing internucleoside linking groups include but are not limited to methylenemethylimino (—CH₂—N(CH₃)—O—CH₂—), thiodiester, thionocarbamate (—O—C(═O)(NH)—S—); siloxane (—O—SiH₂—O—); and N,N′-dimethylhydrazine (—CH₂—N(CH₃)—N(CH₃)—).

[0397] Methods of preparing polynucleotides comprising modified internucleoside linkages do not contain a phosphorous atom are known in the art. See, e.g., U.S. Pat. Nos. 5,034,506; 5,166,315; 5,185,444; 5,214,134; 5,216,141; 5,235,033; 5,64,562; 5,264,564; 5,405,938; 5,434,257; 5,466,677; 5,470,967; 5,489,677; 5,541,307; 5,561,225; 5,596,086; 5,602,240; 5,608,046; 5,610,289; 5,618,704; 5,623,070; 5,663,312; 5,633,360; 5,677,437; and 5,677,439, the entire contents of each of which are hereby incorporated herein by reference.

### 4.4.1.3 Additional Exemplary Nucleotide Modifications

[0398] In some embodiments, the modified agent comprises one or more RNA mimetic in which both the sugar and the internucleoside linkage of the nucleotide units are replaced with novel groups. The nucleobase units are maintained for hybridization with an appropriate nucleic acid target (e.g., a target mRNA). In some embodiments, the RNA mimetic is a peptide nucleic acid (PNA). In PNAs, the ribose moiety of the RNA nucleotide is replaced with an amide containing moiety (e.g., an aminoethylglycine). The nucleobases are retained and are bound directly or indirectly to aza nitrogen atoms of the amide. Representative US patents that teach the preparation of PNA compounds include, but are not limited to, U.S. Pat. Nos. 5,539,082; 5,714,331; and 5,719,262, the entire contents of each of which are hereby incorporated herein by reference. Additional PNA compounds suitable for use in the agents described herein are described in, for example, in Nielsen et al., Science, 1991, 254, 1497-1500, the entire contents of which is incorporated by reference herein for all purposes.

[0399] Potentially stabilizing modifications to the terminal ends of the agents (e.g., described herein) can also be incorporated to agents described herein. For example, N-(acetylaminocaproyl)-4-hydroxyprolinol (Hyp-C6-NHAc), N-(caproyl-4-hydroxyprolinol (Hyp-C6), N-(acetyl-4-hydroxyprolinol (Hyp-NHAc), thymidine-2′-O-deoxythymidine (ether), N-(aminocaproyl)-4-hydroxyprolinol (Hyp-C6-amino), 2-docosanoyl-uridine-3″-phosphate, inverted base dT(idT) and others. Such modifications are known in the art. See, e.g., WO2011/005861, the entire contents of which is incorporated herein by reference.

### 4.4.2 Extent of Modified Nucleotides

[0400] In some embodiments, at least 5%, 10%, 15%, 20%, 25%, 30%, 35%, 40%, 45%, 50%, 55%, 60%, 65%, 70%, 75%, 80%, 85%, 90%, 95%, or 100% of the nucleotides of the agent (or any component (e.g., nucleic acid molecule) thereof) (e.g., described herein, e.g., an antisense strand, a sense strand, a dsRNA agent, agent, an ASO, an ssRNA agent) are modified. In some embodiments, about 25%, 30%, 35%, 40%, 45%, 50%, 55%, 60%, 65%, 70%, 75%, 80%, 85%, 90%, 95%, or 100% of the nucleotides of the agent (or any component (e.g., nucleic acid molecule) thereof) (e.g., described herein, e.g., an antisense strand, a sense strand, a dsRNA agent, agent, an ASO, an ssRNA agent) are modified. In some embodiments, at least 1, 2, 3, 4, 5, 6, 7, 8, 9, 10, 11, 12, 13, 14, 15, 16, 17, 18, 19, 20, 21, 22, 23, 24, 25, 26, 27, 28, 29 or 30 of the nucleotides of the agent (or any component (e.g., nucleic acid molecule) thereof) (e.g., described herein, e.g., an antisense strand, a sense strand, a dsRNA agent, agent, an ASO, an ssRNA agent) are modified. In some embodiments, substantially all of the nucleotides of the agent (or any component (e.g., nucleic acid molecule) thereof) (e.g., described herein, e.g., an antisense strand, a sense strand, a dsRNA agent, agent, an ASO, an ssRNA agent) are modified. In some embodiments, all of the nucleotides of the agent (or any component (e.g., nucleic acid molecule) thereof) (e.g., described herein, e.g., an antisense strand, a sense strand, a dsRNA agent, agent, an ASO, an ssRNA agent) are modified.

[0401] In some embodiments, at least 25%, 30%, 35%, 40%, 45%, 50%, 55%, 60%, 65%, 70%, 75%, 80%, 85%, 90%, 95%, or 100% of the nucleotides of the sense and/or antisense strand are modified. For example, at least 50% of the nucleotides of the sense strand and/or antisense strand may be modified. For example, at least 55% of the nucleotides of the sense strand and/or antisense strand may be modified. For example, at least 60% of the nucleotides of the sense strand and/or antisense strand may be modified. For example, at least 65% of the nucleotides of the sense strand and/or antisense strand may be modified. For example, at least 70% of the nucleotides of the sense strand and/or antisense strand may be modified. For example, at least 75% of the nucleotides of the sense strand and/or antisense strand may be modified. For example, at least 80% of the nucleotides of the sense strand and/or antisense strand may be modified. For example, at least 85% of the nucleotides of the sense strand and/or antisense strand may be modified. For example, at least 90% of the nucleotides of the sense strand and/or antisense strand may be modified. For example, at least 90% of the nucleotides of the sense strand and/or antisense strand may be modified. For example, at least 95% of the nucleotides of the sense strand and/or antisense strand may be modified. For example, at least 96% of the nucleotides of the sense strand and/or antisense strand may be modified. For example, at least 97% of the nucleotides of the sense strand and/or antisense strand may be modified. For example, at least 98% of the nucleotides of the sense strand and/or antisense strand may be modified. For example, at least 99% of the nucleotides of the sense strand and/or antisense strand may be modified. For example, 100% of the nucleotides of the sense strand and/or antisense strand may be modified. In some embodiments, substantially all (or all) of the nucleotides in the sense strand and/or antisense strand are modified.

[0402] In some embodiments, at least 25%, 30%, 35%, 40%, 45%, 50%, 55%, 60%, 65%, 70%, 75%, 80%, 85%, 90%, 95%, or 100% of the nucleotides of the ASO are modified. For example, at least 50% of the nucleotides of the ASO may be modified. For example, at least 55% of the nucleotides of the ASO may be modified. For example, at least 60% of the nucleotides of the ASO may be modified. For example, at least 65% of the nucleotides of the ASO may be modified. For example, at least 70% of the nucleotides of the ASO may be modified. For example, at least 75% of the nucleotides of the ASO may be modified. For example, at least 80% of the nucleotides of the ASO may be modified. For example, at least 85% of the nucleotides of the ASO may be modified. For example, at least 90% of the nucleotides of the ASO may be modified. For example, at least 90% of the nucleotides of the ASO may be modified. For example, at least 95% of the nucleotides of the ASO may be modified. For example, at least 96% of the nucleotides of the ASO may be modified. For example, at least 97% of the nucleotides of the ASO may be modified. For example, at least 98% of the nucleotides of the ASO may be modified. For example, at least 99% of the nucleotides of the ASO may be modified. For example, 100% of the nucleotides of the ASO may be modified. In some embodiments, substantially all (or all) of the nucleotides in the ASO are modified.

[0403] In some embodiments, at least one of the modified nucleotides comprises a modified sugar (e.g., ribose moiety). In some embodiments, at least one of the modified nucleotides comprises a modified nucleobase. In some embodiments, the sense strand comprises at least one modified internucleoside linkage and/or the antisense strand comprises at least one modified internucleoside linkage.

[0404] In some embodiments, not more than 30, 29, 28, 27, 26, 25, 24, 23, 22, 21, 20, 19, 18, 17, 16, 15, 14, 13, 12, 11, 10, 9, 8, 7, 6, 5, 4, 3, 2, or 1 of the nucleotides of the of the agent (or any component (e.g., nucleic acid molecule) thereof) (e.g., described herein, e.g., an antisense strand, a sense strand, a dsRNA agent, agent, an ASO, an ssRNA agent) are unmodified. In some embodiments, not more than 10, 9, 8, 7, 6, 5, 4, 3, 2, or 1 of the nucleotides of the agent (or any component (e.g., nucleic acid molecule) thereof) (e.g., described herein, e.g., an antisense strand, a sense strand, a dsRNA agent, agent, an ASO, an ssRNA agent) are unmodified. In some embodiments, not more than 25%, 30%, 35%, 40%, 45%, 50%, 55%, 60%, 65%, 70%, 75%, 80%, 85%, 90%, 95%, or 100% of the nucleotides of the agent (or any component (e.g., nucleic acid molecule) thereof) (e.g., described herein, e.g., an antisense strand, a sense strand, a dsRNA agent, agent, an ASO, an ssRNA agent) are unmodified.

[0405] In some embodiments, at least 5%, 10%, 15%, 20%, 25%, 30%, 35%, 40%, 45%, 50%, 55%, 60%, 65%, 70%, 75%, 80%, 85%, 90%, 95%, or 100% of the nucleotides of the agent (or any component (e.g., nucleic acid molecule) thereof) (e.g., described herein, e.g., an antisense strand, a sense strand, a dsRNA agent, agent, an ASO, an ssRNA agent) are unmodified. In some embodiments, about 25%, 30%, 35%, 40%, 45%, 50%, 55%, 60%, 65%, 70%, 75%, 80%, 85%, 90%, 95%, or 100% of the nucleotides of the agent (or any component (e.g., nucleic acid molecule) thereof) (e.g., described herein, e.g., an antisense strand, a sense strand, a dsRNA agent, agent, an ASO, an ssRNA agent) are unmodified. In some embodiments, at least 1, 2, 3, 4, 5, 6, 7, 8, 9, 10, 11, 12, 13, 14, 15, 16, 17, 18, 19, 20, 21, 22, 23, 24, 25, 26, 27, 28, 29 or 30 of the nucleotides of the agent (or any component (e.g., nucleic acid molecule) thereof) (e.g., described herein, e.g., an antisense strand, a sense strand, a dsRNA agent, agent, an ASO, an ssRNA agent) are unmodified. In some embodiments, substantially all of the nucleotides of the agent (or any component (e.g., nucleic acid molecule) thereof) (e.g., described herein, e.g., an antisense strand, a sense strand, a dsRNA agent, agent, an ASO, an ssRNA agent) are unmodified. In some embodiments, all of the nucleotides of the agent (or any component (e.g., nucleic acid molecule) thereof) (e.g., described herein, e.g., an antisense strand, a sense strand, a dsRNA agent, agent, an ASO, an ssRNA agent) are unmodified.

[0406] In some embodiments, not more than 30, 29, 28, 27, 26, 25, 24, 23, 22, 21, 20, 19, 18, 17, 16, 15, 14, 13, 12, 11, 10, 9, 8, 7, 6, 5, 4, 3, 2, or 1 of the nucleotides of the of the agent (or any component (e.g., nucleic acid molecule) thereof) (e.g., described herein, e.g., an antisense strand, a sense strand, a dsRNA agent, agent, an ASO, an ssRNA agent) are modified. In some embodiments, not more than 10, 9, 8, 7, 6, 5, 4, 3, 2, or 1 of the nucleotides of the agent (or any component (e.g., nucleic acid molecule) thereof) (e.g., described herein, e.g., an antisense strand, a sense strand, a dsRNA agent, agent, an ASO, an ssRNA agent) are modified. In some embodiments, not more than 25%, 30%, 35%, 40%, 45%, 50%, 55%, 60%, 65%, 70%, 75%, 80%, 85%, 90%, 95%, or 100% of the nucleotides of the agent (or any component (e.g., nucleic acid molecule) thereof) (e.g., described herein, e.g., an antisense strand, a sense strand, a dsRNA agent, agent, an ASO, an ssRNA agent) are modified.

[0407] In some embodiments, the agent (e.g., antisense strand, sense strand, dsRNA agent (e.g., described herein)) comprises one or more non-naturally internucleoside linkage. In some embodiments, at least 25%, 30%, 35%, 40%, 45%, 50%, 55%, 60%, 65%, 70%, 75%, 80%, 85%, 90%, 95%, or 100% of the internucleoside linkages of the agent (e.g., antisense strand, sense strand, dsRNA agent, agent, ASO, ssRNA agent, etc. (e.g., described herein)) are non-naturally occurring. In some embodiments, at least 25%, 30%, 35%, 40%, 45%, 50%, 55%, 60%, 65%, 70%, 75%, 80%, 85%, 90%, 95%, or 100% of the or internucleoside linkages of the agent (e.g., antisense strand, sense strand, dsRNA agent, agent, ASO, ssRNA agent, etc. (e.g., described herein)) are chemically modified. For example, in some embodiments, at least 50% of the or internucleoside linkages of the agent (e.g., antisense strand, sense strand, dsRNA agent, agent, ASO, ssRNA agent, etc. (e.g., described herein)) are chemically modified. For example, in some embodiments, at least 60% of the or internucleoside linkages of the agent (e.g., antisense strand, sense strand, dsRNA agent, agent, ASO, ssRNA agent, etc. (e.g., described herein)) are chemically modified. For example, in some embodiments, at least 70% of the or internucleoside linkages of the agent (e.g., antisense strand, sense strand, dsRNA agent, agent, ASO, ssRNA agent, etc. (e.g., described herein)) are chemically modified. For example, in some embodiments, at least 80% of the or internucleoside linkages of the agent (e.g., antisense strand, sense strand, dsRNA agent, agent, ASO, ssRNA agent, etc. (e.g., described herein)) are chemically modified. For example, in some embodiments, at least 90% of the or internucleoside linkages of the agent (e.g., antisense strand, sense strand, dsRNA agent, agent, ASO, ssRNA agent, etc. (e.g., described herein)) are chemically modified. For example, in some embodiments, at least 95% of the or internucleoside linkages of the agent (e.g., antisense strand, sense strand, dsRNA agent, agent, ASO, ssRNA agent, etc. (e.g., described herein)) are chemically modified. For example, in some embodiments, at least 96% of the or internucleoside linkages of the agent (e.g., antisense strand, sense strand, dsRNA agent, agent, ASO, ssRNA agent, etc. (e.g., described herein)) are chemically modified. For example, in some embodiments, at least 97% of the or internucleoside linkages of the agent (e.g., antisense strand, sense strand, dsRNA agent, agent, ASO, ssRNA agent, etc. (e.g., described herein)) are chemically modified. For example, in some embodiments, at least 98% of the or internucleoside linkages of the agent (e.g., antisense strand, sense strand, dsRNA agent, agent, ASO, ssRNA agent, etc. (e.g., described herein)) are chemically modified. For example, in some embodiments, at least 99% of the or internucleoside linkages of the agent (e.g., antisense strand, sense strand, dsRNA agent, agent, ASO, ssRNA agent, etc. (e.g., described herein)) are chemically modified. For example, in some embodiments, at least 100% of the or internucleoside linkages of the agent (e.g., antisense strand, sense strand, dsRNA agent, agent, ASO, ssRNA agent, etc. (e.g., described herein)) are chemically modified. For example, in some embodiments, all (or substantially all) of the or internucleoside linkages of the agent (e.g., antisense strand, sense strand, dsRNA agent, agent, ASO, ssRNA agent, etc. (e.g., described herein)) are chemically modified.

### 4.5 Conjugates

[0408] In some embodiments, the agent (e.g., described herein) (e.g., antisense strand, sense strand, dsRNA agent, RNAi agent, ASO, ssRNA agent, etc.) comprises a heterologous moiety (e.g., operably connected to the agent). Therefore, further provided herein are conjugates comprising an agent (e.g., described herein) (e.g., antisense strand, sense strand, dsRNA agent, RNAi agent, ASO, ssRNA agent, etc.) and a heterologous moiety (e.g., operably connected to the agent). It is clear from the disclosure, but for the sake of clarity, the conjugate can comprise a modified agent (e.g., described herein, see, e.g., § 4.4).

[0409] In some embodiments, the heterologous moiety modifies one or more property of the agent (e.g., described herein) (e.g., antisense strand, sense strand, dsRNA agent, RNAi agent, ASO, ssRNA agent, etc.) to which it is conjugated. Exemplary properties include, but are not limited to, pharmacodynamics, pharmacokinetics, stability, absorption, activity, tissue distribution, cellular distribution, cellular uptake, charge, half-life, clearance, and binding affinity to a target nucleic acid molecule (e.g., a target mRNA).

[0410] In some embodiments, the heterologous moiety enhances the distribution and/or uptake (e.g., into a cell, e.g., into a cell in a subject) of the agent (e.g., described herein) (e.g., antisense strand, sense strand, dsRNA agent, RNAi agent, ASO, ssRNA agent, etc.) (e.g., as compared to an agent that lacks the heterologous moiety). In some embodiments, the heterologous moiety alters (e.g., extends) the lifetime (e.g., in vivo) of the agent (e.g., described herein) (e.g., antisense strand, sense strand, dsRNA agent, RNAi agent, ASO, ssRNA agent, etc.) (e.g., as compared to an agent that lacks the heterologous moiety). In some embodiments, the heterologous moiety provides an enhanced affinity for a selected target, e.g., a selected molecule, cell type, compartment (e.g., cell type, tissue, organ or region of the body) (e.g., as compared to an agent that lacks the heterologous moiety).

[0411] In some embodiments, the heterologous moiety enhances the activity (e.g., in a cell, e.g., in a cell in a subject) of the agent (e.g., described herein) (e.g., antisense strand, sense strand, dsRNA agent, RNAi agent, ASO, ssRNA agent, etc.) (e.g., as compared to an agent that lacks the heterologous moiety). Activity can include, e.g., degradation of a target mRNA (e.g., a BCL11A mRNA), inhibition of expression of a target gene (e.g., a BCL11A gene), and/or reduction in the expression of a target gene (e.g., a BCL11A gene).

[0412] In some embodiments, the heterologous moiety imparts a new property on the agent (e.g., described herein) (e.g., antisense strand, sense strand, dsRNA agent, RNAi agent, ASO, ssRNA agent, etc.) to which it is conjugated. For example, fluorophores or reporter groups that enable detection of the agent (e.g., described herein).

[0413] It is to be understood the heterologous moieties can impart multiple (e.g., any combination of the foregoing) properties of the agent (e.g., described herein) (e.g., antisense strand, sense strand, dsRNA agent, RNAi agent, ASO, ssRNA agent, etc.).

[0414] In some embodiments, wherein the agent is a dsRNA agent comprising a double stranded region, the heterologous moiety does not take part in, does not alter, and/or does not interfere with, the creation of a double strand region.

### 4.5.1 Heterologous Moieties

[0415] Heterologous moieties, include for example, but are not limited to, carbohydrates, peptides, proteins (e.g., antibodies or functional fragments or variants thereof; ligands (e.g., of a target receptor)), lipids, polymers, small molecules, intercalators, reporter molecules, polyamines, polyamides, vitamin moieties, polyethylene glycols, thioethers, polyethers, cholesterols, thiocholesterols, cholic acid moieties, folate, lipophilic groups, phospholipids, biotin, phenazine, phenanthridine, anthraquinone, adamantane, acridine, fluoresceins, rhodamines, coumarins, fluorophores, and dyes.

[0416] In some embodiments, the heterologous moiety is a carbohydrate, peptide, protein (e.g., antibody or functional fragment or variant thereof, e.g., ligand (e.g., of a target receptor)), lipid, polymer, small molecule, or any combination thereof. In some embodiments, the heterologous moiety comprises an active drug substance. In some embodiments, the heterologous moiety does not contain an active drug substance.

[0417] Exemplary heterologous moieties (e.g., targeting moieties), further include but are not limited, to carbohydrate moieties (e.g., GalNAc and GalNAc derivatives (See, e.g., U.S. Pat. No. 8,106,022 and WO2019055633)); lipid moieties such as a cholesterol moiety (see, e.g., Letsinger et al., Proc. Natl. Acid. Sci. USA, 1989, 86: 6553-6556); cholic acid (see, e.g., Manoharan et al., Biorg. Med. Chem. Let., 1994, 4:1053-1060), a thioether, e.g., beryl-S-tritylthiol (see, e.g., Manoharan et al., Ann. N.Y. Acad. Sci., 1992, 660:306-309; Manoharan et al., Biorg. Med. Chem. Let., 1993, 3:2765-2770); thiocholesterols (see, e.g., Oberhauser et al., Nucl. Acids Res., 1992, 20:533-538); aliphatic chains (e.g., dodecandiol or undecyl residues) (see, e.g., Saison-Behmoaras et al., EMBO J, 1991, 10:1111-1118; Kabanov et al., FEBS Lett., 1990, 259:327-330; Svinarchuk et al., Biochimie, 1993, 75:49-54), phospholipids (e.g., dihexadecyl-rac-glycerol or triethyl-ammonium 1,2-di-O-hexadecyl-rac-glycero-3-phosphonate) (see, e.g., Manoharan et al., Tetrahedron Lett., 1995, 36:3651-3654; Shea et al., Nucl. Acids Res., 1990, 18:3777-3783); polyamine or polyethylene glycol chains (see, e.g., Manoharan et al., Nucleosides & Nucleotides, 1995, 14:969-973); adamantane acetic acids (see, e.g., Manoharan et al., Tetrahedron Lett., 1995, 36:3651-3654); palmityl moieties (see, e.g., Mishra et al., Biochim. Biophys. Acta, 1995, 1264:229-237); and octadecylamine or hexylamino-carbonyloxycholesterol moiety (see, e.g., Crooke et al., J. Pharmacol. Exp. Ther., 1996, 277:923-937). The entire contents of each of the foregoing references is incorporated herein by reference for all purposes. Additional carbohydrate heterologous moieties (and linkers) suitable for use in conjugates described herein include those described in PCT Publication Nos. WO 2014/179620 and WO 2014/179627, the entire contents of each of which are incorporated herein by reference for all purposes.

### 4.5.1.1 Targeting Moieties

[0418] In specific embodiments, the heterologous moiety is a targeting moiety. In some embodiments, the targeting moiety enhances distribution of the agent (e.g., described herein) (e.g., antisense strand, sense strand, dsRNA agent, RNAi agent, ASO, ssRNA agent, etc.) to a target cell (or population of cells), tissue, and/or organ (e.g., as compared to an agent that lacks the targeting moiety). In some embodiments, the targeting moiety enhances the uptake of the agent (e.g., described herein) (e.g., antisense strand, sense strand, dsRNA agent, RNAi agent, ASO, ssRNA agent, etc.) into a target cell (or population of cells) (e.g., as compared to an agent that lacks the targeting moiety). In some embodiments, the targeting moiety provides enhanced affinity for a selected target, e.g., molecule, cell, cell type, compartment, e.g., a cellular or organ compartment, tissue, organ or region of the body, (e.g., as compared to an agent that lacks the targeting moiety).

[0419] In some embodiments, the targeting moiety specifically binds to a target molecule (e.g., protein, carbohydrate, lipid, etc.) expressed on the surface of a target cell, tissue, and/or organ. In some embodiments, the target molecule is a protein, carbohydrate, or lipid. In some embodiments, the target molecule is a receptor.

[0420] In some embodiments, upon binding to TFR (e.g., hTFR (e.g., TFR1)) expressed on the surface of a hematopoietic cell, the conjugate is internalized into the hematopoietic cell.

[0421] In some embodiments, the conjugate exhibits one or more of the following properties: (a) upon binding to TFR (e.g., hTFR (e.g., TFR1)) expressed on the surface of a hematopoietic cell, the conjugate does not induce death of the target cell; (b) upon binding to TFR (e.g., hTFR (e.g., TFR1)) expressed on the surface of a hematopoietic cell, the hematopoietic cell remains viable; (c) upon internalization into a hematopoietic cell, the conjugate does not induce death of the hematopoietic cell; and/or (d) upon binding to TFR (e.g., hTFR (e.g., TFR1)) expressed on the surface of a hematopoietic cell, the conjugate does not induce degradation of TFR (e.g., hTFR (e.g., TFR1)).

[0422] In some embodiments, upon binding to TFR (e.g., hTFR (e.g., TFR1)) expressed on the surface of an erythroid precursor cell, the conjugate is internalized into the erythroid precursor cell.

[0423] In some embodiments, the conjugate exhibits one or more of the following properties: (a) upon binding to TFR (e.g., hTFR (e.g., TFR1)) expressed on the surface of an erythroid precursor cell, the conjugate does not induce death of the target cell; (b) upon binding to TFR (e.g., hTFR (e.g., TFR1)) expressed on the surface of an erythroid precursor cell, the erythroid precursor cell remains viable; (c) upon internalization into an erythroid precursor cell, the conjugate does not induce death of the erythroid precursor cell; and/or (d) upon binding to TFR (e.g., hTFR (e.g., TFR1)) expressed on the surface of an erythroid precursor cell, the conjugate does not induce degradation of TFR (e.g., hTFR (e.g., TFR1)).

[0424] In some embodiments, the conjugate exhibits one or more of the following properties: (a) upon binding to TFR (e.g., hTFR (e.g., TFR1)) expressed on the surface of an erythroid precursor cell, the conjugate is internalized into the erythroid precursor cell; (b) upon binding to TFR (e.g., hTFR (e.g., TFR1)) expressed on the surface of an erythroid precursor cell, the conjugate does not induce death of the target cell; (c) upon binding to TFR (e.g., hTFR (e.g., TFR1)) expressed on the surface of an erythroid precursor cell, the erythroid precursor cell remains viable; (d) upon internalization into an erythroid precursor cell, the conjugate does not induce death of the erythroid precursor cell; and/or (e) upon binding to TFR (e.g., hTFR (e.g., TFR1)) expressed on the surface of an erythroid precursor cell, the conjugate does not induce degradation of TFR (e.g., hTFR (e.g., TFR1)).

[0425] In some embodiments, the protein (e.g., an antibody) that specifically binds to the TFR (e.g., hTFR (e.g., hTFR1)) exhibits one or more of the following properties: (a) upon binding to TFR (e.g., hTFR (e.g., TFR1)) expressed on the surface of an erythroid precursor cell, the protein (e.g., an antibody) that specifically binds to the TFR (e.g., hTFR (e.g., hTFR1)) or conjugate is internalized into the erythroid precursor cell; (b) upon binding to TFR (e.g., hTFR (e.g., TFR1)) expressed on the surface of an erythroid precursor cell, the protein (e.g., an antibody) that specifically binds to the TFR (e.g., hTFR (e.g., hTFR1)) or conjugate does not induce death of the target cell; (c) upon binding to TFR (e.g., hTFR (e.g., TFR1)) expressed on the surface of an erythroid precursor cell, the erythroid precursor cell remains viable; (d) upon internalization into an erythroid precursor cell, the protein (e.g., an antibody) that specifically binds to the TFR (e.g., hTFR (e.g., hTFR1)) or conjugate does not induce death of the erythroid precursor cell; and/or (e) upon binding to TFR (e.g., hTFR (e.g., TFR1)) expressed on the surface of an erythroid precursor cell, the protein (e.g., an antibody) that specifically binds to the TFR (e.g., hTFR (e.g., hTFR1)) or conjugate does not induce degradation of TFR (e.g., hTFR (e.g., TFR1)).

[0426] In some embodiments, the conjugates described herein exhibit one or more of the following properties: (a) upon binding to a target molecule (e.g., TFR (e.g., hTFR (e.g., hTFR1))) expressed on the surface of a target cell (e.g., an erythroid precursor cell), the conjugate is internalized into the target cell; (b) upon binding to a target molecule (e.g., TFR (e.g., hTFR (e.g., hTFR1))) expressed on the surface of a target cell (e.g., an erythroid precursor cell), the conjugate does not induce death of the target cell; (c) upon binding to a target molecule (e.g., TFR (e.g., hTFR (e.g., hTFR1))) expressed on the surface of a target cell (e.g., an erythroid precursor cell), the target cell remains viable; (d) upon internalization into a target cell (e.g., an erythroid precursor cell), the conjugate does not induce death of the target cell; and/or (e) upon binding to a target molecule (e.g., TFR (e.g., hTFR (e.g., hTFR1))) expressed on the surface of a target cell (e.g., an erythroid precursor cell), the conjugate does not induce degradation of the target molecule (e.g., TFR (e.g., hTFR (e.g., hTFR1))).

### (i) Hematopoietic Cell Targeting Moieties

[0427] In some embodiments, the targeting moiety is a hematopoietic cell (e.g., an erythroid precursor cell) targeting moiety. In some embodiments, the targeting moiety is capable of targeting an agent described herein (e.g., an antisense strand, sense strand, dsRNA agent, RNAi agent, ASO, ssRNA agent, etc. described herein) to a hematopoietic cell (e.g., an erythroid precursor cell). In some embodiments, the hematopoietic cell (e.g., an erythroid precursor cell) is present in the bone marrow (e.g., of a subject). In some embodiments, the targeting moiety is capable of targeting an agent (e.g., an antisense strand, sense strand, dsRNA agent, RNAi agent, ASO, ssRNA agent, etc. described herein) to one or more cell within the bone marrow. In some embodiments the targeting moiety specifically targets erythroid precursor cells (e.g., within the bone marrow (e.g., within a subject)). In some embodiments the targeting moiety specifically targets erythroid precursor cells (e.g., within the bone marrow (e.g., within a subject)) through specific binding to an antigen expressed on the surface of the erythroid precursor cells (e.g., TFR (e.g., hTFR (e.g., hTFR1))).

[0428] It should be appreciated that various types of targeting moieties (e.g., hematopoietic cell (e.g., erythroid precursor cell) targeting moieties) may be used in accordance with the disclosure. For example, the targeting moiety (e.g., the hematopoietic cell (e.g., erythroid precursor cell) targeting moiety) may comprise (or consist of) a small molecule, an oligonucleotide (e.g., DNA, RNA, RNA/DNA hybrid) (e.g., an aptamer), a protein (e.g., an antibody, a peptide), a lipid (e.g., a microvesicle), or a carbohydrate (e.g., a polysaccharide). In some embodiments, the targeting moiety is a protein. In some embodiments, the targeting moiety is a peptide. In some embodiments, the targeting moiety is an antibody. In some embodiments, the targeting moiety is an antibody-like scaffold (e.g., as described herein). Exemplary targeting moieties (e.g., hematopoietic cell (e.g., erythroid precursor cell) targeting moieties) are described in further detail herein, however, it should be appreciated that the exemplary targeting moieties (e.g., hematopoietic cell (e.g., erythroid precursor cell) targeting moieties) provided herein are not meant to be limiting.

[0429] In some embodiments, the hematopoietic cell (e.g., erythroid precursor cell) targeting moiety specifically binds to an antigen expressed on surface of hematopoietic cells (or one or more subset thereof) (e.g., erythroid precursor cells) (e.g., within the bone marrow) (e.g., TFR (e.g., hTFR (e.g., hTFR1))). In some embodiments, the hematopoietic cell (e.g., erythroid precursor cell) targeting moiety specifically binds to an antigen expressed on the surface of erythroid precursor cells (e.g., TFR (e.g., hTFR (e.g., hTFR1))). In some embodiments, the hematopoietic cell (e.g., erythroid precursor cell) targeting moiety specifically binds to an antigen expressed on the surface of erythroid precursor cells within the bone marrow (e.g., TFR (e.g., hTFR (e.g., hTFR1))).

[0430] By interacting with one or more molecule (e.g., protein) expressed on the surface of a target hematopoietic cell (e.g., erythroid precursor cell) both tissue (e.g., bone marrow) localization and selective or preferred uptake into hematopoietic cells (e.g., erythroid precursor cells) can be achieved. In some embodiments, molecules (e.g., proteins) that are substrates for hematopoietic cell (e.g., erythroid precursor cell) uptake transporters are useful for delivering an agent (e.g., an antisense strand, sense strand, dsRNA agent, RNAi agent, ASO, ssRNA agent, etc. described herein) into hematopoietic cells (e.g., erythroid precursor cells). Binding to molecules (e.g., proteins) expressed on the surface of hematopoietic cells (e.g., erythroid precursor cells) followed by endocytosis can allow large molecules such as antibodies to enter the hematopoietic cells (e.g., erythroid precursor cells). For example, as described in detail below, agents (e.g., an antisense strand, sense strand, dsRNA agent, RNAi agent, ASO, ssRNA agent, etc. described herein) conjugated to transferrin (or a functional fragment or functional variant thereof) or anti-TFR (e.g., hTFR (e.g., hTFR1)) antibodies can be taken up by hematopoietic cells (e.g., erythroid precursor cells) via binding to TFR (e.g., hTFR (e.g., hTFR1)), which may then be endocytosed, e.g., via endocytosis, e.g., clathrin-mediated endocytosis.

[0431] The use of hematopoietic cell (e.g., erythroid precursor cell) targeting moieties may be useful for concentrating an agent (e.g., an antisense strand, sense strand, dsRNA agent, RNAi agent, ASO, ssRNA agent, etc. described herein) in hematopoietic cells (e.g., erythroid precursor cells (e.g., within the bone marrow (e.g., within a subject))) while reducing toxicity associated with effects in other cells or tissues. In some embodiments, the hematopoietic cell (e.g., erythroid precursor cell) targeting moiety concentrates a bound agent (e.g., an antisense strand, sense strand, dsRNA agent, RNAi agent, ASO, ssRNA agent, etc. described herein) in hematopoietic cells (e.g., erythroid precursor cell (e.g., within the bone marrow (e.g., within a subject))) as compared to another tissue or cell type within a subject. In some embodiments, the hematopoietic cell (e.g., erythroid precursor cell) targeting moiety concentrates a bound agent (e.g., an antisense strand, sense strand, dsRNA agent, RNAi agent, ASO, ssRNA agent, etc. described herein) in hematopoietic cells (e.g., erythroid precursor cells) in an amount that is at least 1, 2, 3, 4, 5, 6, 7, 8, 9, 10, 15, 20, 30, 40, 50, 60, 70, 80, 90, or 100 times greater than an amount in non-hematopoietic cells (e.g., non-erythroid precursor cells). In some embodiments, a toxicity of the agent (e.g., an antisense strand, sense strand, dsRNA agent, RNAi agent, ASO, ssRNA agent, etc. described herein) in a subject is reduced by at least 1%, 2%, 3%, 4%, 5%, 10%, 15%, 20%, 25%, 30%, 35%, 40%, 45%, 50%, 55%, 60%, 65%, 70%, 75%, 80%, 90%, or 95% when it is delivered to the subject when bound to the hematopoietic cell (e.g., erythroid precursor cell) targeting moiety.

[0432] In some embodiments, the hematopoietic cell (e.g., erythroid precursor cell) targeting moiety exhibits one or more of the following properties: (a) upon binding to a target molecule (e.g., TFR (e.g., hTFR (e.g., hTFR1))) expressed on the surface of a target cell (e.g., an erythroid precursor cell), the hematopoietic cell (e.g., erythroid precursor cell) targeting moiety is internalized into the target cell; (b) upon binding to a target molecule (e.g., TFR (e.g., hTFR (e.g., hTFR1))) expressed on the surface of a target cell (e.g., an erythroid precursor cell), the hematopoietic cell (e.g., erythroid precursor cell) targeting moiety does not induce death of the target cell; (c) upon binding to a target molecule (e.g., TFR (e.g., hTFR (e.g., hTFR1))) expressed on the surface of a target cell (e.g., an erythroid precursor cell), the target cell remains viable; (d) upon internalization into a target cell (e.g., an erythroid precursor cell), the hematopoietic cell (e.g., erythroid precursor cell) targeting moiety does not induce death of the target cell; and/or (e) upon binding to a target molecule (e.g., TFR (e.g., hTFR (e.g., hTFR1))) expressed on the surface of a target cell (e.g., an erythroid precursor cell), the hematopoietic cell (e.g., erythroid precursor cell) targeting moiety does not induce degradation of the target molecule (e.g., TFR (e.g., hTFR (e.g., hTFR1))).

### (a) TFR Targeting Moieties

[0433] In some embodiments, the targeting moiety (e.g., the hematopoietic cell (e.g., erythroid precursor cell) targeting moiety) specifically binds to the transferrin receptor (TFR) (e.g., hTFR (e.g., hTFR1)). In some embodiments, the targeting moiety (e.g., the hematopoietic cell (e.g., erythroid precursor cell) targeting moiety) specifically binds to hTFR. In some embodiments, the targeting moiety (e.g., the hematopoietic cell (e.g., erythroid precursor cell) targeting moiety) specifically binds hTFR1.

[0434] TFR1 is a transmembrane homodimeric glycoprotein that functions, inter alia, in the cellular uptake of iron from the plasma glycoprotein transferrin (TF). Iron uptake from transferrin involves the binding of TF to TFR (e.g., TFR1), internalization of TF within an endocytic vesicle by receptor-mediated endocytosis and the release of iron induced by a decrease in endosomal pH. TFR1 is expressed by e.g., placental syncytiotrophoblasts, myocytes, basal keratinocytes, hepatocytes, endocrine pancreas, spermatocytes, and erythroid precursor cells. TFR expression, while known to be highly expressed by erythroid precursor cells, is not expressed by mature erythrocytes. TFR2 is a known homolog of TFR1, but TFR1 is considered the major protein responsible for iron uptake owing to its higher affinity and expression pattern. See, e.g., Derek K. Marsee, et al., CD71 (Transferrin Receptor): An Effective Marker for Erythroid Precursors in Bone Marrow Biopsy Specimens, American Journal of Clinical Pathology, Volume 134, Issue 3, September 2010, Pages 429-435, https://doi.org/10.1309/AJCPCRK3MOAOJ6AT; C. Sieff et al., Changes in Cell Surface Antigen Expression During Hemopoietic Differentiation, Blood, Vol 60 (3), 1982, Pages 703-713, https://doi.org/10.1182/blood.V60.3.703.703; the entire contents of each of which are incorporated herein by reference for all purposes.

[0435] The amino acid sequence of a reference hTFR1 protein is set forth in SEQ ID NO: 3281. The amino acid sequence of a reference hTFR2 protein is set forth in SEQ ID NO: 3282. The amino acid sequence of a reference hTF protein is set forth in SEQ ID NO: 3283. See Table 11, herein.

TABLE 11
The Amino Acid Sequence of a Reference hTFR1, hTFR2, and hTF Protein.

| | | SEQ ID |
|---|---|---|
| Description | Amino Acid Sequence | NO |
| hTFR1 | MMDQARSAFSNLEGGEPLSYTRFSLARQVDGDNSHVEMKLAVDEEENA | 3281 |
| UniProt | DNNTKANVTKPKRCSGSICYGTIAVIVFFLIGFMIGYLGYCKGVEPKT | |
| Accession | ECERLAGTESPVREEPGEDFPAARRLYWDDLKRKLSEKLDSTDFTGTI | |
| P02786\| | KLLNENSYVPREAGSQKDENLALYVENQFREFKLSKVWRDQHFVKIQV | |
| | KDSAQNSVIIVDKNGRLVYLVENPGGYVAYSKAATVTGKLVHANFGTK | |
| | KDFEDLYTPVNGSIVIVRAGKITFAEKVANAESLNAIGVLIYMDQTKF | |
| | PIVNAELSFFGHAHLGTGDPYTPGFPSFNHTQFPPSRSSGLPNIPVQT | |
| | ISRAAAEKLFGNMEGDCPSDWKTDSTCRMVTSESKNVKLTVSNVLKEI | |
| | KILNIFGVIKGFVEPDHYVVVGAQRDAWGPGAAKSGVGTALLLKLAQM | |
| | FSDMVLKDGFQPSRSIIFASWSAGDEGSVGATEWLEGYLSSLHLKAFT | |
| | YINLDKAVLGTSNFKVSASPLLYTLIEKTMQNVKHPVTGQFLYQDSNW | |
| | ASKVEKLILDNAAFPFLAYSGIPAVSFCFCEDTDYPYLGTTMDTYKEL | |
| | IERIPELNKVARAAAEVAGQFVIKLTHDVELNLDYERYNSQLLSFVRD | |
| | LNQYRADIKEMGLSLOWLYSARGDFFRATSRLITDFGNAEKTDRFVMK | |
| | KLNDRVMRVEYHFLSPYVSPKESPFRHVFWGSGSHILPALLENLKLRK | |
| | QNNGAFNETLERNQLALATWTIQGAANALSGDVWDIDNEF | |
| hTFR2 | MERLWGLFQRAQQLSPRSSQTVYQRVEGPRKGHLEEEEEDGEEGAETL | 3282 |
| UniProt | AHFCPMELRGPEPLGSRPROPNLIPWAAAGRRAAPYLVLTALLIFTGA | |
| Accession | FLLGYVAFRGSCQACGDSVLVVSEDVNYEPDLDFHQGRLYWSDLQAMF | |
| Q9UP52 | LQFLGEGRLEDTIRQTSLRERVAGSAGMAALTQDIRAALSROKLDHVW | |
| | TDTHYVGLQFPDPAHPNTLHWVDEAGKVGEQLPLEDPDVYCPYSAIGN | |
| | VTGELVYAHYGRPEDLQDLRARGVDPVGRLLLVRVGVISFAQKVTNAQ | |
| | DFGAQGVLIYPEPADFSQDPPKPSLSSQQAVYGHVHLGTGDPYTPGFP | |
| | SFNQTQFPPVASSGLPSIPAQPISADIASRLLRKLKGPVAPQEWQGSL | |
| | LGSPYHLGPGPRLRLVVNNHRISTPINNIFGCIEGRSEPDHYVVIGAQ | |
| | RDAWGPGAAKSAVGTAILLELVRTFSSMVSNGFRPRRSLLFISWDGGD | |
| | FGSVGSTEWLEGYLSVLHLKAVVYVSLDNAVLGDDKFHAKTSPLLTSL | |
| | IESVLKQVDSPNHSGQTLYEQVVFTNPSWDAEVIRPLPMDSSAYSFTA | |
| | FVGVPAVEFSFMEDDQAYPFLHTKEDTYENLHKVLOGRLPAVAQAVAQ | |
| | LAGQLLIRLSHDRLLPLDFGRYGDVVLRHIGNLNEFSGDLKARGLTLQ | |
| | WVYSARGDYIRAAEKLRQEIYSSEERDERLTRMYNVRIMRVEFYFLSQ | |
| | YVSPADSPFRHIFMGRGDHTLGALLDHLRLLRSNSSGTPGATSSTGFQ | |
| | ESRFRRQLALLTWTLQGAANALSGDVWNIDNNF | |
| hTF | VPDKTVRWCAVSEHEATKCQSFRDHMKSVIPSDGPSVACVKKASYLDC | 3283 |
| (Mature - no | IRAIAANEADAVTLDAGLVYDAYLAPNNLKPVVAEFYGSKEDPQTFYY | |
| signal sequence) | AVAVVKKDSGFQMNQLRGKKSCHTGLGRSAGWNIPIGLLYCDLPEPRK | |
| UniProt | PLEKAVANFFSGSCAPCADGTDFPQLCQLCPGCGCSTLNQYFGYSGAF | |
| Accession | KCLKDGAGDVAFVKHSTIFENLANKADRDQYELLCLDNTRKPVDEYKD | |
| P02787 | CHLAQVPSHTVVARSMGGKEDLIWELLNQAQEHFGKDKSKEFQLFSSP | |
| | HGKDLLFKDSAHGFLKVPPRMDAKMYLGYEYVTAIRNLREGTCPEAPT | |
| | DECKPVKWCALSHHERLKCDEWSVNSVGKIECVSAETTEDCIAKIMNG | |
| | EADAMSLDGGFVYIAGKCGLVPVLAENYNKSDNCEDTPEAGYFAVAVV | |
| | KKSASDLTWDNLKGKKSCHTAVGRTAGWNIPMGLLYNKINHCRFDEFF | |
| | SEGCAPGSKKDSSLCKLCMGSGLNLCEPNNKEGYYGYTGAFRCLVEKG | |
| | DVAFVKHQTVPQNTGGKNPDPWAKNLNEKDYELLCLDGTRKPVEEYAN | |
| | CHLARAPNHAVVTRKDKEACVHKILRQQQHLFGSNVTDCSGNFCLFRS | |
| | ETKDLLFRDDTVCLAKLHDRNTYEKYLGEEYVKAVGNLRKCSTSSLLE | |
| | ACTFRRP | |

[0436] In some embodiments, the targeting moiety (e.g., the hematopoietic cell (e.g., erythroid precursor cell) targeting moiety) specifically binds TFR1. In some embodiments, the targeting moiety (e.g., the hematopoietic cell (e.g., erythroid precursor cell) targeting moiety) specifically binds TFR2. In some embodiments, the targeting moiety (e.g., the hematopoietic cell (e.g., erythroid precursor cell) targeting moiety) specifically binds TFR1 and TFR2. In some embodiments, the targeting moiety (e.g., the hematopoietic cell (e.g., erythroid precursor cell) targeting moiety) specifically binds TFR1 but does not specifically bind TFR2. In some embodiments, the targeting moiety (e.g., the hematopoietic cell (e.g., erythroid precursor cell) targeting moiety) specifically binds TFR1 and binds to TFR2 with significantly lower affinity.

[0437] In some embodiments, the targeting moiety (e.g., the hematopoietic cell (e.g., erythroid precursor cell) targeting moiety) specifically binds hTFR1 and one or more of murine TFR1, rat TFR1, a non-human primate TFR1 (e.g., cynomolgus TFR1).

[0438] In some embodiments, the TFR (e.g., hTFR (e.g., hTFR1)) targeting moiety enhances the distribution and/or uptake (e.g., into a cell, e.g., into a cell in a subject, e.g., a cell that expresses TFR (e.g., hTFR (e.g., hTFR1)) (e.g., an erythroid precursor cell (e.g., in the bone marrow))) of an agent (e.g., an antisense strand, sense strand, dsRNA agent, RNAi agent, ASO, ssRNA agent, etc. described herein) (e.g., as compared to an oligonucleotide that lacks the targeting moiety). In some embodiments, the TFR (e.g., hTFR (e.g., hTFR1)) targeting moiety alters (e.g., extends) the lifetime (e.g., in vivo) of the agent (e.g., an antisense strand, sense strand, dsRNA agent, RNAi agent, ASO, ssRNA agent, etc. described herein) (e.g., as compared to an oligonucleotide that lacks the targeting moiety). In some embodiments, the TFR (e.g., hTFR (e.g., hTFR1)) targeting moiety provides an enhanced affinity for a selected target, e.g., a selected cell type, compartment (e.g., cell type, tissue, organ or region of the body) (e.g., as compared to an oligonucleotide that lacks the targeting moiety) (e.g., erythroid precursor cells (e.g., in the bone marrow)).

[0439] In some embodiments, the TFR targeting moiety does not (or does not significantly) interfere with TF binding to TFR. In some embodiments, the TFR targeting moiety does not (or does not significantly) compete for binding to TFR with TF.

[0440] In some embodiments, the TFR targeting moiety is a protein. In some embodiments, the targeting moiety is a transferrin protein. In some embodiments, the targeting moiety is an antibody. In some embodiments, the targeting moiety comprises an antibody-like scaffold (e.g., a cysteine dense peptide, see, e.g., WO2023023031, the entire contents of which is incorporated by reference herein for all purposes).

### TF Proteins

[0441] In some embodiments, the TFR targeting moiety comprises TF (e.g., hTF) (or a functional fragment or variant thereof). In some embodiments, the TFR targeting moiety comprises the TFR1 binding domain of TF (e.g., hTF) (or a functional fragment or variant thereof). In some embodiments, the TF (e.g., hTF) (or a functional fragment or variant thereof) comprises or consists of an amino acid sequence at least 85%, 86%, 87%, 88%, 89%, 90%, 91%, 92%, 93%, 94%, 95%, 96%, 97%, 98%, 99%, or 100% identical to the amino acid sequence set forth in SEQ ID NO: 3283.

[0442] Variant hTF proteins are known in the art, see, e.g., WO2009019314A1, WO2008152140A2, EP2216341A1, WO2009149393A2, U.S. Pat. No. 8,158,579B2, the entire contents of each of which are incorporated herein by reference for all purposes. In some embodiments, the variant hTF protein exhibits increased stability and/or long plasma half-life (e.g., relative to a reference hTF protein) that does not comprise the one or more variation). In some embodiments, the variant hTF protein comprises a substitution of a non-cysteine amino acid residue with a cysteine (e.g., at position V1, P2, D3, K4 T5, H14, Q20, S21, D24, K27, S28, V29, P31, S32, D33, A43, E89, D104, G106, G114, L122, G123, P145, S155, D163, T165, D166, P168, P175, G176, G178, C179, S180, T181, L182, Q184, F187, S189, D197, G198, E212, A215, N216, A218, D221, D229, G257, N268, D277, K278, K280, E281, S287, P288, H289, K291, S298, P307, L326, T330, P335, T336, N413, S415, D416, D420, K434, S435, A436, S437, D438, D442, N443, G446, N469, N472, G487, K489, D491, S501, G502, L503, N510, T518, P539, Q540, G543, G544, K545, P547, D548, P549, K552, N553, N555, D558, D565, T567, P570, N576, A595, S610, N611, V612, T613, D614, S616, G617, T626, D634, D643, S666, T667 or S669, numbering according to SEQ ID NO: 3283) (e.g., as described in WO2009019314A1). In some embodiments, the variant hTF protein comprises the addition of a cysteine residue (e.g., as described in WO2009019314A1).

### Exemplary hTF Variant Proteins

[0443] The amino acid sequence of exemplary hTF variants is provided in Table 12.

TABLE 12
The Amino Acid Sequence of Exemplary hTF Variants.

| | | SEQ |
|---|---|---|
| Description | Amino Acid Sequence | ID NO |
| A | CPDKTVRWCAVSEHEATKCQSFRDHMKSVIPSDGPSVACVKKASYLDCI | 3284 |
| | RAIAANEADAVTLDAGLVYDAYLAPNNLKPVVAEFYGSKEDPQTFYYAV | |
| | AVVKKDSGFQMNQLRGKKSCHTGLGRSAGWNIPIGLLYCDLPEPRKPLE | |
| | KAVANFFSGSCAPCADGTDFPQLCQLCPGCGCSTLNQYFGYSGAFKCLK | |
| | DGAGDVAFVKHSTIFENLANKADRDQYELLCLDNTRKPVDEYKDCHLAQ | |
| | VPSHTVVARSMGGKEDLIWELLNQAQEHFGKDKSKEFQLFSSPHGKDLL | |
| | FKDSAHGFLKVPPRMDAKMYLGYEYVTAIRNLREGTCPEAPTDECKPVK | |
| | WCALSHHERLKCDEWSVNSVGKIECVSAETTEDCIAKIMNGEADAMSLD | |
| | GGFVYIAGKCGLVPVLAENYNKSDNCEDTPEAGYFAVAVVKKSASDLTW | |
| | DNLKGKKSCHTAVGRTAGWNIPMGLLYNKINHCRFDEFFSEGCAPGSKK | |
| | DSSLCKLCMGSGLNLCEPNNKEGYYGYTGAFRCLVEKGDVAFVKHQTVP | |
| | QNTGGKNPDPWAKNLNEKDYELLCLDGTRKPVEEYANCHLARAPNHAVV | |
| | TRKDKEACVHKILRQQQHLFGSNVTDCSGNFCLFRSETKDLLFRDDTVC | |
| | LAKLHDRNTYEKYLGEEYVKAVGNLRKCSTSSLLEACTERRP | |
| B | VPDKTVRWCAVSEHEATKCQSFRDHMKCVIPSDGPSVACVKKASYLDCI | 3285 |
| | RAIAANEADAVTLDAGLVYDAYLAPNNLKPVVAEFYGSKEDPQTFYYAV | |
| | AVVKKDSGFQMNQLRGKKSCHTGLGRSAGWNIPIGLLYCDLPEPRKPLE | |
| | KAVANFFSGSCAPCADGTDFPQLCQLCPGCGCSTLNQYFGYSGAFKCLK | |
| | DGAGDVAFVKHSTIFENLANKADRDQYELLCLDNTRKPVDEYKDCHLAQ | |
| | VPSHTVVARSMGGKEDLIWELLNQAQEHFGKDKSKEFQLFSSPHGKDLL | |
| | FKDSAHGFLKVPPRMDAKMYLGYEYVTAIRNLREGTCPEAPTDECKPVK | |
| | WCALSHHERLKCDEWSVNSVGKIECVSAETTEDCIAKIMNGEADAMSLD | |
| | GGFVYIAGKCGLVPVLAENYNKSDNCEDTPEAGYFAVAVVKKSASDLTW | |
| | DNLKGKKSCHTAVGRTAGWNIPMGLLYNKINHCRFDEFFSEGCAPGSKK | |
| | DSSLCKLCMGSGLNLCEPNNKEGYYGYTGAFRCLVEKGDVAFVKHQTVP | |
| | QNTGGKNPDPWAKNLNEKDYELLCLDGTRKPVEEYANCHLARAPNHAVV | |
| | TRKDKEACVHKILRQQQHLFGSNVTDCSGNFCLFRSETKDLLFRDDTVC | |
| | LAKLHDRNTYEKYLGEEYVKAVGNLRKCSTSSLLEACTFRRP | |
| C | VPDKTVRWCAVSEHEATKCQSFRDHMKSVIPCDGPSVACVKKASYLDCI | 3286 |
| | RAIAANEADAVTLDAGLVYDAYLAPNNLKPVVAEFYGSKEDPQTFYYAV | |
| | AVVKKDSGFQMNQLRGKKSCHTGLGRSAGWNIPIGLLYCDLPEPRKPLE | |
| | KAVANFFSGSCAPCADGTDFPQLCQLCPGCGCSTLNQYFGYSGAFKCLK | |
| | DGAGDVAFVKHSTIFENLANKADRDQYELLCLDNTRKPVDEYKDCHLAQ | |
| | VPSHTVVARSMGGKEDLIWELLNQAQEHFGKDKSKEFQLFSSPHGKDLL | |
| | FKDSAHGFLKVPPRMDAKMYLGYEYVTAIRNLREGTCPEAPTDECKPVK | |
| | WCALSHHERLKCDEWSVNSVGKIECVSAETTEDCIAKIMNGEADAMSLD | |
| | GGFVYIAGKCGLVPVLAENYNKSDNCEDTPEAGYFAVAVVKKSASDLTW | |
| | DNLKGKKSCHTAVGRTAGWNIPMGLLYNKINHCRFDEFFSEGCAPGSKK | |
| | DSSLCKLCMGSGLNLCEPNNKEGYYGYTGAFRCLVEKGDVAFVKHQTVP | |
| | QNTGGKNPDPWAKNLNEKDYELLCLDGTRKPVEEYANCHLARAPNHAVV | |
| | TRKDKEACVHKILRQQQHLFGSNVTDCSGNFCLFRSETKDLLERDDTVC | |
| | LAKLHDRNTYEKYLGEEYVKAVGNLRKCSTSSLLEACTFRRP | |
| D | VPDKTVRWCAVSEHEATKCQSFRDHMKSVIPSDGPSVACVKKASYLDCI | 3287 |
| | RAIAANEADAVTLDAGLVYDAYLAPNNLKPVVAEFYGSKEDPQTFYYAV | |
| | AVVKKCSGFQMNQLRGKKSCHTGLGRSAGWNIPIGLLYCDLPEPRKPLE | |
| | KAVANFFSGSCAPCADGTDFPQLCQLCPGCGCSTLNQYFGYSGAFKCLK | |
| | DGAGDVAFVKHSTIFENLANKADRDQYELLCLDNTRKPVDEYKDCHLAQ | |
| | VPSHTVVARSMGGKEDLIWELLNQAQEHFGKDKSKEFQLFSSPHGKDLL | |
| | FKDSAHGFLKVPPRMDAKMYLGYEYVTAIRNLREGTCPEAPTDECKPVK | |
| | WCALSHHERLKCDEWSVNSVGKIECVSAETTEDCIAKIMNGEADAMSLD | |
| | GGFVYIAGKCGLVPVLAENYNKSDNCEDTPEAGYFAVAVVKKSASDLTW | |
| | DNLKGKKSCHTAVGRTAGWNIPMGLLYNKINHCRFDEFFSEGCAPGSKK | |
| | DSSLCKLCMGSGLNLCEPNNKEGYYGYTGAFRCLVEKGDVAFVKHQTVP | |
| | QNTGGKNPDPWAKNLNEKDYELLCLDGTRKPVEEYANCHLARAPNHAVV | |
| | TRKDKEACVHKILRQQQHLFGSNVTDCSGNFCLFRSETKDLLFRDDTVC | |
| | LAKLHDRNTYEKYLGEEYVKAVGNLRKCSTSSLLEACTFRRP | |
| E | VPDKTVRWCAVSEHEATKCQSFRDHMKSVIPSDGPSVACVKKASYLDCI | 3288 |
| | RAIAANEADAVTLDAGLVYDAYLAPNNLKPVVAEFYGSKEDPQTFYYAV | |
| | AVVKKDSGFQMNQLRGKKSCHTGLGRSAGWNIPIGLLYCDLPEPRKPLE | |
| | KAVANFFSGSCAPCADGCDFPQLCQLCPGCGCSTLNQYFGYSGAFKCLK | |
| | DGAGDVAFVKHSTIFENLANKADRDQYELLCLDNTRKPVDEYKDCHLAQ | |
| | VPSHTVVARSMGGKEDLIWELLNQAQEHFGKDKSKEFQLFSSPHGKDLL | |
| | FKDSAHGFLKVPPRMDAKMYLGYEYVTAIRNLREGTCPEAPTDECKPVK | |
| | WCALSHHERLKCDEWSVNSVGKIECVSAETTEDCIAKIMNGEADAMSLD | |
| | GGFVYIAGKCGLVPVLAENYNKSDNCEDTPEAGYFAVAVVKKSASDLTW | |
| | DNLKGKKSCHTAVGRTAGWNIPMGLLYNKINHCRFDEFFSEGCAPGSKK | |
| | DSSLCKLCMGSGLNLCEPNNKEGYYGYTGAFRCLVEKGDVAFVKHQTVP | |
| | QNTGGKNPDPWAKNLNEKDYELLCLDGTRKPVEEYANCHLARAPNHAVV | |
| | TRKDKEACVHKILRQQQHLFGSNVTDCSGNFCLFRSETKDLLFRDDTVC | |
| | LAKLHDRNTYEKYLGEEYVKAVGNLRKCSTSSLLEACTFRRP | |
| F | VPDKTVRWCAVSEHEATKCQSFRDHMKSVIPSDGPSVACVKKASYLDCI | 3289 |
| | RAIAANEADAVTLDAGLVYDAYLAPNNLKPVVAEFYGSKEDPQTFYYAV | |
| | AVVKKDSGFQMNQLRGKKSCHTGLGRSAGWNIPIGLLYCDLPEPRKPLE | |
| | KAVANFFSGSCAPCADGTDFPQLCQLCPGCGCSTLNQYFGYSGAFKCLK | |
| | DGAGDVAFVKHSTIFENLANKADRDQYELLCLDNTRKPVDEYKDCHLAQ | |
| | VPSHTVVARSMGGKEDLIWELLNQAQEHFGKDKSKEFQLFSSPHGKDLL | |
| | FKDSAHGFLKVPPRMDAKMYLGYEYVTAIRNLREGTCPEAPTDECKPVK | |
| | WCALSHHERLKCDEWSVNSVGKIECVSAETTEDCIAKIMNGEADAMSLD | |
| | GGFVYIAGKCGLVPVLAENYNKADNCEDTPEAGYFAVAVVKKSASDLIW | |
| | DNLKGKKSCHTAVGRTAGWNIPMGLLYNKINHCRFDEFFSEGCAPGSKK | |
| | DSSLCKLCMGSGLNLCEPNNKEGYYGYTGAFRCLVEKGDVAFVKHQTVP | |
| | QNTGGKNPDPWAKNLNEKDYELLCLDGTRKPVEEYANCHLARAPNHAVV | |
| | TRKDKEACVHKILRQQQHLFGSNVTDCSGNFCLFRSETKDLLFRDDTVC | |
| | LAKLHDRNTYEKYLGEEYVKAVGNLRKCSTSSLLEACTFRRP | |
| G | VPDKTVRWCAVSEHEATKCQSFRDHMKSVIPSDGPSVACVKKASYLDCI | 3290 |
| | RAIAANEADAVTLDAGLVYDAYLAPNNLKPVVAEFYGSKEDPQTFYYAV | |
| | AVVKKDSGFQMNQLRGKKSCHTGLGRSAGWNIPIGLLYCDLPEPRKPLE | |
| | KAVANFFSGSCAPCADGTDFPQLCQLCPGCGCSTLNQYFGYSGAFKCLK | |
| | DGAGDVAFVEHSTIFENLANKADRDQYELLCLDNTRKPVDEYKDCHLAQ | |
| | VPSHTVVARSMGGKEDLIWELLNQAQEHFGKDKSKEFQLFSSPHGKDLL | |
| | FKDSAHGFLKVPPRMDAKMYLGYEYVTAIRNLREGTCPEAPTDECKPVK | |
| | WCALSHHERLKCDEWSVNSVGKIECVSAETTEDCIAKIMNGEADAMSLD | |
| | GGFVYIAGKCGLVPVLAENYNKSDNCEDTPEAGYFAVAVVKKSASDLTW | |
| | DNLKGKKSCHTAVGRTAGWNIPMGLLYNKINHCRFDEFFSEGCAPGSKK | |
| | DSSLCKLCMGSGLNLCEPNNKEGYYGYTGAFRCLVEKGDVAFVKHQTVP | |
| | QNTGGKNPDPWAKNLNEKDYELLCLDGTRKPVEEYANCHLARAPNHAVV | |
| | TRKDKEACVHKILRQQQHLFGSNVTDCSGNFCLFRSETKDLLFRDDTVC | |
| | LAKLHDRNTYEKYLGEEYVKAVGNLRKCSTSSLLEACTFRRP | |
| H | VPDKTVRWCAVSEHEATKCQSFRDHMKSVIPSDGPSVACVKKASYLDCI | 3291 |
| | RAIAANEADAVTLDAGLVYDAYLAPNNLKPVVAEFYGSKEDPQTFYYAV | |
| | AVVKKDSGFQMNQLRGKKSCHTGLGRSAGWNIPIGLLYCDLPEPRKPLE | |
| | KAVANFFSGSCAPCADGTDFPQLCQLCPGCGCSTLNQYFGYSGAFKCLK | |
| | DGAGDVAFVEHSTIFENLANKADRDQYELLCLDNTRKPVDEYKDCHLAQ | |
| | VPSHTVVARSMGGKEDLIWELLNQAQEHFGKDKSKEFQLFSSPHGKDLL | |
| | FKDSAHGFLKVPPRMDAKMYLGYEYVTAIRNLREGTCPEAPTDECKPVK | |
| | WCALSHHERLKCDEWSVNSVGKIECVSAETTEDCIAKIMNGEADAMSLD | |
| | GGFVYIAGKCGLVPVLAENYNKSDNCEDTPEAGYFAVAVVKKSASDLTW | |
| | DNLKGKKSCHTAVGRTAGWNIPMGLLYNKINHCRFDEFFSEGCAPGSKK | |
| | DSSLCKLCMGSGLNLCEPNNKEGYYGYTGAFRCLVEKGDVAFVKHQTVP | |
| | QNTGGKNPDPWAKNLNEKDYELLCLDGTRKPVEEYANCHLARAPNHAVV | |
| | TRKDKEACVHKILRQQQHLFGSNVTDCSGNFCLFRSETKDLLFADDTVC | |
| | LAKLHDRNTYEKYLGEEYVKAVGNLRKCSTSSLLEACTFRRP | |
| I | VPDKTVRWCAVSEHEATKCQSFRDHMKSVIPSDGPSVACVKKASYLDCI | 3292 |
| | RAIAANEADAVTLDAGLVYDAYLAPNNLKPVVAEFYGSKEDPQTFYYAV | |
| | AVVKKDSGFQMNQLRGKKSCHTGLGRSAGWNIPIGLLYCDLPEPRKPLE | |
| | KAVANFFSGSCAPCADGTDFPQLCQLCPGCGCSTLNQYFGYSGAFKCLK | |
| | DGAGDVAFVEHSTIFENLANKADRDQYELLCLDNTRKPVDEYKDCHLAQ | |
| | VPSHTVVARSMGGKEDLIWELLNQAQEHFGKDKSKEFQLFSSPHGKDLL | |
| | FKDSAHGFLKVPPRMDAKMYLGYEYVTAIRNLREGTCPEAPTDECKPVK | |
| | WCALSHHERLKCDEWSVNSVGKIECVSAETTEDCIAKIMNGEADAMSLD | |
| | GGFVYIAGKCGLVPVLAENYNKSDNCEDTPEAGYFAVAVVKKSASDLTW | |
| | DNLKGKKSCHTAVGRTAGWNIPMGLLYNKINHCRFDEFFSEGCAPGSKK | |
| | DSSLCKLCMGSGLNLCEPNNKEGYYGYTGAFRCLVEKGDVAFVAHQTVP | |
| | QNTGGKNPDPWAKNLNEKDYELLCLDGTRKPVEEYANCHLARAPNHAVV | |
| | TRKDKEACVHKILRQQQHLFGSNVTDCSGNFCLFRSETKDLLERDDTVC | |
| | LAKLHDRNTYEKYLGEEYVKAVGNLRKCSTSSLLEACTERRP | |

[0444] In some embodiments, the TFR targeting moiety comprises a TF variant (e.g., a hTF variant) (or a functional fragment or variant thereof). In some embodiments, TF variant (or the functional fragment or variant thereof) comprises or consists of an amino acid sequence at least 85%, 86%, 87%, 88%, 89%, 90%, 91%, 92%, 93%, 94%, 95%, 96%, 97%, 98%, 99%, or 100% identical to the amino acid sequence of a TF variant set forth in Table 12, wherein the amino acid sequence of the TF variant comprises at least one amino acid variation compared to the amino acid sequence of a reference TF protein (e.g., SEQ ID NO: 3283). In some embodiments, TF variant (or the functional fragment or variant thereof) comprises or consists of an amino acid sequence at least 85%, 86%, 87%, 88%, 89%, 90%, 91%, 92%, 93%, 94%, 95%, 96%, 97%, 98%, 99%, or 100% identical to the amino acid sequence set forth in any one of SEQ ID NOS: 3200-3208, wherein the amino acid sequence of the TF variant comprises at least one amino acid variation compared to the amino acid sequence of a reference TF protein (e.g., SEQ ID NO: 3283).

### Heterologous Moieties

[0445] In some embodiments, the TF (e.g., hTF) is operably connected to a heterologous moiety (e.g., an Fc region (e.g., an Fc region described herein (e.g., described herein). In some embodiments, the heterologous moiety is a half-life extension moiety. Exemplary half-life extension moieties include, but are not limited to, an immunoglobulin (e.g., human Ig (hIg)), a fragment of an Ig (e.g., hIg), an Ig (e.g., hIg) constant region, a fragment of an Ig (e.g., hIg) constant region, an Ig (e.g., hIg) Fc region, human serum albumin (HSA), an HSA binding protein or peptide, and polyethylene glycol (PEG) (and polymers thereof). In some embodiments, the heterologous polypeptide is a half-life extension polypeptide. Exemplary half-life extension polypeptides include, but are not limited to, an Ig, a fragment of an Ig, one or more Ig heavy chain constant region, a fragment of an Ig constant region, an Ig Fc region, a hIg, a fragment of a hIg, one or more hIg heavy chain constant region, a fragment of a hIg constant region, a hIg Fc region, human serum albumin (HSA), and an HSA binding protein or peptide. The immunomodulatory protein or polypeptide described herein fused or conjugated to a half-life extending moiety or a half-life extending moiety can be evaluated for their pharmacokinetic properties utilizing standard in vivo methods known in the art.

[0446] In some embodiments, the heterologous moiety is a heterologous polypeptide. In some embodiments, the heterologous polypeptide comprises one or more Ig heavy chain constant region (e.g., a CH2 region, a CH3 region, a hinge region, an Fc region). In some embodiments, the Ig is an IgG. In some embodiments, the IgG is IgG1, IgG2, IgG3, or IgG4.

[0447] In some embodiments, the heterologous polypeptide comprises or consists of an IgG CH2 region and an IgG CH3 region. In some embodiments, the heterologous polypeptide comprises or consists of a partial IgG hinge region, IgG CH2 region, and IgG CH3 region. In some embodiments, the heterologous polypeptide comprises or consists of an IgG hinge region, IgG CH2 region, and IgG CH3 region. In some embodiments, the heterologous polypeptide comprises or consists of an IgG1 CH2 region and an IgG1 CH3 region. In some embodiments, the heterologous polypeptide comprises or consists of a partial IgG1 hinge region, IgG1 CH2 region, and IgG1 CH3 region. In some embodiments, the heterologous polypeptide comprises or consists of an IgG1 hinge region, IgG1 CH2 region, and IgG1 CH3 region. In some embodiments, the heterologous polypeptide comprises or consists of an IgG4 CH2 region and an IgG4 CH3 region. In some embodiments, the heterologous polypeptide comprises or consists of a partial IgG4 hinge region, IgG4 CH2 region, and IgG4 CH3 region. In some embodiments, the heterologous polypeptide comprises or consists of an IgG4 hinge region, IgG4 CH2 region, and IgG4 CH3 region.

[0448] In some embodiments, the heterologous polypeptide comprises or consists of an Ig Fc region. In some embodiments, the Ig Fc region comprises or consists of at least a portion of a hinge region, a CH2 region, and a CH3 region. In some embodiments, the Ig Fc region comprises or consists of a hinge region, a CH2 region, and a CH3 region. In some embodiments, the Ig Fc region comprises or consists of at least a portion of an IgG hinge region, an IgG CH2 region, and an IgG CH3 region. In some embodiments, the Ig Fc region comprises or consists of an IgG hinge region, an IgG CH2 region, and an IgG CH3 region. In some embodiments, the Ig Fc region comprises or consists of at least a portion of an IgG1 hinge region, an IgG1 CH2 region, and an IgG1 CH3 region. In some embodiments, the Ig Fc region comprises or consists of an IgG1 hinge region, an IgG1 CH2 region, and an IgG1 CH3 region. In some embodiments, the Ig Fc region comprises or consists of at least a portion of an IgG4 hinge region, an IgG4 CH2 region, and an IgG4 CH3 region. In some embodiments, the Ig Fc region comprises or consists of an IgG4 hinge region, an IgG4 CH2 region, and an IgG4 CH3 region.

[0449] In some embodiments, the heterologous polypeptide comprises one or more hIg heavy chain constant regions (e.g., a CH2 region, a CH3 region, a hinge region, an Fc region). In some embodiments, the hIg is a human IgG (hIgG). In some embodiments, the hIgG is hIgG1, IgG2, IgG3, or IgG4. In some embodiments, the hIgG is IgG1 or IgG4. In some embodiments, the hIgG is hIgG1. In some embodiments, the hIgG is hIgG4.

[0450] In some embodiments, the heterologous polypeptide comprises or consists of a hIgG CH2 region and a hIgG CH3 region. In some embodiments, the heterologous polypeptide comprises or consists of a partial hIgG hinge region, hIgG CH2 region, and hIgG CH3 region. In some embodiments, the heterologous polypeptide comprises or consists of a hIgG hinge region, hIgG CH2 region, and hIgG CH3 region. In some embodiments, the heterologous polypeptide comprises or consists of a hIgG1 CH2 region and a hIgG1 CH3 region. In some embodiments, the heterologous polypeptide comprises or consists of a partial hIgG1 hinge region, hIgG1 CH2 region, and hIgG1 CH3 region. In some embodiments, the heterologous polypeptide comprises or consists of a hIgG1 hinge region, hIgG1 CH2 region, and hIgG1 CH3 region. In some embodiments, the heterologous polypeptide comprises or consists of a hIgG4 CH2 region and a hIgG4 CH3 region. In some embodiments, the heterologous polypeptide comprises or consists of a partial hIgG4 hinge region, hIgG4 CH2 region, and hIgG4 CH3 region. In some embodiments, the heterologous polypeptide comprises or consists of a hIgG4 hinge region, hIgG4 CH2 region, and hIgG4 CH3 region.

[0451] In some embodiments, the heterologous polypeptide comprises or consists of a hIg Fc region. In some embodiments, the hIg Fc region comprises or consists of at least a portion of a hinge region, a CH2 region, and a CH3 region. In some embodiments, the hIg Fc region comprises or consists of a hinge region, a CH2 region, and a CH3 region. In some embodiments, the hIg Fc region comprises or consists of at least a portion of a hIgG hinge region, a hIgG CH2 region, and a hIgG CH3 region. In some embodiments, the hIg Fc region comprises or consists of a hIgG hinge region, a hIgG CH2 region, and a hIgG CH3 region. In some embodiments, the hIg Fc region comprises or consists of at least a portion of a hIgG1 hinge region, a hIgG1 CH2 region, and a hIgG1 CH3 region. In some embodiments, the hIg Fc region comprises or consists of a hIgG1 hinge region, a hIgG1 CH2 region, and a hIgG1 CH3 region. In some embodiments, the hIg Fc region comprises or consists of at least a portion of a hIgG4 hinge region, a hIgG4 CH2 region, and a hIgG4 CH3 region. In some embodiments, the hIg Fc region comprises or consists of a hIgG4 hinge region, a hIgG4 CH2 region, and a hIgG4 CH3 region.

### TFR Binding Peptides and Antibody-Like Scaffolds

[0452] In some embodiments, the TFR targeting moiety comprises a peptide that specifically binds TFR (e.g., hTFR). TFR (e.g., hTFR (e.g., hTFR1)) binding peptides that can be employed in the conjugates described herein are known in the art. For example, see, e.g., U.S. Pat. Nos. 6,743,893 and 8,399,653, the entire contents of each of which is incorporated herein by reference for all purposes.

[0453] In some embodiments, the TFR targeting moiety comprises an antibody-like scaffold. Anti-TFR antibody like scaffolds that can be employed in the conjugates described herein are known in the art. See, e.g., WO2023023031 (describing anti-TFR cysteine dense peptides) and WO2021076546 (describing TFR binding fibronectin type III domains), the entire contents of each of which is incorporated herein by reference for all purposes.

### Exemplary TFR Binding Peptides and Antibody-Like Scaffolds

[0454] The amino acid sequence of exemplary TFR specific antibody like scaffolds is provided in Table 13.

TABLE 13
The Amino Acid Sequence of Exemplary TFR Specific Peptides and Antibody
Like Scaffolds.

| | | SEQ |
|---|---|---|
| Description | Amino Acid Sequence | ID NO |
| TFR Binding Peptides (see, e.g., US6743893 and US8399653) | | |
| A | HAIYPRH | 3293 |
| B | THRPPMWSPVWP | 3294 |
| C | GGGDIMGEWGNEIFGAIAGFLGGGRRRRRRRRR | 3295 |
| TFR Binding Cysteine Dense Peptides (see, e.g., WO2023023031) | | |
| A | REGCASRCTKYNAELEKCEARVSSMSNTEETCVQELFDLLHCVDHCVSQ | 3296 |
| B | REGCASRCTKYNAELEKCEARVMSMSNTEEDCEQELEDLLHCLDHCHSQ | 3297 |
| C | REGCASRCTKYNAELEKCEARVVSMSNTEEDCEQELEDLLHCLDHCHSQ | 3298 |
| D | REGCASRCTKYNAELEKCEARVMSMSNTEETCEQELEDLLHCLDHCHSQ | 3299 |
| E | REGCASRCTKYNAELEKCEARVMSMSNTEEDCVQELEDLLHCLDHCHSQ | 3300 |
| F | REGCASRCTKYNAELEKCEARVMSMSNTEEDCEQELFDLLHCLDHCHSQ | 3301 |
| G | REGCASRCTKYNAELEKCEARVMSMSNTEEDCEQELEDLLHCVDHCHSQ | 3302 |
| H | REGCASRCTKYNAELEKCEARVMSMSNTEEDCEQELEDLLHCLDHCVSQ | 3303 |
| I | REGCASRCTKYNAELEKCEARVVSMSNTEETCEQELEDLLHCLDHCHSQ | 3304 |
| J | REGCASRCTKYNAELEKCEARVVSMSNTEEDCVQELEDLLHCLDHCHSQ | 3305 |
| K | REGCASRCTKYNAELEKCEARVVSMSNTEEDCEQELFDLLHCLDHCHSQ | 3306 |
| L | REGCASRCTKYNAELEKCEARVVSMSNTEEDCEQELEDLLHCVDHCHSQ | 3307 |
| M | REGCASRCTKYNAELEKCEARVVSMSNTEEDCEQELEDLLHCLDHCVSQ | 3308 |
| N | REGCASRCTKYNAELEKCEARVMSMSNTEETCVQELEDLLHCLDHCHSQ | 3309 |
| O | REGCASRCTKYNAELEKCEARVMSMSNTEETCEQELFDLLHCLDHCHSQ | 3310 |
| P | REGCASRCTKYNAELEKCEARVMSMSNTEETCEQELEDLLHCVDHCHSQ | 3311 |
| Q | REGCASRCTKYNAELEKCEARVMSMSNTEETCEQELEDLLHCLDHCVSQ | 3312 |
| R | REGCASRCTKYNAELEKCEARVMSMSNTEEDCVQELFDLLHCLDHCHSQ | 3313 |
| S | REGCASRCTKYNAELEKCEARVMSMSNTEEDCVQELEDLLHCVDHCHSQ | 3314 |
| T | REGCASRCTKYNAELEKCEARVMSMSNTEEDCVQELEDLLHCLDHCVSQ | 3315 |
| U | REGCASRCTKYNAELEKCEARVMSMSNTEEDCEQELFDLLHCVDHCHSQ | 3316 |
| V | REGCASRCTKYNAELEKCEARVMSMSNTEEDCEQELFDLLHCLDHCVSQ | 3317 |
| W | REGCASRCTKYNAELEKCEARVMSMSNTEEDCEQELEDLLHCVDHCVSQ | 3318 |
| X | REGCASRCMKYNAELEKCEARVMSMSNTEEDCEQELEDLLHCLDHCHSQ | 3319 |
| Y | REGCASRCTKYNDELEKCEARVMSMSNTEEDCEQELEDLLHCLDHCHSQ | 3320 |
| Z | REGCASRCTKYNAELEKCEARMMSMSNTEEDCEQELEDLLHCLDHCHSQ | 3321 |

TFR binding fibronectin type IIIdomains (see, e.g., WO2021076546)

| | | |
|---|---|---|
| A | MLPAPKNLVVSRVTEDSARLSWTAPDAAFDSFVIEYREGAWYGEAIV | 3322 |
| | LTVPGSERSYDLIGLKPGTEYAVYIPGVKGGPRSFPLSAIFTT | |
| B | MLPAPKNLVVSRVTEDSARLSWTAPDAAFDSFAIAYVEWWKLGEAIV | 3323 |
| | LTVPGSERSYDLTGLKPGTEYVVPIPGVKGGGHSSPLSAIFTT | |
| C | MLPAPKNLVVSRVTEDSARLSWTAPDAAFDSFYIYYYESSGTGEAIVLT | 3324 |
| | VPGSERSYDLTGLKPGTEYFVDIGGVKGGSYSLPLSAIFTT | |
| D | MLPAPKNLVVSRVTEDSARLSWTAPDAAFDSFPIYYWEVFPAGEAIEL | 3325 |
| | DVPGSERSYDLTGLKPGTEYFVRIEGVKGGASSYPLRAEFTT | |
| E | MLPAPKNLVVSRVTEDSARLSWTAPDAAFDSFFIWYWEKSVDGEAIV | 3326 |
| | LTVPGSERSYDLTGLKPGTEYNVGIQGVKGGTPSDPLSAIFTT | |
| F | MLPAPKNLVVSRVTEDSARLSWTAPDAAFDSFIIWYAEWVNDGEAIV | 3327 |
| | LTVPGSERSYDLIGLKPGTEYRVEITGVKGGTWSRPLSAIFTT | |
| G | MLPAPKNLVVSRVTEDSARLSWTAPDAAFDSFAIEYYEPVPAGEAIYL | 3328 |
| | DVPGSERSYDLTGLKPGTEYDVTIYGVKGGYYSHPLFASFTT | |
| H | MLPAPKNLVVSRVTEDSARLSWTAPDAAFDSFWIEYFEWTVGGEAIV | 3329 |
| | LTVPGSERSYDLTGLKPGTEYYVSIYGVKGGWLSPPLSAIFTT | |
| I | MLPAPKNLVVSRVTEDSARLSWTAPDAAFDSFHISYEETPVVGEAIYL | 3330 |
| | RVPGSERSYDLTGLKPGTEYTVAIHGVKGGRESTPLIAPFTT | |
| J | MLPAPKNLVVSRVTEDSARLSWTAPDAAFDSFTIHYWEFDPPGEAIV | 3331 |
| | LTVPGSERSYDLTGLKPGTEYTVYIEGVKGGWWSKPLSAIFTT | |
| K | MLPAPKNLVVSRVTEDSARLSWTAPDAAFDSFVIEYWERTQPGEAIV | 3332 |
| | LTVPGSERSYDLIGLKPGTEYDVWISGVKGGKWSEPLSAIFTT | |
| L | MLPAPKNLVVSRVTEDSARLSWTAPDAAFDSFLIRYWEWYVLGEAIV | 3333 |
| | LTVPGSERSYDLTGLKPGTEYYVEISGVKGGWQSWPLSAIFTT | |
| M | MLPAPKNLVVSRVTEDSARLSWTAPDAAFDSFYIGYLEPGDNGEAIVL | 3334 |
| | TVPGSERSYDLTGLKPGTEYNVSIGGVKGGLGSYPLSAIFTT | |
| N | MLPAPKNLVVSRITEDSARLSWTAPDAAFDSFGIYYYEWWSTGEAIVL | 3335 |
| | TVPGSERSYDLTGPKPGTEYYVKISGVKGGYRSYPLSAIFTT | |
| O | MLPAPKNLVVSRVTEDSARLSWTAPDAAFDSFRISYYEWYDLGEAIVL | 3336 |
| | TVPGSERSYDLTGLKPGTEYWVDIAGVKGGYYSYPLSAIFTT | |
| P | MLPAPKNLVVSRVTEDSARLSWTAPDAAFDSFFIGYLEPQPPGEAIVL | 3337 |
| | TVPGSERSYDLTGLKPGTEYNVTIQGVKGGFPSMPLSAIFTT | |
| Q | MLPAPKNLVVSRVTEDSARLSWTAPDAAFDSFFISYFEGWASGEAIHL | 3338 |
| | YVPGSERSYDLTGLKPGTEYSVHIQGVKGGQPSTPLSAIFTT | |
| R | MLPAPKNLVVSRITEDSARLSWTAPDAAFDSFDIPYGEFDTIGEAIVLT | 3339 |
| | VPGSERSYDLTGLKPGTEYDVYIEGVKGGHLSWPLSAIFTT | |
| S | MLPAPKNLVVSRVTEDSARLSWTAPDAAFDSFGIQYNEFVERGEAIVL | 3340 |
| | TVPGSERSYDLIGLKPGTEYFVPISGVKGGDDSRPLSAIFTT | |
| T | MLPAPKNLVVSRVTEDSARLSWTAPDAAFDSFWIEYWEVVGFGEAI | 3341 |
| | VLTVPGSERSYDLTGLKPGTEYWVGIYGVKGGNPSVPLSAIFTT | |

[0455] In some embodiments, the TFR targeting moiety comprises a TFR specific peptide or an antibody like scaffold (or a functional fragment or variant thereof). In some embodiments, the TFR targeting moiety comprises a TFR specific peptide (or a functional fragment or variant thereof). In some embodiments, the TFR specific peptide (or the functional fragment or variant thereof) comprises or consists of an amino acid sequence at least 85%, 86%, 87%, 88%, 89%, 90%, 91%, 92%, 93%, 94%, 95%, 96%, 97%, 98%, 99%, or 100% identical to the amino acid sequence of a TFR specific peptide (or the functional fragment or variant thereof) set forth in Table 13. In some embodiments, the TFR specific peptide (or the functional fragment or variant thereof) comprises or consists of an amino acid sequence at least 85%, 86%, 87%, 88%, 89%, 90%, 91%, 92%, 93%, 94%, 95%, 96%, 97%, 98%, 99%, or 100% identical to the amino acid sequence set forth in any one of SEQ ID NOS: 3293-3341. In some embodiments, the TFR targeting moiety comprises an antibody like scaffold (or a functional fragment or variant thereof). In some embodiments, the antibody like scaffold (or the functional fragment or variant thereof) comprises or consists of an amino acid sequence at least 85%, 86%, 87%, 88%, 89%, 90%, 91%, 92%, 93%, 94%, 95%, 96%, 97%, 98%, 99%, or 100% identical to the amino acid sequence of antibody like scaffold (or the functional fragment or variant thereof) set forth in Table 13. In some embodiments, the antibody like scaffold (or the functional fragment or variant thereof) comprises or consists of an amino acid sequence at least 85%, 86%, 87%, 88%, 89%, 90%, 91%, 92%, 93%, 94%, 95%, 96%, 97%, 98%, 99%, or 100% identical to the amino acid sequence set forth in any one of SEQ ID NOS: 3293-3341.

### Heterologous Moieties

[0456] In some embodiments, the TFR binding peptide or antibody-like scaffold is operably connected to a heterologous moiety (e.g., an Fc region (e.g., an Fc region described herein (e.g., described herein)). In some embodiments, the heterologous moiety is a half-life extension moiety. Exemplary half-life extension moieties include, but are not limited to, an immunoglobulin (e.g., human Ig (hIg)), a fragment of an Ig (e.g., hIg), an Ig (e.g., hIg) constant region, a fragment of an Ig (e.g., hIg) constant region, an Ig (e.g., hIg) Fc region human transferrin, human serum albumin (HSA), an HSA binding protein or peptide, and polyethylene glycol (PEG) (and polymers thereof). In some embodiments, the heterologous polypeptide is a half-life extension polypeptide. Exemplary half-life extension polypeptides include, but are not limited to, an Ig, a fragment of an Ig, one or more Ig heavy chain constant region, a fragment of an Ig constant region, an Ig Fc region, a hIg, a fragment of a hIg, one or more hIg heavy chain constant region, a fragment of a hIg constant region, a hIg Fc region, human serum albumin (HSA), and an HSA binding protein or peptide. The immunomodulatory protein or polypeptide described herein fused or conjugated to a half-life extending moiety or a half-life extending moiety can be evaluated for their pharmacokinetic properties utilizing standard in vivo methods known in the art.

[0457] In some embodiments, the heterologous moiety is a heterologous polypeptide. In some embodiments, the heterologous polypeptide comprises one or more Ig heavy chain constant region (e.g., a CH2 region, a CH3 region, a hinge region, an Fc region). In some embodiments, the Ig is an IgG. In some embodiments, the IgG is IgG1, IgG2, IgG3, or IgG4.

[0458] In some embodiments, the heterologous polypeptide comprises or consists of an IgG CH2 region and an IgG CH3 region. In some embodiments, the heterologous polypeptide comprises or consists of a partial IgG hinge region, IgG CH2 region, and IgG CH3 region. In some embodiments, the heterologous polypeptide comprises or consists of an IgG hinge region, IgG CH2 region, and IgG CH3 region. In some embodiments, the heterologous polypeptide comprises or consists of an IgG1 CH2 region and an IgG1 CH3 region. In some embodiments, the heterologous polypeptide comprises or consists of a partial IgG1 hinge region, IgG1 CH2 region, and IgG1 CH3 region. In some embodiments, the heterologous polypeptide comprises or consists of an IgG1 hinge region, IgG1 CH2 region, and IgG1 CH3 region. In some embodiments, the heterologous polypeptide comprises or consists of an IgG4 CH2 region and an IgG4 CH3 region. In some embodiments, the heterologous polypeptide comprises or consists of a partial IgG4 hinge region, IgG4 CH2 region, and IgG4 CH3 region. In some embodiments, the heterologous polypeptide comprises or consists of an IgG4 hinge region, IgG4 CH2 region, and IgG4 CH3 region.

[0459] In some embodiments, the heterologous polypeptide comprises or consists of an Ig Fc region. In some embodiments, the Ig Fc region comprises or consists of at least a portion of a hinge region, a CH2 region, and a CH3 region. In some embodiments, the Ig Fc region comprises or consists of a hinge region, a CH2 region, and a CH3 region. In some embodiments, the Ig Fc region comprises or consists of at least a portion of an IgG hinge region, an IgG CH2 region, and an IgG CH3 region. In some embodiments, the Ig Fc region comprises or consists of an IgG hinge region, an IgG CH2 region, and an IgG CH3 region. In some embodiments, the Ig Fc region comprises or consists of at least a portion of an IgG1 hinge region, an IgG1 CH2 region, and an IgG1 CH3 region. In some embodiments, the Ig Fc region comprises or consists of an IgG1 hinge region, an IgG1 CH2 region, and an IgG1 CH3 region. In some embodiments, the Ig Fc region comprises or consists of at least a portion of an IgG4 hinge region, an IgG4 CH2 region, and an IgG4 CH3 region. In some embodiments, the Ig Fc region comprises or consists of an IgG4 hinge region, an IgG4 CH2 region, and an IgG4 CH3 region.

[0460] In some embodiments, the heterologous polypeptide comprises one or more hIg heavy chain constant regions (e.g., a CH2 region, a CH3 region, a hinge region, an Fc region). In some embodiments, the hIg is a human IgG (hIgG). In some embodiments, the hIgG is hIgG1, IgG2, IgG3, or IgG4. In some embodiments, the hIgG is IgG1 or IgG4. In some embodiments, the hIgG is hIgG1. In some embodiments, the hIgG is hIgG4.

[0461] In some embodiments, the heterologous polypeptide comprises or consists of a hIgG CH2 region and a hIgG CH3 region. In some embodiments, the heterologous polypeptide comprises or consists of a partial hIgG hinge region, hIgG CH2 region, and hIgG CH3 region. In some embodiments, the heterologous polypeptide comprises or consists of a hIgG hinge region, hIgG CH2 region, and hIgG CH3 region. In some embodiments, the heterologous polypeptide comprises or consists of a hIgG1 CH2 region and a hIgG1 CH3 region. In some embodiments, the heterologous polypeptide comprises or consists of a partial hIgG1 hinge region, hIgG1 CH2 region, and hIgG1 CH3 region. In some embodiments, the heterologous polypeptide comprises or consists of a hIgG1 hinge region, hIgG1 CH2 region, and hIgG1 CH3 region. In some embodiments, the heterologous polypeptide comprises or consists of a hIgG4 CH2 region and a hIgG4 CH3 region. In some embodiments, the heterologous polypeptide comprises or consists of a partial hIgG4 hinge region, hIgG4 CH2 region, and hIgG4 CH3 region. In some embodiments, the heterologous polypeptide comprises or consists of a hIgG4 hinge region, hIgG4 CH2 region, and hIgG4 CH3 region.

[0462] In some embodiments, the heterologous polypeptide comprises or consists of a hIg Fc region. In some embodiments, the hIg Fc region comprises or consists of at least a portion of a hinge region, a CH2 region, and a CH3 region. In some embodiments, the hIg Fc region comprises or consists of a hinge region, a CH2 region, and a CH3 region. In some embodiments, the hIg Fc region comprises or consists of at least a portion of a hIgG hinge region, a hIgG CH2 region, and a hIgG CH3 region. In some embodiments, the hIg Fc region comprises or consists of a hIgG hinge region, a hIgG CH2 region, and a hIgG CH3 region. In some embodiments, the hIg Fc region comprises or consists of at least a portion of a hIgG1 hinge region, a hIgG1 CH2 region, and a hIgG1 CH3 region. In some embodiments, the hIg Fc region comprises or consists of a hIgG1 hinge region, a hIgG1 CH2 region, and a hIgG1 CH3 region. In some embodiments, the hIg Fc region comprises or consists of at least a portion of a hIgG4 hinge region, a hIgG4 CH2 region, and a hIgG4 CH3 region. In some embodiments, the hIg Fc region comprises or consists of a hIgG4 hinge region, a hIgG4 CH2 region, and a hIgG4 CH3 region.

### Anti-TFR (e.g., Anti-TFR1) Antibodies

[0463] In some embodiments, the TFR targeting moiety is an anti-TFR antibody (e.g., an anti-hTFR antibody) (e.g., an anti-hTFR1 antibody)). In some embodiments, the antibody comprises or consists of a full-length antibody, Fab, Fab′, F(ab′)2, Fab-Fc, scFv, scFv-Fc, (scFv)₂-Fc, Fv, a single domain antibody (sdAb) (e.g., a VHH), a sdAb-Fc (e.g., a VHH-Fc), (sdAb)₂ (e.g., a (VHH)₂, or a (sdAb)₂-Fc (e.g., (VHH)₂-Fc). In some embodiments, the antibody comprises or consists of a full-length antibody, Fab, Fab′, F(ab′)2, Fab-Fc, scFv, scFv-Fc, (scFv)₂-Fc, sdAb-Fc (e.g., a VHH-Fc), or (sdAb)₂-Fc (e.g., (VHH)₂-Fc). In some embodiments, the antibody comprises or consists of a full-length antibody. In some embodiments, the antibody comprises or consists of a Fab. In some embodiments, the antibody comprises or consists of a F(ab′)2. In some embodiments, the antibody comprises or consists of a Fab-Fc. In some embodiments, the antibody comprises or consists of a scFv-Fc. In some embodiments, the antibody comprises or consists of a (scFv)₂-Fc. In some embodiments, the antibody comprises or consists of a sdAb-Fc (e.g., a VHH-Fc). In some embodiments, the antibody comprises or consists of a o(sdAb)₂-Fc (e.g., (VHH)₂-Fc)

[0464] In some embodiments, the antibody is an IgG1, IgG2, IgG3, or IgG4 antibody. In some embodiments, the antibody is an IgG1 or IgG4 antibody. In some embodiments, the antibody is an IgG1 antibody. In some embodiments, the antibody is an IgG4 antibody. In some embodiments, the antibody is a hIgG1, hIgG2, hIgG3, or hIgG4 antibody. In some embodiments, the antibody is a hIgG1 or hIgG4 antibody. In some embodiments, the antibody is a hIgG1 antibody. In some embodiments, the antibody is a hIgG4 antibody.

### Exemplary Anti-TFR (e.g., Anti-TFR1) Antibodies

[0465] In some embodiments, the targeting moiety (e.g., the hematopoietic cell (e.g., erythroid precursor cell)-targeting moiety) comprises an anti-TFR antibody. Anti-hTFR1 antibodies that can be employed in the conjugates described herein are known in the art.

[0466] Exemplary anti-TFR1 antibodies known in the art that can be employed in the conjugates described herein include, but are not limited to, e.g., OKT9 (see, e.g., U.S. Pat. No. 4,364,934); M11, M23, M27, B84 (see, e.g., WO2015098989 and U.S. Pat. No. 9,994,641); 7A4, 8A2, 15D2, 10D11, 7B10, 15G11, 16G5, 13C3, 16G4, 16F6, 7G7, 4C2, 1B12, and 13D4 (see, e.g., WO2016081643 and U.S. Pat. No. 9,708,406); 8D3 (see, e.g., US2010/077498 and Lee et al. “Targeting Rat Anti-8D3 Mouse Transferrin Receptor Monoclonal Antibodies through Blood-Brain Barrier in Mouse” 2000, J Pharmacol. Exp. Ther., 292: 1048-1052); OX26 (see, e.g., Haobam, B. et al. 2014. Rab17-mediated recycling endosomes contribute to autophagosome formation in response to Group A Streptococcus invasion. Cellular microbiology. 16: 1806-21); DF1513 (see, e.g., Ortiz-Zapater E et al. Trafficking of the human transferrin receptor in plant cells: effects of tyrphostin A23 and brefeldin A. Plant J 48:757-70 (2006)); the following commercially available clones (e.g., Novus Biologicals) 1A1B2,661G1, MEM-189, JF0956, 29806, 1A1B2, TFRC/1818, 1E6, 66Ig10, TFRC/1059, Q1/71, 23D10, 13E4, TFRC/1149, ER-MP21, YTA74.4, BU54, 2B6, RI7 217; BA120g (see, e.g., US20110311544A1 and U.S. Pat. No. 7,572,895); B3/25 and T58/30 (see, e.g., Trowbridge, I. S. et al. “Anti-transferrin receptor monoclonal antibody and toxin-antibody conjugates affect growth of human tumour cells.” Nature, 1981, volume 294, pages 171-173); the following commercially available clones (e.g., BioXcell) R17 217.1.3, 5E9C11, OKT9 (BE0023 clone), BK19.9, B3/25, T56/14 and T58/1 (see, e.g., Gatter, K. C. et al. “Transferrin receptors in human tissues: their distribution and possible clinical relevance.” J Clin Pathol. 1983 May; 36(5):539-45); 5E9C11; R17 217.1.3 (available from BioXcell), BE0175 (available from BioXcell); the entire contents of each of which is incorporated herein by reference for all purposes.

[0467] Exemplary anti-TFR (e.g., hTFR (e.g., hTFR1)) antibodies that can be employed in the conjugates described herein are described in e.g., WO2023283531; WO2021154477A1; WO2020132584A1; WO2021154476A1; WO2021150382A1; WO2023023031A2; WO2021146256A1; WO2021142275A1; US20220017635A1; WO2016207240A1; U.S. Pat. No. 11,267,896B2; US20220143206A1, U.S. Pat. No. 11,028,179B2; U.S. Pat. No. 11,286,305B2; WO2023087017A1; WO2023086864A1; WO2023044398A1; WO2023039611A2; WO2023034409A1; WO2023283623A1; WO2023283624A2; WO2023283619A2; WO2023283620A1; WO2023283615A1; WO2023283613A1; WO2023283614A2; U.S. Pat. No. 11,672,872B2; U.S. Pat. No. 11,648,318B2; WO2022271549A1; WO2022201122A1; WO2022174114A1; WO2022026152A2; WO2022020107A1; WO2022020106A1; WO2022020105A1; WO2022020108A; WO2022020109A1; WO2021205358A1; US20230174646A1; US20210299266A1; WO2021195469A1; U.S. Pat. No. 11,446,387B2; US20220409735A1; US20210301290A1; US20210369762A1; U.S. Pat. No. 11,525,137B2; U.S. Pat. No. 11,555,190B2; U.S. Pat. No. 11,111,308B2; U.S. Pat. No. 10,550,188B2; U.S. Pat. No. 10,508,151B2; US20160208008A1; US20150291697A1; US20130171061A1; U.S. Pat. No. 9,562,230B2; U.S. Pat. No. 7,976,841B2; U.S. Pat. No. 4,364,934; WO2015098989; U.S. Pat. No. 9,994,641; WO2016081643; U.S. Pat. No. 9,708,406; US2010077498; US20110311544; U.S. Pat. No. 7,572,895; WO2019075417; US20060286030A1; US20190240346A1; US20130216476A1; WO2023283531; US20130177579A1; U.S. Pat. No. 9,598,496B2; US20130045206A1; US20060039908A1; U.S. Pat. Nos. 6,015,555A; 6,008,326A; 5,648,469A; EP79696B1; WO2023034409A1; U.S. Pat. Nos. 4,364,934; 8,409,573; 9,708,406; 9,611,323; WO2015098989; Schneider C. et al. “Structural features of the cell surface receptor for transferrin that is recognized by the monoclonal antibody OKT9.” J Biol Chem. 1982, 257:14, 8516-8522; Lee et al. “Targeting Rat Anti-Mouse Transferrin Receptor Monoclonal Antibodies through Blood-Brain Barrier in Mouse” 2000, J Pharmacol. Exp. Ther., 292: 1048-1052; Lee et al. “Targeting Rat Anti-8D3 Mouse Transferrin Receptor Monoclonal Antibodies through Blood-Brain Barrier in Mouse” 2000, J Pharmacol. Exp. Ther., 292: 1048-1052; Haobam, B. et al. 2014. Rab17-mediated recycling endosomes contribute to autophagosome formation in response to Group A Streptococcus invasion. Cellular microbiology. 16: 1806-21; Ortiz-Zapater E et al. Trafficking of the human transferrin receptor in plant cells: effects of tyrphostin A23 and brefeldin A. Plant J 48:757-70 (2006); Trowbridge, I. S. et al. “Anti-transferrin receptor monoclonal antibody and toxin-antibody conjugates affect growth of human tumour cells.” Nature, 1981, volume 294, pages 171-173; Gatter, K. C. et al. “Transferrin receptors in human tissues: their distribution and possible clinical relevance.” J Clin Pathol. 1983 May; 36(5):539-4; the entire contents of each of which are incorporated herein by reference for all purposes.

[0468] The amino acid sequence of exemplary anti-hTFR antibodies that can be utilized in the conjugates described herein is provided in Table 14. The CDRs of the anti-hTFR antibodies in Table 14, are denoted according to Kabat. A person of ordinary skill in the art would be able to determine the CDRs as defined by another scheme, e.g., Chothia, IMGT, using ordinary methods known in the art.

TABLE 14
The Amino Acid Sequence of Exemplary Anti-hTFR Antibodies.

| | | SEQ ID | |
|---|---|---|---|
| Description | | NO | Amino Acid Sequence |
| Full-Length anti- | VH CDR1 | 3342 | NYWLG |
| TFR1 mAb2 | VH CDR2 | 3343 | DIYPGGDYPTYSEKFKV |
| | VH CDR3 | 3344 | SGNYDEVAY |
| | VL CDR1 | 3345 | RSSQSLVHSNGNTYLH |
| | VL CDR2 | 3346 | KVSNRFS |
| | VL CDR3 | 3347 | SQSTHVPWT |
| | VH | 3348 | EVQLVQSGAEVKKPGESLKISCKGSGYSFMNYWLGWVRQMP |
| | | | GKGLEWMGDIYPGGDYPTYSEKFKVQVTISADKSISTAYLQ |
| | | | LSSLKASDTAMYYCARSGNYDEVAYWGQGTLVTVSS |
| | VL | 3349 | DIVMTQTPLSLSVTPGQPASISCRSSQSLVHSNGNTYLHWY |
| | | | LQKPGQSPQLLIYKVSNRFSGVPDRFSGSGSGTDFTLKISR |
| | | | VEAEDVGVYYCSQSTHVPWTFGQGTKVEIK |
| | HC Immature | 3350 | MGWSCIILFLVATATGVHSEVQLVQSGAEVKKPGESLKISC |
| | Sigal | | KGSGYSFMNYWLGWVRQMPGKGLEWMGDIYPGGDYPTYSEK |
| | Sequence | | FKVQVTISADKSISTAYLQLSSLKASDTAMYYCARSGNYDE |
| | Underlined | | VAYWGQGTLVTVSSASTKGPSVFPLAPCSRSTSESTAALGC |
| | | | LVKDYFPEPVTVSWNSGALTSGVHTFPAVLQSSGLYSLSSV |
| | | | VTVPSSSLGTKTYTCNVDHKPSNTKVDKRVESKYGPPCPPC |
| | | | PAPEFEGGPSVFLFPPKPKDTLMISRTPEVTCVVVDVSQED |
| | | | PEVQFNWYVDGVEVHNAKTKPREEQFNSTYRVVSVLTVLHQ |
| | | | DWLNGKEYKCKVSNKGLPSSIEKTISKAKGQPREPQVYTLP |
| | | | PSQEEMTKNQVSLTCLVKGFYPSDIAVEWESNGQPENNYKT |
| | | | TPPVLDSDGSFFLYSRLTVDKSRWQEGNVFSCSVMHEALHN |
| | | | HYTQKSLSLSLG |
| | LC Immature | 3351 | MGWSCIILFLVATATGVHSDIVMTQTPLSLSVTPGQPASIS |
| | Sigal | | CRSSQSLVHSNGNTYLHWYLQKPGQSPQLLIYKVSNRFSGV |
| | Sequence | | PDRFSGSGSGTDFTLKISRVEAEDVGVYYCSQSTHVPWTFG |
| | Underlined | | QGTKVEIKRTVAAPSVFIFPPSDEQLKSGTASVVCLLNNFY |
| | | | PREAKVQWKVDNALQSGNSQESVTEQDSKDSTYSLSSTLTL |
| | | | SKADYEKHKVYACEVTHQGLSSPVTKSFNRGEC |
| | HC Mature | 3352 | EVQLVQSGAEVKKPGESLKISCKGSGYSFMNYWLGWVRQMP |
| | | | GKGLEWMGDIYPGGDYPTYSEKFKVQVTISADKSISTAYLQ |
| | | | LSSLKASDTAMYYCARSGNYDEVAYWGQGTLVTVSSASTKG |
| | | | PSVFPLAPCSRSTSESTAALGCLVKDYFPEPVTVSWNSGAL |
| | | | TSGVHTFPAVLQSSGLYSLSSVVTVPSSSLGTKTYTCNVDH |
| | | | KPSNTKVDKRVESKYGPPCPPCPAPEFEGGPSVFLFPPKPK |
| | | | DTLMISRTPEVTCVVVDVSQEDPEVQFNWYVDGVEVHNAKT |
| | | | KPREEQFNSTYRVVSVLTVLHQDWLNGKEYKCKVSNKGLPS |
| | | | SIEKTISKAKGQPREPQVYTLPPSQEEMTKNQVSLTCLVKG |
| | | | FYPSDIAVEWESNGQPENNYKTTPPVLDSDGSFFLYSRLTV |
| | | | DKSRWQEGNVFSCSVMHEALHNHYTQKSLSLSLG |
| | LC Mature | 3353 | DIVMTQTPLSLSVTPGQPASISCRSSQSLVHSNGNTYLHWY |
| | | | LQKPGQSPQLLIYKVSNRFSGVPDRFSGSGSGTDFTLKISR |
| | | | VEAEDVGVYYCSQSTHVPWTFGQGTKVEIKRTVAAPSVFIF |
| | | | PPSDEQLKSGTASVVCLLNNFYPREAKVQWKVDNALQSGNS |
| | | | QESVTEQDSKDSTYSLSSTLTLSKADYEKHKVYACEVTHQG |
| | | | LSSPVTKSFNRGEC |
| Full-Length anti- | VH CDR1 | 3354 | SYWMH |
| TFR1 mAb3 | VH CDR2 | 3355 | EINPINGRTNYIEKFKS |
| | VH CDR3 | 3356 | GTRAYHY |
| | VL CDR1 | 3357 | RASDNLYSNLA |
| | VL CDR2 | 3358 | DATNLAD |
| | VL CDR3 | 3359 | QHFWGTPLT |
| | VH | 3360 | EVQLVQSGAEVKKPGASVKVSCKASGYTFTSYWMHWVRQAP |
| | | | GQRLEWIGEINPTNGRTNYIEKFKSRATLTVDKSASTAYME |
| | | | LSSLRSEDTAVYYCARGTRAYHYWGQGTMVTVSS |
| | VL | 3361 | DIQMTQSPSSLSASVGDRVTITCRASDNLYSNLAWYQQKPG |
| | | | KSPKLLVYDATNLADGVPSRFSGSGSGTDYSLKINSLQSED |
| | | | FGTYYCQHFWGTPLTFGAGTKLELKRTV |
| | HC Immature | 3362 | MGWSCIILFLVATATGVHSEVQLVQSGAEVKKPGASVKVSC |
| | Sigal | | KASGYTFTSYWMHWVRQAPGQRLEWIGEINPTNGRTNYIEK |
| | Sequence | | FKSRATLTVDKSASTAYMELSSLRSEDTAVYYCARGTRAYH |
| | Underlined | | YWGQGTMVTVSSASTKGPSVFPLAPCSRSTSESTAALGCLV |
| | | | KDYFPEPVTVSWNSGALTSGVHTFPAVLQSSGLYSLSSVVT |
| | | | VPSSSLGTKTYTCNVDHKPSNTKVDKRVESKYGPPCPPCPA |
| | | | PEFEGGPSVFLFPPKPKDTLMISRTPEVTCVVVDVSQEDPE |
| | | | VQFNWYVDGVEVHNAKTKPREEQFNSTYRVVSVLTVLHQDW |
| | | | LNGKEYKCKVSNKGLPSSIEKTISKAKGQPREPQVYTLPPS |
| | | | QEEMTKNQVSLTCLVKGFYPSDIAVEWESNGQPENNYKTTP |
| | | | PVLDSDGSFFLYSRLTVDKSRWQEGNVFSCSVMHEALHNHY |
| | | | TQKSLSLSLG |
| | LC Immature | 3363 | MGWSCIILFLVATATGVHSDIQMTQSPSSLSASVGDRVTIT |
| | Sigal | | CRASDNLYSNLAWYQQKPGKSPKLLVYDATNLADGVPSRFS |
| | Sequence | | GSGSGTDYSLKINSLQSEDFGTYYCQHFWGTPLTFGAGTKL |
| | Underlined | | ELKRTVAAPSVFIFPPSDEQLKSGTASVVCLLNNFYPREAK |
| | | | VQWKVDNALQSGNSQESVTEQDSKDSTYSLSSTLTLSKADY |
| | | | EKHKVYACEVTHQGLSSPVTKSFNRGEC |
| | HC Mature | 3364 | EVQLVQSGAEVKKPGASVKVSCKASGYTFTSYWMHWVRQAP |
| | | | GQRLEWIGEINPTNGRTNYIEKFKSRATLTVDKSASTAYME |
| | | | LSSLRSEDTAVYYCARGTRAYHYWGQGTMVTVSSASTKGPS |
| | | | VFPLAPCSRSTSESTAALGCLVKDYFPEPVTVSWNSGALTS |
| | | | GVHTFPAVLQSSGLYSLSSVVTVPSSSLGTKTYTCNVDHKP |
| | | | SNTKVDKRVESKYGPPCPPCPAPEFEGGPSVFLFPPKPKDT |
| | | | LMISRTPEVTCVVVDVSQEDPEVQFNWYVDGVEVHNAKTKP |
| | | | REEQFNSTYRVVSVLIVLHQDWLNGKEYKCKVSNKGLPSSI |
| | | | EKTISKAKGQPREPQVYTLPPSQEEMTKNQVSLTCLVKGFY |
| | | | PSDIAVEWESNGQPENNYKTTPPVLDSDGSFFLYSRLTVDK |
| | | | SRWQEGNVFSCSVMHEALHNHYTQKSLSLSLG |
| | LC Mature | 3365 | DIQMTQSPSSLSASVGDRVTITCRASDNLYSNLAWYQQKPG |
| | | | KSPKLLVYDATNLADGVPSRFSGSGSGTDYSLKINSLQSED |
| | | | FGTYYCQHFWGTPLTFGAGTKLELKRTVAAPSVFIFPPSDE |
| | | | QLKSGTASVVCLLNNFYPREAKVQWKVDNALQSGNSQESVT |
| | | | EQDSKDSTYSLSSTLTLSKADYEKHKVYACEVTHQGLSSPV |
| | | | TKSFNRGEC |
| Anti-TFR1 Fab | VH CDR1 | 3354 | SYWMH |
| | VH CDR2 | 3355 | EINPTNGRTNYIEKFKS |
| | VH CDR3 | 3356 | GTRAYHY |
| | VL CDR1 | 3357 | RASDNLYSNLA |
| | VL CDR2 | 3358 | DATNLAD |
| | VL CDR3 | 3359 | QHFWGTPLT |
| | | 3360 | EVQLVQSGAEVKKPGASVKVSCKASGYTFTSYWMHWVRQAP |
| | | | GQRLEWIGEINPINGRTNYIEKFKSRATLTVDKSASTAYME |
| | VH | | LSSLRSEDTAVYYCARGTRAYHYWGQGTMVTVSS |
| | VL | 3361 | DIQMTQSPSSLSASVGDRVTITCRASDNLYSNLAWYQQKPG |
| | | | KSPKLLVYDATNLADGVPSRFSGSGSGTDYSLKINSLQSED |
| | | | FGTYYCQHFWGTPLTFGAGTKLELKRTV |
| | HC Immature | 3362 | MGWSCIILFLVATATGVHSEVQLVQSGAEVKKPGASVKVSC |
| | Sigal | | KASGYTFTSYWMHWVRQAPGQRLEWIGEINPINGRTNYIEK |
| | Sequence | | FKSRATLTVDKSASTAYMELSSLRSEDTAVYYCARGTRAYH |
| | Underlined | | YWGQGTMVTVSSASTKGPSVFPLAPCSRSTSESTAALGCLV |
| | | | KDYFPEPVTVSWNSGALTSGVHTFPAVLQSSGLYSLSSVVT |
| | | | VPSSSLGTKTYTCNVDHKPSNTKVDKRV |
| | LC Immature | 3363 | MGWSCIILFLVATATGVHSDIQMTQSPSSLSASVGDRVTIT |
| | Sigal | | CRASDNLYSNLAWYQQKPGKSPKLLVYDATNLADGVPSRFS |
| | Sequence | | GSGSGTDYSLKINSLQSEDFGTYYCQHFWGTPLTFGAGTKL |
| | Underlined | | ELKRTVAAPSVFIFPPSDEQLKSGTASVVCLLNNFYPREAK |
| | | | VQWKVDNALQSGNSQESVTEQDSKDSTYSLSSTLTLSKADY |
| | | | EKHKVYACEVTHQGLSSPVTKSFNRGEC |
| | HC Mature | 3366 | EVQLVQSGAEVKKPGASVKVSCKASGYTFTSYWMHWVRQAP |
| | | | GQRLEWIGEINPTNGRTNYIEKFKSRATLTVDKSASTAYME |
| | | | LSSLRSEDTAVYYCARGTRAYHYWGQGTMVTVSSASTKGPS |
| | | | VFPLAPCSRSTSESTAALGCLVKDYFPEPVTVSWNSGALTS |
| | | | GVHTFPAVLQSSGLYSLSSVVTVPSSSLGTKTYTCNVDHKP |
| | | | SNTKVDKRV |
| | LC Mature | 3365 | DIQMTQSPSSLSASVGDRVTITCRASDNLYSNLAWYQQKPG |
| | | | KSPKLLVYDATNLADGVPSRFSGSGSGTDYSLKINSLQSED |
| | | | FGTYYCQHFWGTPLTFGAGTKLELKRTVAAPSVFIFPPSDE |
| | | | QLKSGTASVVCLLNNFYPREAKVQWKVDNALQSGNSQESVT |
| | | | EQDSKDSTYSLSSTLTLSKADYEKHKVYACEVTHQGLSSPV |
| | | | TKSFNRGEC |
| A | VH CDR1 | 3367 | SYWIG |
| (see, e.g., | VH CDR2 | 3368 | IIYPGDSDTRYSPSFQGQ |
| WO2021154477) | VH CDR3 | 3369 | FPYDSSGYYSFDY |
| | VL CDR1 | 3370 | RASQSISSYLN |
| | VL CDR2 | 3371 | AASSLQS |
| | VL CDR3 | 3372 | QQSYSTPLT |
| | VH | 3373 | QVQLVQSGAEVKKPGESLKISCKGSGYSFTSYWIGWVRQMP |
| | | | GKGLEWMGIIYPGDSDTRYSPSFQGQVTISADKSISTAYLQ |
| | | | WSSLKASDTAMYYCARFPYDSSGYYSFDYWGQGTLVTVSS |
| | VL | 3374 | DIQMTQSPSSLSASVGDRVTITCRASQSISSYLNWYQQKPG |
| | | | KAPKLLIYAASSLQSGVPSRFSGSGSGTDFTLTISSLQPED |
| | | | FATYYCQQSYSTPLTFGGGTKVEIK |
| B | VH CDR1 | 3375 | DDYMY |
| (see, e.g., | VH CDR2 | 3376 | WIDPENGDTEYASKFQD |
| WO2023283531) | VH CDR3 | 3377 | WLRRGLDY |
| | VL CDR1 | 3378 | RSSKSLLHSNGYTYLF |
| | VL CDR2 | 3379 | RMSNLAS |
| | VL CDR3 | 3380 | MQHLEYPFT |
| | VH murine | 3381 | EVQLQQSGAELVRPGASVKLSCTASGFNIKDDYMYWVKQRP |
| | | | EQGLEWIGWIDPENGDTEYASKFQDKATVTADTSSNTAYLQ |
| | | | LSSLTSEDTAVYYCTLWLRRGLDYWGQGTSVTVSS |
| | VH- | 3382 | EVQLVQSGSELKKPGASVKVSCTASGFNIKDDYMYWVRQPP |
| | Humanized | | GKGLEWIGWIDPENGDTEYASKFQDRVTVTADTSTNTAYME |
| | | | LSSLRSEDTAVYYCTLWLRRGLDYWGQGTLVTVSS |
| | VL | 3383 | DIVMTQAAPSVPVTPGESVSISCRSSKSLLHSNGYTYLFWF |
| | murine | | LQRPGQSPQLLIYRMSNLASGVPDRFSGSGSGTAFTLRISR |
| | | | VEAEDVGVYYCMQHLEYPFTFGGGTKLEIK |
| | VL- | 3384 | DIVMTQSPLSLPVTPGEPASISCRSSKSLLHSNGYTYLFWF |
| | Humanized | | QQRPGQSPRLLIYRMSNLASGVPDRFSGSGSGTDFTLKISR |
| | | | VEAEDVGVYYCMQHLEYPFTFGGGTKEIK |
| C | VH CDR1 | 3375 | DDYMY |
| (see, e.g., | VH CDR2 | 3385 | WIDPETGDTEYASKFQD |
| WO2023283531) | VH CDR3 | 3377 | WLRRGLDY |
| | VL CDR1 | 3378 | RSSKSLLHSNGYTYLF |
| | VL CDR2 | 3379 | RMSNLAS |
| | VL CDR3 | 3380 | MQHLEYPFT |
| | VH | 3386 | EVQLQQSGAELVRPGASVKLSCTASGFNIKDDYMYWVKQRP |
| | | | EQGLEWIGWIDPETGDTEYASKFQDKATVTADTSSNTAYLQ |
| | | | LSSLTSEDTAVYYCTLWLRRGLDYWGQGTSVTVSS |
| | VH- | 3387 | EVQLVQSGSELKKPGASVKVSCTASGFNIKDDYMYWVRQPP |
| | Humanized | | GKGLEWIGWIDPETGDTEYASKFQDRVTVTADTSTNTAYME |
| | | | LSSLRSEDTAVYYCTLWLRRGLDYWGQGTLVTVSS |
| | VL | 3383 | DIVMTQAAPSVPVTPGESVSISCRSSKSLLHSNGYTYLFWF |
| | | | LQRPGQSPQLLIYRMSNLASGVPDRFSGSGSGTAFTLRISR |
| | | | VEAEDVGVYYCMQHLEYPFTFGGGTKLEIK |
| | VL- | 3384 | DIVMTQSPLSLPVTPGEPASISCRSSKSLLHSNGYTYLFWF |
| | Humanized | | QQRPGQSPRLLIYRMSNLASGVPDRFSGSGSGTDFTLKISR |
| | | | VEAEDVGVYYCMQHLEYPFTFGGGTKEIK |
| D | VH CDR1 | 3375 | DDYMY |
| (see, e.g., | VH CDR2 | 3388 | WIDPESGDTEYASKFQD |
| WO2023283531) | VH CDR3 | 3377 | WLRRGLDY |
| | VL CDR1 | 3378 | RSSKSLLHSNGYTYLF |
| | VL CDR2 | 3379 | RMSNLAS |
| | VL CDR3 | 3380 | MQHLEYPFT |
| | VH | 3389 | EVQLQQSGAELVRPGASVKLSCTASGFNIKDDYMYWVKQRP |
| | | | EQGLEWIGWIDPESGDTEYASKFQDKATVTADTSSNTAYLQ |
| | | | LSSLTSEDTAVYYCTLWLRRGLDYWGQGTSVTVSS |
| | VH- | 3390 | EVQLVQSGSELKKPGASVKVSCTASGFNIKDDYMYWVRQPP |
| | Humanized | | GKGLEWIGWIDPESGDTEYASKFQDRVTVTADTSTNTAYME |
| | | | LSSLRSEDTAVYYCTLWLRRGLDYWGQGTLVTVSS |
| | VL | 3383 | DIVMTQAAPSVPVTPGESVSISCRSSKSLLHSNGYTYLFWF |
| | | | LQRPGQSPQLLIYRMSNLASGVPDRFSGSGSGTAFTLRISR |
| | | | VEAEDVGVYYCMQHLEYPFTFGGGTKLEIK |
| | VL- | 3384 | DIVMTQSPLSLPVTPGEPASISCRSSKSLLHSNGYTYLFWF |
| | Humanized | | QQRPGQSPRLLIYRMSNLASGVPDRFSGSGSGTDFTLKISR |
| | | | VEAEDVGVYYCMQHLEYPFTFGGGTKEIK |
| E | VH CDR1 | 3391 | SGYYWN |
| (see, e.g., | VH CDR2 | 3392 | YITFDGANNYNPSLKN |
| WO2023283531) | VH CDR3 | 3393 | SSYDYDVLDY |
| | VL CDR1 | 3394 | RASQDISNFLN |
| | VL CDR2 | 3395 | YTSRLHS |
| | VL CDR3 | 3396 | QQGHTLPYT |
| | VH | 3397 | DVQLQESGPGLVKPSQSLSLTCSVTGYSITSGYYWNWIRQF |
| | | | PGNKLEWMGYITFDGANNYNPSLKNRISITRDTSKNQFFLK |
| | | | LTSVTTEDTATYYCTRSSYDYDVLDYWGQGTTLTVSS |
| | VH- | 3398 | QVQLQESGPGLVKPSQTLSLTCSVTGYSITSGYYWNWIRQP |
| | Humanized 1 | | PGKGLEWMGYITFDGANNYNPSLKNRVSISRDTSKNQFSLK |
| | | | LSSVTAEDTATYYCTRSSYDYDVLDYWGQGTTVTVSS |
| | VH- | 3399 | QVQLQESGPGLVKPSQTLSLTCTVTGYSITSGYYWNWIRQP |
| | Humanized 2 | | PGKGLEWIGYITFDGANNYNPSLKNRVSISRDTSKNQFSLK |
| | | | LSSVTAEDTATYYCTRSSYDYDVLDYWGQGTTVTVSS |
| | VL | 3400 | DIQMTQTTSSLSASLGDRVTISCRASQDISNFLNWYQQRPD |
| | | | GTVKLLIYYTSRLHSGVPSRFSGSGSGTDFSLTVSNLEQED |
| | | | IATYFCQQGHTLPYTFGGGTKLEIK |
| | VL- | 3401 | DIQMTQSPSSLSASVGDRVTITCRASQDISNFLNWYQQKPG |
| | Humanized 1 | | QPVKLLIYYTSRLHSGVPSRFSGSGSGTDFTLTISSLQPED |
| | | | FATYFCQQGHTLPYTFGQGTKLEIK |
| | VL- | 3402 | DIQMTQSPSSLSASVGDRVTITCRASQDISNFLNWYQQKPG |
| | Humanized 2 | | QPVKLLIYYTSRLHSGVPSRFSGSGSGTDFTLTISSLQPED |
| | | | FATYYCQQGHTLPYTFGQGTKLEIK |
| F | VH CDR1 | 3403 | DYCIN |
| (see, e.g., | VH CDR2 | 3404 | WIYPGSGNTRYSERFKG |
| WO2023283531) | VH CDR3 | 3405 | EDYYPYHGMDY |
| | VL CDR1 | 3406 | RASESVDGYDNSFMH |
| | VL CDR2 | 3407 | RASNLES |
| | VL CDR3 | 3408 | QQSSEDPWT |
| | VH | 3409 | QIQLQQSGPELVRPGASVKISCKASGYSFTDYCINWVNQRP |
| | | | GQGLEWIGWIYPGSGNTRYSERFKGKATLTVDTSSNTAYMQ |
| | | | LSSLTSEDSAVYFCAREDYYPYHGMDYWGQGTSVTVSS |
| | VL | 3410 | DIVLTQSPTSLAVSLGQRATISCRASESVDGYDNSFMHWYQ |
| | | | QKPGQPPKLLIFRASNLESGIPARFSGSGSRTDFTLTINPV |
| | | | EAADVATYYCQQSSEDPWTFGGGTKLEIK |
| G | VH CDR1 | 3411 | DYYIN |
| (see, e.g., | VH CDR2 | 3404 | WIYPGSGNTRYSERFKG |
| WO2023283531) | VH CDR3 | 3405 | EDYYPYHGMDY |
| | VL CDR1 | 3406 | RASESVDGYDNSFMH |
| | VL CDR2 | 3407 | RASNLES |
| | VL CDR3 | 3408 | QQSSEDPWT |
| | VH | 3412 | QIQLQQSGPELVRPGASVKISCKASGYSFTDYYINWVNQRP |
| | | | GQGLEWIGWIYPGSGNTRYSERFKGKATLTVDTSSNTAYMQ |
| | | | LSSLTSEDSAVYFCAREDYYPYHGMDYWGQGTSVTVSS |
| | VL | 3410 | DIVLTQSPTSLAVSLGQRATISCRASESVDGYDNSFMHWYQ |
| | | | QKPGQPPKLLIFRASNLESGIPARFSGSGSRTDFTLTINPV |
| | | | EAADVATYYCQQSSEDPWTFGGGTKLEIK |
| H | VH CDR1 | 3413 | DYDIN |
| (see, e.g., | VH CDR2 | 3404 | WIYPGSGNTRYSERFKG |
| WO2023283531) | VH CDR3 | 3405 | EDYYPYHGMDY |
| | VL CDR1 | 3406 | RASESVDGYDNSFMH |
| | VL CDR2 | 3407 | RASNLES |
| | VL CDR3 | 3408 | QQSSEDPWT |
| | VH | 3414 | QIQLQQSGPELVRPGASVKISCKASGYSFTDYDINWVNQRP |
| | | | GQGLEWIGWIYPGSGNTRYSERFKGKATLTVDTSSNTAYMQ |
| | | | LSSLTSEDSAVYFCAREDYYPYHGMDYWGQGTSVTVSS |
| | VL | 3410 | DIVLTQSPTSLAVSLGQRATISCRASESVDGYDNSFMHWYQ |
| | | | QKPGQPPKLLIFRASNLESGIPARFSGSGSRTDFTLTINPV |
| | | | EAADVATYYCQQSSEDPWTFGGGTKLEIK |
| H | VH CDR1 | 3415 | NYYMH |
| (see, e.g., | VH CDR2 | 3416 | WIYPGDGNTHYNEKFKG |
| US20190240346) | VH CDR3 | 3417 | DNSGYVGFPY |
| | VL CDR1 | 3418 | KSSQSLFNSANQENYLT |
| | VL CDR2 | 3419 | WASTRDS |
| | VL CDR3 | 3420 | QNDYSYPLT |
| | VH | 3421 | EVQLQQSGPELVKPGTSMNISCKASGYTFTNYYMHWVRQRP |
| | | | GQGLEWIGWIYPGDGNTHYNEKFKGKTTLTADTSSITAYML |
| | | | LSSLTSEDSAVYFCARDNSGYVGFPYWGQGTTLTVSS |
| | VL | 3422 | MDIKMTQSPSSLTVTAGERVTMSCKSSQSLFNSANQENYLT |
| | | | WYQQRPGQPPKLLIYWASTRDSGVPDRFTGSGSGTDFPLTI |
| | | | SSVQAEDLAVYYCQNDYSYPLTFGAGTKLEIK |
| I | VH CDR1 | 3423 | SYAMS |
| (see, e.g., | VH CDR2 | 3424 | YIWSGGSTDYASWAKS |
| US11584793) | VH CDR3 | 3425 | RYGTSYPDYGDASGFDP |
| | VL CDR1 | 3426 | RASQSISSYLA |
| | VL CDR2 | 3427 | RASTLAS |
| | VL CDR3 | 3428 | QQNYASSNVDNT |
| | VH | 3429 | QSMQESGPGLVKPSQTLSLTCTVSGFSLSSYAMSWIRQHPG |
| | | | KGLEWIGYIWSGGSTDYASWAKSRVTISKTSTTVSLKLSSV |
| | | | TAADTAVYYCARRYGTSYPDYGDASGFDPWGQGTLVTVSS |
| | VL | 3430 | AIQLTQSPSSLSASVGDRVTITCRASQSISSYLAWYQQKPG |
| | | | KAPKLLIYRASTLASGVPSRFSGSGSGTDFTLTISSLQPED |
| | | | FATYYCQQNYASSNVDNTFGGGTKVEIK |
| J | VH CDR1 | 3431 | NSYWIC |
| (see, e.g., | VH CDR2 | 3432 | CINTDADSTNYASWARG |
| WO2023034409) | VH CDR3 | 3433 | QNNVFDPGYNL |
| | VL CDR1 | 3434 | RASQNIGSNLA |
| | VL CDR2 | 3435 | DASKLES |
| | VL CDR3 | 3436 | QCTVRGGAYGNA |
| | VH | 3437 | QSLVESGGGVVQPGRSLRLSCKASGFSFSNSYWICWVRQAP |
| | | | GKGLEWVGCINTDADSTNYASWARGRFTISKTSSTTVYLQM |
| | | | NSLRAEDTAVYYCARQNNVFDPGYNLWGPGTLVTVSS |
| | VL | 3438 | ELVLTQSPSTLSASVGDRVTITCRASQNIGSNLAWYQQKPG |
| | | | KAPKLLIYDASKLESGVPSRFSGSGSGTEFTLTISSLQPDD |
| | | | FATYYCQCTVRGGAYGNAFGGGTKVEIK |
| K | VH CDR1 | 3354 | SYWMH |
| (see, e.g., | VH CDR2 | 3355 | EINPINGRTNYIEKFKS |
| WO2016081643) | VH CDR3 | 3356 | GTRAYHY |
| | VL CDR1 | 3357 | RASDNLYSNLA |
| | VL CDR2 | 3358 | DATNLAD |
| | VL CDR3 | 3359 | QHFWGTPLT |
| | VH | 3439 | QVQLQQPGAELVKPGASVKLSCKASGYTFTSYWMHWVKQRP |
| | | | GQGLEWIGEINPINGRTNYIEKFKSKATLTVDKSSSTAYMQ |
| | | | LSSLTSEDSAVYYCARGTRAYHYWGQGTSVTVSS |
| | VL | 3440 | DIQMTQSPASLSVSVGETVTITCRASDNLYSNLAWYQQKQG |
| | | | KSPQLLVYDATNLADGVPSRFSGSGSGTQYSLKINSLQSED |
| | | | FGTYYCQHFWGTPLTFGAGTKLELK |
| L | VH CDR1 | 3441 | NYWMH |
| (see, e.g., | VH CDR2 | 3442 | EINPINGRSNYAQKFQG |
| WO2020132584) | VH CDR3 | 3443 | GTRAMHY |
| | VL CDR1 | 3444 | RTSENIYNNLA |
| | VL CDR2 | 3445 | AATNLAD |
| | VL CDR3 | 3359 | QHFWGTPLT |
| | VH | 3446 | QVQLVQSGAEVKKPGASVKVSCKASGYTFTNYWMHWVRQAP |
| | | | GQGLEWMGEINPINGRSNYAQKFQGRVTLTVDTSISTAYME |
| | | | LSRLRSDDTAVYYCARGTRAMHYWGQGTLVTVSS |
| | VL | 3447 | DIQMTQSPSSLSASVGDRVTITCRTSENIYNNLAWYQQKPG |
| | | | KSPKLLIYAATNLADGVPSRFSGSGSGTDYTLTISSLQPED |
| | | | FATYYCQHFWGTPLTFGGGTKVEIK |
| M | VH CDR1 | 3441 | NYWMH |
| (see, e.g., | VH CDR2 | 3448 | EINPINGRSNYAEKFQG |
| WO2020132584) | VH CDR3 | 3443 | GTRAMHY |
| | VL CDR1 | 3444 | RTSENIYNNLA |
| | VL CDR2 | 3445 | AATNLAD |
| | VL CDR3 | 3359 | QHFWGTPLT |
| | VH | 3446 | QVQLVQSGAEVKKPGASVKVSCKASGYTFTNYWMHWVRQAP |
| | | | GQGLEWIGEINPINGRSNYAEKFQGRVTLTVDTSSSTAYME |
| | | | LSRLRSDDTAVYYCARGTRAMHYWGQGTLVTVSS |
| | VL | 3447 | DIQMTQSPSSLSASVGDRVTITCRTSENIYNNLAWYQQKPG |
| | | | KAPKLLIYAATNLADGVPSRFSGSGSGTDYTLTISSLQPED |
| | | | FATYYCQHFWGTPLTFGGGTKVEIK |
| N | VH CDR1 | 3441 | NYWMH |
| (see, e.g., | VH CDR2 | 3448 | EINPIQGRSNYAEKFQG |
| WO2020132584) | VH CDR3 | 3443 | GTRAMHY |
| | VL CDR1 | 3444 | RTSENIYNNLA |
| | VL CDR2 | 3449 | AATNLAE |
| | VL CDR3 | 3450 | QHFWGTPLTF |
| | VH | 3451 | QVQLVQSGAEVKKPGASVKVSCKASGYTFTNYWMHWVRQAP |
| | | | GQGLEWMGEINPIQGRSNYAEKFQGRVTLTVDTSSSTAYME |
| | | | LSSLRSEDTATYYCARGTRAMHYWGQGTLVTVSS |
| | VL | 3452 | DIQMTQSPSSLSASVGDRVTITCRTSENIYNNLAWYQQKPG |
| | | | KAPKLLIYAATNLAEGVPSRFSGSGSGTDYTLTISSLQPED |
| | | | FATYYCQHFWGTPLTFGGGTKVEIK |
| P | VH CDR1 | 3354 | SYWMH |
| (see, e.g., | VH CDR2 | 3453 | AIYPGNSETGYAQKFQG |
| US11267896B2) | VH CDR3 | 3454 | ENWDPGFAF |
| | VL CDR1 | 3455 | SASSSVYYM |
| | VL CDR2 | 3456 | STSNLAS |
| | VL CDR3 | 3457 | QQRRNYPYT |
| | VH | 3458 | QVQLVQSGAEVKKPGASVKMSCKASGYTFTSYWMHWVRQAP |
| | | | GQGLEWIGAIYPGNSETGYAQKFQGRATLTADTSTSTAYME |
| | | | LSSLRSEDTAVYYCTRENWDPGFAFWGQGTLITVSS |
| | VL | 3459 | DIQMTQSPSSLSASVGDRVTITCSASSSVYYMYWFQQKPGK |
| | | | APKLWIYSTSNLASGVPSRFSGSGSGTDYTLTISSMQPEDE |
| | | | ATYYCQQRRNYPYTFGQGTKLEIK |
| Q | VH CDR1 | 3354 | SYWMH |
| (see, e.g., | VH CDR2 | 3355 | EINPINGRTNYIEKFKS |
| US20220143206) | VH CDR3 | 3356 | GTRAYHY |
| | VL CDR1 | 3357 | RASDNLYSNLA |
| | VL CDR2 | 3358 | DATNLAD |
| | VL CDR3 | 3359 | QHFWGTPLT |
| | VH-1 | 3439 | QVQLQQPGAELVKPGASVKLSCKASGYTFTSYWMHWVKQRP |
| | | | GQGLEWIGEINPTNGRTNYIEKFKSKATLTVDKSSSTAYMQ |
| | | | LSSLTSEDSAVYYCARGTRAYHYWGQGTSVTVSS |
| | VL-1 | 3440 | DIQMTQSPASLSVSVGETVTITCRASDNLYSNLAWYQQKQG |
| | | | KSPQLLVYDATNLADGVPSRFSGSGSGTQYSLKINSLQSED |
| | | | FGTYYCQHFWGTPLTFGAGTKLELK |
| | VH-1 | 3360 | EVQLVQSGAEVKKPGASVKVSCKASGYTFTSYWMHWVRQAP |
| | | | GQRLEWIGEINPINGRTNYIEKFKSRATLTVDKSASTAYME |
| | | | LSSLRSEDTAVYYCARGTRAYHYWGQGTMVTVSS |
| | VL-1 | 3460 | DIQMTSPSSLSASVGDRVTITCRASDNLYSNLAWYQQKPGK |
| | | | SPKLLVYDATNLADGVPSRFSGSGSGTDYSLKINSLQSEDF |
| | | | GTYYCQHFWGTPLTFGAGTKLELK |
| S | VH CDR1 | 3441 | NYWMH |
| | VH CDR2 | 3448 | EINPINGRSNYAEKFQG |
| | VH CDR3 | 3443 | GTRAMHY |
| | VL CDR1 | 3444 | RTSENIYNNLA |
| | VL CDR2 | 3445 | AATNLAD |
| | VL CDR3 | 3359 | QHFWGTPLT |
| | VH | 3446 | QVQLVQSGAEVKKPGASVKVSCKASGYTFTNYWMHWVRQAP |
| | | | GQGLEWIGEINPINGRSNYAEKFQGRVTLTVDTSSSTAYME |
| | | | LSRLRSDDTAVYYCARGTRAMHYWGQGTLVTVSS |
| | VL | 3447 | DIQMTQSPSSLSASVGDRVTITCRISENIYNNLAWYQQKPG |
| | | | KSPKLLIYAATNLADGVPSRFSGSGSGTDYTLTISSLQPED |
| | | | FATYYCQHFWGTPLTFGGGTKVEIK |

[0469] In some embodiments, the anti-TFR (e.g., hTFR, e.g., hTFR1) antibody comprises an anti-TFR (e.g., hTFR, e.g., hTFR1) antibody named and/or incorporated by reference herein).

[0470] In some embodiments, the anti-TFR (e.g., hTFR, e.g., hTFR1) comprises a VH that comprises: a VH CDR1, a VH CDR2, and a VH CDR3.

[0471] In some embodiments, the amino acid sequence of VH CDR1 comprises or consists of the amino acid sequence of a VH CDR1 of a VH of an anti-TFR antibody named and/or incorporated by reference herein), or the amino acid sequence of a VH CDR1 of an anti-TFR antibody named and/or incorporated by reference herein) comprising or consisting of 1, 2, or 3 amino acid variations (e.g., substitution, deletion, addition, etc.). In some embodiments, the amino acid sequence of VH CDR2 comprises or consists of the amino acid sequence of a VH CDR2 of a VH of an anti-TFR antibody named and/or incorporated by reference herein), or the amino acid sequence of a VH CDR2 of a VH of an anti-TFR antibody named and/or incorporated by reference herein) comprising or consisting of 1, 2, or 3 amino acid variations (e.g., substitution, deletion, addition, etc.). In some embodiments, the amino acid sequence of VH CDR3 comprises or consists of the amino acid sequence of a VH CDR3 of a VH of an anti-TFR antibody named and/or incorporated by reference herein), or the amino acid sequence of a VH CDR3 of a VH of an anti-TFR antibody named and/or incorporated by reference herein) comprising or consisting of 1, 2, or 3 amino acid variations (e.g., substitution, deletion, addition, etc.).

[0472] In some embodiments, the amino acid sequence of VH CDR1 comprises or consists of the amino acid sequence of a VH CDR1 of a VH of an anti-TFR antibody named and/or incorporated by reference herein), or the amino acid sequence of a VH CDR1 of an anti-TFR antibody named and/or incorporated by reference herein) comprising or consisting of 1, 2, or 3 amino acid variations (e.g., substitution, deletion, addition, etc.); the amino acid sequence of VH CDR2 comprises or consists of the amino acid sequence of a VH CDR2 of a VH of an anti-TFR antibody named and/or incorporated by reference herein), or the amino acid sequence of a VH CDR2 of a VH of an anti-TFR antibody named and/or incorporated by reference herein) comprising or consisting of 1, 2, or 3 amino acid variations (e.g., substitution, deletion, addition, etc.); and the amino acid sequence of VH CDR3 comprises or consists of the amino acid sequence of a VH CDR3 of a VH of an anti-TFR antibody named and/or incorporated by reference herein), or the amino acid sequence of a VH CDR3 of a VH of an anti-TFR antibody named and/or incorporated by reference herein) comprising or consisting of 1, 2, or 3 amino acid variations (e.g., substitution, deletion, addition, etc.).

[0473] In some embodiments, the amino acid sequence of VH CDR1 comprises or consists of the amino acid sequence of a VH CDR1 of an anti-TFR antibody named and/or incorporated by reference herein), or the amino acid sequence of a VH CDR1 of an anti-TFR antibody named and/or incorporated by reference herein) comprising or consisting of 1, 2, or 3 amino acid variations (e.g., substitution, deletion, addition, etc.). In some embodiments, the amino acid sequence of VH CDR2 comprises or consists of the amino acid sequence of a VH CDR2 of an anti-TFR antibody named and/or incorporated by reference herein), or the amino acid sequence of a VH CDR2 of an anti-TFR antibody named and/or incorporated by reference herein) comprising or consisting of 1, 2, or 3 amino acid variations (e.g., substitution, deletion, addition, etc.). In some embodiments, the amino acid sequence of VH CDR3 comprises or consists of the amino acid sequence of a VH CDR3 of an anti-TFR antibody named and/or incorporated by reference herein), or the amino acid sequence of a VH CDR3 of an anti-TFR antibody named and/or incorporated by reference herein) comprising or consisting of 1, 2, or 3 amino acid variations (e.g., substitution, deletion, addition, etc.).

[0474] In some embodiments, the amino acid sequence of VH CDR1 comprises or consists of the amino acid sequence of a VH CDR1 of an anti-TFR antibody named and/or incorporated by reference herein), or the amino acid sequence of a VH CDR1 of an anti-TFR antibody named and/or incorporated by reference herein) comprising or consisting of 1, 2, or 3 amino acid variations (e.g., substitution, deletion, addition, etc.); the amino acid sequence of VH CDR2 comprises or consists of the amino acid sequence of a VH CDR2 of an anti-TFR antibody named and/or incorporated by reference herein), or the amino acid sequence of a VH CDR2 of an anti-TFR antibody named and/or incorporated by reference herein) comprising or consisting of 1, 2, or 3 amino acid variations (e.g., substitution, deletion, addition, etc.); and the amino acid sequence of VH CDR3 comprises or consists of the amino acid sequence of a VH CDR3 of an anti-TFR antibody named and/or incorporated by reference herein), or the amino acid sequence of a VH CDR3 of an anti-TFR antibody named and/or incorporated by reference herein) comprising or consisting of 1, 2, or 3 amino acid variations (e.g., substitution, deletion, addition, etc.).

[0475] In some embodiments, the anti-TFR (e.g., hTFR, e.g., hTFR1) comprises a VL that comprises: VL CDR1, VL CDR2, and VL CDR3.

[0476] In some embodiments, the amino acid sequence of VL CDR1 comprises or consists of the amino acid sequence of a VL CDR1 of a VL of an anti-TFR antibody named and/or incorporated by reference herein), or the amino acid sequence of a VL CDR1 of a VL of an anti-TFR antibody named and/or incorporated by reference herein) comprising or consisting of 1, 2, or 3 amino acid variations (e.g., substitution, deletion, addition, etc.). In some embodiments, the amino acid sequence of VL CDR2 comprises or consists of the amino acid sequence of a VL CDR2 of a VL of an anti-TFR antibody named and/or incorporated by reference herein), or the amino acid sequence of a VL CDR2 of a VL of an anti-TFR antibody named and/or incorporated by reference herein) comprising or consisting of 1, 2, or 3 amino acid variations (e.g., substitution, deletion, addition, etc.). In some embodiments, the amino acid sequence of VL CDR3 comprises or consists of the amino acid sequence of a VL CDR3 of a VL of an anti-TFR antibody named and/or incorporated by reference herein), or the amino acid sequence of a VL CDR3 of a VL of an anti-TFR antibody named and/or incorporated by reference herein) comprising or consisting of 1, 2, or 3 amino acid variations (e.g., substitution, deletion, addition, etc.).

[0477] In some embodiments, the amino acid sequence of VL CDR1 comprises or consists of the amino acid sequence of a VL CDR1 of a VL of an anti-TFR antibody named and/or incorporated by reference herein), or the amino acid sequence of a VL CDR1 of a VL of an anti-TFR antibody named and/or incorporated by reference herein) comprising or consisting of 1, 2, or 3 amino acid variations (e.g., substitution, deletion, addition, etc.); the amino acid sequence of VL CDR2 comprises or consists of the amino acid sequence of a VL CDR2 of a VL of an anti-TFR antibody named and/or incorporated by reference herein), or the amino acid sequence of a VL CDR2 of a VL of an anti-TFR antibody named and/or incorporated by reference herein) comprising or consisting of 1, 2, or 3 amino acid variations (e.g., substitution, deletion, addition, etc.); and the amino acid sequence of VL CDR3 comprises or consists of the amino acid sequence of a VL CDR3 of a VL of an anti-TFR antibody named and/or incorporated by reference herein), or the amino acid sequence of a VL CDR3 of a VL of an anti-TFR antibody named and/or incorporated by reference herein) comprising or consisting of 1, 2, or 3 amino acid variations (e.g., substitution, deletion, addition, etc.).

[0478] In some embodiments, the amino acid sequence of VL CDR1 comprises or consists of the amino acid sequence of a VL CDR1 of an anti-TFR antibody named and/or incorporated by reference herein), or the amino acid sequence of a VL CDR1 of an anti-TFR antibody named and/or incorporated by reference herein) comprising or consisting of 1, 2, or 3 amino acid variations (e.g., substitution, deletion, addition, etc.). In some embodiments, the amino acid sequence of VL CDR2 comprises or consists of the amino acid sequence of a VL CDR2 of an anti-TFR antibody named and/or incorporated by reference herein), or the amino acid sequence of a VL CDR2 of an anti-TFR antibody named and/or incorporated by reference herein) comprising or consisting of 1, 2, or 3 amino acid variations (e.g., substitution, deletion, addition, etc.). In some embodiments, the amino acid sequence of VL CDR3 comprises or consists of the amino acid sequence of a VL CDR3 of an anti-TFR antibody named and/or incorporated by reference herein), or the amino acid sequence of a VL CDR3 of an anti-TFR antibody named and/or incorporated by reference herein) comprising or consisting of 1, 2, or 3 amino acid variations (e.g., substitution, deletion, addition, etc.).

[0479] In some embodiments, the amino acid sequence of VL CDR1 comprises or consists of the amino acid sequence of a VL CDR1 of an anti-TFR antibody named and/or incorporated by reference herein), or the amino acid sequence of a VL CDR1 of an anti-TFR antibody named and/or incorporated by reference herein) comprising or consisting of 1, 2, or 3 amino acid variations (e.g., substitution, deletion, addition, etc.); the amino acid sequence of VL CDR2 comprises or consists of the amino acid sequence of a VL CDR2 of an anti-TFR antibody named and/or incorporated by reference herein), or the amino acid sequence of a VL CDR2 of an anti-TFR antibody named and/or incorporated by reference herein) comprising or consisting of 1, 2, or 3 amino acid variations (e.g., substitution, deletion, addition, etc.); and the amino acid sequence of VL CDR3 comprises or consists of the amino acid sequence of a VL CDR3 of an anti-TFR antibody named and/or incorporated by reference herein), or the amino acid sequence of a VL CDR3 of an anti-TFR antibody named and/or incorporated by reference herein) comprising or consisting of 1, 2, or 3 amino acid variations (e.g., substitution, deletion, addition, etc.).

[0480] In some embodiments, the anti-TFR (e.g., hTFR, e.g., hTFR1) comprises a VH that comprises: VH CDR1, VH CDR2, and VH CDR3; and a VL that comprises: VL CDR1, VL CDR2, and VL CDR3.

[0481] In some embodiments, the amino acid sequence of VH CDR1 comprises or consists of the amino acid sequence of a VH CDR1 of a VH of an anti-TFR antibody named and/or incorporated by reference herein), or the amino acid sequence of a VH CDR1 of a VH of an anti-TFR antibody named and/or incorporated by reference herein) comprising or consisting of 1, 2, or 3 amino acid variations (e.g., substitution, deletion, addition, etc.); the amino acid sequence of VH CDR2 comprises or consists of the amino acid sequence of a VH CDR2 of a VH of an anti-TFR antibody named and/or incorporated by reference herein), or the amino acid sequence of a VH CDR2 of a VH of an anti-TFR antibody named and/or incorporated by reference herein) comprising or consisting of 1, 2, or 3 amino acid variations (e.g., substitution, deletion, addition, etc.); the amino acid sequence of VH CDR3 comprises or consists of the amino acid sequence of a VH CDR3 of a VH of an anti-TFR antibody named and/or incorporated by reference herein), or the amino acid sequence of a VH CDR3 of a VH of an anti-TFR antibody named and/or incorporated by reference herein) comprising or consisting of 1, 2, or 3 amino acid variations (e.g., substitution, deletion, addition, etc.); the amino acid sequence of VL CDR1 comprises or consists of the amino acid sequence of a VL CDR1 of a VL of an anti-TFR antibody named and/or incorporated by reference herein), or the amino acid sequence of a VL CDR1 of a VL of an anti-TFR antibody named and/or incorporated by reference herein) comprising or consisting of 1, 2, or 3 amino acid variations (e.g., substitution, deletion, addition, etc.); the amino acid sequence of VL CDR2 comprises or consists of the amino acid sequence of a VL CDR2 of a VL of an anti-TFR antibody named and/or incorporated by reference herein), or the amino acid sequence of a VL CDR2 of a VL of an anti-TFR antibody named and/or incorporated by reference herein) comprising or consisting of 1, 2, or 3 amino acid variations (e.g., substitution, deletion, addition, etc.); and the amino acid sequence of VL CDR3 comprises or consists of the amino acid sequence of a VL CDR3 of a VL of an anti-TFR antibody named and/or incorporated by reference herein), or the amino acid sequence of a VL CDR3 of a VL of an anti-TFR antibody named and/or incorporated by reference herein) comprising or consisting of 1, 2, or 3 amino acid variations (e.g., substitution, deletion, addition, etc.).

[0482] In some embodiments, the amino acid sequence of VH CDR1 comprises or consists of the amino acid sequence of a VH CDR1 of an anti-TFR antibody named and/or incorporated by reference herein), or the amino acid sequence of a VH CDR1 of an anti-TFR antibody named and/or incorporated by reference herein) comprising or consisting of 1, 2, or 3 amino acid variations (e.g., substitution, deletion, addition, etc.); the amino acid sequence of VH CDR2 comprises or consists of the amino acid sequence of a VH CDR2 of an anti-TFR antibody named and/or incorporated by reference herein), or the amino acid sequence of a VH CDR2 of an anti-TFR antibody named and/or incorporated by reference herein) comprising or consisting of 1, 2, or 3 amino acid variations (e.g., substitution, deletion, addition, etc.); the amino acid sequence of VH CDR3 comprises or consists of the amino acid sequence of a VH CDR3 of an anti-TFR antibody named and/or incorporated by reference herein), or the amino acid sequence of a VH CDR3 of an anti-TFR antibody named and/or incorporated by reference herein) comprising or consisting of 1, 2, or 3 amino acid variations (e.g., substitution, deletion, addition, etc.); the amino acid sequence of VL CDR1 comprises or consists of the amino acid sequence of a VL CDR1 of an anti-TFR antibody named and/or incorporated by reference herein), or the amino acid sequence CDR1 of a VL of an anti-TFR antibody named and/or incorporated by reference herein) comprising or consisting of 1, 2, or 3 amino acid variations (e.g., substitution, deletion, addition, etc.); the amino acid sequence of VL CDR2 comprises or consists of the amino acid sequence of a VL CDR2 of an anti-TFR antibody named and/or incorporated by reference herein), or the amino acid sequence of a VL CDR2 of an anti-TFR antibody named and/or incorporated by reference herein) comprising or consisting of 1, 2, or 3 amino acid variations (e.g., substitution, deletion, addition, etc.); and the amino acid sequence of VL CDR3 comprises or consists of the amino acid sequence of a VL CDR3 of an anti-TFR antibody named and/or incorporated by reference herein), or the amino acid sequence of a VL CDR3 of an anti-TFR antibody named and/or incorporated by reference herein) comprising or consisting of 1, 2, or 3 amino acid variations (e.g., substitution, deletion, addition, etc.).

[0483] In some embodiments, the amino acid sequence of the VH comprises or consists of an amino acid sequence at least 85%, 86%, 87%, 88%, 89%, 90%, 91%, 92%, 93%, 94%, 95%, 96%, 97%, 98%, 99%, or 100% identical to the amino acid sequence of a VH of an anti-TFR antibody named and/or incorporated by reference herein). In some embodiments, the amino acid sequence of the VL comprises or consists of an amino acid sequence at least 85%, 86%, 87%, 88%, 89%, 90%, 91%, 92%, 93%, 94%, 95%, 96%, 97%, 98%, 99%, or 100% identical to the amino acid sequence of a VL of an anti-TFR antibody named and/or incorporated by reference herein). In some embodiments, the amino acid sequence of the VH comprises or consists of an amino acid sequence at least 85%, 86%, 87%, 88%, 89%, 90%, 91%, 92%, 93%, 94%, 95%, 96%, 97%, 98%, 99%, or 100% identical to the amino acid sequence of a VH of an anti-TFR antibody named and/or incorporated by reference herein); and the amino acid sequence of the VL comprises or consists of an amino acid sequence at least 85%, 86%, 87%, 88%, 89%, 90%, 91%, 92%, 93%, 94%, 95%, 96%, 97%, 98%, 99%, or 100% identical to the amino acid sequence of a VL of an anti-TFR antibody named and/or incorporated by reference herein).

[0484] In some embodiments, the anti-TFR (e.g., hTFR, e.g., hTFR1) antibody comprises an anti-TFR (e.g., hTFR, e.g., hTFR1) antibody provided in Table 14.

[0485] In some embodiments, the anti-TFR (e.g., hTFR, e.g., hTFR1) comprises a VH that comprises: a VH CDR1, a VH CDR2, and a VH CDR3.

[0486] In some embodiments, the amino acid sequence of VH CDR1 comprises or consists of the amino acid sequence of a VH CDR1 of a VH set forth in Table 14, or the amino acid sequence of a VH CDR1 of a VH set forth in Table 14 comprising or consisting of 1, 2, or 3 amino acid variations (e.g., substitution, deletion, addition, etc.). In some embodiments, the amino acid sequence of VH CDR2 comprises or consists of the amino acid sequence of a VH CDR2 of a VH set forth in Table 14, or the amino acid sequence of a VH CDR2 of a VH set forth in Table 14 comprising or consisting of 1, 2, or 3 amino acid variations (e.g., substitution, deletion, addition, etc.). In some embodiments, the amino acid sequence of VH CDR3 comprises or consists of the amino acid sequence of a VH CDR3 of a VH set forth in Table 14, or the amino acid sequence of a VH CDR3 of a VH set forth in Table 14 comprising or consisting of 1, 2, or 3 amino acid variations (e.g., substitution, deletion, addition, etc.).

[0487] In some embodiments, the amino acid sequence of VH CDR1 comprises or consists of the amino acid sequence of a VH CDR1 of a VH set forth in Table 14, or the amino acid sequence of a VH CDR1 of a VH set forth in Table 14 comprising or consisting of 1, 2, or 3 amino acid variations (e.g., substitution, deletion, addition, etc.); the amino acid sequence of VH CDR2 comprises or consists of the amino acid sequence of a VH CDR2 of a VH set forth in Table 14, or the amino acid sequence of a VH CDR2 of a VH set forth in Table 14 comprising or consisting of 1, 2, or 3 amino acid variations (e.g., substitution, deletion, addition, etc.); and the amino acid sequence of VH CDR3 comprises or consists of the amino acid sequence of a VH CDR3 of a VH set forth in Table 14, or the amino acid sequence of a VH CDR3 of a VH set forth in Table 14 comprising or consisting of 1, 2, or 3 amino acid variations (e.g., substitution, deletion, addition, etc.).

[0488] In some embodiments, the amino acid sequence of VH CDR1 comprises or consists of the amino acid sequence of a VH CDR1 set forth in Table 14, or the amino acid sequence of a VH CDR1 set forth in Table 14 comprising or consisting of 1, 2, or 3 amino acid variations (e.g., substitution, deletion, addition, etc.). In some embodiments, the amino acid sequence of VH CDR2 comprises or consists of the amino acid sequence of a VH CDR2 set forth in Table 14, or the amino acid sequence of a VH CDR2 set forth in Table 14 comprising or consisting of 1, 2, or 3 amino acid variations (e.g., substitution, deletion, addition, etc.). In some embodiments, the amino acid sequence of VH CDR3 comprises or consists of the amino acid sequence of a VH CDR3 set forth in Table 14, or the amino acid sequence of a VH CDR3 set forth in Table 14 comprising or consisting of 1, 2, or 3 amino acid variations (e.g., substitution, deletion, addition, etc.).

[0489] In some embodiments, the amino acid sequence of VH CDR1 comprises or consists of the amino acid sequence of a VH CDR1 set forth in Table 14, or the amino acid sequence of a VH CDR1 set forth in Table 14 comprising or consisting of 1, 2, or 3 amino acid variations (e.g., substitution, deletion, addition, etc.); the amino acid sequence of VH CDR2 comprises or consists of the amino acid sequence of a VH CDR2 set forth in Table 14, or the amino acid sequence of a VH CDR2 set forth in Table 14 comprising or consisting of 1, 2, or 3 amino acid variations (e.g., substitution, deletion, addition, etc.); and the amino acid sequence of VH CDR3 comprises or consists of the amino acid sequence of a VH CDR3 set forth in Table 14, or the amino acid sequence of a VH CDR3 set forth in Table 14 comprising or consisting of 1, 2, or 3 amino acid variations (e.g., substitution, deletion, addition, etc.).

[0490] In some embodiments, the anti-TFR (e.g., hTFR, e.g., hTFR1) comprises a VL that comprises: VL CDR1, VL CDR2, and VL CDR3.

[0491] In some embodiments, the amino acid sequence of VL CDR1 comprises or consists of the amino acid sequence of a VL CDR1 of a VL set forth in Table 14, or the amino acid sequence of a VL CDR1 of a VL set forth in Table 14 comprising or consisting of 1, 2, or 3 amino acid variations (e.g., substitution, deletion, addition, etc.). In some embodiments, the amino acid sequence of VL CDR2 comprises or consists of the amino acid sequence of a VL CDR2 of a VL set forth in Table 14, or the amino acid sequence of a VL CDR2 of a VL set forth in Table 14 comprising or consisting of 1, 2, or 3 amino acid variations (e.g., substitution, deletion, addition, etc.). In some embodiments, the amino acid sequence of VL CDR3 comprises or consists of the amino acid sequence of a VL CDR3 of a VL set forth in Table 14, or the amino acid sequence of a VL CDR3 of a VL set forth in Table 14 comprising or consisting of 1, 2, or 3 amino acid variations (e.g., substitution, deletion, addition, etc.).

[0492] In some embodiments, the amino acid sequence of VL CDR1 comprises or consists of the amino acid sequence of a VL CDR1 of a VL set forth in Table 14, or the amino acid sequence of a VL CDR1 of a VL set forth in Table 14 comprising or consisting of 1, 2, or 3 amino acid variations (e.g., substitution, deletion, addition, etc.); the amino acid sequence of VL CDR2 comprises or consists of the amino acid sequence of a VL CDR2 of a VL set forth in Table 14, or the amino acid sequence of a VL CDR2 of a VL set forth in Table 14 comprising or consisting of 1, 2, or 3 amino acid variations (e.g., substitution, deletion, addition, etc.); and the amino acid sequence of VL CDR3 comprises or consists of the amino acid sequence of a VL CDR3 of a VL set forth in Table 14, or the amino acid sequence of a VL CDR3 of a VL set forth in Table 14 comprising or consisting of 1, 2, or 3 amino acid variations (e.g., substitution, deletion, addition, etc.).

[0493] In some embodiments, the amino acid sequence of VL CDR1 comprises or consists of the amino acid sequence of a VL CDR1 set forth in Table 14, or the amino acid sequence of a VL CDR1 set forth in Table 14 comprising or consisting of 1, 2, or 3 amino acid variations (e.g., substitution, deletion, addition, etc.). In some embodiments, the amino acid sequence of VL CDR2 comprises or consists of the amino acid sequence of a VL CDR2 set forth in Table 14, or the amino acid sequence of a VL CDR2 set forth in Table 14 comprising or consisting of 1, 2, or 3 amino acid variations (e.g., substitution, deletion, addition, etc.). In some embodiments, the amino acid sequence of VL CDR3 comprises or consists of the amino acid sequence of a VL CDR3 set forth in Table 14, or the amino acid sequence of a VL CDR3 set forth in Table 14 comprising or consisting of 1, 2, or 3 amino acid variations (e.g., substitution, deletion, addition, etc.).

[0494] In some embodiments, the amino acid sequence of VL CDR1 comprises or consists of the amino acid sequence of a VL CDR1 set forth in Table 14, or the amino acid sequence of a VL CDR1 set forth in Table 14 comprising or consisting of 1, 2, or 3 amino acid variations (e.g., substitution, deletion, addition, etc.); the amino acid sequence of VL CDR2 comprises or consists of the amino acid sequence of a VL CDR2 set forth in Table 14, or the amino acid sequence of a VL CDR2 set forth in Table 14 comprising or consisting of 1, 2, or 3 amino acid variations (e.g., substitution, deletion, addition, etc.); and the amino acid sequence of VL CDR3 comprises or consists of the amino acid sequence of a VL CDR3 set forth in Table 14, or the amino acid sequence of a VL CDR3 set forth in Table 14 comprising or consisting of 1, 2, or 3 amino acid variations (e.g., substitution, deletion, addition, etc.).

[0495] In some embodiments, the anti-TFR (e.g., hTFR, e.g., hTFR1) comprises a VH that comprises: VH CDR1, VH CDR2, and VH CDR3; and a VL that comprises: VL CDR1, VL CDR2, and VL CDR3.

[0496] In some embodiments, the amino acid sequence of VH CDR1 comprises or consists of the amino acid sequence of a VH CDR1 of a VH set forth in Table 14, or the amino acid sequence of a VH CDR1 of a VH set forth in Table 14 comprising or consisting of 1, 2, or 3 amino acid variations (e.g., substitution, deletion, addition, etc.); the amino acid sequence of VH CDR2 comprises or consists of the amino acid sequence of a VH CDR2 of a VH set forth in Table 14, or the amino acid sequence of a VH CDR2 of a VH set forth in Table 14 comprising or consisting of 1, 2, or 3 amino acid variations (e.g., substitution, deletion, addition, etc.); the amino acid sequence of VH CDR3 comprises or consists of the amino acid sequence of a VH CDR3 of a VH set forth in Table 14, or the amino acid sequence of a VH CDR3 of a VH set forth in Table 14 comprising or consisting of 1, 2, or 3 amino acid variations (e.g., substitution, deletion, addition, etc.); the amino acid sequence of VL CDR1 comprises or consists of the amino acid sequence of a VL CDR1 of a VL set forth in Table 14, or the amino acid sequence of a VL CDR1 of a VL set forth in Table 14 comprising or consisting of 1, 2, or 3 amino acid variations (e.g., substitution, deletion, addition, etc.); the amino acid sequence of VL CDR2 comprises or consists of the amino acid sequence of a VL CDR2 of a VL set forth in Table 14, or the amino acid sequence of a VL CDR2 of a VL set forth in Table 14 comprising or consisting of 1, 2, or 3 amino acid variations (e.g., substitution, deletion, addition, etc.); and the amino acid sequence of VL CDR3 comprises or consists of the amino acid sequence of a VL CDR3 of a VL set forth in Table 14, or the amino acid sequence of a VL CDR3 of a VL set forth in Table 14 comprising or consisting of 1, 2, or 3 amino acid variations (e.g., substitution, deletion, addition, etc.).

[0497] In some embodiments, the amino acid sequence of VH CDR1 comprises or consists of the amino acid sequence of a VH CDR1 set forth in Table 14, or the amino acid sequence of a VH CDR1 set forth in Table 14 comprising or consisting of 1, 2, or 3 amino acid variations (e.g., substitution, deletion, addition, etc.); the amino acid sequence of VH CDR2 comprises or consists of the amino acid sequence of a VH CDR2 set forth in Table 14, or the amino acid sequence of a VH CDR2 set forth in Table 14 comprising or consisting of 1, 2, or 3 amino acid variations (e.g., substitution, deletion, addition, etc.); the amino acid sequence of VH CDR3 comprises or consists of the amino acid sequence of a VH CDR3 set forth in Table 14, or the amino acid sequence of a VH CDR3 set forth in Table 14 comprising or consisting of 1, 2, or 3 amino acid variations (e.g., substitution, deletion, addition, etc.); the amino acid sequence of VL CDR1 comprises or consists of the amino acid sequence of a VL CDR1 set forth in Table 14, or the amino acid sequence CDR1 of a VL set forth in Table 14 comprising or consisting of 1, 2, or 3 amino acid variations (e.g., substitution, deletion, addition, etc.); the amino acid sequence of VL CDR2 comprises or consists of the amino acid sequence of a VL CDR2 set forth in Table 14, or the amino acid sequence of a VL CDR2 set forth in Table 14 comprising or consisting of 1, 2, or 3 amino acid variations (e.g., substitution, deletion, addition, etc.); and the amino acid sequence of VL CDR3 comprises or consists of the amino acid sequence of a VL CDR3 set forth in Table 14, or the amino acid sequence of a VL CDR3 set forth in Table 14 comprising or consisting of 1, 2, or 3 amino acid variations (e.g., substitution, deletion, addition, etc.).

[0498] In some embodiments, the amino acid sequence of the VH comprises or consists of an amino acid sequence at least 85%, 86%, 87%, 88%, 89%, 90%, 91%, 92%, 93%, 94%, 95%, 96%, 97%, 98%, 99%, or 100% identical to the amino acid sequence of a VH set forth in Table 14. In some embodiments, the amino acid sequence of the VL comprises or consists of an amino acid sequence at least 85%, 86%, 87%, 88%, 89%, 90%, 91%, 92%, 93%, 94%, 95%, 96%, 97%, 98%, 99%, or 100% identical to the amino acid sequence of a VL set forth in Table 14. In some embodiments, the amino acid sequence of the VH comprises or consists of an amino acid sequence at least 85%, 86%, 87%, 88%, 89%, 90%, 91%, 92%, 93%, 94%, 95%, 96%, 97%, 98%, 99%, or 100% identical to the amino acid sequence of a VH set forth in Table 14; and the amino acid sequence of the VL comprises or consists of an amino acid sequence at least 85%, 86%, 87%, 88%, 89%, 90%, 91%, 92%, 93%, 94%, 95%, 96%, 97%, 98%, 99%, or 100% identical to the amino acid sequence of a VL set forth in Table 14.

### (b) Ig Constant Regions

[0499] In some embodiments, the antibody (or heterologous polypeptide (e.g., operably connected to a protein (e.g., hTF) that specifically binds TFR (e.g., described herein) comprises an IgG CH2 region and an IgG CH3 region. In some embodiments, the antibody (or heterologous polypeptide) comprises a partial IgG hinge region, IgG CH2 region, and IgG CH3 region. In some embodiments, the antibody (or heterologous polypeptide) comprises of an IgG hinge region, IgG CH2 region, and IgG CH3 region. In some embodiments, the antibody (or heterologous polypeptide) comprises an IgG1 CH2 region and an IgG1 CH3 region. In some embodiments, the antibody (or heterologous polypeptide) comprises a partial IgG1 hinge region, IgG1 CH2 region, and IgG1 CH3 region. In some embodiments, the antibody (or heterologous polypeptide) comprises an IgG1 hinge region, IgG1 CH2 region, and IgG1 CH3 region. In some embodiments, the antibody (or heterologous polypeptide) comprises an IgG4 CH2 region and an IgG4 CH3 region. In some embodiments, the antibody (or heterologous polypeptide) comprises a partial IgG4 hinge region, IgG4 CH2 region, and IgG4 CH3 region. In some embodiments, the antibody (or heterologous polypeptide) comprises an IgG4 hinge region, IgG4 CH2 region, and IgG4 CH3 region.

[0500] In some embodiments, the antibody (or heterologous polypeptide) comprises an Ig Fc region. In some embodiments, the Ig Fc region comprises or consists of at least a portion of a hinge region, a CH2 region, and a CH3 region. In some embodiments, the Ig Fc region comprises or consists of a hinge region, a CH2 region, and a CH3 region. In some embodiments, the Ig Fc region comprises or consists of at least a portion of an IgG hinge region, an IgG CH2 region, and an IgG CH3 region. In some embodiments, the Ig Fc region comprises or consists of an IgG hinge region, an IgG CH2 region, and an IgG CH3 region. In some embodiments, the Ig Fc region comprises or consists of at least a portion of an IgG1 hinge region, an IgG1 CH2 region, and an IgG1 CH3 region. In some embodiments, the Ig Fc region comprises or consists of an IgG1 hinge region, an IgG1 CH2 region, and an IgG1 CH3 region. In some embodiments, the Ig Fc region comprises or consists of at least a portion of an IgG4 hinge region, an IgG4 CH2 region, and an IgG4 CH3 region. In some embodiments, the Ig Fc region comprises or consists of an IgG4 hinge region, an IgG4 CH2 region, and an IgG4 CH3 region.

[0501] In some embodiments, the antibody (or heterologous polypeptide) comprises a first Ig Fc region and a second Ig Fc region. In some embodiments, the first and/or second Ig Fc region comprises or consists of at least a portion of a hinge region, a CH2 region, and a CH3 region. In some embodiments, the first and/or second Ig Fc region comprises or consists of a hinge region, a CH2 region, and a CH3 region. In some embodiments, the first and/or second Ig Fc region comprises or consists of at least a portion of an IgG hinge region, an IgG CH2 region, and an IgG CH3 region. In some embodiments, the first and/or second Ig Fc region comprises or consists of an IgG hinge region, an IgG CH2 region, and an IgG CH3 region. In some embodiments, the first and/or second Ig Fc region comprises or consists of at least a portion of an IgG1 hinge region, an IgG1 CH2 region, and an IgG1 CH3 region. In some embodiments, the first and/or second Ig Fc region comprises or consists of an IgG1 hinge region, an IgG1 CH2 region, and an IgG1 CH3 region. In some embodiments, the first and/or second Ig Fc region comprises or consists of at least a portion of an IgG4 hinge region, an IgG4 CH2 region, and an IgG4 CH3 region. In some embodiments, the first and/or second Ig Fc region comprises or consists of an IgG4 hinge region, an IgG4 CH2 region, and an IgG4 CH3 region.

[0502] In some embodiments, the antibody (or heterologous polypeptide) comprises one or more hIg heavy chain constant regions (e.g., a CH2 region, a CH3 region, a hinge region, an Fc region). In some embodiments, the hIg is a human IgG (hIgG). In some embodiments, the hIgG is hIgG1, IgG2, IgG3, or IgG4. In some embodiments, the hIgG is IgG1 or IgG4. In some embodiments, the hIgG is hIgG1. In some embodiments, the hIgG is hIgG4.

[0503] In some embodiments, the antibody (or heterologous polypeptide) comprises a hIgG CH2 region and a hIgG CH3 region. In some embodiments, the antibody (or heterologous polypeptide) comprises a partial hIgG hinge region, hIgG CH2 region, and hIgG CH3 region. In some embodiments, the antibody (or heterologous polypeptide) comprises a hIgG hinge region, hIgG CH2 region, and hIgG CH3 region. In some embodiments, the antibody (or heterologous polypeptide) comprises a hIgG1 CH2 region and a hIgG1 CH3 region. In some embodiments, the antibody (or heterologous polypeptide) comprises a partial hIgG1 hinge region, hIgG1 CH2 region, and hIgG1 CH3 region. In some embodiments, the antibody (or heterologous polypeptide) comprises a hIgG1 hinge region, hIgG1 CH2 region, and hIgG1 CH3 region. In some embodiments, the antibody (or heterologous polypeptide) comprises a hIgG4 CH2 region and a hIgG4 CH3 region. In some embodiments, the antibody (or heterologous polypeptide) comprises a partial hIgG4 hinge region, hIgG4 CH2 region, and hIgG4 CH3 region. In some embodiments, the antibody (or heterologous polypeptide) comprises a hIgG4 hinge region, hIgG4 CH2 region, and hIgG4 CH3 region.

[0504] In some embodiments, the antibody (or heterologous polypeptide) comprises a hIg Fc region. In some embodiments, the hIg Fc region comprises or consists of at least a portion of a hinge region, a CH2 region, and a CH3 region. In some embodiments, the hIg Fc region comprises or consists of a hinge region, a CH2 region, and a CH3 region. In some embodiments, the hIg Fc region comprises or consists of at least a portion of a hIgG hinge region, a hIgG CH2 region, and a hIgG CH3 region. In some embodiments, the hIg Fc region comprises or consists of a hIgG hinge region, a hIgG CH2 region, and a hIgG CH3 region. In some embodiments, the hIg Fc region comprises or consists of at least a portion of a hIgG1 hinge region, a hIgG1 CH2 region, and a hIgG1 CH3 region. In some embodiments, the hIg Fc region comprises or consists of a hIgG1 hinge region, a hIgG1 CH2 region, and a hIgG1 CH3 region. In some embodiments, the hIg Fc region comprises or consists of at least a portion of a hIgG4 hinge region, a hIgG4 CH2 region, and a hIgG4 CH3 region. In some embodiments, the hIg Fc region comprises or consists of a hIgG4 hinge region, a hIgG4 CH2 region, and a hIgG4 CH3 region.

[0505] In some embodiments, the antibody (or heterologous polypeptide) comprises a first hIg Fc region and a second hIg Fc region. In some embodiments, the first and/or second hIg Fc region comprises or consists of at least a portion of a hinge region, a CH2 region, and a CH3 region. In some embodiments, the first and/or second hIg Fc region comprises or consists of a hinge region, a CH2 region, and a CH3 region. In some embodiments, the first and/or second hIg Fc region comprises or consists of at least a portion of a hIgG hinge region, a hIgG CH2 region, and a hIgG CH3 region. In some embodiments, the first and/or second hIg Fc region comprises or consists of a hIgG hinge region, a hIgG CH2 region, and a hIgG CH3 region. In some embodiments, the first and/or second hIg Fc region comprises or consists of at least a portion of a hIgG1 hinge region, a hIgG1 CH2 region, and a hIgG1 CH3 region. In some embodiments, the first and/or second hIg Fc region comprises or consists of a hIgG1 hinge region, a hIgG1 CH2 region, and a hIgG1 CH3 region. In some embodiments, the first and/or second hIg Fc region comprises or consists of at least a portion of a hIgG4 hinge region, a hIgG4 CH2 region, and a hIgG4 CH3 region. In some embodiments, the first and/or second hIg Fc region comprises or consists of a hIgG4 hinge region, a hIgG4 CH2 region, and a hIgG4 CH3 region.

[0506] In some embodiments, the antibody (or heterologous polypeptide) comprises one or more Ig (e.g., hIg) light chain constant region (e.g., a hIg light chain kappa constant region (κCL) or a hIg light chain lambda constant region (λCL).

[0507] The amino acid sequence of exemplary reference hIgG1 and hIgG4 heavy chain and light chain constant regions, which can be incorporated in one or more of the embodiments described herein (e.g., anti-TFR (e.g., hTFR (e.g., hTFR1)) antibodies and heterologous polypeptides), is provided in Table 15.

### Table 15. The Amino Acid Sequence of Exemplary hIg Heavy Chain and Light Chain Constant Regions and Components Thereof.

| | | SEQ |
|---|---|---|
| Description | Amino Acid Sequence | ID NO |
| hIgG1 CH1 Region | ASTKGPSVFPLAPSSKSTSGGTAALGCLVKDYFPEPVTVSWNS | 3461 |
| | GALTSGVHTFPAVLQSSGLYSLSSVVTVPSSSLGTQTYICNVN | |
| | HKPSNTKVDKKV | |
| hIgG1 Hinge Region | EPKSCDKTHTCP | 3462 |
| hIgG1 CH2 Region | PCPAPELLGGPSVFLFPPKPKDTLMISRTPEVTCVVVDVSHED | 3463 |
| | PEVKFNWYVDGVEVHNAKTKPREEQYNSTYRVVSVLTVLHQDW | |
| | LNGKEYKCKVSNKALPAPIEKTISKAK | |
| hIgG1 CH3 Region | GQPREPQVYTLPPSRDELTKNQVSLTCLVKGFYPSDIAVEWES | 3464 |
| With C-terminal Lysine | NGQPENNYKTTPPVLDSDGSFFLYSKLTVDKSRWQQGNVFSCS | |
| | VMHEALHNHYTQKSLSLSPGK | |
| hIgG1 CH3 Region | GQPREPQVYTLPPSRDELTKNQVSLTCLVKGFYPSDIAVEWES | 3465 |
| Without C-terminal | NGQPENNYKTTPPVLDSDGSFFLYSKLTVDKSRWQQGNVFSCS | |
| Lysine | VMHEALHNHYTQKSLSLSPG | |
| hIgG1 CH2 Region + | PCPAPELLGGPSVFLFPPKPKDTLMISRTPEVTCVVVDVSHED | 3466 |
| CH3 Region | PEVKFNWYVDGVEVHNAKTKPREEQYNSTYRVVSVLIVLHQDW | |
| With C-terminal Lysine | LNGKEYKCKVSNKALPAPIEKTISKAKGQPREPQVYTLPPSRD | |
| | ELTKNQVSLTCLVKGFYPSDIAVEWESNGQPENNYKTTPPVLD | |
| | SDGSFFLYSKLTVDKSRWQQGNVFSCSVMHEALHNHYTQKSLS | |
| | LSPGK | |
| hIgG1 CH2 Region + | PCPAPELLGGPSVFLFPPKPKDTLMISRTPEVTCVVVDVSHED | 3467 |
| CH3 Region | PEVKFNWYVDGVEVHNAKTKPREEQYNSTYRVVSVLIVLHQDW | |
| Without C-terminal | LNGKEYKCKVSNKALPAPIEKTISKAKGQPREPQVYTLPPSRD | |
| Lysine | ELTKNQVSLTCLVKGFYPSDIAVEWESNGQPENNYKITPPVLD | |
| | SDGSFFLYSKLTVDKSRWQQGNVFSCSVMHEALHNHYTQKSLS | |
| | LSPG | |
| hIgG1 Partial Hinge | TCPPCPAPELLGGPSVFLFPPKPKDTLMISRTPEVTCVVVDVS | 3468 |
| Region + CH2 Region + | HEDPEVKFNWYVDGVEVHNAKTKPREEQYNSTYRVVSVLTVLH | |
| CH3 Region | QDWLNGKEYKCKVSNKALPAPIEKTISKAKGQPREPQVYTLPP | |
| With C-terminal Lysine | SRDELTKNQVSLTCLVKGFYPSDIAVEWESNGQPENNYKITPP | |
| | VLDSDGSFFLYSKLTVDKSRWQQGNVFSCSVMHEALHNHYTQK | |
| | SLSLSPGK | |
| hIgG1 Partial Hinge | TCPPCPAPELLGGPSVFLFPPKPKDTLMISRTPEVTCVVVDVS | 3469 |
| Region + CH2 Region + | HEDPEVKFNWYVDGVEVHNAKTKPREEQYNSTYRVVSVLTVLH | |
| CH3 Region | QDWLNGKEYKCKVSNKALPAPIEKTISKAKGQPREPQVYTLPP | |
| Without C-terminal | SRDELTKNQVSLTCLVKGFYPSDIAVEWESNGQPENNYKITPP | |
| Lysine | VLDSDGSFFLYSKLTVDKSRWQQGNVFSCSVMHEALHNHYTQK | |
| | SLSLSPG | |
| hIgG1 Hinge Region + | EPKSCDKTHTCPPCPAPELLGGPSVFLFPPKPKDTLMISRTPE | 3470 |
| CH2 Region + CH3 | VTCVVVDVSHEDPEVKFNWYVDGVEVHNAKTKPREEQYNSTYR | |
| Region | VVSVLTVLHQDWLNGKEYKCKVSNKALPAPIEKTISKAKGQPR | |
| With C-terminal Lysine | EPQVYTLPPSRDELTKNQVSLTCLVKGFYPSDIAVEWESNGQP | |
| | ENNYKTTPPVLDSDGSFFLYSKLTVDKSRWQQGNVFSCSVMHE | |
| | ALHNHYTQKSLSLSPGK | |
| hIgG1 Hinge Region + | EPKSCDKTHTCPPCPAPELLGGPSVFLFPPKPKDILMISRIPE | 3471 |
| CH2 Region + CH3 | VTCVVVDVSHEDPEVKFNWYVDGVEVHNAKTKPREEQYNSTYR | |
| Region | VVSVLTVLHQDWLNGKEYKCKVSNKALPAPIEKTISKAKGQPR | |
| Without C-terminal | EPQVYTLPPSRDELTKNQVSLTCLVKGFYPSDIAVEWESNGQP | |
| Lysine | ENNYKTTPPVLDSDGSFFLYSKLTVDKSRWQQGNVFSCSVMHE | |
| | ALHNHYTQKSLSLSPG | |
| hIgG1 CH1 + Hinge | ASTKGPSVFPLAPSSKSTSGGTAALGCLVKDYFPEPVTVSWNS | 3472 |
| Region + CH2 Region + | GALISGVHTFPAVLQSSGLYSLSSVVTVPSSSLGTQTYICNVN | |
| CH3 Region | HKPSNTKVDKKVEPKSCDKTHTCPPCPAPELLGGPSVFLFPPK | |
| With C-terminal Lysine | PKDTLMISRTPEVTCVVVDVSHEDPEVKFNWYVDGVEVHNAKT | |
| | KPREEQYNSTYRVVSVLIVLHQDWLNGKEYKCKVSNKALPAPI | |
| | EKTISKAKGQPREPQVYTLPPSRDELTKNQVSLTCLVKGFYPS | |
| | DIAVEWESNGQPENNYKTTPPVLDSDGSFFLYSKLTVDKSRWQ | |
| | QGNVFSCSVMHEALHNHYTQKSLSLSPGK | |
| hIgG1 CH1 + Hinge | ASTKGPSVFPLAPSSKSTSGGTAALGCLVKDYFPEPVTVSWNS | 3473 |
| Region + CH2 Region + | GALTSGVHTFPAVLQSSGLYSLSSVVTVPSSSLGTQTYICNVN | |
| CH3 Region | HKPSNTKVDKKVEPKSCDKTHTCPPCPAPELLGGPSVFLFPPK | |
| Without C-terminal | PKDTLMISRTPEVTCVVVDVSHEDPEVKFNWYVDGVEVHNAKT | |
| Lysine | KPREEQYNSTYRVVSVLTVLHQDWLNGKEYKCKVSNKALPAPI | |
| | EKTISKAKGQPREPQVYTLPPSRDELTKNQVSLTCLVKGFYPS | |
| | DIAVEWESNGQPENNYKTTPPVLDSDGSFFLYSKLTVDKSRWQ | |
| | QGNVFSCSVMHEALHNHYTQKSLSLSPG | |
| hIgG4 CH1 Region | ASTKGPSVFPLAPCSRSTSESTAALGCLVKDYFPEPVTVSWNS | 3474 |
| | GALTSGVHTFPAVLQSSGLYSLSSVVTVPSSSLGTKTYTCNVD | |
| | HKPSNTKVDKRV | |
| hIgG4 Hinge Region | ESKYGPPCPSCP | 3475 |
| hIgG4 CH2 Region | APEFLGGPSVFLFPPKPKDTLMISRTPEVTCVVVDVSQEDPEV | 3476 |
| | QFNWYVDGVEVHNAKTKPREEQFNSTYRVVSVLTVLHQDWLNG | |
| | KEYKCKVSNKGLPSSIEKTISKAK | |
| hIgG4 CH3 Region | GQPREPQVYTLPPSQEEMTKNQVSLTCLVKGFYPSDIAVEWES | 3477 |
| With C-terminal Lysine | NGQPENNYKITPPVLDSDGSFFLYSRLTVDKSRWQEGNVFSCS | |
| | VMHEALHNHYTQKSLSLSLGK | |
| hIgG4 CH3 Region | GQPREPQVYTLPPSQEEMTKNQVSLTCLVKGFYPSDIAVEWES | 3478 |
| Without C-terminal | NGQPENNYKTTPPVLDSDGSFFLYSRLTVDKSRWQEGNVFSCS | |
| Lysine | VMHEALHNHYTQKSLSLSLG | |
| hIgG4 CH2 Region + | APEFLGGPSVFLFPPKPKDTLMISRTPEVTCVVVDVSQEDPEV | 3479 |
| CH3 Region | QFNWYVDGVEVHNAKTKPREEQFNSTYRVVSVLTVLHQDWLNG | |
| With C-terminal Lysine | KEYKCKVSNKGLPSSIEKTISKAKGQPREPQVYTLPPSQEEMT | |
| | KNQVSLTCLVKGFYPSDIAVEWESNGQPENNYKTTPPVLDSDG | |
| | SFFLYSRLTVDKSRWQEGNVFSCSVMHEALHNHYTQKSLSLSL | |
| | GK | |
| hIgG4 CH2 Region + | APEFLGGPSVFLFPPKPKDTLMISRTPEVTCVVVDVSQEDPEV | 3480 |
| CH3 Region | QFNWYVDGVEVHNAKTKPREEQFNSTYRVVSVLIVLHQDWLNG | |
| Without C-terminal | KEYKCKVSNKGLPSSIEKTISKAKGQPREPQVYTLPPSQEEMT | |
| Lysine | KNQVSLTCLVKGFYPSDIAVEWESNGQPENNYKTTPPVLDSDG | |
| | SFFLYSRLTVDKSRWQEGNVFSCSVMHEALHNHYTQKSLSLSL | |
| | G | |
| hIgG4 Partial Hinge | PCPSCPAPEFLGGPSVFLFPPKPKDTLMISRTPEVTCVVVDVS | 3481 |
| Region + CH2 Region + | QEDPEVQFNWYVDGVEVHNAKTKPREEQFNSTYRVVSVLTVLH | |
| CH3 Region | QDWLNGKEYKCKVSNKGLPSSIEKTISKAKGQPREPQVYTLPP | |
| With C-terminal Lysine | SQEEMTKNQVSLTCLVKGFYPSDIAVEWESNGQPENNYKITPP | |
| | VLDSDGSFFLYSRLTVDKSRWQEGNVFSCSVMHEALHNHYTQK | |
| | SLSLSLGK | |
| hIgG4 Partial Hinge | PCPSCPAPEFLGGPSVFLFPPKPKDTLMISRTPEVTCVVVDVS | 3482 |
| Region + CH2 Region + | QEDPEVQFNWYVDGVEVHNAKTKPREEQFNSTYRVVSVLTVLH | |
| CH3 Region | QDWLNGKEYKCKVSNKGLPSSIEKTISKAKGQPREPQVYTLPP | |
| Without C-terminal | SQEEMTKNQVSLTCLVKGFYPSDIAVEWESNGQPENNYKITPP | |
| Lysine | VLDSDGSFFLYSRLTVDKSRWQEGNVFSCSVMHEALHNHYTQK | |
| | SLSLSLG | |
| hIgG4 Hinge Region + | ESKYGPPCPSCPAPEFLGGPSVFLFPPKPKDTLMISRTPEVTC | 3483 |
| CH2 Region + CH3 | VVVDVSQEDPEVQFNWYVDGVEVHNAKTKPREEQFNSTYRVVS | |
| Region | VLTVLHQDWLNGKEYKCKVSNKGLPSSIEKTISKAKGQPREPQ | |
| With C-terminal Lysine | VYTLPPSQEEMTKNQVSLTCLVKGFYPSDIAVEWESNGQPENN | |
| | YKTTPPVLDSDGSFFLYSRLTVDKSRWQEGNVFSCSVMHEALH | |
| | NHYTQKSLSLSLGK | |
| hIgG4 Hinge Region + | ESKYGPPCPSCPAPEFLGGPSVFLFPPKPKDTLMISRTPEVTC | 3484 |
| CH2 Region + CH3 | VVVDVSQEDPEVQFNWYVDGVEVHNAKIKPREEQFNSTYRVVS | |
| Region | VLTVLHQDWLNGKEYKCKVSNKGLPSSIEKTISKAKGQPREPQ | |
| Without C-terminal | VYTLPPSQEEMTKNQVSLTCLVKGFYPSDIAVEWESNGQPENN | |
| Lysine | YKTTPPVLDSDGSFFLYSRLTVDKSRWQEGNVFSCSVMHEALH | |
| | NHYTQKSLSLSLG | |
| hIgG4 CH1 + Hinge | ASTKGPSVFPLAPCSRSTSESTAALGCLVKDYFPEPVTVSWNS | 3485 |
| Region + CH2 Region + | GALTSGVHTFPAVLQSSGLYSLSSVVTVPSSSLGTKTYTCNVD | |
| CH3 Region | HKPSNTKVDKRVESKYGPPCPSCPAPEFLGGPSVFLFPPKPKD | |
| With C-terminal Lysine | TLMISRTPEVTCVVVDVSQEDPEVQFNWYVDGVEVHNAKTKPR | |
| | EEQFNSTYRVVSVLIVLHQDWLNGKEYKCKVSNKGLPSSIEKT | |
| | ISKAKGQPREPQVYTLPPSQEEMTKNQVSLTCLVKGFYPSDIA | |
| | VEWESNGQPENNYKTTPPVLDSDGSFFLYSRLTVDKSRWQEGN | |
| | VFSCSVMHEALHNHYTQKSLSLSLGK | |
| hIgG4 CH1 + Hinge | ASTKGPSVFPLAPCSRSTSESTAALGCLVKDYFPEPVTVSWNS | 3486 |
| Region + CH2 Region + | GALTSGVHTFPAVLQSSGLYSLSSVVTVPSSSLGTKTYTCNVD | |
| CH3 Region | HKPSNTKVDKRVESKYGPPCPSCPAPEFLGGPSVFLFPPKPKD | |
| Without C-terminal | TLMISRTPEVTCVVVDVSQEDPEVQFNWYVDGVEVHNAKTKPR | |
| Lysine | EEQFNSTYRVVSVLIVLHQDWLNGKEYKCKVSNKGLPSSIEKT | |
| | ISKAKGQPREPQVYTLPPSQEEMTKNQVSLTCLVKGFYPSDIA | |
| | VEWESNGQPENNYKTTPPVLDSDGSFFLYSRLTVDKSRWQEGN | |
| | VFSCSVMHEALHNHYTQKSLSLSLG | |
| Ig light chain kappa | RTVAAPSVFIFPPSDEQLKSGTASVVCLLNNFYPREAKVQWKV | 3487 |
| constant region (κCL) | DNALQSGNSQESVTEQDSKDSTYSLSSTLILSKADYEKHKVYA | |
| | CEVTHQGLSSPVTKSFNRGEC | |
| Ig light chain kappa | GQPKANPTVTLFPPSSEELQANKATLVCLISDFYPGAVTVAWK | 3489 |
| constant region (λCL) | ADGSPVKAGVETTKPSKQSNNKYAASSYLSLTPEQWKSHRSYS | |
| | CQVTHEGSTVEKTVAPTECS | |

[0508] In some embodiments, the antibody (or heterologous polypeptide) comprises one or more hIg constant region, wherein the amino acid sequence of the one or more hIg constant region comprises or consists of an amino acid sequence at least 85%, 86%, 87%, 88%, 89%, 90%, 91%, 92%, 93%, 94%, 95%, 96%, 97%, 98%, 99%, or 100% identical to the amino acid sequence of a polypeptide set forth in Table 15. In some embodiments, the amino acid sequence of the one or more hIg constant region comprises or consists of an amino acid sequence set forth in Table 15.

[0509] In some embodiments, the amino acid sequence of the one or more hIg constant region comprises or consists of an amino acid sequence set forth in Table 15, and further comprises 1 or more but less than 15% (less than 12%, less than 10%, less than 8%), amino acid variations (e.g., amino acid substitutions, deletions, or additions). In some embodiments, the amino acid sequence of the one or more hIg constant region comprises or consists of an amino acid sequence set forth in Table 15, comprising or consisting of at least about 1, 2, 3, 4, 5, 6, 7, 8, 9, 10, or more amino acid variations (e.g., amino acid substitutions, deletions, or additions). In some embodiments, the amino acid sequence of the one or more hIg constant region comprises or consists of an amino acid sequence set forth in Table 15, comprising or consisting of about 1, 2, 3, 4, 5, 6, 7, 8, 9, 10, or more amino acid variations (e.g., amino acid substitutions, deletions, or additions). In some embodiments, the amino acid sequence of the one or more hIg constant regions comprises or consists of an amino acid sequence set forth in Table 15, comprising or consisting of about no more than 1, 2, 3, 4, 5, 6, 7, 8, 9, 10, or more amino acid variations (e.g., amino acid substitutions, deletions, or additions).

[0510] In some embodiments, the amino acid sequence of the one or more hIg constant regions comprises or consists of an amino acid sequence set forth in Table 15, and further comprises 1 or more but less than 15% (less than 12%, less than 10%, less than 8%), amino acid substitutions. In some embodiments, the amino acid sequence of the one or more hIg constant regions comprises or consists of an amino acid sequence set forth in Table 15, comprising or consisting of at least about 1, 2, 3, 4, 5, 6, 7, 8, 9, 10, or more amino acid substitutions. In some embodiments, the amino acid sequence of the one or more hIg constant regions comprises or consists of an amino acid sequence set forth in Table 15, comprising or consisting of about 1, 2, 3, 4, 5, 6, 7, 8, 9, 10, or more amino acid substitutions. In some embodiments, the amino acid sequence of the one or more hIg constant regions comprises or consists of an amino acid sequence set forth in Table 15, comprising or consisting of about no more than 1, 2, 3, 4, 5, 6, 7, 8, 9, 10, or more amino acid substitutions.

[0511] In some embodiments, the amino acid sequence of the one or more hIg constant regions comprises or consists of an amino acid sequence at least 85%, 86%, 87%, 88%, 89%, 90%, 91%, 92%, 93%, 94%, 95%, 96%, 97%, 98%, 99%, or 100% identical to the amino acid sequence of any one of SEQ ID NOS: 3461-3489. In some embodiments, the amino acid sequence of the one or more hIg constant regions comprises or consists of the amino acid sequence of any one of SEQ ID NOS: 3461-3489.

[0512] In some embodiments, the amino acid sequence of the one or more hIg constant regions comprises or consists of the amino acid sequence of any one of SEQ ID NOS: 3461-3489, and further comprises 1 or more but less than 15% (less than 12%, less than 10%, less than 8%), amino acid variations (e.g., amino acid substitutions, deletions, or additions). In some embodiments, the amino acid sequence of the one or more hIg constant regions comprises or consists of the amino acid sequence of any one of SEQ ID NOS: 3461-3489, comprising or consisting at least about 1, 2, 3, 4, 5, 6, 7, 8, 9, 10, or more amino acid variations (e.g., amino acid substitutions, deletions, or additions). In some embodiments, the amino acid sequence of the one or more hIg constant regions comprises or consists of the amino acid sequence of any one of SEQ ID NOS: 3461-3489, comprising or consisting about 1, 2, 3, 4, 5, 6, 7, 8, 9, or 10 amino acid variations (e.g., amino acid substitutions, deletions, or additions). In some embodiments, the amino acid sequence of the one or more hIg constant regions comprises or consists of the amino acid sequence of any one of SEQ ID NOS: 3461-3489, comprising or consisting of no more than about 1, 2, 3, 4, 5, 6, 7, 8, 9, or 10 amino acid variations (e.g., amino acid substitutions, deletions, or additions).

[0513] In some embodiments, the amino acid sequence of the one or more hIg constant regions comprises or consists of the amino acid sequence of any one of SEQ ID NOS: 3461-3489, and further comprises 1 or more but less than 15% (less than 12%, less than 10%, less than 8%), amino acid substitutions. In some embodiments, the amino acid sequence of the one or more hIg constant regions comprises or consists of the amino acid sequence of any one of SEQ ID NOS: 3461-3489, comprising or consisting at least about 1, 2, 3, 4, 5, 6, 7, 8, 9, 10, or more amino acid substitutions. In some embodiments, the amino acid sequence of the one or more hIg constant regions comprises or consists of the amino acid sequence of any one of SEQ ID NOS: 3461-3489, comprising or consisting about 1, 2, 3, 4, 5, 6, 7, 8, 9, or 10 amino acid substitutions. In some embodiments, the amino acid sequence of the one or more hIg constant regions comprises or consists of the amino acid sequence of any one of SEQ ID NOS: 3461-3489, comprising or consisting of no more than about 1, 2, 3, 4, 5, 6, 7, 8, 9, or 10 amino acid substitutions.

### Ig Effector Function

[0514] As described herein, in some embodiments, the antibody (or heterologous polypeptide) comprises an Fc region (e.g., described herein). In some embodiments, the Fc region of an antibody (or heterologous polypeptide) described herein exhibits a decrease in one or more Fc effector function relative to a reference (e.g., wild type) Fc region. Exemplary Fc effector functions include, but are not limited to, antibody dependent cellular cytotoxicity (ADCC), antibody dependent cellular phagocytosis (ADCP), complement dependent cytotoxicity (CDC), and binding affinity to one or more human Fc receptor (e.g., an Fcγ receptor (e.g., FcγRI, FcγRIIa, FcγRIIc, FcγRIIIa, and/or FcγRIIIb (e.g., FcγRI, FcγIIa, and/or FcγIIIa))).

[0515] Standard in vitro and/or in vivo assays known in the art can be conducted to evaluate Fc effector function, including, any one or more of ADCC, CDC, ADCP, Fc receptor (e.g., Fcγ receptor) binding affinity, and C1q binding affinity.

[0516] For example, ADCC activity can be assessed utilizing standard (radioactive and non-radioactive) methods known in the art (see, e.g., WO2006/082515, WO2012/130831), the entire contents of each of which is incorporated by reference herein for all purposes). For example, ADCC activity can be assessed using a chromium-5 (⁵¹Cr) assay. Briefly, ⁵¹Cr is pre-loaded into target cells, NK cells are added to the culture, and radioactivity in the cell culture supernatant is assessed (indicative of lysis of the target cells by the NK cells). Similar non-radioactive assays can also be utilized that employ a similar method, but the target cells are pre-loaded with fluorescent dyes, such as calcein-AM, CFSE, BCECF, or lanthanide fluorophore (Europium). See, e.g., Parekh, Bhavin S et al. “Development and validation of an antibody-dependent cell-mediated cytotoxicity-reporter gene assay.” mAbs vol. 4, 3 (2012): 310-8. Doi:10.4161/mabs.19873, the entire contents of which is incorporated by reference herein for all purposes. Exemplary commercially available non-radioactive assays include, for example, ACTI™ non-radioactive cytotoxicity assay for flow cytometry (Cell Technology, Inc. Mountain View, Calif.; and CytoTox 96® non-radioactive cytotoxicity assay (Promega, Madison, Wis.). Additional non-limiting examples of in vitro assays that can be used to assess ADCC activity of a fusion protein described herein include those described in U.S. Pat. Nos. 5,500,362; 5,821,337; Hellstrom, I., et al., Proc. Nat'l Acad. Sci. USA 83 (1986) 7059-7063; Hellstrom, I., et al., Proc. Nat'l Acad. Sci. USA 82 (1985) 1499-1502; and Bruggemann, M., et al., J. Exp. Med. 166 (1987) 1351-1361, the entire contents of each of which is incorporated by reference herein. Alternatively, or additionally, ADCC activity of a fusion protein described herein may be assessed in vivo, e.g., in an animal model such as that disclosed in Clynes, et al., Proc. Nat'l Acad. Sci. USA 95 (1998) 652-656, the entire contents of which is incorporated by reference herein for all purposes.

[0517] C1q binding assays can be utilized to assess the ability of a an antibody (or heterologous polypeptide) described herein to bind C1q (or bind with less affinity than a reference fusion protein) and hence lack (or have decreased) CDC activity. The binding of an antibody (or heterologous polypeptide) described herein to C1q can be determined by a variety of in vitro assays (e.g., biochemical or immunological based assays) known in the art for determining Fc-C1q interactions, including e.g., equilibrium methods (e.g., enzyme-linked immunosorbent assay (ELISA) or radioimmunoassay (RIA)), or kinetic methods (e.g., surface plasmon resonance (SPR) analysis), and other methods such as indirect binding assays, competitive inhibition assays, fluorescence resonance energy transfer (FRET), gel electrophoresis, and chromatography (e.g., gel filtration). These and other methods may utilize a label on one or more of the components being examined and/or employ a variety of detection methods including but not limited to chromogenic, fluorescent, luminescent, or isotopic labels. A detailed description of binding affinities and kinetics can be found in e.g., Paul, W. E., ed., Fundamental Immunology, 4^{th} Ed., Lippincott-Raven, Philadelphia (1999), the entire contents of which is incorporated by reference herein. For example, see, e.g., C1q and C3c binding ELISAs described in WO2006/029879 and WO2005/100402, the entire contents of each of which is incorporated by reference herein for all purposes. Additional CDC activity assays include those described in e.g., Gazzano-Santoro, et al., J. Immunol. Methods 202 (1996) 163; Cragg, M. S., et al., Blood 101 (2003) 1045-1052; and Cragg, M. S., and Glennie, M. J., Blood 103 (2004) 2738-2743), the entire contents of each of which is incorporated by reference herein for all purposes.

[0518] ADCP activity can be measured by in vitro or in vivo methods known in the art and also commercially available assays (see, e.g., van de Donk N W, Moreau P, Plesner T, et al. “Clinical efficacy and management of monoclonal antibodies targeting CD38 and SLAMF7 in multiple myeloma,” Blood, 127(6):681-695 (2016), the entire contents of each of which is incorporated by reference herein for all purposes). For example, a primary cell based ADCP assay can be used in which fresh human peripheral blood mononuclear cells (PBMCs) are isolated, monocytes isolated and differentiated in culture to macrophages using standard procedures. The macrophages are fluorescently labeled added to cultures containing fluorescently labeled target cells. Phagocytosis events can be analyzed using FACS screening and/or microscopy. A modified reporter version of the above described assay can also be used that employs an engineered cell line that stably expresses FcγRIIa (CD32a) as the effector cell line (e.g., an engineered T cell line, e.g., THP-1), removing the requirement for primary cells. Exemplary ADCP assays are described in e.g., Ackerman, M. E. et al. A robust, high-throughput assay to determine the phagocytic activity of clinical antibody samples. J. Immunol. Methods 366, 8-19 (2011); and Mcandrew, E. G. et al. Determining the phagocytic activity of clinical antibody samples. J. Vis. Exp. 3588 (2011). Doi:10.3791/3588; the entire contents of each of which is incorporated by reference herein.

[0519] Binding of an antibody (or heterologous polypeptide) described herein to an Fc receptor can be determined by a variety of in vitro assays (e.g., biochemical or immunological based assays) known in the art for determining Fc-Fc receptor interactions, i.e., specific binding of an Fc region to an Fc receptor. Common assays include equilibrium methods (e.g., enzyme-linked immunosorbent assay (ELISA) or radioimmunoassay (RIA)), or kinetic methods (e.g., surface plasmon resonance (SPR) analysis), and other methods such as indirect binding assays, competitive inhibition assays, fluorescence resonance energy transfer (FRET), gel electrophoresis, and chromatography (e.g., gel filtration). These and other methods may utilize a label on one or more of the components being examined and/or employ a variety of detection methods including but not limited to chromogenic, fluorescent, luminescent, or isotopic labels. A detailed description of binding affinities and kinetics can be found in e.g., Paul, W. E., ed., Fundamental Immunology, 4” Ed., Lippincott-Raven, Philadelphia (1999), the entire contents of which is incorporated by reference herein for all purposes.

[0520] In some embodiments, the Fc region of an antibody (or heterologous polypeptide) described herein is varied (e.g., comprises one or more amino acid variation (e.g., one or more amino acid substitution, deletion, addition, etc.)) (referred to herein as a “varied Fc region”), relative to the amino acid sequence of a reference Fc region (e.g., a wild type Fc region, e.g., Table 15 herein (e.g., SEQ ID NOS: 178, 180, 191, or 195). In some embodiments, the one or more amino acid variation (e.g., the one or more amino acid substitution, deletion, addition, etc.)) decreases or abolishes one or more Fc effector function, relative to a reference Fc that does not comprise the variation (e.g., the one or more variation (e.g., the one or more amino acid substitution, deletion, addition, etc.)).

[0521] In some embodiments, the antibody (or heterologous polypeptide) comprising a varied Fc region exhibits no detectable or decreased ADCC compared to a reference antibody (or heterologous polypeptide) that does not comprise the Fc region variation (e.g., the one or more amino acid variation (e.g., one or more amino acid substitution, deletion, or addition)). In some embodiments, the antibody (or heterologous polypeptide) comprising a varied Fc region exhibits no detectable or decreased CDC compared to a reference antibody (or heterologous polypeptide) that does not comprise the Fc region variation (e.g., the one or more amino acid variation (e.g., one or more amino acid substitution, deletion, or addition)). In some embodiments, the antibody (or heterologous polypeptide) comprising a modified Fc region exhibits no detectable or decreased ADCP compared to a reference antibody (or heterologous polypeptide) that does not comprise the Fc region variation (e.g., the one or more variation (e.g., one or more amino acid substitution, deletion, or addition)). In some embodiments, the antibody (or heterologous polypeptide) comprising a varied Fc region exhibits decreased or no detectable specific binding affinity to one or more human Fc receptor (e.g., an Fcγ receptor (e.g., FcγRI, FcγRIIa, FcγRIIc, FcγRIIIa, and/or FcγRIIIb (e.g., FcγRI, FcγIIa, and/or FcγIIIa))) compared to a reference antibody (or heterologous polypeptide) that does not comprise the Fc region variation (e.g., the one or more variation (e.g., one or more amino acid substitution, deletion, or addition)). In some embodiments, the antibody (or heterologous polypeptide) comprising a varied Fc region exhibits decreased or no detectable specific binding affinity to FcγRI, FcγIIa, and/or FcγIIIa compared to an antibody (or heterologous polypeptide) that does not comprise the Fc region variation (e.g., the one or more variation (e.g., one or more amino acid substitution, deletion, or addition)). In some embodiments, the antibody (or heterologous polypeptide) comprising a varied Fc exhibits decreased or no detectable specific binding affinity to FcγRI compared to a reference antibody (or heterologous polypeptide) that does not comprise the Fc variation (e.g., the one or more variation (e.g., one or more amino acid substitution, deletion, or addition)). In some embodiments, the antibody (or heterologous polypeptide) comprising a varied Fc exhibits decreased or no detectable specific binding affinity to FcγIIa compared to a reference antibody (or heterologous polypeptide) that does not comprise the Fc region variation (e.g., the one or more variation (e.g., one or more amino acid substitution, deletion, or addition)). In some embodiments, the antibody (or heterologous polypeptide) comprising a varied Fc region exhibits decreased or no detectable specific binding affinity to FcγIIIa compared to an antibody (or heterologous polypeptide) that does not comprise the Fc region variation (e.g., the one or more variation (e.g., one or more amino acid substitution, deletion, or addition)). In some embodiments, the antibody (or heterologous polypeptide) comprising a varied Fc region exhibits decreased or no detectable specific binding affinity to C1q compared to a reference antibody (or heterologous polypeptide) that does not comprise the Fc region variation (e.g., the one or more variation (e.g., one or more amino acid substitution, deletion, or addition)).

[0522] In some embodiments, the antibody (or heterologous polypeptide) comprising an Fc region exhibits no detectable ADCC. In some embodiments, the antibody (or heterologous polypeptide) comprising an Fc region exhibits no detectable CDC. In some embodiments, the antibody (or heterologous polypeptide) comprising an Fc region exhibits no detectable ADCP. In some embodiments, the antibody (or heterologous polypeptide) comprising an Fc region exhibits no detectable specific binding affinity to one or more human Fc receptor (e.g., an Fcγ receptor (e.g., FcγRI, FcγRIIa, FcγRIIc, FcγRIIIa, and/or FcγRIIIb (e.g., FcγRI, FcγIIa, and/or FcγIIIa))). In some embodiments, the antibody (or heterologous polypeptide) comprising an Fc region exhibits no detectable specific binding affinity to FcγRI, FcγIIa, and/or. In some embodiments, the antibody (or heterologous polypeptide) comprising an Fc exhibits no detectable specific binding affinity to FcγRI. In some embodiments, the antibody (or heterologous polypeptide) comprising an Fc exhibits no detectable specific binding affinity to FcγIIa. In some embodiments, the antibody (or heterologous polypeptide) comprising an Fc region exhibits no detectable specific binding affinity to FcγIIIa. In some embodiments, the antibody (or heterologous polypeptide) comprising an Fc region exhibits no detectable specific binding affinity to C1q.

[0523] Amino acid substitutions that decrease or abolish one or more Fc effector function are known in the art. See for example, Saunders Kevin, “Conceptual Approaches to Modulating Antibody Effector Functions and Circulation Half-Life,” Frontiers in Immunology, v10 (Jun. 7, 2019) DOI=10.3389/fimmu.2019.01296, the full contents of which is incorporated by reference herein for all purposes, see more particularly for example, e.g., Table 8 of Saunders.

[0524] In some embodiments, the varied Fc comprises a hIgG1 Fc region comprising one or more amino acid variations (e.g., one or more amino acid substitutions). In some embodiments, the hIgG1 Fc region comprises an amino acid substitution at amino acid positions L234, L235, and/or P329, EU numbering according to Kabat. In some embodiments, the hIgG1 Fc region comprises the following amino acid substitutions L234A and/or L235A, EU numbering according to Kabat. In some embodiments, the hIgG1 Fc region comprises the following amino acid substitutions L234A, L235A, and P329G, EU numbering according to Kabat. In some embodiments, the hIgG1 Fc region comprises the following amino acid substitutions L234A, L235A, and P329A, EU numbering according to Kabat.

[0525] In some embodiments, the varied Fc region comprises a hIg4 Fc region comprising one or more amino acid variations (e.g., one or more amino acid substitutions). In some embodiments, the hIgG4 Fc region comprises an amino acid substitution at amino acid positions D228, F234, and/or L235, EU numbering according to Kabat. In some embodiments, the hIgG4 Fc region comprises the following amino acid substitutions S228P, F234A, and/or L235A, EU numbering according to Kabat. In some embodiments, the hgG4 Fc region comprises the following amino acid substitutions S228P, F234A, and/or L235E, EU numbering according to Kabat. In some embodiments, the hIgG4 Fc comprises the following amino acid substitutions S228P and/or L235E, EU numbering according to Kabat.

[0526] The amino acid sequence of exemplary varied Fc regions that are known in the art to exhibit a decrease in one more effector function is provided in Table 16.

TABLE 16
The Amino Acid Sequence of Exemplary Varied Fc Regions.

| | | SEQ |
|---|---|---|
| Description | Amino Acid Sequence | ID NO |
| hIgG1 CH2 Region + | PCPAPEAAGGPSVFLFPPKPKDTLMISRTPEVTCVVVDVSHED | 3490 |
| CH3 Region | PEVKFNWYVDGVEVHNAKTKPREEQYNSTYRVVSVLIVLHQDW | |
| L234A/L235A | LNGKEYKCKVSNKALPAPIEKTISKAKGQPREPQVYTLPPSRD | |
| With C-terminal Lysine | ELTKNQVSLTCLVKGFYPSDIAVEWESNGQPENNYKTTPPVLD | |
| | SDGSFFLYSKLTVDKSRWQQGNVFSCSVMHEALHNHYTQKSLS | |
| | LSPGK | |
| hIgG1 CH2 Region + | PCPAPEAAGGPSVFLFPPKPKDTLMISRTPEVTCVVVDVSHED | 3491 |
| CH3 Region | PEVKFNWYVDGVEVHNAKIKPREEQYNSTYRVVSVLTVLHQDW | |
| L234A/L235A | LNGKEYKCKVSNKALPAPIEKTISKAKGQPREPQVYTLPPSRD | |
| Without C-terminal | ELTKNQVSLTCLVKGFYPSDIAVEWESNGQPENNYKTTPPVLD | |
| Lysine | SDGSFFLYSKLTVDKSRWQQGNVFSCSVMHEALHNHYTQKSLS | |
| | LSPG | |
| hIgG1 CH2 Region + | PCPAPEAAGGPSVFLFPPKPKDTLMISRTPEVTCVVVDVSHED | 3492 |
| CH3 Region | PEVKFNWYVDGVEVHNAKTKPREEQYNSTYRVVSVLIVLHQDW | |
| L234A/L235A/P329A | LNGKEYKCKVSNKALAAPIEKTISKAKGQPREPQVYTLPPSRD | |
| With C-terminal Lysine | ELTKNQVSLTCLVKGFYPSDIAVEWESNGQPENNYKTTPPVLD | |
| | SDGSFFLYSKLTVDKSRWQQGNVFSCSVMHEALHNHYTQKSLS | |
| | LSPGK | |
| hIgG1 CH2 Region + | PCPAPEAAGGPSVFLFPPKPKDTLMISRTPEVTCVVVDVSHED | 3493 |
| CH3 Region | PEVKFNWYVDGVEVHNAKTKPREEQYNSTYRVVSVLIVLHQDW | |
| L234A/L235A/P329A | LNGKEYKCKVSNKALAAPIEKTISKAKGQPREPQVYTLPPSRD | |
| Without C-terminal | ELTKNQVSLTCLVKGFYPSDIAVEWESNGQPENNYKTTPPVLD | |
| Lysine | SDGSFFLYSKLTVDKSRWQQGNVFSCSVMHEALHNHYTQKSLS | |
| | LSPG | |
| hIgG1 CH2 Region + | PCPAPEAAGGPSVFLFPPKPKDTLMISRTPEVTCVVVDVSHED | 3494 |
| CH3 Region | PEVKFNWYVDGVEVHNAKTKPREEQYNSTYRVVSVLIVLHQDW | |
| L234A/L235A/P329G | LNGKEYKCKVSNKALGAPIEKTISKAKGQPREPQVYTLPPSRD | |
| With C-terminal Lysine | ELTKNQVSLTCLVKGFYPSDIAVEWESNGQPENNYKITPPVLD | |
| | SDGSFFLYSKLTVDKSRWQQGNVFSCSVMHEALHNHYTQKSLS | |
| | LSPGK | |
| hIgG1 CH2 Region + | PCPAPEAAGGPSVFLFPPKPKDTLMISRTPEVTCVVVDVSHED | 3495 |
| CH3 Region | PEVKFNWYVDGVEVHNAKTKPREEQYNSTYRVVSVLTVLHQDW | |
| L234A/L235A/P329G | LNGKEYKCKVSNKALGAPIEKTISKAKGQPREPQVYTLPPSRD | |
| Without C-terminal | ELTKNQVSLTCLVKGFYPSDIAVEWESNGQPENNYKTTPPVLD | |
| Lysine | SDGSFFLYSKLTVDKSRWQQGNVFSCSVMHEALHNHYTQKSLS | |
| | LSPG | |
| hIgG1 Partial Hinge | TCPPCPAPEAAGGPSVFLFPPKPKDTLMISRTPEVTCVVVDVS | 3496 |
| Region + CH2 Region + | HEDPEVKFNWYVDGVEVHNAKTKPREEQYNSTYRVVSVLTVLH | |
| CH3 Region | QDWLNGKEYKCKVSNKALPAPIEKTISKAKGQPREPQVYTLPP | |
| L234A/L235A | SRDELTKNQVSLTCLVKGFYPSDIAVEWESNGQPENNYKTTPP | |
| With C-terminal Lysine | VLDSDGSFFLYSKLTVDKSRWQQGNVFSCSVMHEALHNHYTQK | |
| | SLSLSPGK | |
| hIgG1 Partial Hinge | TCPPCPAPEAAGGPSVFLFPPKPKDTLMISRTPEVTCVVVDVS | 3497 |
| Region + CH2 Region + | HEDPEVKFNWYVDGVEVHNAKTKPREEQYNSTYRVVSVLTVLH | |
| CH3 Region | QDWLNGKEYKCKVSNKALPAPIEKTISKAKGQPREPQVYTLPP | |
| L234A/L235A | SRDELTKNQVSLTCLVKGFYPSDIAVEWESNGQPENNYKTTPP | |
| Without C-terminal | VLDSDGSFFLYSKLTVDKSRWQQGNVFSCSVMHEALHNHYTQK | |
| Lysine | SLSLSPG | |
| hIgG1 Partial Hinge | TCPPCPAPEAAGGPSVFLFPPKPKDTLMISRTPEVTCVVVDVS | 3498 |
| Region + CH2 Region + | HEDPEVKFNWYVDGVEVHNAKTKPREEQYNSTYRVVSVLTVLH | |
| CH3 Region | QDWLNGKEYKCKVSNKALAAPIEKTISKAKGQPREPQVYTLPP | |
| L234A/L235A/P329A | SRDELTKNQVSLTCLVKGFYPSDIAVEWESNGQPENNYKTTPP | |
| With C-terminal Lysine | VLDSDGSFFLYSKLTVDKSRWQQGNVFSCSVMHEALHNHYTQK | |
| | SLSLSPGK | |
| hIgG1 Partial Hinge | TCPPCPAPEAAGGPSVFLFPPKPKDTLMISRTPEVTCVVVDVS | 3499 |
| Region + CH2 Region + | HEDPEVKFNWYVDGVEVHNAKTKPREEQYNSTYRVVSVLTVLH | |
| CH3 Region | QDWLNGKEYKCKVSNKALAAPIEKTISKAKGQPREPQVYTLPP | |
| L234A/L235A/P329A | SRDELTKNQVSLTCLVKGFYPSDIAVEWESNGQPENNYKTTPP | |
| Without C-terminal | VLDSDGSFFLYSKLTVDKSRWQQGNVFSCSVMHEALHNHYTQK | |
| Lysine | SLSLSPG | |
| hIgG1 Partial Hinge | TCPPCPAPEAAGGPSVFLFPPKPKDTLMISRTPEVTCVVVDVS | 3500 |
| Region + CH2 Region + | HEDPEVKFNWYVDGVEVHNAKTKPREEQYNSTYRVVSVLTVLH | |
| CH3 Region | QDWLNGKEYKCKVSNKALGAPIEKTISKAKGQPREPQVYTLPP | |
| L234A/L235A/P329G | SRDELTKNQVSLTCLVKGFYPSDIAVEWESNGQPENNYKTTPP | |
| With C-terminal Lysine | VLDSDGSFFLYSKLTVDKSRWQQGNVFSCSVMHEALHNHYTQK | |
| | SLSLSPGK | |
| hIgG1 Partial Hinge | TCPPCPAPEAAGGPSVFLFPPKPKDTLMISRTPEVTCVVVDVS | 3501 |
| Region + CH2 Region + | HEDPEVKFNWYVDGVEVHNAKTKPREEQYNSTYRVVSVLTVLH | |
| CH3 Region | QDWLNGKEYKCKVSNKALGAPIEKTISKAKGQPREPQVYTLPP | |
| L234A/L235A/P329G | SRDELTKNQVSLTCLVKGFYPSDIAVEWESNGQPENNYKTTPP | |
| Without C-terminal | VLDSDGSFFLYSKLTVDKSRWQQGNVFSCSVMHEALHNHYTQK | |
| Lysine | SLSLSPG | |
| hIgG1 Hinge Region + | EPKSCDKTHTCPPCPAPEAAGGPSVFLFPPKPKDTLMISRTPE | 3502 |
| CH2 Region + CH3 | VTCVVVDVSHEDPEVKFNWYVDGVEVHNAKTKPREEQYNSTYR | |
| Region | VVSVLTVLHQDWLNGKEYKCKVSNKALPAPIEKTISKAKGQPR | |
| L234A/L235A | EPQVYTLPPSRDELTKNQVSLTCLVKGFYPSDIAVEWESNGQP | |
| With C-terminal Lysine | ENNYKTTPPVLDSDGSFFLYSKLTVDKSRWQQGNVFSCSVMHE | |
| | ALHNHYTQKSLSLSPGK | |
| hIgG1 Hinge Region + | EPKSCDKTHTCPPCPAPEAAGGPSVFLFPPKPKDTLMISRTPE | 3503 |
| CH2 Region + CH3 | VTCVVVDVSHEDPEVKFNWYVDGVEVHNAKTKPREEQYNSTYR | |
| Region | VVSVLTVLHQDWLNGKEYKCKVSNKALPAPIEKTISKAKGQPR | |
| L234A/L235A | EPQVYTLPPSRDELTKNQVSLTCLVKGFYPSDIAVEWESNGQP | |
| Without C-terminal | ENNYKTTPPVLDSDGSFFLYSKLTVDKSRWQQGNVFSCSVMHE | |
| Lysine | ALHNHYTQKSLSLSPG | |
| hIgG1 Hinge Region + | EPKSCDKTHTCPPCPAPEAAGGPSVFLFPPKPKDTLMISRTPE | 3504 |
| CH2 Region + CH3 | VTCVVVDVSHEDPEVKFNWYVDGVEVHNAKTKPREEQYNSTYR | |
| Region | VVSVLIVLHQDWLNGKEYKCKVSNKALPAPIEKTISKAKGQPR | |
| L234A/L235A/P329A | EPQVYTLPPSRDELTKNQVSLTCLVKGFYPSDIAVEWESNGQP | |
| With C-terminal Lysine | ENNYKTTPPVLDSDGSFFLYSKLTVDKSRWQQGNVFSCSVMHE | |
| | ALHNHYTQKSLSLSPGK | |
| hIgG1 Hinge Region + | EPKSCDKTHTCPPCPAPEAAGGPSVFLFPPKPKDTLMISRTPE | 3505 |
| CH2 Region + CH3 | VTCVVVDVSHEDPEVKFNWYVDGVEVHNAKTKPREEQYNSTYR | |
| Region | VVSVLTVLHQDWLNGKEYKCKVSNKALPAPIEKTISKAKGQPR | |
| L234A/L235A/P329A | EPQVYTLPPSRDELTKNQVSLTCLVKGFYPSDIAVEWESNGQP | |
| Without C-terminal | ENNYKTTPPVLDSDGSFFLYSKLTVDKSRWQQGNVFSCSVMHE | |
| Lysine | ALHNHYTQKSLSLSPG | |
| hIgG1 Hinge Region + | EPKSCDKTHTCPPCPAPEAAGGPSVFLFPPKPKDTLMISRTPE | 3506 |
| CH2 Region + CH3 | VTCVVVDVSHEDPEVKFNWYVDGVEVHNAKTKPREEQYNSTYR | |
| Region | VVSVLTVLHQDWLNGKEYKCKVSNKALPAPIEKTISKAKGQPR | |
| L234A/L235A/P329G | EPQVYTLPPSRDELTKNQVSLTCLVKGFYPSDIAVEWESNGQP | |
| With C-terminal Lysine | ENNYKTTPPVLDSDGSFFLYSKLTVDKSRWQQGNVFSCSVMHE | |
| | ALHNHYTQKSLSLSPGK | |
| hIgG1 Hinge Region + | EPKSCDKTHTCPPCPAPEAAGGPSVFLFPPKPKDTLMISRTPE | 3507 |
| CH2 Region + CH3 | VTCVVVDVSHEDPEVKFNWYVDGVEVHNAKTKPREEQYNSTYR | |
| Region | VVSVLIVLHQDWLNGKEYKCKVSNKALPAPIEKTISKAKGQPR | |
| L234A/L235A/P329G | EPQVYTLPPSRDELTKNQVSLTCLVKGFYPSDIAVEWESNGQP | |
| Without C-terminal | ENNYKTTPPVLDSDGSFFLYSKLTVDKSRWQQGNVFSCSVMHE | |
| Lysine | ALHNHYTQKSLSLSPG | |
| hIgG4 CH2 Region + | APEAAGGPSVFLFPPKPKDTLMISRTPEVTCVVVDVSQEDPEV | 3508 |
| CH3 Region | QFNWYVDGVEVHNAKTKPREEQFNSTYRVVSVLTVLHQDWLNG | |
| S228P/F234A/L235A | KEYKCKVSNKGLPSSIEKTISKAKGQPREPQVYTLPPSQEEMT | |
| With C-terminal Lysine | KNQVSLTCLVKGFYPSDIAVEWESNGQPENNYKTTPPVLDSDG | |
| | SFFLYSRLTVDKSRWQEGNVFSCSVMHEALHNHYTQKSLSLSL | |
| | GK | |
| hIgG4 CH2 Region + | APEAAGGPSVFLFPPKPKDTLMISRTPEVTCVVVDVSQEDPEV | 3509 |
| CH3 Region | QFNWYVDGVEVHNAKTKPREEQFNSTYRVVSVLTVLHQDWLNG | |
| S228P/F234A/L235A | KEYKCKVSNKGLPSSIEKTISKAKGQPREPQVYTLPPSQEEMT | |
| Without C-terminal | KNQVSLTCLVKGFYPSDIAVEWESNGQPENNYKTTPPVLDSDG | |
| Lysine | SFFLYSRLTVDKSRWQEGNVFSCSVMHEALHNHYTQKSLSLSL | |
| | G | |
| hIgG4 Partial Hinge | PCPSCPAPEAAGGPSVFLFPPKPKDTLMISRTPEVTCVVVDVS | 3510 |
| Region + CH2 Region + | QEDPEVQFNWYVDGVEVHNAKTKPREEQFNSTYRVVSVLTVLH | |
| CH3 Region | QDWLNGKEYKCKVSNKGLPSSIEKTISKAKGQPREPQVYTLPP | |
| S228P/F234A/L235A | SQEEMTKNQVSLTCLVKGFYPSDIAVEWESNGQPENNYKITPP | |
| With C-terminal Lysine | VLDSDGSFFLYSRLTVDKSRWQEGNVFSCSVMHEALHNHYTQK | |
| | SLSLSLGK | |
| hIgG4 Partial Hinge | PCPPCPAPEAAGGPSVFLFPPKPKDTLMISRTPEVTCVVVDVS | 3511 |
| Region + CH2 Region + | QEDPEVQFNWYVDGVEVHNAKTKPREEQFNSTYRVVSVLTVLH | |
| CH3 Region | QDWLNGKEYKCKVSNKGLPSSIEKTISKAKGQPREPQVYTLPP | |
| S228P/F234A/L235A | SQEEMTKNQVSLTCLVKGFYPSDIAVEWESNGQPENNYKTTPP | |
| Without C-terminal | VLDSDGSFFLYSRLTVDKSRWQEGNVFSCSVMHEALHNHYTQK | |
| Lysine | SLSLSLG | |
| hIgG4 Hinge Region + | ESKYGPPCPPCPAPEAAGGPSVFLFPPKPKDTLMISRTPEVTC | 3512 |
| CH2 Region + CH3 | VVVDVSQEDPEVQFNWYVDGVEVHNAKTKPREEQFNSTYRVVS | |
| Region | VLTVLHQDWLNGKEYKCKVSNKGLPSSIEKTISKAKGQPREPQ | |
| S228P/F234A/L235A | VYTLPPSQEEMTKNQVSLTCLVKGFYPSDIAVEWESNGQPENN | |
| With C-terminal Lysine | YKTTPPVLDSDGSFFLYSRLTVDKSRWQEGNVFSCSVMHEALH | |
| | NHYTQKSLSLSLGK | |
| hIgG4 Hinge Region + | ESKYGPPCPPCPAPEAAGGPSVFLFPPKPKDTLMISRTPEVTC | 3513 |
| CH2 Region + CH3 | VVVDVSQEDPEVQFNWYVDGVEVHNAKTKPREEQFNSTYRVVS | |
| Region | VLTVLHQDWLNGKEYKCKVSNKGLPSSIEKTISKAKGQPREPQ | |
| S228P/F234A/L235A | VYTLPPSQEEMTKNQVSLTCLVKGFYPSDIAVEWESNGQPENN | |
| Without C-terminal | YKITPPVLDSDGSFFLYSRLTVDKSRWQEGNVFSCSVMHEALH | |
| Lysine | NHYTQKSLSLSLG | |
| hIgG4 Hinge Region + | AESKYGPPCPPCPAPEAAGGPSVFLFPPKPKDTLMISRTPEVT | 3514 |
| CH2 Region + CH3 | CVVVDVSQEDPEVQFNWYVDGVEVHNAKTKPREEQFNSTYRVV | |
| Region | SVLTVLHQDWLNGKEYKCKVSNKGLPSSIEKTISKAKGQPREP | |
| (Modified) | QVYTLPPSQEEMTKNQVSLTCLVKGFYPSDIAVEWESNGQPEN | |
| S228P/F234A/L235A | NYKITPPVLDSDGSFFLYSRLTVDKSRWQEGNVFSCSVMHEAL | |
| With C-terminal Lysine | HNHYTQKSLSLSLGK | |
| hIgG4 Hinge Region + | AESKYGPPCPPCPAPEAAGGPSVFLFPPKPKDTLMISRTPEVT | 3515 |
| CH2 Region + CH3 | CVVVDVSQEDPEVQFNWYVDGVEVHNAKTKPREEQFNSTYRVV | |
| Region | SVLTVLHQDWLNGKEYKCKVSNKGLPSSIEKTISKAKGQPREP | |
| (Modified) | QVYTLPPSQEEMTKNQVSLTCLVKGFYPSDIAVEWESNGQPEN | |
| S228P/F234A/L235A | NYKTTPPVLDSDGSFFLYSRLTVDKSRWQEGNVFSCSVMHEAL | |
| Without C-terminal | HNHYTQKSLSLSLG | |
| Lysine | | |

[0527] In some embodiments, the variant hIg Fc fusion protein or polypeptide comprises a hIg Fc region comprising an amino acid sequence at least 85%, 86%, 87%, 88%, 89%, 90%, 91%, 92%, 93%, 94%, 95%, 96%, 97%, 98%, 99%, or 100% identical to the amino acid sequence of a polypeptide set forth in Table 16.

[0528] In some embodiments, the amino acid sequence of the variant hIg Fc fusion protein or polypeptide comprises a hIg Fc region that comprises or consists of the amino acid sequence of a polypeptide set forth in Table 16, and further comprises 1 or more but less than 15% (less than 12%, less than 10%, less than 8%), amino acid variations (e.g., amino acid substitutions, deletions, or additions). In some embodiments, the amino acid sequence of the variant hIg Fc fusion protein or polypeptide comprises a hIg Fc region that comprises or consists of the amino acid sequence of a polypeptide set forth in Table 16, and further comprises or consists of at least about 1, 2, 3, 4, 5, 6, 7, 8, 9, or 10 amino acid variations (e.g., substitutions, additions, deletions, etc.). In some embodiments, the amino acid sequence of the variant hIg Fc fusion protein or polypeptide comprises a hIg Fc region that comprises or consists of the amino acid sequence of a polypeptide set forth in Table 16, and further comprises or consists of about 1, 2, 3, 4, 5, 6, 7, 8, 9, or 10 amino acid variations (e.g., substitutions, additions, deletions, etc.). In some embodiments, the amino acid sequence of the variant hIg Fc fusion protein or polypeptide comprises a hIg Fc region that comprises or consists of the amino acid sequence of a polypeptide set forth in Table 16, and further comprises or consists of no more than about 1, 2, 3, 4, 5, 6, 7, 8, 9, or 10 amino acid variations (e.g., substitutions, additions, deletions, etc.).

[0529] In some embodiments, the amino acid sequence of the variant hIg Fc fusion protein or polypeptide comprises a hIg Fc region that comprises or consists of the amino acid sequence of a polypeptide set forth in Table 16, and further comprises 1 or more but less than 15% (less than 12%, less than 10%, less than 8%), amino acid substitutions. In some embodiments, the amino acid sequence of the variant hIg Fc fusion protein or polypeptide comprises a hIg Fc region that comprises or consists of the amino acid sequence of a polypeptide set forth in Table 16, and further comprises or consists of at least about 1, 2, 3, 4, 5, 6, 7, 8, 9, or 10 amino acid substitutions. In some embodiments, the amino acid sequence of the variant hIg Fc fusion protein or polypeptide comprises a hIg Fc region that comprises or consists of the amino acid sequence of a polypeptide set forth in Table 16, and further comprises or consists of about 1, 2, 3, 4, 5, 6, 7, 8, 9, or 10 amino acid substitutions. In some embodiments, the amino acid sequence of the variant hIg Fc fusion protein or polypeptide comprises a hIg Fc region that comprises or consists of the amino acid sequence of a polypeptide set forth in Table 16, and further comprises or consists of no more than about 1, 2, 3, 4, 5, 6, 7, 8, 9, or 10 amino acid substitutions.

[0530] In some embodiments, the amino acid sequence of the variant hIg Fc fusion protein or polypeptide comprises a hIg Fc region that comprises or consists of an amino acid sequence at least 85%, 86%, 87%, 88%, 89%, 90%, 91%, 92%, 93%, 94%, 95%, 96%, 97%, 98%, or 100% identical to the amino acid sequence of any one of SEQ ID NOS: 3490-3515.

[0531] In some embodiments, the amino acid sequence of the variant hIg Fc fusion protein or polypeptide comprises a hIg Fc region that comprises or consists of the amino acid sequence of any one of SEQ ID NOS: 3490-3515, and further comprises 1 or more but less than 15% (less than 12%, less than 10%, less than 8%), amino acid variations (e.g., amino acid substitutions, deletions, or additions). In some embodiments, the amino acid sequence of the variant hIg Fc fusion protein or polypeptide comprises a hIg Fc region that comprises or consists of the amino acid sequence of any one of SEQ ID NOS: 3490-3515, and further comprises or consists of at least about 1, 2, 3, 4, 5, 6, 7, 8, 9, or 10 amino acid variations (e.g., substitutions, additions, deletions, etc.). In some embodiments, the amino acid sequence of the variant hIg Fc fusion protein or polypeptide comprises a hIg Fc region that comprises or consists of the amino acid sequence of any one of SEQ ID NOS: 3490-3515, and further comprises or consists of about 1, 2, 3, 4, 5, 6, 7, 8, 9, or 10 amino acid variations (e.g., substitutions, additions, deletions, etc.). In some embodiments, the amino acid sequence of the variant hIg Fc fusion protein or polypeptide comprises a hIg Fc region that comprises or consists of the amino acid sequence of any one of SEQ ID NOS: 3490-3515, and further comprises or consists of no more than about 1, 2, 3, 4, 5, 6, 7, 8, 9, or 10 amino acid variations (e.g., substitutions, additions, deletions, etc.).

[0532] In some embodiments, the amino acid sequence of the variant hIg Fc fusion protein or polypeptide comprises a hIg Fc region that comprises or consists of the amino acid sequence of any one of SEQ ID NOS: 3490-3515, and further comprises 1 or more but less than 15% (less than 12%, less than 10%, less than 8%), amino acid substitutions. In some embodiments, the amino acid sequence of the variant hIg Fc fusion protein or polypeptide comprises a hIg Fc region that comprises or consists of the amino acid sequence of any one of SEQ ID NOS: 3490-3515, and further comprises or consists of at least about 1, 2, 3, 4, 5, 6, 7, 8, 9, or 10 amino acid substitutions. In some embodiments, the amino acid sequence of the variant hIg Fc fusion protein or polypeptide comprises a hIg Fc region that comprises or consists of the amino acid sequence of any one of SEQ ID NOS: 3490-3515, and further comprises or consists of about 1, 2, 3, 4, 5, 6, 7, 8, 9, or 10 amino acid substitutions. In some embodiments, the amino acid sequence of the variant hIg Fc fusion protein or polypeptide comprises a hIg Fc region that comprises or consists of the amino acid sequence of any one of SEQ ID NOS: 3490-3515, and further comprises or consists of no more than about 1, 2, 3, 4, 5, 6, 7, 8, 9, or 10 amino acid substitutions.

[0533] In some embodiments, the amino acid sequence of the hIgG1 Fc region comprises an alanine at position L234 and/or an alanine at position L235, EU numbering according to Kabat. In some embodiments, the amino acid sequence of the hIgG1 Fc region comprises an alanine at position L234 and an alanine at position L235, EU numbering according to Kabat. In some embodiments, the amino acid sequence of the hIgG1 Fc region comprises of an alanine, glycine, or serine at position P329, EU numbering according to Kabat.

[0534] In some embodiments, the amino acid sequence of the hIgG1 Fc region comprises an alanine at position L234; an alanine at position L235; and an alanine, glycine, or serine at position P329 EU numbering according to Kabat. In some embodiments, the amino acid sequence of the hIgG1 Fc region comprises of an alanine at position L234; an alanine at position L235; and an alanine at position P329 EU numbering according to Kabat. In some embodiments, the amino acid sequence of the hIgG1 Fc region comprises an alanine at position L234; an alanine at position L235; and a glycine amino acid at position P329 EU numbering according to Kabat. In some embodiments, the amino acid sequence of the hIgG1 Fc region comprises an alanine at position L234; an alanine at position L235; and a serine amino acid at position P329 EU numbering according to Kabat.

[0535] In some embodiments, the amino acid sequence of the hIgG1 Fc region comprises an alanine at position L234, an alanine at position L235, and/or an alanine, glycine, or serine at position P329, EU numbering according to Kabat; and comprises an amino acid sequence at least 85%, 86%, 87%, 88%, 89%, 90%, 91%, 92%, 93%, 94%, 95%, 96%, 97%, 98%, 99%, or 100% identical to the amino acid sequence of a polypeptide set forth in Table 16. In some embodiments, the amino acid sequence of the hIgG1 Fc region comprises an alanine at position L234 and/or an alanine at position L235, EU numbering according to Kabat; and comprises an amino acid sequence at least 85%, 86%, 87%, 88%, 89%, 90%, 91%, 92%, 93%, 94%, 95%, 96%, 97%, 98%, 99%, or 100% identical to the amino acid sequence of a polypeptide set forth in Table 16. In some embodiments, the amino acid sequence of the hIgG1 Fc region comprises an alanine at position L234 and an alanine at position L235, EU numbering according to Kabat; and comprises an amino acid sequence at least 85%, 86%, 87%, 88%, 89%, 90%, 91%, 92%, 93%, 94%, 95%, 96%, 97%, 98%, 99%, or 100% identical to the amino acid sequence of a polypeptide set forth in Table 16. In some embodiments, the amino acid sequence of the hIgG1 Fc region comprises an alanine at position L234, an alanine at position L235, and an alanine, glycine, or serine at position P329, EU numbering according to Kabat; and comprises an amino acid sequence at least 85%, 86%, 87%, 88%, 89%, 90%, 91%, 92%, 93%, 94%, 95%, 96%, 97%, 98%, 99%, or 100% identical to the amino acid sequence of a polypeptide set forth in Table 16. In some embodiments, the amino acid sequence of the hIgG1 Fc region comprises an alanine at position L234, an alanine at position L235, and an alanine at position P329, EU numbering according to Kabat; and comprises an amino acid sequence at least 85%, 86%, 87%, 88%, 89%, 90%, 91%, 92%, 93%, 94%, 95%, 96%, 97%, 98%, 99%, or 100% identical to the amino acid sequence of a polypeptide set forth in Table 16. In some embodiments, the amino acid sequence of the hIgG1 Fc region comprises an alanine at position L234, an alanine at position L235, and a glycine at position P329, EU numbering according to Kabat; and comprises an amino acid sequence at least 85%, 86%, 87%, 88%, 89%, 90%, 91%, 92%, 93%, 94%, 95%, 96%, 97%, 98%, 99%, or 100% identical to the amino acid sequence of a polypeptide set forth in Table 16. In some embodiments, the amino acid sequence of the hIgG1 Fc region comprises an alanine at position L234, an alanine at position L235, and a serine at position P329, EU numbering according to Kabat; and comprises an amino acid sequence at least 85%, 86%, 87%, 88%, 89%, 90%, 91%, 92%, 93%, 94%, 95%, 96%, 97%, 98%, 99%, or 100% identical to the amino acid sequence of a polypeptide set forth in Table 16.

[0536] In some embodiments, the amino acid sequence of the hIgG1 Fc region comprises an alanine at position L234, an alanine at position L235, and/or an alanine, glycine, or serine amino acid at position P329, EU numbering according to Kabat; and comprises an amino acid sequence at least 85%, 86%, 87%, 88%, 89%, 90%, 91%, 92%, 93%, 94%, 95%, 96%, 97%, 98%, 99%, or 100% identical to the amino acid sequence of any one of SEQ ID NOS: 3490-3515. In some embodiments, the amino acid sequence of the hIgG1 Fc region comprises an alanine at position L234 and/or an alanine at position L235, EU numbering according to Kabat; and comprises an amino acid sequence at least 85%, 86%, 87%, 88%, 89%, 90%, 91%, 92%, 93%, 94%, 95%, 96%, 97%, 98%, 99%, or 100% identical to the amino acid sequence of any one of SEQ ID NOS: 3490-3515. In some embodiments, the amino acid sequence of the hIgG1 Fc region comprises an alanine at position L234 and an alanine at position L235, EU numbering according to Kabat; and comprises an amino acid sequence at least 85%, 86%, 87%, 88%, 89%, 90%, 91%, 92%, 93%, 94%, 95%, 96%, 97%, 98%, 99%, or 100% identical to the amino acid sequence of any one of SEQ ID NOS: 3490-3515. In some embodiments, the amino acid sequence of the hIgG1 Fc region comprises an alanine at position L234, an alanine at position L235, and an alanine, glycine, or serine amino acid at position P329, EU numbering according to Kabat; and comprises an amino acid sequence at least 85%, 86%, 87%, 88%, 89%, 90%, 91%, 92%, 93%, 94%, 95%, 96%, 97%, 98%, 99%, or 100% identical to the amino acid sequence of any one of SEQ ID NOS: 3490-3515. In some embodiments, the amino acid sequence of the hIgG1 Fc region comprises an alanine at position L234, an alanine at position L235, and an alanine at position P329, EU numbering according to Kabat; and comprises an amino acid sequence at least 85%, 86%, 87%, 88%, 89%, 90%, 91%, 92%, 93%, 94%, 95%, 96%, 97%, 98%, 99%, or 100% identical to the amino acid sequence of any one of SEQ ID NOS: 3490-3515. In some embodiments, the amino acid sequence of the hIgG1 Fc region comprises an alanine at position L234, an alanine at position L235, and a glycine amino acid at position P329, EU numbering according to Kabat; and comprises an amino acid sequence at least 85%, 86%, 87%, 88%, 89%, 90%, 91%, 92%, 93%, 94%, 95%, 96%, 97%, 98%, 99%, or 100% identical to the amino acid sequence of any one of SEQ ID NOS: 3490-3515. In some embodiments, the amino acid sequence of the hIgG1 Fc region comprises an alanine at position L234, an alanine at position L235, and a serine amino acid at position P329, EU numbering according to Kabat; and comprises an amino acid sequence at least 85%, 86%, 87%, 88%, 89%, 90%, 91%, 92%, 93%, 94%, 95%, 96%, 97%, 98%, 99%, or 100% identical to the amino acid sequence of any one of SEQ ID NOS: 3490-3515.

[0537] In some embodiments, the amino acid sequence of the hIgG1 Fc region comprises an alanine at position L234, an alanine at position L235, and/or an alanine, glycine, or serine amino acid at position P329, EU numbering according to Kabat; and comprises an amino acid sequence at least 85%, 86%, 87%, 88%, 89%, 90%, 91%, 92%, 93%, 94%, 95%, 96%, 97%, 98%, 99%, or 100% identical to the amino acid sequence of any one of SEQ ID NOS: 3490-3515. In some embodiments, the amino acid sequence of the hIgG1 Fc region comprises an alanine at position L234 and/or an alanine at position L235, EU numbering according to Kabat; and comprises an amino acid sequence at least 85%, 86%, 87%, 88%, 89%, 90%, 91%, 92%, 93%, 94%, 95%, 96%, 97%, 98%, 99%, or 100% identical to the amino acid sequence of any one of SEQ ID NOS: 3490-3515. In some embodiments, the amino acid sequence of the hIgG1 Fc region comprises an alanine at position L234 and an alanine at position L235, EU numbering according to Kabat; and comprises an amino acid sequence at least 85%, 86%, 87%, 88%, 89%, 90%, 91%, 92%, 93%, 94%, 95%, 96%, 97%, 98%, 99%, or 100% identical to the amino acid sequence of any one of SEQ ID NOS: 3490-3515. In some embodiments, the amino acid sequence of the hIgG1 Fc region comprises an alanine at position L234, an alanine at position L235, and an alanine, glycine, or serine amino acid at position P329, EU numbering according to Kabat; and comprises an amino acid sequence at least 85%, 86%, 87%, 88%, 89%, 90%, 91%, 92%, 93%, 94%, 95%, 96%, 97%, 98%, 99%, or 100% identical to the amino acid sequence of any one of SEQ ID NOS: 3490-3515. In some embodiments, the amino acid sequence of the hIgG1 Fc region comprises an alanine at position L234, an alanine at position L235, and an alanine at position P329, EU numbering according to Kabat; and comprises an amino acid sequence at least 85%, 86%, 87%, 88%, 89%, 90%, 91%, 92%, 93%, 94%, 95%, 96%, 97%, 98%, 99%, or 100% identical to the amino acid sequence of any one of SEQ ID NOS: 3490-3515. In some embodiments, the amino acid sequence of the hIgG1 Fc region comprises an alanine at position L234, an alanine at position L235, and a glycine at position P329, EU numbering according to Kabat; and comprises an amino acid sequence at least 85%, 86%, 87%, 88%, 89%, 90%, 91%, 92%, 93%, 94%, 95%, 96%, 97%, 98%, 99%, or 100% identical to the amino acid sequence of any one of SEQ ID NOS: 3490-3515. In some embodiments, the amino acid sequence of the hIgG1 Fc region comprises an alanine at position L234, an alanine at position L235, and a serine at position P329, EU numbering according to Kabat; and comprises an amino acid sequence at least 85%, 86%, 87%, 88%, 89%, 90%, 91%, 92%, 93%, 94%, 95%, 96%, 97%, 98%, 99%, or 100% identical to the amino acid sequence of any one of SEQ ID NOS: 3490-3515.

[0538] In some embodiments, the amino acid sequence of the hIgG4 Fc region comprises a phenylalanine at position L234 and/or an alanine at position L235, EU numbering according to Kabat. In some embodiments, the amino acid sequence of the hIgG4 Fc region comprises a phenylalanine at position L234 and an alanine at position L235, EU numbering according to Kabat. In some embodiments, the amino acid sequence of the hIgG4 Fc region comprises a proline at position S228, EU numbering according to Kabat.

[0539] In some embodiments, the amino acid sequence of the hIgG4 Fc region comprises a phenylalanine at position L234; an alanine at position L235; and a proline at position S228, EU numbering according to Kabat.

[0540] In some embodiments, the amino acid sequence of the hIgG4 Fc region comprises a phenylalanine at position L234, an alanine at position L235, and/or a proline at position S228, EU numbering according to Kabat; and comprises an amino acid sequence at least 85%, 86%, 87%, 88%, 89%, 90%, 91%, 92%, 93%, 94%, 95%, 96%, 97%, 98%, 99%, or 100% identical to the amino acid sequence of a polypeptide set forth in Table 16. In some embodiments, the amino acid sequence of the hIgG4 Fc region comprises a phenylalanine at position L234 and/or an alanine at position L235, EU numbering according to Kabat; and comprises an amino acid sequence at least 85%, 86%, 87%, 88%, 89%, 90%, 91%, 92%, 93%, 94%, 95%, 96%, 97%, 98%, 99%, or 100% identical to the amino acid sequence of a polypeptide set forth in Table 16. In some embodiments, the amino acid sequence of the hIgG4 Fc region comprises a phenylalanine at position L234, an alanine at position L235, and a proline at position S228, EU numbering according to Kabat; and comprises an amino acid sequence at least 85%, 86%, 87%, 88%, 89%, 90%, 91%, 92%, 93%, 94%, 95%, 96%, 97%, 98%, 99%, or 100% identical to the amino acid sequence of a polypeptide set forth in Table 16.

[0541] In some embodiments, the amino acid sequence of the hIgG4 Fc region comprises a phenylalanine at position L234, an alanine at position L235, and/or a proline at position S228, EU numbering according to Kabat; and comprises an amino acid sequence at least 85%, 86%, 87%, 88%, 89%, 90%, 91%, 92%, 93%, 94%, 95%, 96%, 97%, 98%, 99%, or 100% identical to the amino acid sequence of any one of SEQ ID NOS:199-224. In some embodiments, the amino acid sequence of the hIgG4 Fc region comprises a phenylalanine at position L234 and/or an alanine at position L235, EU numbering according to Kabat; and comprises an amino acid sequence at least 85%, 86%, 87%, 88%, 89%, 90%, 91%, 92%, 93%, 94%, 95%, 96%, 97%, 98%, 99%, or 100% identical to the amino acid sequence of any one of SEQ ID NOS: 3490-3515. In some embodiments, the amino acid sequence of the hIgG4 Fc region comprises a phenylalanine at position L234, an alanine at position L235, and a proline at position S228, EU numbering according to Kabat; and comprises an amino acid sequence at least 85%, 86%, 87%, 88%, 89%, 90%, 91%, 92%, 93%, 94%, 95%, 96%, 97%, 98%, 99%, or 100% identical to the amino acid sequence of any one of SEQ ID NOS: 3490-3515.

[0542] In some embodiments, the amino acid sequence of the hIgG4 Fc region comprises a phenylalanine at position L234, an alanine at position L235, and/or a proline at position S228, EU numbering according to Kabat; and comprises an amino acid sequence at least 85%, 86%, 87%, 88%, 89%, 90%, 91%, 92%, 93%, 94%, 95%, 96%, 97%, 98%, 99%, or 100% identical to the amino acid sequence of any one of SEQ ID NOS: 3490-3515. In some embodiments, the amino acid sequence of the hIgG4 Fc region comprises a phenylalanine at position L234 and/or an alanine at position L235, EU numbering according to Kabat; and comprises an amino acid sequence at least 85%, 86%, 87%, 88%, 89%, 90%, 91%, 92%, 93%, 94%, 95%, 96%, 97%, 98%, 99%, or 100% identical to the amino acid sequence of any one of SEQ ID NOS: 3490-3515. In some embodiments, the amino acid sequence of the hIgG4 Fc region comprises a phenylalanine at position L234, an alanine at position L235, and a proline at position S228, EU numbering according to Kabat; and comprises an amino acid sequence at least 85%, 86%, 87%, 88%, 89%, 90%, 91%, 92%, 93%, 94%, 95%, 96%, 97%, 98%, 99%, or 100% identical to the amino acid sequence of any one of SEQ ID NOS: 3490-3515.

### Promotion of Heterodimerization

[0543] As described herein, in some embodiments, the antibody (or heterologous polypeptide) comprises a first and second Fc region (e.g., described herein). In some embodiments, the first Ig Fc region and the second Ig Fc region each comprise one or more amino acid modifications relative to each other to promote heterodimerization. IgG derived heterodimeric formats can be generated by methods known in the art, e.g., by forced heavy chain heterodimerization. Forced heavy chain heterodimerization can be obtained using known methods in the art, e.g., knob-in-hole or strand exchange engineered domains (SEED), see, e.g., Ji-Hee et al., “Immunoglobulin Fc Heterodimer Platform Technology: From Design to Applications in Therapeutic Antibodies and Proteins” Frontiers in Immunology, v7 (article 394) (2016) DOI=10.3389/fimmu.2016.00394 (hereinafter “Ji-Hee 2016”), the entire contents of which is incorporated by reference herein for all purposes.

[0544] In some embodiments, an interface of the first and the second Ig Fc regions is varied, e.g., introduction of an amino acid substitution, to increase heterodimerization, e.g., relative to a non-modified interface, e.g., a naturally occurring interface. For example, dimerization of the first and second Ig Fc regions can be enhanced by providing an Ig Fc interface of a first and a second Fc region with one or more of: a paired protuberance-cavity (“knob-in-hole”), an electrostatic interaction, or a strand-exchange, such that a greater ratio of heteromultimer to homomultimer forms, e.g., relative to a non-modified interface.

[0545] Knob-in-Hole amino acid pairing modifications are known in the art, and described in e.g., U.S. Pat. Nos. 5,731,116; 7,476,724; Ji-Hee 2016; and Ridgway, J. “‘Knobs-into-holes’ engineering of antibody CH3 domains for heavy chain heterodimerization” et al. Prot. Engineering 9(7): 617-621 (1996), the full contents of each of which is incorporated by reference herein. Generally, Knob-in-Hole comprises 1) introducing one or more amino acid substitutions in the CH3 domain of one or both of the first and second subject Ig Fc regions to promote heterodimerization; and 2) combining the modified Ig Fc regions under conditions that promote heterodimerization. “Knobs” are typically created by substituting a small amino acid in a parental Ig Fc region with a larger amino acid (e.g., T366Y or T366W); “holes” are created by substituting a larger residue in a parental Ig Fc region with a smaller amino acid (e.g., Y407T, T366S, 11368A, or Y407V). Exemplary Knob-in-Hole mutations include S354C, T366W in the “knob” Ig Fc region and Y349C, T366S, L368A, Y407V in the “hole” Ig Fc region. Other exemplary Knob-in-Hole mutations, which can be incorporated into any one or more of the embodiments, are provided in Table 17, with additional exemplary optional stabilizing Ig Fc cysteine mutations.

TABLE 17
Exemplary Knob-in-hole and Stabilizing Cysteine Modifications.

| | | |
|---|---|---|
| Amino Acid Position | | |
| (EU numbering according to | Knob Ig Fc Amino Acid | Hole Ig Fc Amino Acid |
| Kabat) | Substitution | Substitution |

Knob-in Hole Amio Acid Substitutions

| | | |
|---|---|---|
| T366 | T366W | T366S |
| L368 | — | L368A |
| Y407 | — | Y407V |

Stabilizing Cysteine Amino Acid Substitutions

| | | |
|---|---|---|
| S354 | S354C | — |
| Y349 | — | Y349C |

[0546] The amino acid sequence of exemplary Fc regions that are known in the art to promote heterodimerization is provided in Table 18.

TABLE 18
The Amino Acid Sequence of Exemplary Pairs of
Varied Heterodimeric Fc Regions.

| | | SEQ |
|---|---|---|
| Description | Amino Acid Sequence | ID NO |
| hIgG1 CH2 Region + | PCPAPELLGGPSVFLFPPKPKDTLMISRTPEVTCVVVDVSHED | 3516 |
| CH3 Region | PEVKFNWYVDGVEVHNAKTKPREEQYNSTYRVVSVLIVLHQDW | |
| Knob T366W | LNGKEYKCKVSNKALPAPIEKTISKAKGQPREPQVYTLPPSRD | |
| With C-terminal Lysine | ELTKNQVSLWCLVKGFYPSDIAVEWESNGQPENNYKITPPVLD | |
| | SDGSFFLYSKLTVDKSRWQQGNVFSCSVMHEALHNHYTQKSLS | |
| | LSPGK | |
| hIgG1 CH2 Region + | PCPAPELLGGPSVFLFPPKPKDTLMISRTPEVTCVVVDVSHED | 3517 |
| CH3 Region | PEVKFNWYVDGVEVHNAKTKPREEQYNSTYRVVSVLIVLHQDW | |
| Knob T366W | LNGKEYKCKVSNKALPAPIEKTISKAKGQPREPQVYTLPPSRD | |
| Without C-terminal | ELTKNQVSLWCLVKGFYPSDIAVEWESNGQPENNYKTTPPVLD | |
| Lysine | SDGSFFLYSKLTVDKSRWQQGNVFSCSVMHEALHNHYTQKSLS | |
| | LSPG | |
| hIgG1 Partial Hinge | TCPPCPAPELLGGPSVFLFPPKPKDTLMISRTPEVTCVVVDVS | 3518 |
| Region + CH2 Region + | HEDPEVKFNWYVDGVEVHNAKTKPREEQYNSTYRVVSVLTVLH | |
| CH3 Region | QDWLNGKEYKCKVSNKALPAPIEKTISKAKGQPREPQVYTLPP | |
| Knob T366W | SRDELTKNQVSLWCLVKGFYPSDIAVEWESNGQPENNYKITPP | |
| With C-terminal Lysine | VLDSDGSFFLYSKLTVDKSRWQQGNVFSCSVMHEALHNHYTQK | |
| | SLSLSPGK | |
| hIgG1 Partial Hinge | TCPPCPAPELLGGPSVFLFPPKPKDTLMISRTPEVTCVVVDVS | 3519 |
| Region + CH2 Region + | HEDPEVKFNWYVDGVEVHNAKTKPREEQYNSTYRVVSVLTVLH | |
| CH3 Region | QDWLNGKEYKCKVSNKALPAPIEKTISKAKGQPREPQVYTLPP | |
| Knob T366W | SRDELTKNQVSLWCLVKGFYPSDIAVEWESNGQPENNYKTTPP | |
| Without C-terminal | VLDSDGSFFLYSKLTVDKSRWQQGNVFSCSVMHEALHNHYTQK | |
| Lysine | SLSLSPG | |
| hIgG1 Hinge Region + | EPKSCDKTHTCPPCPAPELLGGPSVFLFPPKPKDTLMISRTPE | 3520 |
| CH2 Region + CH3 | VTCVVVDVSHEDPEVKFNWYVDGVEVHNAKTKPREEQYNSTYR | |
| Region | VVSVLIVLHQDWLNGKEYKCKVSNKALPAPIEKTISKAKGQPR | |
| Knob T366W | EPQVYTLPPSRDELTKNQVSLWCLVKGFYPSDIAVEWESNGQP | |
| With C-terminal Lysine | ENNYKTTPPVLDSDGSFFLYSKLTVDKSRWQQGNVFSCSVMHE | |
| | ALHNHYTQKSLSLSPGK | |
| hIgG1 Hinge Region + | EPKSCDKTHTCPPCPAPELLGGPSVFLFPPKPKDTLMISRTPE | 3521 |
| CH2 Region + CH3 | VTCVVVDVSHEDPEVKFNWYVDGVEVHNAKTKPREEQYNSTYR | |
| Region | VVSVLTVLHQDWLNGKEYKCKVSNKALPAPIEKTISKAKGQPR | |
| Knob T366W | EPQVYTLPPSRDELTKNQVSLWCLVKGFYPSDIAVEWESNGQP | |
| Without C-terminal | ENNYKTTPPVLDSDGSFFLYSKLTVDKSRWQQGNVFSCSVMHE | |
| Lysine | ALHNHYTQKSLSLSPG | |
| hIgG1 CH1+ Hinge | ASTKGPSVFPLAPSSKSTSGGTAALGCLVKDYFPEPVTVSWNS | 3522 |
| Region + CH2 Region + | GALTSGVHTFPAVLQSSGLYSLSSVVTVPSSSLGTQTYICNVN | |
| CH3 Region | HKPSNTKVDKKVEPKSCDKTHTCPPCPAPELLGGPSVFLFPPK | |
| Knob T366W | PKDTLMISRTPEVTCVVVDVSHEDPEVKFNWYVDGVEVHNAKT | |
| With C-terminal Lysine | KPREEQYNSTYRVVSVLTVLHQDWLNGKEYKCKVSNKALPAPI | |
| | EKTISKAKGQPREPQVYTLPPCRDELTKNQVSLWCLVKGFYPS | |
| | DIAVEWESNGQPENNYKTTPPVLDSDGSFFLYSKLTVDKSRWQ | |
| | QGNVFSCSVMHEALHNHYTQKSLSLSPGK | |
| hIgG1 CH1 + Hinge | ASTKGPSVFPLAPSSKSTSGGTAALGCLVKDYFPEPVTVSWNS | 3523 |
| Region + CH2 Region + | GALTSGVHTFPAVLQSSGLYSLSSVVTVPSSSLGTQTYICNVN | |
| CH3 Region | HKPSNTKVDKKVEPKSCDKTHTCPPCPAPELLGGPSVFLFPPK | |
| Knob T366W | PKDTLMISRTPEVTCVVVDVSHEDPEVKFNWYVDGVEVHNAKT | |
| Without C-terminal | KPREEQYNSTYRVVSVLIVLHQDWLNGKEYKCKVSNKALPAPI | |
| Lysine | EKTISKAKGQPREPQVYTLPPSRDELTKNQVSLWCLVKGFYPS | |
| | DIAVEWESNGQPENNYKTTPPVLDSDGSFFLYSKLTVDKSRWQ | |
| | QGNVFSCSVMHEALHNHYTQKSLSLSPG | |
| hIgG1 CH2 Region + | PCPAPELLGGPSVFLFPPKPKDTLMISRTPEVTCVVVDVSHED | 3524 |
| CH3 Region | PEVKFNWYVDGVEVHNAKTKPREEQYNSTYRVVSVLIVLHQDW | |
| Knob T366W/S354C | LNGKEYKCKVSNKALPAPIEKTISKAKGQPREPQVYTLPPCRD | |
| With C-terminal Lysine | ELTKNQVSLWCLVKGFYPSDIAVEWESNGQPENNYKTTPPVLD | |
| | SDGSFFLYSKLTVDKSRWQQGNVFSCSVMHEALHNHYTQKSLS | |
| | LSPGK | |
| hIgG1 CH2 Region + | PCPAPELLGGPSVFLFPPKPKDTLMISRTPEVTCVVVDVSHED | 3525 |
| CH3 Region | PEVKFNWYVDGVEVHNAKTKPREEQYNSTYRVVSVLIVLHQDW | |
| Knob T366W/S354C | LNGKEYKCKVSNKALPAPIEKTISKAKGQPREPQVYTLPPCRD | |
| Without C-terminal | ELTKNQVSLWCLVKGFYPSDIAVEWESNGQPENNYKTTPPVLD | |
| Lysine | SDGSFFLYSKLTVDKSRWQQGNVFSCSVMHEALHNHYTQKSLS | |
| | LSPG | |
| hIgG1 Partial Hinge | TCPPCPAPELLGGPSVFLFPPKPKDTLMISRTPEVTCVVVDVS | 3526 |
| Region + CH2 Region + | HEDPEVKFNWYVDGVEVHNAKTKPREEQYNSTYRVVSVLTVLH | |
| CH3 Region | QDWLNGKEYKCKVSNKALPAPIEKTISKAKGQPREPQVYTLPP | |
| Knob T366W/S354C | CRDELTKNQVSLWCLVKGFYPSDIAVEWESNGQPENNYKITPP | |
| With C-terminal Lysine | VLDSDGSFFLYSKLTVDKSRWQQGNVFSCSVMHEALHNHYTQK | |
| | SLSLSPGK | |
| hIgG1 Partial Hinge | TCPPCPAPELLGGPSVFLFPPKPKDTLMISRTPEVTCVVVDVS | 3527 |
| Region + CH2 Region + | HEDPEVKFNWYVDGVEVHNAKTKPREEQYNSTYRVVSVLTVLH | |
| CH3 Region | QDWLNGKEYKCKVSNKALPAPIEKTISKAKGQPREPQVYTLPP | |
| Knob T366W/S354C | CRDELTKNQVSLWCLVKGFYPSDIAVEWESNGQPENNYKTTPP | |
| Without C-terminal | VLDSDGSFFLYSKLTVDKSRWQQGNVFSCSVMHEALHNHYTQK | |
| Lysine | SLSLSPG | |
| hIgG1 Hinge Region + | EPKSCDKTHTCPPCPAPELLGGPSVFLFPPKPKDTLMISRTPE | 3528 |
| CH2 Region + CH3 | VTCVVVDVSHEDPEVKFNWYVDGVEVHNAKTKPREEQYNSTYR | |
| Region | VVSVLTVLHQDWLNGKEYKCKVSNKALPAPIEKTISKAKGQPR | |
| Knob T366W/S354C | EPQVYTLPPCRDELTKNQVSLWCLVKGFYPSDIAVEWESNGQP | |
| With C-terminal Lysine | ENNYKTTPPVLDSDGSFFLYSKLTVDKSRWQQGNVFSCSVMHE | |
| | ALHNHYTQKSLSLSPGK | |
| hIgG1 Hinge Region + | EPKSCDKTHTCPPCPAPELLGGPSVFLFPPKPKDTLMISRTPE | 3529 |
| CH2 Region + CH3 | VTCVVVDVSHEDPEVKFNWYVDGVEVHNAKTKPREEQYNSTYR | |
| Region | VVSVLTVLHQDWLNGKEYKCKVSNKALPAPIEKTISKAKGQPR | |
| Knob T366W/S354C | EPQVYTLPPCRDELTKNQVSLWCLVKGFYPSDIAVEWESNGQP | |
| Without C-terminal | ENNYKTTPPVLDSDGSFFLYSKLTVDKSRWQQGNVFSCSVMHE | |
| Lysine | ALHNHYTQKSLSLSPG | |
| hIgG1 CH1 + Hinge | ASTKGPSVFPLAPSSKSTSGGTAALGCLVKDYFPEPVTVSWNS | 3530 |
| Region + CH2 Region + | GALTSGVHTFPAVLQSSGLYSLSSVVTVPSSSLGTQTYICNVN | |
| CH3 Region | HKPSNTKVDKKVEPKSCDKTHTCPPCPAPELLGGPSVFLFPPK | |
| Knob T366W/S354C | PKDTLMISRTPEVTCVVVDVSHEDPEVKFNWYVDGVEVHNAKT | |
| With C-terminal Lysine | KPREEQYNSTYRVVSVLTVLHQDWLNGKEYKCKVSNKALPAPI | |
| | EKTISKAKGQPREPQVYTLPPCRDELTKNQVSLWCLVKGFYPS | |
| | DIAVEWESNGQPENNYKTTPPVLDSDGSFFLYSKLTVDKSRWQ | |
| | QGNVFSCSVMHEALHNHYTQKSLSLSPGK | |
| hIgG1 CH1 + Hinge | ASTKGPSVFPLAPSSKSTSGGTAALGCLVKDYFPEPVTVSWNS | 3531 |
| Region + CH2 Region + | GALTSGVHTFPAVLQSSGLYSLSSVVTVPSSSLGTQTYICNVN | |
| CH3 Region | HKPSNTKVDKKVEPKSCDKTHTCPPCPAPELLGGPSVFLFPPK | |
| Knob T366W/S354C | PKDTLMISRTPEVTCVVVDVSHEDPEVKFNWYVDGVEVHNAKT | |
| Without C-terminal | KPREEQYNSTYRVVSVLTVLHQDWLNGKEYKCKVSNKALPAPI | |
| Lysine | EKTISKAKGQPREPQVYTLPPCRDELTKNQVSLWCLVKGFYPS | |
| | DIAVEWESNGQPENNYKTTPPVLDSDGSFFLYSKLTVDKSRWQ | |
| | QGNVFSCSVMHEALHNHYTQKSLSLSPG | |
| hIgG1 CH2 Region + | PCPAPELLGGPSVFLFPPKPKDTLMISRTPEVTCVVVDVSHED | 3532 |
| CH3 Region | PEVKFNWYVDGVEVHNAKTKPREEQYNSTYRVVSVLTVLHQDW | |
| Hole | LNGKEYKCKVSNKALPAPIEKTISKAKGQPREPQVYTLPPSRD | |
| T366S/L368A/Y407V | ELTKNQVSLSCAVKGFYPSDIAVEWESNGQPENNYKTTPPVLD | |
| With C-terminal Lysine | SDGSFFLVSKLTVDKSRWQQGNVFSCSVMHEALHNHYTQKSLS | |
| | LSPGK | |
| hIgG1 CH2 Region + | PCPAPELLGGPSVFLFPPKPKDTLMISRTPEVTCVVVDVSHED | 3533 |
| CH3 Region | PEVKFNWYVDGVEVHNAKTKPREEQYNSTYRVVSVLTVLHQDW | |
| Hole | LNGKEYKCKVSNKALPAPIEKTISKAKGQPREPQVYTLPPSRD | |
| T366S/L368A/Y407V | ELTKNQVSLSCAVKGFYPSDIAVEWESNGQPENNYKTTPPVLD | |
| Without C-terminal | SDGSFFLVSKLTVDKSRWQQGNVFSCSVMHEALHNHYTQKSLS | |
| Lysine | LSPG | |
| hIgG1 Partial Hinge | TCPPCPAPELLGGPSVFLFPPKPKDTLMISRTPEVTCVVVDVS | 3534 |
| Region + CH2 Region + | HEDPEVKFNWYVDGVEVHNAKTKPREEQYNSTYRVVSVLTVLH | |
| CH3 Region | QDWLNGKEYKCKVSNKALPAPIEKTISKAKGQPREPQVYTLPP | |
| Hole | SRDELTKNQVSLSCAVKGFYPSDIAVEWESNGQPENNYKTTPP | |
| T366S/L368A/Y407V | VLDSDGSFFLVSKLTVDKSRWQQGNVFSCSVMHEALHNHYTQK | |
| With C-terminal Lysine | SLSLSPGK | |
| hIgG1 Partial Hinge | TCPPCPAPELLGGPSVFLFPPKPKDTLMISRTPEVTCVVVDVS | 3535 |
| Region + CH2 Region + | HEDPEVKFNWYVDGVEVHNAKTKPREEQYNSTYRVVSVLTVLH | |
| CH3 Region | QDWLNGKEYKCKVSNKALPAPIEKTISKAKGQPREPQVYTLPP | |
| Hole | SRDELTKNQVSLSCAVKGFYPSDIAVEWESNGQPENNYKTTPP | |
| T366S/L368A/Y407V | VLDSDGSFFLVSKLTVDKSRWQQGNVFSCSVMHEALHNHYTQK | |
| Without C-terminal | SLSLSPG | |
| Lysine | | |
| hIgG1 Hinge Region + | EPKSCDKTHTCPPCPAPELLGGPSVFLFPPKPKDTLMISRTPE | 3536 |
| CH2 Region + CH3 | VTCVVVDVSHEDPEVKFNWYVDGVEVHNAKTKPREEQYNSTYR | |
| Region | VVSVLIVLHQDWLNGKEYKCKVSNKALPAPIEKTISKAKGQPR | |
| Hole | EPQVYTLPPSRDELTKNQVSLSCAVKGFYPSDIAVEWESNGQP | |
| T366S/L368A/Y407V | ENNYKTTPPVLDSDGSFFLVSKLTVDKSRWQQGNVFSCSVMHE | |
| With C-terminal Lysine | ALHNHYTQKSLSLSPGK | |
| hIgG1 Hinge Region + | EPKSCDKTHTCPPCPAPELLGGPSVFLFPPKPKDTLMISRTPE | 3537 |
| CH2 Region + CH3 | VTCVVVDVSHEDPEVKFNWYVDGVEVHNAKTKPREEQYNSTYR | |
| Region | VVSVLIVLHQDWLNGKEYKCKVSNKALPAPIEKTISKAKGQPR | |
| Hole | EPQVYTLPPSRDELTKNQVSLSCAVKGFYPSDIAVEWESNGQP | |
| T366S/L368A/Y407V | ENNYKTTPPVLDSDGSFFLVSKLTVDKSRWQQGNVFSCSVMHE | |
| Without C-terminal | ALHNHYTQKSLSLSPG | |
| Lysine | | |
| hIgG1 CH1+ Hinge | ASTKGPSVFPLAPSSKSTSGGTAALGCLVKDYFPEPVTVSWNS | 3538 |
| Region + CH2 Region + | GALTSGVHTFPAVLQSSGLYSLSSVVTVPSSSLGTQTYICNVN | |
| CH3 Region | HKPSNTKVDKKVEPKSCDKTHTCPPCPAPELLGGPSVFLFPPK | |
| Hole | PKDTLMISRTPEVTCVVVDVSHEDPEVKFNWYVDGVEVHNAKT | |
| T366S/L368A/Y407V | KPREEQYNSTYRVVSVLTVLHQDWLNGKEYKCKVSNKALPAPI | |
| With C-terminal Lysine | EKTISKAKGQPREPQVYTLPPSRDELTKNQVSLSCAVKGFYPS | |
| | DIAVEWESNGQPENNYKTTPPVLDSDGSFFLVSKLTVDKSRWQ | |
| | QGNVFSCSVMHEALHNHYTQKSLSLSPGK | |
| hIgG1 CH1 + Hinge | ASTKGPSVFPLAPSSKSTSGGTAALGCLVKDYFPEPVTVSWNS | 3539 |
| Region + CH2 Region + | GALTSGVHTFPAVLQSSGLYSLSSVVTVPSSSLGTQTYICNVN | |
| CH3 Region | HKPSNTKVDKKVEPKSCDKTHTCPPCPAPELLGGPSVFLFPPK | |
| Hole | PKDTLMISRTPEVTCVVVDVSHEDPEVKFNWYVDGVEVHNAKT | |
| T366S/L368A/Y407V | KPREEQYNSTYRVVSVLIVLHQDWLNGKEYKCKVSNKALPAPI | |
| Without C-terminal | EKTISKAKGQPREPQVYTLPPSRDELTKNQVSLSCAVKGFYPS | |
| Lysine | DIAVEWESNGQPENNYKITPPVLDSDGSFFLVSKLTVDKSRWQ | |
| | QGNVFSCSVMHEALHNHYTQKSLSLSPG | |
| hIgG1 CH2 Region + | PCPAPELLGGPSVFLFPPKPKDTLMISRTPEVTCVVVDVSHED | 3540 |
| CH3 Region | PEVKFNWYVDGVEVHNAKTKPREEQYNSTYRVVSVLIVLHQDW | |
| Hole | LNGKEYKCKVSNKALPAPIEKTISKAKGQPREPQVYTLPPSRD | |
| T366S/L368A/Y407V/Y349C | ELTKNQVSLSCAVKGFYPSDIAVEWESNGQPENNYKTTPPVLD | |
| With C-terminal Lysine | SDGSFFLVSKLTVDKSRWQQGNVFSCSVMHEALHNHYTQKSLS | |
| | LSPGK | |
| hIgG1 CH2 Region + | PCPAPELLGGPSVFLFPPKPKDTLMISRTPEVTCVVVDVSHED | 3541 |
| CH3 Region | PEVKFNWYVDGVEVHNAKTKPREEQYNSTYRVVSVLTVLHQDW | |
| Hole | LNGKEYKCKVSNKALPAPIEKTISKAKGQPREPQVYTLPPSRD | |
| T366S/L368A/Y407V/Y349C | ELTKNQVSLSCAVKGFYPSDIAVEWESNGQPENNYKTTPPVLD | |
| Without C-terminal | SDGSFFLVSKLTVDKSRWQQGNVFSCSVMHEALHNHYTQKSLS | |
| Lysine | LSPG | |
| hIgG1 Partial Hinge | TCPPCPAPELLGGPSVFLFPPKPKDTLMISRTPEVTCVVVDVS | 3542 |
| Region + CH2 Region + | HEDPEVKFNWYVDGVEVHNAKTKPREEQYNSTYRVVSVLTVLH | |
| CH3 Region | QDWLNGKEYKCKVSNKALPAPIEKTISKAKGQPREPQVCTLPP | |
| Hole | SRDELTKNQVSLSCAVKGFYPSDIAVEWESNGQPENNYKTTPP | |
| T366S/L368A/Y407V/Y349C | VLDSDGSFFLVSKLTVDKSRWQQGNVFSCSVMHEALHNHYTQK | |
| With C-terminal Lysine | SLSLSPGK | |
| hIgG1 Partial Hinge | TCPPCPAPELLGGPSVFLFPPKPKDTLMISRTPEVTCVVVDVS | 3543 |
| Region + CH2 Region + | HEDPEVKFNWYVDGVEVHNAKTKPREEQYNSTYRVVSVLTVLH | |
| CH3 Region | QDWLNGKEYKCKVSNKALPAPIEKTISKAKGQPREPQVCTLPP | |
| Hole | SRDELTKNQVSLSCAVKGFYPSDIAVEWESNGQPENNYKTTPP | |
| T366S/L368A/Y407V/Y348C | VLDSDGSFFLVSKLTVDKSRWQQGNVFSCSVMHEALHNHYTQK | |
| Without C-terminal | SLSLSPG | |
| Lysine | | |
| hIgG1 Hinge Region + | EPKSCDKTHTCPPCPAPELLGGPSVFLFPPKPKDTLMISRTPE | 3544 |
| CH2 Region + CH3 | VTCVVVDVSHEDPEVKFNWYVDGVEVHNAKTKPREEQYNSTYR | |
| Region | VVSVLIVLHQDWLNGKEYKCKVSNKALPAPIEKTISKAKGQPR | |
| Hole | EPQVCTLPPSRDELTKNQVSLSCAVKGFYPSDIAVEWESNGQP | |
| T366S/L368A/Y407V/Y349C | ENNYKTTPPVLDSDGSFFLVSKLTVDKSRWQQGNVFSCSVMHE | |
| With C-terminal Lysine | ALHNHYTQKSLSLSPGK | |
| hIgG1 Hinge Region + | EPKSCDKTHTCPPCPAPELLGGPSVFLFPPKPKDTLMISRTPE | 3545 |
| CH2 Region + CH3 | VTCVVVDVSHEDPEVKFNWYVDGVEVHNAKTKPREEQYNSTYR | |
| Region | VVSVLTVLHQDWLNGKEYKCKVSNKALPAPIEKTISKAKGQPR | |
| Hole | EPQVCTLPPSRDELTKNQVSLSCAVKGFYPSDIAVEWESNGQP | |
| T366S/L368A/Y407V/Y349C | ENNYKTTPPVLDSDGSFFLVSKLTVDKSRWQQGNVFSCSVMHE | |
| Without C-terminal | ALHNHYTQKSLSLSPG | |
| Lysine | | |
| hIgG1 CH1 + Hinge | ASTKGPSVFPLAPSSKSTSGGTAALGCLVKDYFPEPVTVSWNS | 3546 |
| Region + CH2 Region + | GALISGVHTFPAVLQSSGLYSLSSVVTVPSSSLGTQTYICNVN | |
| CH3 Region | HKPSNTKVDKKVEPKSCDKTHTCPPCPAPELLGGPSVFLFPPK | |
| Hole | PKDTLMISRTPEVTCVVVDVSHEDPEVKFNWYVDGVEVHNAKT | |
| T366S/L368A/Y407V/Y349C | KPREEQYNSTYRVVSVLIVLHQDWLNGKEYKCKVSNKALPAPI | |
| With C-terminal Lysine | EKTISKAKGQPREPQVCTLPPSRDELTKNQVSLSCAVKGFYPS | |
| | DIAVEWESNGQPENNYKTTPPVLDSDGSFFLVSKLTVDKSRWQ | |
| | QGNVFSCSVMHEALHNHYTQKSLSLSPGK | |
| hIgG1 CH1 + Hinge | ASTKGPSVFPLAPSSKSTSGGTAALGCLVKDYFPEPVTVSWNS | 3547 |
| Region + CH2 Region + | GALTSGVHTFPAVLQSSGLYSLSSVVTVPSSSLGTQTYICNVN | |
| CH3 Region | HKPSNTKVDKKVEPKSCDKTHTCPPCPAPELLGGPSVFLFPPK | |
| Hole | PKDTLMISRTPEVTCVVVDVSHEDPEVKFNWYVDGVEVHNAKT | |
| T366S/L368A/Y407V/Y349C | KPREEQYNSTYRVVSVLIVLHQDWLNGKEYKCKVSNKALPAPI | |
| Without C-terminal | EKTISKAKGQPREPQVCTLPPSRDELTKNQVSLSCAVKGFYPS | |
| Lysine | DIAVEWESNGQPENNYKTTPPVLDSDGSFFLVSKLTVDKSRWQ | |
| | QGNVFSCSVMHEALHNHYTQKSLSLSPG | |

[0547] As described herein, in some embodiments, the antibody (or heterologous polypeptide) comprises a first Fc region and a second Ig Fc region.

[0548] In some embodiments, the amino acid sequence of the first Fc region comprises a T366W amino acid substitution, EU numbering according to Kabat; and the second the amino acid sequence of the Fc region comprises each of the following amino acid substitutions: T366S, L368A, and Y407V, EU numbering according to Kabat; each relative to the amino acid sequence of an exemplary reference Ig Fc region (e.g., a reference Ig Fc region set forth in Table 15). In some embodiments, the amino acid sequence of the first hIg further comprises a S354C amino acid substitution, EU numbering according to Kabat; and the amino acid sequence of the second Fc region comprises a Y349C amino acid substitution, EU numbering according to Kabat; each relative to the amino acid sequence of an exemplary reference Ig Fc region (e.g., a reference Ig Fc region set forth in Table 15).

[0549] In some embodiments, the amino acid sequence of the first Fc region comprises each of the following amino acid substitutions: T366W and a S354C, EU numbering according to Kabat; and the second the amino acid sequence of the Fc region comprises each of the following amino acid substitutions: T366S, L368A, Y407V, and Y349C, EU numbering according to Kabat; each relative to the amino acid sequence of an exemplary reference Ig Fc region (e.g., a reference Ig Fc region set forth in Table 15).

[0550] In some embodiments, the amino acid sequence of the second Fc region comprises a T366W amino acid substitution, EU numbering according to Kabat; and the second the amino acid sequence of the Fc region comprises each of the following amino acid substitutions: T366S, L368A, and Y407V, EU numbering according to Kabat; each relative to the amino acid sequence of an exemplary reference Ig Fc region (e.g., a reference Ig Fc region set forth in Table 15). In some embodiments, the amino acid sequence of the second hIg further comprises a S354C amino acid substitution, EU numbering according to Kabat; and the amino acid sequence of the second Fc region comprises a Y349C amino acid substitution, EU numbering according to Kabat; each relative to the amino acid sequence of an exemplary reference Ig Fc region (e.g., a reference Ig Fc region set forth in Table 15).

[0551] In some embodiments, the amino acid sequence of the second Fc region comprises each of the following amino acid substitutions: T366W and a S354C, EU numbering according to Kabat; and the second the amino acid sequence of the Fc region comprises each of the following amino acid substitutions: T366S, L368A, Y407V, and Y349C, EU numbering according to Kabat; each relative to the amino acid sequence of an exemplary reference Ig Fc region (e.g., a reference Ig Fc region set forth in Table 15).

[0552] In some embodiments, the amino acid sequence of the first Ig Fc region comprises a W amino acid at position T366, EU numbering according to Kabat; and the amino acid sequence of the second Ig Fc region comprises a S amino acid at position T366, an A amino acid at position L368, and a V amino acid at position Y407, EU numbering according to Kabat.

[0553] In some embodiments, the amino acid sequence of the first Ig Fc region comprises a W amino acid at position T366 and a C amino acid at position S354, EU numbering according to Kabat; and the amino acid sequence of the second Ig Fc region comprises a S amino acid at position T366, an A amino acid at position L368, a V amino acid at position Y407, and a C amino acid at position Y349, EU numbering according to Kabat.

### Ig Constant Region Variations for Site Specific Conjugation

[0554] In some embodiments, the agent (e.g., an antisense strand, sense strand, dsRNA agent, RNAi agent, ASO, ssRNA agent, etc. described herein) is conjugated (e.g., directly, or indirectly through a linker) to the Ig constant region. In some embodiments, the agent (e.g., an antisense strand, sense strand, dsRNA agent, RNAi agent, ASO, ssRNA agent, etc. described herein) (or a linker) is conjugated directly to an amino acid (e.g., a naturally occurring amino acid or an engineered (i.e., variant) amino acid) within the Ig constant region.

[0555] In some embodiments, the agent (e.g., an antisense strand, sense strand, dsRNA agent, RNAi agent, ASO, ssRNA agent, etc. described herein) (or the linker) is conjugated directly to an engineered lysine, cysteine, or tyrosine amino acid residue within the Ig constant region. In some embodiments, the amino acid sequence of the Ig constant region comprises the substitution of one or more naturally occurring amino acid residue with a lysine, cysteine, or tyrosine amino acid residue (e.g., to mediate conjugation). In some embodiments, the amino acid sequence of the Ig constant region comprises the substitution of one or more non-cysteine amino acid residue with a cysteine amino acid residue (e.g., to mediate conjugation). In some embodiments, the amino acid sequence of the Ig constant region comprises the substitution of one or more non-lysine amino acid residue with a lysine amino acid residue (e.g., to mediate conjugation). In some embodiments, the amino acid sequence of the Ig constant region comprises the substitution of one or more non-tyrosine amino acid residue with a tyrosine amino acid residue (e.g., to mediate conjugation).

[0556] In some embodiments, the amino acid sequence of the Ig constant region comprises the addition of one or more lysine, cysteine, or tyrosine amino acid residue (e.g., to mediate conjugation). In some embodiments, the amino acid sequence of the Ig constant region comprises the addition of one or more lysine amino acid residue (e.g., to mediate conjugation). In some embodiments, the amino acid sequence of the Ig constant region comprises the addition of one or more cysteine amino acid residue (e.g., to mediate conjugation). In some embodiments, the amino acid sequence of the Ig constant region comprises the addition of one or more tyrosine amino acid residue (e.g., to mediate conjugation).

### 4.5.2 Linkers

[0557] In some embodiments, the agent (e.g., described herein) (e.g., RNAi agent, dsRNA agent, sense strand, antisense strand, ASO, ssRNA agent, etc.) is directly attached to the heterologous moiety (e.g., targeting moiety) (e.g., directly attached through a single chemical bond). In some embodiments, the agent (e.g., described herein) (e.g., RNAi agent, dsRNA agent, sense strand, antisense strand, ASO, ssRNA agent, etc.) is indirectly attached to the heterologous moiety (e.g., targeting moiety). In some embodiments, the agent (e.g., described herein) (e.g., RNAi agent, dsRNA agent, sense strand, antisense strand, ASO, ssRNA agent, etc.) is indirectly attached to the heterologous moiety via a linker.

[0558] Suitable linkers for use in the conjugates described herein are known in the art and can be evaluated by a person of ordinary skill in the art using standard methods. Exemplary linkers and components thereof for use in the conjugates described herein are also described below.

[0559] Linkers typically comprise a direct bond or an atom such as oxygen or sulfur, a unit such as NR8, C(O), C(O)NH, SO, SO2, SO2NH or a chain of atoms, such as, but not limited to, substituted or unsubstituted alkyl, substituted or unsubstituted alkenyl, substituted or unsubstituted alkynyl, arylalkyl, arylalkenyl, arylalkynyl, heteroarylalkyl, heteroarylalkenyl, heteroarylalkynyl, heterocyclylalkyl, heterocyclylalkenyl, heterocyclylalkynyl, aryl, heteroaryl, heterocyclyl, cycloalkyl, cycloalkenyl, alkylarylalkyl, alkylarylalkenyl, alkylarylalkynyl, alkenylarylalkyl, alkenylarylalkenyl, alkenylarylalkynyl, alkynylarylalkyl, alkynylarylalkenyl, alkynylarylalkynyl, alkylheteroarylalkyl, alkylheteroarylalkenyl, alkylheteroarylalkynyl, alkenylheteroarylalkyl, alkenylheteroarylalkenyl, alkenylheteroarylalkynyl, alkynylheteroarylalkyl, alkynylheteroarylalkenyl, alkynylheteroarylalkynyl, alkylheterocyclylalkyl, alkylheterocyclylalkenyl, alkylhererocyclylalkynyl, alkenylheterocyclylalkyl, alkenylheterocyclylalkenyl, alkenylheterocyclylalkynyl, alkynylheterocyclylalkyl, alkynylheterocyclylalkenyl, alkynylheterocyclylalkynyl, alkylaryl, alkenylaryl, alkynylaryl, alkylheteroaryl, alkenylheteroaryl, alkynylhereroaryl, which one or more methylenes can be interrupted or terminated by O, S, S(O), SO₂, N(R8), C(O), substituted or unsubstituted aryl, substituted or unsubstituted heteroaryl, or substituted or unsubstituted heterocyclic; where R8 is hydrogen, acyl, aliphatic, or substituted aliphatic. In one embodiment, the linker is about 1-24 atoms, 2-24, 3-24, 4-24, 5-24, 6-24, 6-18, 7-18, 8-18, 7-17, 8-17, 6-16, 7-17, or 8-16 atoms.

[0560] In some embodiments, the linker comprises ethylene glycol, nucleosides, or amino acid units. In some embodiments, the linker comprises one or more groups selected from alkyl, amino, oxo, amide, disulfide, polyethylene glycol, ether, thioether, and hydroxylamino. In some embodiments, the linker comprises groups selected from alkyl, amino, oxo, amide and ether groups. In some embodiments, the linker comprises groups selected from alkyl and amide groups. In some embodiments, the linker comprises groups selected from alkyl and ether groups. In some embodiments, the linker comprises at least one phosphorus moiety. In some embodiments, the linker comprises at least one phosphate group. In some embodiments, the linker comprises at least one neutral linking group. Exemplary linkers include but are not limited to pyrrolidine, 8-amino-3,6-dioxaoctanoic acid (ADO), succinimidyl 4-(N-maleimidomethyl) cyclohexane-1-carboxylate (SMCC), 6-aminohexanoic acid (AHEX or AHA). Additional exemplary linkers include but are not limited to substituted or unsubstituted Ci-Cw alkyl, substituted or unsubstituted C2-C10 alkenyl or substituted or unsubstituted C2-C10 alkynyl, wherein a nonlimiting list of preferred substituent groups includes hydroxyl, amino, alkoxy, carboxy, benzyl, phenyl, nitro, thiol, thioalkoxy, halogen, alkyl, aryl, alkenyl and alkynyl.

[0561] In some embodiments, the linker is bifunctional. In general, a bifunctional linker comprises at least two functional groups. One of the functional groups is selected to react with a particular site on an agent (e.g., described herein) and the other is selected to react with a heterologous moiety (e.g., described herein). Examples of functional groups used in a bifunctional linkers include but are not limited to electrophiles for reacting with nucleophilic groups and nucleophiles for reacting with electrophilic groups. In some embodiments, bifunctional linking moieties comprise one or more groups selected from amino, hydroxyl, carboxylic acid, thiol, alkyl, alkenyl, and alkynyl.

[0562] In some embodiments, the linker is a monovalent linker, a bivalent linker, a trivalent linker, or a tetravalent linker.

### 4.5.2.1 Cleavable Linkers

[0563] In some embodiments, the linker is non-cleavable. In some embodiments, the linker is cleavable. Cleavable linkers contain at least one (or a plurality of) cleavable bonds that are susceptible to one or more cleavage agent. Exemplary classes of cleavable linkers include, but are not limited to, redox cleavable linkers, phosphate based cleavable linkers, acid cleavable linkers, ester-based cleavable linkers, and peptide-based cleavable linkers. In certain embodiments, a cleavable bond is selected from among: an amide, an ester, an ether, one or both esters of a phosphodiester, a phosphate ester, a carbamate, or a disulfide.

[0564] Cleavable linkers may be advantageous when a stable conjugate is desired under a first set of conditions but under a second set of conditions it is advantageous to release the agent (e.g., described herein) from the heterologous moiety (e.g., described herein). For example, in some embodiments, it may be desirable to have a sufficiently stable conjugate outside of a cell (e.g., within a subject (e.g., within the blood or serum of a subject)), and upon entry into a cell (e.g., a target cell (e.g., a target cell within a subject)) have the linker cleaved to release the agent (e.g., described herein) from the heterologous moiety (e.g., described herein). In some embodiments, the linker is not cleaved (or is cleaved at a lower rate) under a first condition relative to under a second condition. In some embodiments, the first condition is within the blood (e.g., of a subject) (or in an in vitro system sufficient to mimic the conditions of the blood within a subject) and the second condition is with a cell (e.g., a cell within a subject) (or in an in vitro system sufficient to mimic the conditions of a cell within a subject).

[0565] The suitability of a cleavable linker can be assessed by standard methods known in the art. In general, the suitability of a cleavable linker can be evaluated by testing the ability of a cleavage agent (or condition) to cleave the candidate linker (e.g., the cleavage bond(s)). In some embodiments, it may be desirable to further test the ability of the linker to resist cleavage under a certain condition (e.g., within the blood or serum of subject, when in contact with a non-target cell, tissue, organ).

[0566] In some embodiments, the linker is a redox cleavable linker that is cleaved upon reduction or oxidation. An example of a reductively cleavable linker is a disulphide (—S—S—) containing linker. Redox cleavable linkers can be evaluated using methods analogous to those described above.

[0567] In some embodiments, the linker is a phosphate-based cleavable linker. A phosphate-based cleavable linker is cleaved by agents that degrade or hydrolyze the phosphate group. For example, in cells, enzymes such as phosphatases are capable of cleaving phosphate groups. Examples of phosphate-based linkers include those comprising any of the following —O—P(O)(ORk)-O—, —OP(S)(ORk)-O—, —O—P(S)(SRk)-O—, —S—P(O)(ORk)-O—, —O—P(O)(ORk)-S—, —S—P(O)(ORk)-S—, —OP(S)(ORk)-S—, —S—P(S)(ORk)-O—, —O—P(O)(Rk)-O—, —O—P(S)(Rk)-O—, —S—P(O)(Rk)-O—, —S—P(S)(Rk)-O—, —S—P(O)(Rk)-S—, —O—P(S)(Rk)-S—, wherein Rk at each occurrence can be, independently, C1-C20 alkyl, C1-C20 haloalkyl, C6-C10 aryl, or C7-C12 aralkyl. Exemplary embodiments include are —OP(O)(OH)—O—, —O—P(S)(OH)—O—, —O—P(S)(SH)—O—, —S—P(O)(OH)—O—, —O—P(O)(OH)—S—, —S—P(O)(OH)—S—, —O—P(S)(OH)—S—, —S—P(S)(OH)—O—, —O—P(O)(H)—O—, —O—P(S)(H)—O—, —S—P(O)(H)—O, —S—P(S)(H)—O—, —S—P(O)(H)—S—, or —O—P(S)(H)—S—. Phosphate based cleavable linker can be evaluated using methods analogous to those described above.

[0568] In some embodiments, the linker is an acid cleavable linker. An acid cleavable linker is cleaved under acidic conditions. For example, in some embodiments the acid cleavable linker can be cleaved in an acidic environment with a pH of about 6.5 or less (e.g., about 6.0, 5.5, 5.0, or less). In some embodiments the acid cleavable linker can be cleaved by enzymes that can act as a general acid. In a cell (e.g., within a subject), specific low pH organelles, such as endosomes and lysosomes can provide a cleaving environment for acid cleavable linkers. Examples of acid cleavable linkers include but are not limited to hydrazones, esters, and esters of amino acids. Acid cleavable groups can have the general formula —C═NN—, C(O)O, or —OC(O). Acid cleavable linkers can be evaluated using methods analogous to those described above.

[0569] In some embodiments, the linker is an ester-based cleavable linker. An ester-based cleavable linker is cleaved by enzymes such as esterases and amidases in cells. Examples of ester-based cleavable include, but are not limited to, esters of alkylene, alkenylene and alkynylene groups. The cleavable bonds of ester cleavable linkers have the general formula —C(O)O— or —OC(O)—. Ester-based cleavable linkers can be evaluated using methods analogous to those described above.

[0570] In some embodiments, the linker is a peptide-based cleavable linker. A peptide-based cleavable linker is cleaved by enzymes such as peptidases and proteases (e.g., present in cells (e.g., cells within a subject)). Peptide-based cleavable linkers comprise peptide bonds formed between amino acids to yield polypeptides (e.g., dipeptides, tripeptides, etc.). As known in the art, peptide bonds. The peptide bonds (i.e., the amide bond) of the peptide linker is generally the site of cleavage. Peptide-based cleavable linkers can be evaluated using methods analogous to those described above.

### 4.5.3 Orientation

[0571] The heterologous moiety may be attached at any suitable position to the agent (e.g., described herein) (e.g., RNAi agent, dsRNA agent, sense strand, antisense strand, ASO, ssRNA agent, etc.).

[0572] In some embodiments, the heterologous moiety is conjugated to the 5′ end of the agent (e.g., described herein) (e.g., RNAi agent, dsRNA agent, sense strand, antisense strand, ASO, ssRNA agent, etc.). In some embodiments, the heterologous moiety is conjugated to the 3′ end of the agent (e.g., described herein) (e.g., RNAi agent, dsRNA agent, sense strand, antisense strand, ASO, ssRNA agent, etc.). In some embodiments, a first heterologous moiety is conjugated to the 5′ end of the agent (e.g., described herein) (e.g., RNAi agent, dsRNA agent, sense strand, antisense strand, ASO, ssRNA agent, etc.) and a second heterologous moiety is conjugated to the 3′ end of the agent (e.g., described herein) (e.g., RNAi agent, dsRNA agent, sense strand, antisense strand, ASO, ssRNA agent, etc.). The first and second heterologous moieties can be the same or different. In some embodiments, the heterologous moiety is conjugated to an internal site of the agent (e.g., described herein) (e.g., RNAi agent, dsRNA agent, sense strand, antisense strand, ASO, ssRNA agent, etc.).

[0573] In some embodiments, the agent (e.g., RNAi agent, dsRNA agent) comprises an antisense strand. In some embodiments, the heterologous moiety is conjugated to the 5′ end of the antisense strand. In some embodiments, the heterologous moiety is conjugated to the 3′ end of the antisense strand. In some embodiments, a first heterologous moiety is conjugated to the 5′ end of the antisense strand and a second heterologous moiety is conjugated to the 3′ end of the antisense strand. The first and second heterologous moieties can be the same or different. In some embodiments, the heterologous moiety is conjugated to an internal site of the antisense strand.

[0574] In some embodiments, the agent (e.g., RNAi agent, dsRNA agent) comprises a sense strand. In some embodiments, the heterologous moiety is conjugated to the 5′ end of the sense strand. In some embodiments, the heterologous moiety is conjugated to the 3′ end of the sense strand. In some embodiments, a first heterologous moiety is conjugated to the 5′ end of the sense strand and a second heterologous moiety is conjugated to the 3′ end of the sense strand. The first and second heterologous moieties can be the same or different. In some embodiments, the heterologous moiety is conjugated to an internal site of the sense strand.

[0575] The heterologous moiety may be attached to the 3′ end of the sense and/or antisense strand. The heterologous moiety may be attached to the 5′ end of the sense and/or antisense strand. The heterologous moiety may be attached to at an internal site of the sense and/or antisense strand. The heterologous moiety may be attached to the 3′ end of the sense and antisense strand. The heterologous moiety may be attached to the 5′ end of the sense and antisense strand. The heterologous moiety may be attached to at an internal site of the sense and antisense strand.

[0576] In some embodiments, the agent (e.g., RNAi agent) comprises a dsRNA agent comprising a sense strand and an antisense strand. In some embodiments, the heterologous moiety is conjugated to the 5′ end of the sense strand. In some embodiments, the heterologous moiety is conjugated to the 3′ end of the sense strand. In some embodiments, a first heterologous moiety is conjugated to the 5′ end of the sense strand and a second heterologous moiety is conjugated to the 3′ end of the sense strand. The first and second heterologous moieties can be the same or different. In some embodiments, the heterologous moiety is conjugated to an internal site of the sense strand. In some embodiments, the heterologous moiety is conjugated to the 5′ end of the sense strand. In some embodiments, the heterologous moiety is conjugated to the 3′ end of the sense strand. In some embodiments, a first heterologous moiety is conjugated to the 5′ end of the sense strand and a second heterologous moiety is conjugated to the 3′ end of the sense strand. The first and second heterologous moieties can be the same or different. In some embodiments, the heterologous moiety is conjugated to an internal site of the sense strand.

[0577] In some embodiments, a first heterologous moiety is conjugated to the 5′ end of the sense strand and a second heterologous moiety is conjugated to the 5′ end of the antisense strand. In some embodiments, a first heterologous moiety is conjugated to the 3′ end of the sense strand and a second heterologous moiety is conjugated to the 3′ end of the antisense strand. In some embodiments, a first heterologous moiety is conjugated to the 5′ end of the sense strand and a second heterologous moiety is conjugated to the 3′ end of the antisense strand. In some embodiments, a first heterologous moiety is conjugated to the 3′ end of the sense strand and a second heterologous moiety is conjugated to the 5′ end of the antisense strand. The first and second heterologous moieties can be the same or different.

[0578] In some embodiments, a first heterologous moiety is conjugated to an internal site of the sense strand and a second heterologous moiety is conjugated to the 5′ end of the antisense strand. In some embodiments, a first heterologous moiety is conjugated to an internal site of the sense strand and a second heterologous moiety is conjugated to the 3′ end of the antisense strand. In some embodiments, a first heterologous moiety is conjugated to an internal site of the antisense strand and a second heterologous moiety is conjugated to the 3′ end of the antisense strand. In some embodiments, a first heterologous moiety is conjugated to an internal site of the antisense strand and a second heterologous moiety is conjugated to the 5′ end of the antisense strand. The first and second heterologous moieties can be the same or different.

### 4.6 Activity of Nucleic Acis Molecule Agents & Conjugates Thereof

[0579] In some embodiments, the agent (e.g., dsRNA agent, RNAi agent, ASO, ssRNA agent, etc.) inhibits expression of a target gene (e.g., BCL11A). In some embodiments, the agent (e.g., dsRNA agent, RNAi agent, ASO, ssRNA agent, etc.) inhibits expression of a target gene (e.g., BCL11A) in a cell. In some embodiments, the agent (e.g., dsRNA agent, RNAi agent, ASO, ssRNA agent, etc.) inhibits expression of a target gene (e.g., BCL11A) in a cell in a subject (e.g., a mammalian subject, e.g., a primate, human, non-human primate, mouse, rat, etc.). In some embodiments, the agent (e.g., dsRNA agent, RNAi agent, ASO, ssRNA agent, etc.) inhibits expression of a target gene (e.g., BCL11A) in a cell in a subject (e.g., a mammalian subject, e.g., a primate, human, non-human primate, mouse, rat, etc.) by at least about 30%, 40%, 50%, 55%, 60%, 65%, 70%, 75%, 80%, 85%, 90%, 95%, 96%, 97%, 98%, 99%, or 100%. In some embodiments, the agent (e.g., dsRNA agent, RNAi agent, ASO, ssRNA agent, etc.) mediates degradation of a target mRNA (e.g., a BCL11A (e.g., hBCL11A) mRNA). In some embodiments, the agent (e.g., dsRNA agent, RNAi agent, ASO, ssRNA agent, etc.) inhibits expression of a target gene (e.g., BCL11A) in a cell in a subject (e.g., a mammalian subject, e.g., a primate, human, non-human primate, mouse, rat, etc.) by at least about 50%, 55%, 60%, 65%, 70%, 75%, 80%, 85%, 90%, 95%, 96%, 97%, 98%, 99%, or 100%. In some embodiments, the agent (e.g., dsRNA agent, RNAi agent, ASO, ssRNA agent, etc.) inhibits expression of a target gene (e.g., BCL11A) in a cell in a subject (e.g., a mammalian subject, e.g., a primate, human, non-human primate, mouse, rat, etc.) by at least about 75%, 80%, 85%, 90%, 95%, 96%, 97%, 98%, 99%, or 100%. In some embodiments, the agent (e.g., dsRNA agent, RNAi agent, ASO, ssRNA agent, etc.) inhibits expression of a target gene (e.g., BCL11A) in a cell in a subject (e.g., a mammalian subject, e.g., a primate, human, non-human primate, mouse, rat, etc.) by at least about 90%, 95%, 96%, 97%, 98%, 99%, or 100%. In some embodiments, the agent (e.g., dsRNA agent, RNAi agent, ASO, ssRNA agent, etc.) inhibits expression of a target gene (e.g., BCL11A) in a cell in a subject (e.g., a mammalian subject, e.g., a primate, human, non-human primate, mouse, rat, etc.) by at least about 50%. In some embodiments, the agent (e.g., dsRNA agent, RNAi agent, ASO, ssRNA agent, etc.) inhibits expression of a target gene (e.g., BCL11A) in a cell in a subject (e.g., a mammalian subject, e.g., a primate, human, non-human primate, mouse, rat, etc.) by at least about 75%. In some embodiments, the agent (e.g., dsRNA agent, RNAi agent, ASO, ssRNA agent, etc.) inhibits expression of a target gene (e.g., BCL11A) in a cell in a subject (e.g., a mammalian subject, e.g., a primate, human, non-human primate, mouse, rat, etc.) by at least about 80%. In some embodiments, the agent (e.g., dsRNA agent, RNAi agent, ASO, ssRNA agent, etc.) inhibits expression of a target gene (e.g., BCL11A) in a cell in a subject (e.g., a mammalian subject, e.g., a primate, human, non-human primate, mouse, rat, etc.) by at least about 90%. In some embodiments, the agent (e.g., dsRNA agent, RNAi agent, ASO, ssRNA agent, etc.) inhibits expression of a target gene (e.g., BCL11A) in a cell in a subject (e.g., a mammalian subject, e.g., a primate, human, non-human primate, mouse, rat, etc.) by at least about 95%.

[0580] Any one or more of the above activities can be evaluated in vitro, ex vivo, or in vivo. Any one or more of the above activities can be evaluated by standard methods known in the art. For example, by PCR (e.g., qPCR), branched DNA assays, or by a protein-based methods (such as immunofluorescence analysis (using, e.g., western blotting or flow cytometric techniques). In some embodiments, inhibition of gene (e.g., BCL11A (e.g., hBCL11A)) expression is determined by qPCR.

### 4.7 Methods of Making Nucleic Acid Molecule Agents & Conjugates Thereof

[0581] An agent (e.g., described herein) (e.g., RNAi agent, dsRNA agent, antisense strand, sense strand, ASO, ssRNA agent, etc.) can be synthesized by standard methods known in the art (e.g., chemical synthesis (e.g., solid phase synthesis)). See, e.g., “Current protocols in nucleic acid chemistry,” Beaucage, S. L. et al. (Edrs.), John Wiley & Sons, Inc., New York, N.Y., USA, and See, e.g., Dong Y, Siegwart D J, Anderson D G. Strategies, design, and chemistry in siRNA delivery systems. Adv Drug Deliv Rev. 2019 April; 144:133-147. doi: 10.1016/j.addr.2019.05.004. Epub 2019 May 15. PMID: 31102606; PMCID: PMC6745264, the entire contents of each of which is incorporated by reference herein for all purposes. As such, further provided herein are methods of making an agent described herein) (e.g., RNAi agent, dsRNA agent, antisense strand, sense strand, ASO, ssRNA agent, etc.).

[0582] For example, single stranded nucleic acid molecules (e.g., described herein) (e.g., antisense strands, sense strands, ASOs, ssRNA agents, etc.) can be prepared using solution-phase or solid-phase organic synthesis or both. dsRNA agents (e.g., described herein) can be prepared using a two-step procedure, wherein the individual strands of the dsRNA agent are prepared separately and subsequently annealed. The individual strands of the dsRNA agent can be prepared using solution-phase or solid-phase organic synthesis or both. Regardless of the method of synthesis, the agents (e.g., described herein) (e.g., dsRNA agents described herein) can be prepared in a solution (e.g., an aqueous or organic solution) that is appropriate for formulation. For example, the dsRNA agent can be precipitated and redissolved in pure double-distilled water, and lyophilized. The lyophilized dsRNA agent can be resuspended in a solution appropriate for the intended formulation process.

[0583] Likewise, conjugates (e.g., described herein) can be synthesized utilizing standard methods known in the art. See, e.g., Dong Y, Siegwart D J, Anderson D G. Strategies, design, and chemistry in siRNA delivery systems. Adv Drug Deliv Rev. 2019 April; 144:133-147. doi: 10.1016/j.addr.2019.05.004. Epub 2019 May 15. PMID: 31102606; PMCID: PMC6745264, the entire contents of which is incorporated herein by reference for all purposes. A person of ordinary skill in the art can determine the appropriate conjugation method based on e.g., the heterologous moiety and the agent to be conjugated. For example, standard conjugation methods include, e.g., parallel synthesis methods and linear synthesis methods.

### 4.8 Methods of Making Proteins (e.g., Targeting Moieties)

[0584] Any of the proteins (e.g., antibodies), peptides, fusion proteins, etc., including the targeting moieties described herein, may be produced using standard methods known in the art. For example, each may be produced by recombinant technology in host cells (e.g., insect cells, mammalian cells, bacteria) that have been transfected or transduced with a nucleic acid expression vector (e.g., plasmid, viral vector (e.g., a baculoviral expression vector)) encoding the protein (e.g., antibody). Such general methods are common knowledge in the art. The expression vector typically contains an expression cassette that includes nucleic acid sequences capable of bringing about expression of the nucleic acid molecule encoding the protein interest, such as promoter(s), enhancer(s), polyadenylation signals, and the like. The person of ordinary skill in the art is aware that various promoter and enhancer elements can be used to obtain expression of a nucleic acid molecule in a host cell. For example, promoters can be constitutive or regulated, and can be obtained from various sources, e.g., viruses, prokaryotic or eukaryotic sources, or artificially designed. Post transfection or transduction, host cells containing the expression vector encoding the protein of interest are cultured under conditions conducive to expression of the nucleic acid molecule encoding the protein. Culture media is available from various vendors, and a suitable medium can be routinely chosen for a host cell to express a protein or polypeptide of interest. Host cells can be adherent or suspension cultures, and a person of ordinary skill in the art can optimize culture methods for specific host cells selected. For example, suspension cells can be cultured in, for example, bioreactors in e.g., a batch process or a fed-batch process. The produced protein or polypeptide may be isolated from the cell cultures, by, for example, column chromatography in either flow-flow through or bind-and-elute modes. Examples include, but are not limited to, ion exchange resins and affinity resins, such as lentil lectin Sepharose, and mixed mode cation exchange-hydrophobic interaction columns (CEX-HIC). The protein or polypeptide may be concentrated, buffer exchanged by ultrafiltration, and the retentate from the ultrafiltration may be filtered through an appropriate filter, e.g., a 0.22 μm filter. See, e.g., Hacker, David (Ed.), Recombinant Protein Expression in Mammalian Cells: Methods and Protocols (Methods in Molecular Biology), Humana Press (2018); and McPherson et al., “Development of a SARS Coronavirus Vaccine from Recombinant Spike Protein Plus Delta Inulin Adjuvant,” Chapter 4, in Sunil Thomas (ed.), Vaccine Design: Methods and Protocols: Volume 1: Vaccines for Human Diseases, Methods in Molecular Biology, Springer, New York, 2016. See also U.S. Pat. No. 5,762,939, the entire contents of each of which is incorporated by reference herein for all purposes.

[0585] The proteins (e.g., antibodies), peptides, fusion proteins, etc. described herein may also be produced synthetically.

### 4.9 Vectors

[0586] In some embodiments, one or more of the agents described herein (e.g., RNAi agents, dsRNA agents, sense strands, antisense strands, ASOs, ssRNA agents, etc.) (see, e.g., §§ 4.2, 4.3, 4.4) are contained in a vector (e.g., a non-viral vector (e.g., a plasmid), a viral vector). Thus, in one aspect, also provided herein are vectors (e.g., non-viral vectors (e.g., plasmids) viral vectors) comprising one or more agent described herein (e.g., RNAi agents, dsRNA agents, sense strands, antisense strands, ASOs, ssRNA agents, etc.) (see, e.g., §§ 4.2, 4.3, 4.4). Such vectors can be easily manipulated by methods well known to the ordinary person of skill in the art. The vector used can be any vector that is suitable for cloning nucleic acid molecules that can be used for transcription of the nucleic acid molecule of interest (e.g., an agent described herein (e.g., RNAi agents, dsRNA agents, sense strands, antisense strands, ASOs, ssRNA agents, etc.) (see, e.g., §§ 4.2, 4.3, 4.4).

[0587] In some embodiments, the vector is a viral vector. Viral vectors include both RNA and DNA based vectors. The vectors can be designed to meet a variety of specifications. For example, viral vectors can be engineered to be capable or incapable of replication in prokaryotic and/or eukaryotic cells. In some embodiments, the vector is replication deficient. In some embodiments, the vector is replication competent. Vectors can be engineered or selected that either will (or will not) integrate in whole or in part into the genome of host cells, resulting (or not (e.g., episomal expression)) in stable host cells comprising the desired nucleic acid in their genome.

[0588] Exemplary viral vectors include, but are not limited to, adenovirus vectors, adeno-associated virus vectors, lentivirus vectors, retrovirus vectors, poxvirus vectors, parapoxvirus vectors, vaccinia virus vectors, fowlpox virus vectors, herpes virus vectors, adeno-associated virus vectors, alphavirus vectors, lentivirus vectors, rhabdovirus vectors, measles virus, Newcastle disease virus vectors, picornaviruses vectors, anellovectors, or lymphocytic choriomeningitis virus vectors. In some embodiments, the viral vector is an adenovirus vector, adeno-associated virus vector, lentivirus vector, anellovector (as described, for example, in U.S. Pat. No. 11,446,344, the entire contents of which is incorporated by reference herein for all purposes).

[0589] In some embodiments, the vector is an adenoviral vector (e.g., human adenoviral vector, e.g., HAdV or AdHu). In some embodiments, the adenovirus vector has the E1 region deleted, rendering it replication-deficient in human cells. Other regions of the adenovirus such as E3 and E4 may also be deleted. Exemplary adenovirus vectors include, but are not limited to, those described in e.g., WO2005071093 or WO2006048215, the entire contents of each of which is incorporated by reference herein for all purposes. In some embodiments, the adenovirus-based vector used is a simian adenovirus, thereby avoiding dampening of the immune response after vaccination by pre-existing antibodies to common human entities such as AdHu5. Exemplary, simian adenovirus vectors include AdCh63 (see, e.g., WO2005071093, the entire contents of which is incorporated by reference herein for all purposes) or AdCh68.

[0590] Viral vectors can be generated through the use of a packaging/producer cell line (e.g., a mammalian cell line) using standard methods known to the person of ordinary skill in the art. Generally, a nucleic acid construct (e.g., a plasmid) encoding the transgene (e.g., an agent described herein) (along with additional elements e.g., a promoter, inverted terminal repeats (ITRs) flanking the transgene, a plasmid encoding e.g., viral replication and structural proteins, along with one or more helper plasmids a host cell (e.g., a host cell line) are transfected into a host cell line (i.e., the packing/producer cell line). In some instances, depending on the viral vector, a helper plasmid may also be needed that include helper genes from another virus (e.g., in the instance of adeno-associated viral vectors). Eukaryotic expression plasmids are commercially available from a variety of suppliers, for example the plasmid series: pcDNA™, pCR3.1™, pCMV™, pFRT™, pVAX1™, pCI™, Nanoplasmid™, and Pcaggs. The person of ordinary skill in the art is aware of numerous transfection methods and any suitable method of transfection may be employed (e.g., using a biochemical substance as carrier (e.g., lipofectamine), by mechanical means, or by electroporation). The cells are cultured under conditions suitable and for a sufficient time for plasmid expression. The viral particles may be purified from the cell culture medium using standard methods known to the person of ordinary skill in the art. For example, by centrifugation followed by e.g., chromatography or ultrafiltration.

[0591] In some embodiments, the vector is a plasmid. A person of ordinary skill in the art is aware of suitable plasmids for expression of the DNA of interest. For example, Suitable plasmid DNA may be generated to allow efficient production of the encoded RNA in cell lines, e.g., in insect cell lines, for example using vectors as described in W02009150222A2 and as defined in PCT claims 1 to 33, the disclosure relating to claim 1 to 33 of W02009150222A2 the entire contents of which is incorporated by reference herein for all purposes.

### 4.10 Carriers

[0592] In some embodiments, one or more of the agents described herein (e.g., RNAi agents, dsRNA agents, sense strands, antisense strands, ASOs, ssRNA agents, etc. (or a conjugate comprising the same)) or a vector comprising any of the foregoing is formulated within one or more carrier.

[0593] Therefore, further provided herein are carriers comprising any one or more of the agents described herein (e.g., RNAi agents, dsRNA agents, sense strands, antisense strands, ASOs, ssRNA agents, etc. (or a conjugate comprising the same)) or a vector comprising any of the foregoing.

[0594] Any of the foregoing (e.g., one or more of the agents described herein (e.g., RNAi agents, dsRNA agents, sense strands, antisense strands, ASOs, ssRNA agents, etc. (or a conjugate comprising the same)) or a vector comprising any of the foregoing) can be encapsulated within a carrier, chemically conjugated to a carrier, associated with the carrier. In this context, the term “associated” refers to the essentially stable combination of an agent described herein (or a conjugate comprising the same) (or a vector comprising the same) with one or more molecules of a carrier (e.g., one or more lipids of a lipid-based carrier, e.g., an LNP, liposome, lipoplex, and/or nanoliposome) into larger complexes or assemblies without covalent binding. In this context, the term “encapsulation” refers to the incorporation of an agent described herein (or a conjugate comprising the same) (or a vector comprising the same) into a carrier (e.g., a lipid-based carrier, e.g., an LNP, liposome, lipoplex, and/or nanoliposome) wherein the agent described herein (or the conjugate comprising the same) (or the vector comprising the same) is entirely contained within the interior space of the carrier (e.g., the lipid-based carrier, e.g., the LNP, liposome, lipoplex, and/or nanoliposome).

[0595] Exemplary carriers includes, but are not limited to, lipid-based carriers (e.g., lipid nanoparticles (LNPs), liposomes, lipoplexes, and nanoliposomes). In some embodiments, the carrier is a lipid-based carrier. In some embodiments, the carrier is an LNP. In some embodiments, the LNP comprises a cationic lipid, a neutral lipid, a cholesterol, and/or a PEG lipid.

### 4.11 Host Cells

[0596] In one aspect, provided herein are host cells comprising any one more agent described herein (e.g., an RNAi agent, a dsRNA agent, a sense strand, an antisense strand, an ASO, a ssRNA agent, etc.) (see, e.g., §§ 4.2, 4.3, 4.4); a vector described herein (see, e.g., § 4.9); a conjugate described herein (see, e.g., § 4.5); a carrier described herein (see, e.g., § 4.10); or any combination thereof. In some embodiments, the host cell comprises an RNAi agent described herein, a dsRNA agent described herein, an antisense strand described herein, and/or a sense strand described herein. In some embodiments, the host cell comprises a dsRNA agent described herein. In some embodiments, the host cell comprises an antisense oligonucleotide described herein. In some embodiments, the host cell is in vitro, ex vivo, or in vivo.

### 4.12 Pharmaceutical Compositions

[0597] In one aspect, provided herein are pharmaceutical compositions comprising any one more agent described herein (e.g., an RNAi agent, a dsRNA agent, a sense strand, an antisense strand, an ASO, a ssRNA agent, etc.) (see, e.g., §§ 4.2, 4.3, 4.4); a vector described herein (see, e.g., § 4.9); a conjugate described herein (see, e.g., § 4.5); a carrier described herein (see, e.g., § 4.10); and/or a host cell described herein (see, e.g., § 4.11); or any combination thereof; and a pharmaceutically acceptable excipient (see, e.g., Remington's Pharmaceutical Sciences (1990) Mack Publishing Co., Easton, PA, the entire contents of which is incorporated by reference herein for all purposes).

[0598] In one aspect, also provided herein are methods of making pharmaceutical compositions described herein comprising providing any one more agent described herein (e.g., an RNAi agent, a dsRNA agent, a sense strand, an antisense strand, an ASO, a ssRNA agent, etc.) (see, e.g., §§ 4.2, 4.3, 4.4); a vector described herein (see, e.g., § 4.9); a conjugate described herein (see, e.g., § 4.5); a carrier described herein (see, e.g., § 4.10); and/or a host cell described herein (see, e.g., § 4.11); and formulating it into a pharmaceutically acceptable composition by the addition of one or more pharmaceutically acceptable excipient.

[0599] Also provided herein are pharmaceutical compositions comprising any one more agent described herein (e.g., an RNAi agent, a dsRNA agent, a sense strand, an antisense strand, an ASO, a ssRNA agent, etc.); vector described herein; conjugate described herein; carrier described herein; and/or cell described herein, wherein the pharmaceutical composition lacks a predetermined threshold amount or a detectable amount of a process impurity or contaminant, e.g., lacks a predetermined threshold amount or a detectable amount of a process-related impurity such as host cell proteins, host cell DNA, or a cell culture component (e.g., inducers, antibiotics, or media components); a product-related impurity (e.g., precursors, fragments, aggregates, degradation products); or a contaminant, e.g., endotoxin, bacteria, viral contaminant.

[0600] Acceptable excipients (e.g., carriers and stabilizers) are preferably nontoxic to recipients at the dosages and concentrations employed, and include buffers such as phosphate, citrate, or other organic acids; antioxidants including ascorbic acid or methionine; preservatives (such as octadecyldimethylbenzyl ammonium chloride; hexamethonium chloride; benzalkonium chloride, benzethonium chloride; phenol, butyl or benzyl alcohol; alkyl parabens such as methyl or propyl paraben; catechol; resorcinol; cyclohexanol; 3-pentanol; or m-cresol); low molecular weight (less than about 10 residues) polypeptides; proteins, such as serum albumin, gelatin, or immunoglobulins; hydrophilic polymers such as polyvinylpyrrolidone; amino acids such as glycine, glutamine, asparagine, histidine, arginine, or lysine; monosaccharides, disaccharides, or other carbohydrates including glucose, mannose, or dextrins; chelating agents such as EDTA; sugars such as sucrose, mannitol, trehalose or sorbitol; salt-forming counter-ions such as sodium; metal complexes (e.g., Zn-protein complexes); and/or non-ionic surfactants such as TWEEN™, PLURONICS™ or polyethylene glycol (PEG).

[0601] A pharmaceutical composition may be formulated for any route of administration to a subject. Non-limiting embodiments include parenteral administration, such as intramuscular, intradermal, subcutaneous, transcutaneous, or mucosal.

[0602] In one embodiment, the pharmaceutical composition is formulated for administration by intramuscular, intradermal, or subcutaneous injection. In one embodiment, the pharmaceutical composition is formulated for administration by intramuscular injection. In one embodiment, the pharmaceutical composition is formulated for administration by intradermal injection. In one embodiment, the pharmaceutical composition is formulated for administration by subcutaneous injection. Injectables can be prepared in conventional forms, either as liquid solutions or suspensions. The injectables can contain one or more excipients. Exemplary excipients include, for example, water, saline, dextrose, glycerol or ethanol. In addition, if desired, the pharmaceutical compositions to be administered can also contain minor amounts of non-toxic auxiliary substances such as wetting or emulsifying agents, pH buffering agents, stabilizers, solubility enhancers, or other such agents, such as for example, sodium acetate, sorbitan monolaurate, triethanolamine oleate or cyclodextrins. In some embodiments, the pharmaceutical composition is formulated in a single dose. In some embodiments, the pharmaceutical compositions if formulated as a multi-dose.

[0603] Pharmaceutically acceptable excipients used in the parenteral preparations described herein include for example, aqueous vehicles, nonaqueous vehicles, antimicrobial agents, isotonic agents, buffers, antioxidants, local anesthetics, suspending and dispersing agents, emulsifying agents, sequestering or chelating agents or other pharmaceutically acceptable substances. Examples of aqueous vehicles, which can be incorporated in one or more of the formulations described herein, include sodium chloride injection, Ringer's injection, isotonic dextrose injection, sterile water injection, dextrose or lactated Ringer's injection. Nonaqueous parenteral vehicles, which can be incorporated in one or more of the formulations described herein, include fixed oils of vegetable origin, cottonseed oil, corn oil, sesame oil or peanut oil. Antimicrobial agents in bacteriostatic or fungistatic concentrations can be added to the parenteral preparations described herein and packaged in multiple-dose containers, which include phenols or cresols, mercurials, benzyl alcohol, chlorobutanol, methyl and propyl p-hydroxybenzoic acid esters, thimerosal, benzalkonium chloride or benzethonium chloride. Isotonic agents, which can be incorporated in one or more of the formulations described herein, include sodium chloride or dextrose. Buffers, which can be incorporated in one or more of the formulations described herein, include phosphate or citrate. Antioxidants, which can be incorporated in one or more of the formulations described herein, include sodium bisulfate. Local anesthetics, which can be incorporated in one or more of the formulations described herein, include procaine hydrochloride. Suspending and dispersing agents, which can be incorporated in one or more of the formulations described herein, include sodium carboxymethylcelluose, hydroxypropyl methylcellulose or polyvinylpyrrolidone. Emulsifying agents, which can be incorporated in one or more of the formulations described herein, include Polysorbate 80 (TWEEN® 80). A sequestering or chelating agent of metal ions, which can be incorporated in one or more of the formulations described herein, is EDTA. Pharmaceutical carriers, which can be incorporated in one or more of the formulations described herein, also include ethyl alcohol, polyethylene glycol or propylene glycol for water miscible vehicles; or sodium hydroxide, hydrochloric acid, citric acid or lactic acid for pH adjustment.

[0604] The precise dose to be employed in a pharmaceutical composition will also depend on the route of administration, and the seriousness of the condition caused by it, and should be decided according to the judgment of the practitioner and each subject's circumstances. For example, effective doses may also vary depending upon means of administration, target site, physiological state of the subject (including age, body weight, and health), other medications administered, or whether therapy is prophylactic or therapeutic. Therapeutic dosages are preferably titrated to optimize safety and efficacy.

### 4.13 Methods of Use

[0605] Provided herein are various methods of utilizing any one more agent described herein (e.g., an RNAi agent, a dsRNA agent, a sense strand, an antisense strand, an ASO, a ssRNA agent, etc.) (see, e.g., §§ 4.2, 4.3, 4.4); a vector described herein (see, e.g., § 4.9); a conjugate described herein (see, e.g., § 4.5); a carrier described herein (see, e.g., § 4.10); a host cell described herein (see, e.g., § 4.11); and/or a pharmaceutical composition described herein (see, e.g., § 4.12); or any combination thereof.

[0606] In some aspects, the methods described herein comprise administering one or more of the foregoing to a subject. Exemplary subjects include mammals, e.g., humans, non-human mammals, e.g., non-human primates. In some embodiments, the subject is a human.

[0607] The dosage of any of the foregoing, to be administered to a subject in accordance with any of the methods described herein can be determined in accordance with standard techniques known to those of ordinary skill in the art, including the route of administration, the age and weight of the subject.

### 4.13.1 Methods of Delivery

[0608] Provided herein are, inter alia, various methods of delivering any one more agent described herein (e.g., an RNAi agent, a dsRNA agent, a sense strand, an antisense strand, an ASO, a ssRNA agent, etc.); a vector described herein; a conjugate described herein; a carrier described herein; a host cell described herein; and/or a pharmaceutical composition described herein; or any combination thereof to e.g., a cell, subject, a cell within a subject.

[0609] In one aspect, provided herein are methods of delivering any one more agent described herein (e.g., an RNAi agent, a dsRNA agent, a sense strand, an antisense strand, an ASO, a ssRNA agent, etc.); a vector described herein; a conjugate described herein; a carrier described herein; a host cell described herein; and/or a pharmaceutical composition described herein; or any combination thereof to a cell, the method comprising introducing into a cell any one more agent described herein (e.g., an RNAi agent, a dsRNA agent, a sense strand, an antisense strand, an ASO, a ssRNA agent, etc.); a vector described herein; a conjugate described herein; a carrier described herein; a host cell described herein; and/or a pharmaceutical composition described herein into the cell, to thereby deliver the agent (e.g., RNAi agent, dsRNA agent, sense strand, antisense strand, ASO, ssRNA agent, etc.), conjugate, vector, carrier, or pharmaceutical composition into the cell. In some embodiments, the agent (e.g., RNAi agent, dsRNA agent, sense strand, antisense strand, ASO, ssRNA agent, etc.), conjugate, vector, carrier, or pharmaceutical composition is introduced in an amount and for a time sufficient to deliver the agent (e.g., RNAi agent, dsRNA agent, sense strand, antisense strand, ASO, ssRNA agent, etc.), conjugate, vector, carrier, or pharmaceutical composition into the cell. In some embodiments, the cell is in vitro, ex vivo, or in vivo. In some embodiments, the cell is in vitro or ex vivo. In some embodiments, the cell is in vitro. In some embodiments, the cell is ex vivo. In some embodiments, the cell is in vivo. In some embodiments, the cells is a hematopoietic cell. In some embodiments, the cells is an erythroid precursor cell.

[0610] In one aspect, provided herein are methods of delivering any one more agent described herein (e.g., an RNAi agent, a dsRNA agent, a sense strand, an antisense strand, an ASO, a ssRNA agent, etc.); a vector described herein; a conjugate described herein; a carrier described herein; a host cell described herein; and/or a pharmaceutical composition described herein; or any combination thereof to a subject, the method comprising administering to a subject any one more agent described herein (e.g., an RNAi agent, a dsRNA agent, a sense strand, an antisense strand, an ASO, a ssRNA agent, etc.); a vector described herein; a conjugate described herein; a carrier described herein; a host cell described herein; and/or a pharmaceutical composition described herein into the cell, to thereby deliver the agent (e.g., RNAi agent, dsRNA agent, sense strand, antisense strand, ASO, ssRNA agent, etc.), conjugate, vector, carrier, or pharmaceutical composition to the subject. In some embodiments, the agent (e.g., RNAi agent, dsRNA agent, sense strand, antisense strand, ASO, ssRNA agent, etc.), conjugate, vector, carrier, or pharmaceutical composition is administered in an amount and for a time sufficient to deliver the agent (e.g., RNAi agent, dsRNA agent, sense strand, antisense strand, ASO, ssRNA agent, etc.), conjugate, vector, carrier, or pharmaceutical composition to the subject. In some embodiments, the cells is a hematopoietic cell. In some embodiments, the cells is an erythroid precursor cell.

[0611] In one aspect, provided herein are methods of delivering any one more agent described herein (e.g., an RNAi agent, a dsRNA agent, a sense strand, an antisense strand, an ASO, a ssRNA agent, etc.); a vector described herein; a conjugate described herein; a carrier described herein; a host cell described herein; and/or a pharmaceutical composition described herein; or any combination thereof to a cell within a subject, the method comprising administering to a cell within a subject any one more agent described herein (e.g., an RNAi agent, a dsRNA agent, a sense strand, an antisense strand, an ASO, a ssRNA agent, etc.); a vector described herein; a conjugate described herein; a carrier described herein; a host cell described herein; and/or a pharmaceutical composition described herein into the cell, to thereby deliver the agent (e.g., RNAi agent, dsRNA agent, sense strand, antisense strand, ASO, ssRNA agent, etc.), conjugate, vector, carrier, or pharmaceutical composition to the cell within the subject. In some embodiments, the agent (e.g., RNAi agent, dsRNA agent, sense strand, antisense strand, ASO, ssRNA agent, etc.), conjugate, vector, carrier, or pharmaceutical composition is administered in an amount and for a time sufficient to deliver the agent (e.g., RNAi agent, dsRNA agent, sense strand, antisense strand, ASO, ssRNA agent, etc.), conjugate, vector, carrier, or pharmaceutical composition to the cell within the subject. In some embodiments, the cells is a hematopoietic cell. In some embodiments, the cells is an erythroid precursor cell.

### 4.13.2 Methods of Reducing or Inhibiting BCL11A Expression

[0612] In one aspect, provided herein are methods of reducing or inhibiting expression of BCL11A (e.g., hBCL11A) in a cell, the method comprising introducing into the cell any one more agent described herein (e.g., an RNAi agent, a dsRNA agent, a sense strand, an antisense strand, an ASO, a ssRNA agent, etc.); a vector described herein; a conjugate described herein; a carrier described herein; a host cell described herein; and/or a pharmaceutical composition described herein, to thereby reduce or inhibit expression of BCL11A (e.g., hBCL11A) in the cell. In some embodiments, the agent (e.g., RNAi agent, dsRNA agent, sense strand, antisense strand, ASO, ssRNA agent, etc.), conjugate, vector, carrier, or pharmaceutical composition is introduced in an amount and for a time sufficient to reduce or inhibit expression of BCL11A (e.g., hBCL11A) in the cell. In some embodiments, the cell is in vitro, ex vivo, or in vivo. In some embodiments, the cell is in vitro or ex vivo. In some embodiments, the cell is in vitro. In some embodiments, the cell is ex vivo. In some embodiments, the cell is in vivo. In some embodiments, the cells is a hematopoietic cell. In some embodiments, the cells is an erythroid precursor cell.

[0613] In some embodiments, the level of BCL11A (e.g., hBCL11A) expression in the cell is reduced by at least about 30%, 40%, 50%, 55%, 60%, 65%, 70%, 75%, 80%, 85%, 90%, 95%, 96%, 97%, 98%, 99%, or 100% (e.g., as compared to suitable control) (e.g., as measured by an assay known in the art or described herein, e.g., qPCR). In some embodiments, the level of BCL11A (e.g., hBCL11A) expression in the cell is reduced by at least about 50% (e.g., as compared to suitable control) (e.g., as measured by an assay known in the art or described herein, e.g., qPCR). In some embodiments, the level of BCL11A (e.g., hBCL11A) expression in the cell is reduced by at least about 75% (e.g., as compared to suitable control) (e.g., as measured by an assay known in the art or described herein, e.g., qPCR). In some embodiments, the level of BCL11A (e.g., hBCL11A) expression in the cell is reduced by at least about 80% (e.g., as compared to suitable control) (e.g., as measured by an assay known in the art or described herein, e.g., qPCR). In some embodiments, the level of BCL11A (e.g., hBCL11A) expression in the cell is reduced by at least about 90% (e.g., as compared to suitable control) (e.g., as measured by an assay known in the art or described herein, e.g., qPCR). In some embodiments, the level of BCL11A (e.g., hBCL11A) expression in the cell is reduced by at least about 95% (e.g., as compared to suitable control) (e.g., as measured by an assay known in the art or described herein, e.g., qPCR).

[0614] In one aspect, provided herein are methods of reducing or inhibiting expression of BCL11A (e.g., hBCL11A) in a cell in a subject, the method comprising administering to a subject any one more agent described herein (e.g., an RNAi agent, a dsRNA agent, a sense strand, an antisense strand, an ASO, a ssRNA agent, etc.); a vector described herein; a conjugate described herein; a carrier described herein; a host cell described herein; and/or a pharmaceutical composition described herein, to thereby reduce or inhibit expression of BCL11A (e.g., hBCL11A) in the cell in the subject. In some embodiments, the agent (e.g., RNAi agent, dsRNA agent, sense strand, antisense strand, ASO, ssRNA agent, etc.), conjugate, vector, carrier, or pharmaceutical composition is administered to the subject in an amount and for a time sufficient to reduce or inhibit expression of BCL11A (e.g., hBCL11A) in the cell in the subject. In some embodiments, the level of BCL11A (e.g., hBCL11A) expression in the cell is reduced by at least about 30%, 40%, 50%, 55%, 60%, 65%, 70%, 75%, 80%, 85%, 90%, 95%, 96%, 97%, 98%, 99%, or 100% (e.g., as compared to suitable control) (e.g., as measured by an assay known in the art or described herein, e.g., qPCR). In some embodiments, the cells is a hematopoietic cell. In some embodiments, the cells is an erythroid precursor cell.

[0615] In one aspect, provided herein are dsRNA agents, conjugates, vectors, carriers, and pharmaceutical compositions for use in a method of reducing or inhibiting expression of BCL11A (e.g., hBCL11A) in a cell in a subject, the method comprising administering to the subject a dsRNA agent described herein, a conjugate described herein, a vector described herein, a carrier described herein, or a pharmaceutical composition described herein, to thereby reduce or inhibit expression of BCL11A (e.g., hBCL11A) in the cell in the subject. In some embodiments, the agent (e.g., RNAi agent, dsRNA agent, sense strand, antisense strand, ASO, ssRNA agent, etc.), conjugate, vector, carrier, or pharmaceutical composition is administered to the subject in an amount and for a time sufficient to reduce or inhibit expression of BCL11A (e.g., hBCL11A) in the cell in the subject. In some embodiments, the level of BCL11A (e.g., hBCL11A) expression in the cell is reduced by at least about 30%, 40%, 50%, 55%, 60%, 65%, 70%, 75%, 80%, 85%, 90%, 95%, 96%, 97%, 98%, 99%, or 100% (e.g., as compared to suitable control) (e.g., as measured by an assay known in the art or described herein, e.g., qPCR). In some embodiments, the cells is a hematopoietic cell. In some embodiments, the cells is an erythroid precursor cell.

[0616] In one aspect, provided herein are uses of dsRNA agents, conjugates, vectors, carriers, and pharmaceutical compositions in the manufacture of a medicament for the reduction or inhibition of BCL11A (e.g., hBCL11A) expression in a cell in a subject. In some embodiments, the agent (e.g., RNAi agent, dsRNA agent, sense strand, antisense strand, ASO, ssRNA agent, etc.), conjugate, vector, carrier, or pharmaceutical composition is administered to the subject in an amount and for a time sufficient to reduce or inhibit expression of BCL11A (e.g., hBCL11A) in the cell in the subject. In some embodiments, the level of BCL11A (e.g., hBCL11A) expression in the cell is reduced by at least about 30%, 40%, 50%, 55%, 60%, 65%, 70%, 75%, 80%, 85%, 90%, 95%, 96%, 97%, 98%, 99%, or 100% (e.g., as compared to suitable control) (e.g., as measured by an assay known in the art or described herein, e.g., qPCR). In some embodiments, the cells is a hematopoietic cell. In some embodiments, the cells is an erythroid precursor cell.

[0617] In one aspect, provided herein are uses of dsRNA agents, conjugates, vectors, carriers, and pharmaceutical compositions in the manufacture of a medicament for use in a method of reducing or inhibiting expression of BCL11A (e.g., hBCL11A) in a cell in a subject, the method comprising administering to the subject a dsRNA agent described herein, a conjugate described herein, a vector described herein, a carrier described herein, or a pharmaceutical composition described herein, to thereby reduce or inhibit expression of BCL11A (e.g., hBCL11A) in the cell in the subject. In some embodiments, the agent (e.g., RNAi agent, dsRNA agent, sense strand, antisense strand, ASO, ssRNA agent, etc.), conjugate, vector, carrier, or pharmaceutical composition is administered to the subject in an amount and for a time sufficient to reduce or inhibit expression of BCL11A (e.g., hBCL11A) in the cell in the subject. In some embodiments, the level of BCL11A (e.g., hBCL11A) expression in the cell is reduced by at least about 30%, 40%, 50%, 55%, 60%, 65%, 70%, 75%, 80%, 85%, 90%, 95%, 96%, 97%, 98%, 99%, or 100% (e.g., as compared to suitable control) (e.g., as measured by an assay known in the art or described herein, e.g., qPCR). In some embodiments, the cells is a hematopoietic cell. In some embodiments, the cells is an erythroid precursor cell.

### 4.13.3 Methods of Inducing Expression of Fetal Hemoglobin

[0618] In one aspect, provided herein are methods of inducing expression of increasing the level of fetal hemoglobin in a subject, the method comprising administering to the subject any one more agent described herein (e.g., an RNAi agent, a dsRNA agent, a sense strand, an antisense strand, an ASO, a ssRNA agent, etc.); a vector described herein; a conjugate described herein; a carrier described herein; a host cell described herein; and/or a pharmaceutical composition described herein, to thereby increase the level of fetal hemoglobin the subject. In some embodiments, the agent (e.g., RNAi agent, dsRNA agent, sense strand, antisense strand, ASO, ssRNA agent, etc.), conjugate, vector, carrier, or pharmaceutical composition is administered to the subject in an amount and for a time sufficient to increase the level of fetal hemoglobin the subject.

[0619] In one aspect, provided herein are methods of inducing expression of fetal hemoglobin in a subject, the method comprising administering to the subject any one more agent described herein (e.g., an RNAi agent, a dsRNA agent, a sense strand, an antisense strand, an ASO, a ssRNA agent, etc.); a vector described herein; a conjugate described herein; a carrier described herein; a host cell described herein; and/or a pharmaceutical composition described herein, to thereby induce expression of fetal hemoglobin the subject. In some embodiments, the agent (e.g., RNAi agent, dsRNA agent, sense strand, antisense strand, ASO, ssRNA agent, etc.), conjugate, vector, carrier, or pharmaceutical composition is administered to the subject in an amount and for a time sufficient to induce expression of fetal hemoglobin the subject.

[0620] In one aspect, provided herein are methods of increasing the ratio of fetal hemoglobin to adult hemoglobin in a subject, the method comprising administering to the subject any one more agent described herein (e.g., an RNAi agent, a dsRNA agent, a sense strand, an antisense strand, an ASO, a ssRNA agent, etc.); a vector described herein; a conjugate described herein; a carrier described herein; a host cell described herein; and/or a pharmaceutical composition described herein, to thereby increase the ratio of fetal hemoglobin to adult hemoglobin in the subject. In some embodiments, the agent (e.g., RNAi agent, dsRNA agent, sense strand, antisense strand, ASO, ssRNA agent, etc.), conjugate, vector, carrier, or pharmaceutical composition is administered to the subject in an amount and for a time sufficient to increase the ratio of fetal hemoglobin to adult hemoglobin in the subject.

[0621] Standard assays to measure the level of fetal hemoglobin are known in the art. For example, immunoassays such as a western blot and an enzyme-linked immunosorbent assay (ELISA) can be utilized to evaluate protein levels. mRNA levels can be measured by, e.g., a northern blot or by RT-qPCR, a nuclease protection assay, or in situ hybridization. Fetal hemoglobin can be measured in, e.g., sample from a subject (e.g., a blood or tissue sample).

### 4.13.4 Methods of Treating, Ameliorating, or Preventing a BCL11A Associated Disease

[0622] In one aspect, provided herein are methods of treating, ameliorating, or preventing a disease in a subject, the method comprising administering to the subject any one more agent described herein (e.g., an RNAi agent, a dsRNA agent, a sense strand, an antisense strand, an ASO, a ssRNA agent, etc.); a vector described herein; a conjugate described herein; a carrier described herein; a host cell described herein; and/or a pharmaceutical composition described herein, to thereby treat, ameliorate, or prevent a disease in the subject. In some embodiments, the agent (e.g., RNAi agent, dsRNA agent, sense strand, antisense strand, ASO, ssRNA agent, etc.), conjugate, vector, carrier, or pharmaceutical composition is administered to the subject in an amount and for a time sufficient to treat, ameliorate, or prevent the disease in the subject.

[0623] In one aspect, provided herein are methods of treating, ameliorating, or preventing a BCL11A (e.g., hBCL11A) associated disease in a subject, the method comprising administering to the subject any one more agent described herein (e.g., an RNAi agent, a dsRNA agent, a sense strand, an antisense strand, an ASO, a ssRNA agent, etc.); a vector described herein; a conjugate described herein; a carrier described herein; a host cell described herein; and/or a pharmaceutical composition described herein, to thereby treat, ameliorate, or prevent the BCL11A (e.g., hBCL11A) associated disease in the subject. In some embodiments, the agent (e.g., RNAi agent, dsRNA agent, sense strand, antisense strand, ASO, ssRNA agent, etc.), conjugate, vector, carrier, or pharmaceutical composition is administered to the subject in an amount and for a time sufficient to treat, ameliorate, or prevent the BCL11A (e.g., hBCL11A) associated disease in the subject.

[0624] In some embodiments, the BCL11A associated disease is an inherited blood disorder. In some embodiments, the inherited blood disorder is a hemoglobinopathy (e.g., a hemoglobinopathy described herein). In some embodiments, the hemoglobinopathy is sickle cell disease, sickle cell trait, hemoglobin C disease, hemoglobin C trait, hemoglobin S/C disease, hemoglobin D disease, hemoglobin E disease, a thalassemia (e.g., α-thalassemia, β-thalassemia, δ-thalassemia, or γ-thalassemia), a condition associated with hemoglobin with increased oxygen affinity, a condition associated with hemoglobin with decreased oxygen affinity, unstable hemoglobin disease, or methemoglobinemia.

[0625] In some embodiments, the inherited blood disorder is an inherited bone marrow failure syndrome (e.g., an inherited bone marrow failure syndrome described herein). In some embodiments, inherited bone marrow failure syndrome is amegakaryocytic thrombocytopenia (Amega), diamond blackfan anemia (DBA), dyskeratosis congenita (DC), Fanconi anemia (FA), Pearson syndrome, severe congenital neutropenia (SCN), Schwachman diamond syndrome (SDS), GATA2 deficiency, cyclic neutropenia, Dubowitz syndrome, Kostmann syndrome, refractory cytopenia, thrombocytopenia absent radii (TAR), a SAMD9/SAMD9L disorder, or a MECOM-associated syndrome.

[0626] In one aspect, provided herein are dsRNA agents, conjugates, vectors, carriers, and pharmaceutical compositions for use in a method of treating, ameliorating, or preventing a BCL11A (e.g., hBCL11A) associated disease in a subject, the method comprising administering to the subject a dsRNA agent described herein, a conjugate described herein, a vector described herein, a carrier described herein, or a pharmaceutical composition described herein, to thereby treat, ameliorate, or prevent the BCL11A (e.g., hBCL11A) associated disease in the subject.

[0627] In some embodiments, the agent (e.g., RNAi agent, dsRNA agent, sense strand, antisense strand, ASO, ssRNA agent, etc.), conjugate, vector, carrier, or pharmaceutical composition is administered to the subject in an amount and for a time sufficient to treat, ameliorate, or prevent the BCL11A (e.g., hBCL11A) associated disease in the subject.

[0628] In some embodiments, the BCL11A associated disease is an inherited blood disorder. In some embodiments, the inherited blood disorder is a hemoglobinopathy (e.g., a hemoglobinopathy described herein). In some embodiments, the hemoglobinopathy is sickle cell disease, sickle cell trait, hemoglobin C disease, hemoglobin C trait, hemoglobin S/C disease, hemoglobin D disease, hemoglobin E disease, a thalassemia (e.g., α-thalassemia, β-thalassemia, δ-thalassemia, or γ-thalassemia), a condition associated with hemoglobin with increased oxygen affinity, a condition associated with hemoglobin with decreased oxygen affinity, unstable hemoglobin disease, or methemoglobinemia.

[0629] In some embodiments, the BCL11A associated disease is an inherited bone marrow failure syndrome. In some embodiments, the inherited bone marrow failure syndrome is amegakaryocytic thrombocytopenia (Amega), diamond blackfan anemia (DBA), dyskeratosis congenita (DC), Fanconi anemia (FA), Pearson syndrome, severe congenital neutropenia (SCN), Schwachman diamond syndrome (SDS), GATA2 deficiency, cyclic neutropenia, Dubowitz syndrome, Kostmann syndrome, refractory cytopenia, thrombocytopenia absent radii (TAR), a SAMD9/SAMD9L disorder, or a MECOM-associated syndrome.

[0630] In one aspect, provided herein are uses of dsRNA agents, conjugates, vectors, carriers, and pharmaceutical compositions in the manufacture of a medicament for the treatment, amelioration, or prevention of a BCL11A (e.g., hBCL11A) associated disease in a subject.

[0631] In some embodiments, the agent (e.g., RNAi agent, dsRNA agent, sense strand, antisense strand, ASO, ssRNA agent, etc.), conjugate, vector, carrier, or pharmaceutical composition is administered to the sub eject in an amount and for a time sufficient to treat, ameliorate, or prevent the BCL11A (e.g., hBCL11A) associated disease in the subject.

[0632] In some embodiments, the BCL11A associated disease is an inherited blood disorder. In some embodiments, the inherited blood disorder is a hemoglobinopathy (e.g., a hemoglobinopathy described herein). In some embodiments, the hemoglobinopathy is sickle cell disease, sickle cell trait, hemoglobin C disease, hemoglobin C trait, hemoglobin S/C disease, hemoglobin D disease, hemoglobin E disease, a thalassemia (e.g., α-thalassemia, β-thalassemia, δ-thalassemia, or γ-thalassemia), a condition associated with hemoglobin with increased oxygen affinity, a condition associated with hemoglobin with decreased oxygen affinity, unstable hemoglobin disease, or methemoglobinemia.

[0633] In some embodiments, the inherited blood disorder is an inherited bone marrow failure syndrome (e.g., an inherited bone marrow failure syndrome described herein). In some embodiments, inherited bone marrow failure syndrome is amegakaryocytic thrombocytopenia (Amega), diamond blackfan anemia (DBA), dyskeratosis congenita (DC), Fanconi anemia (FA), Pearson syndrome, severe congenital neutropenia (SCN), Schwachman diamond syndrome (SDS), GATA2 deficiency, cyclic neutropenia, Dubowitz syndrome, Kostmann syndrome, refractory cytopenia, thrombocytopenia absent radii (TAR), a SAMD9/SAMD9L disorder, or a MECOM-associated syndrome.

[0634] In one aspect, provided herein are uses of dsRNA agents, conjugates, vectors, carriers, and pharmaceutical compositions in the manufacture of a medicament for use in a method of treating, ameliorating, or preventing a BCL11A (e.g., hBCL11A) associated disease in a subject, the method comprising administering to the subject a dsRNA agent described herein, a conjugate described herein, a vector described herein, a carrier described herein, or a pharmaceutical composition described herein, to thereby treat, ameliorate, or prevent the BCL11A (e.g., hBCL11A) associated disease in the subject.

[0635] In some embodiments, the agent (e.g., RNAi agent, dsRNA agent, sense strand, antisense strand, ASO, ssRNA agent, etc.), conjugate, vector, carrier, or pharmaceutical composition is administered to the subject in an amount and for a time sufficient to treat, ameliorate, or prevent the BCL11A (e.g., hBCL11A) associated disease in the subject.

[0636] In some embodiments, the BCL11A associated disease is an inherited blood disorder. In some embodiments, the inherited blood disorder is a hemoglobinopathy (e.g., a hemoglobinopathy described herein. In some embodiments, the hemoglobinopathy is sickle cell disease, sickle cell trait, hemoglobin C disease, hemoglobin C trait, hemoglobin S/C disease, hemoglobin D disease, hemoglobin E disease, a thalassemia (e.g., α-thalassemia, β-thalassemia, δ-thalassemia, or γ-thalassemia), a condition associated with hemoglobin with increased oxygen affinity, a condition associated with hemoglobin with decreased oxygen affinity, unstable hemoglobin disease, or methemoglobinemia.

[0637] In some embodiments, the inherited blood disorder is an inherited bone marrow failure syndrome (e.g., an inherited bone marrow failure syndrome described herein. In some embodiments, inherited bone marrow failure syndrome is amegakaryocytic thrombocytopenia (Amega), diamond blackfan anemia (DBA), dyskeratosis congenita (DC), Fanconi anemia (FA), Pearson syndrome, severe congenital neutropenia (SCN), Schwachman diamond syndrome (SDS), GATA2 deficiency, cyclic neutropenia, Dubowitz syndrome, Kostmann syndrome, refractory cytopenia, thrombocytopenia absent radii (TAR), a SAMD9/SAMD9L disorder, or a MECOM-associated syndrome.

[0638] In one aspect, provided herein are dsRNA agents, conjugates, vectors, carriers, and pharmaceutical compositions for use in treating a disease in a subject, preferably a BCL11A (e.g., hBCL11A) associated disease, more preferably a liver disease.

[0639] In one aspect, provided herein are dsRNA agents, conjugates, vectors, carriers, and pharmaceutical compositions for use for use in treating a disease in a subject by reducing or inhibiting expression of BCL11A (e.g., hBCL11A) in a cell.

### 4.13.5 Methods of Treating, Ameliorating, or Preventing an Inherited Blood Disorder

[0640] In one aspect, provided herein are methods of treating, ameliorate, or preventing an inherited blood disorder in a subject, the method comprising administering to the subject any one more agent described herein (e.g., an RNAi agent, a dsRNA agent, a sense strand, an antisense strand, an ASO, a ssRNA agent, etc.); a vector described herein; a conjugate described herein; a carrier described herein; a host cell described herein; and/or a pharmaceutical composition described herein, to thereby treat, ameliorate, or prevent the inherited blood disorder in the subject. In some embodiments, the agent (e.g., RNAi agent, dsRNA agent, sense strand, antisense strand, ASO, ssRNA agent, etc.), conjugate, vector, carrier, or pharmaceutical composition is administered to the subject in an amount and for a time sufficient to treat, ameliorate, or prevent the inherited blood disorder in the subject.

[0641] In some embodiments, the inherited blood disorder is a hemoglobinopathy (e.g., a hemoglobinopathy described herein). In some embodiments, the hemoglobinopathy is sickle cell disease, sickle cell trait, hemoglobin C disease, hemoglobin C trait, hemoglobin S/C disease, hemoglobin D disease, hemoglobin E disease, a thalassemia (e.g., α-thalassemia, β-thalassemia, δ-thalassemia, or γ-thalassemia), a condition associated with hemoglobin with increased oxygen affinity, a condition associated with hemoglobin with decreased oxygen affinity, unstable hemoglobin disease, or methemoglobinemia.

[0642] In some embodiments, the inherited blood disorder is an inherited bone marrow failure syndrome (e.g., an inherited bone marrow failure syndrome described herein). In some embodiments, inherited bone marrow failure syndrome is amegakaryocytic thrombocytopenia (Amega), diamond blackfan anemia (DBA), dyskeratosis congenita (DC), Fanconi anemia (FA), Pearson syndrome, severe congenital neutropenia (SCN), Schwachman diamond syndrome (SDS), GATA2 deficiency, cyclic neutropenia, Dubowitz syndrome, Kostmann syndrome, refractory cytopenia, thrombocytopenia absent radii (TAR), a SAMD9/SAMD9L disorder, or a MECOM-associated syndrome.

[0643] In one aspect, provided herein are dsRNA agents, conjugates, vectors, carriers, and pharmaceutical compositions for use in a method of treating, ameliorating, or preventing an inherited blood disorder in a subject, the method comprising administering to the subject a dsRNA agent described herein, a conjugate described herein, a vector described herein, a carrier described herein, or a pharmaceutical composition described herein, to thereby treat, ameliorate, or prevent the inherited blood disorder in the subject.

[0644] In some embodiments, the agent (e.g., RNAi agent, dsRNA agent, sense strand, antisense strand, ASO, ssRNA agent, etc.), conjugate, vector, carrier, or pharmaceutical composition is administered to the subject in an amount and for a time sufficient to treat, ameliorate, or prevent the inherited blood disorder in the subject.

[0645] In some embodiments, the inherited blood disorder is a hemoglobinopathy (e.g., a hemoglobinopathy described herein). In some embodiments, the hemoglobinopathy is sickle cell disease, sickle cell trait, hemoglobin C disease, hemoglobin C trait, hemoglobin S/C disease, hemoglobin D disease, hemoglobin E disease, a thalassemia (e.g., α-thalassemia, β-thalassemia, δ-thalassemia, or γ-thalassemia), a condition associated with hemoglobin with increased oxygen affinity, a condition associated with hemoglobin with decreased oxygen affinity, unstable hemoglobin disease, or methemoglobinemia.

[0646] In some embodiments, the inherited blood disorder is an inherited bone marrow failure syndrome (e.g., an inherited bone marrow failure syndrome described herein). In some embodiments, inherited bone marrow failure syndrome is amegakaryocytic thrombocytopenia (Amega), diamond blackfan anemia (DBA), dyskeratosis congenita (DC), Fanconi anemia (FA), Pearson syndrome, severe congenital neutropenia (SCN), Schwachman diamond syndrome (SDS), GATA2 deficiency, cyclic neutropenia, Dubowitz syndrome, Kostmann syndrome, refractory cytopenia, thrombocytopenia absent radii (TAR), a SAMD9/SAMD9L disorder, or a MECOM-associated syndrome.

[0647] In one aspect, provided herein are uses of dsRNA agents, conjugates, vectors, carriers, and pharmaceutical compositions in the manufacture of a medicament for the treatment, amelioration, or prevention of an inherited blood disorder in a subject.

[0648] In some embodiments, the agent (e.g., RNAi agent, dsRNA agent, sense strand, antisense strand, ASO, ssRNA agent, etc.), conjugate, vector, carrier, or pharmaceutical composition is administered to the subject in an amount and for a time sufficient to treat, ameliorate, or prevent the inherited blood disorder in the subject.

[0649] In some embodiments, the inherited blood disorder is a hemoglobinopathy (e.g., a hemoglobinopathy described herein). In some embodiments, the hemoglobinopathy is sickle cell disease, sickle cell trait, hemoglobin C disease, hemoglobin C trait, hemoglobin S/C disease, hemoglobin D disease, hemoglobin E disease, a thalassemia (e.g., α-thalassemia, β-thalassemia, δ-thalassemia, or γ-thalassemia), a condition associated with hemoglobin with increased oxygen affinity, a condition associated with hemoglobin with decreased oxygen affinity, unstable hemoglobin disease, or methemoglobinemia.

[0650] In some embodiments, the inherited blood disorder is an inherited bone marrow failure syndrome (e.g., an inherited bone marrow failure syndrome described herein). In some embodiments, inherited bone marrow failure syndrome is amegakaryocytic thrombocytopenia (Amega), diamond blackfan anemia (DBA), dyskeratosis congenita (DC), Fanconi anemia (FA), Pearson syndrome, severe congenital neutropenia (SCN), Schwachman diamond syndrome (SDS), GATA2 deficiency, cyclic neutropenia, Dubowitz syndrome, Kostmann syndrome, refractory cytopenia, thrombocytopenia absent radii (TAR), a SAMD9/SAMD9L disorder, or a MECOM-associated syndrome.

[0651] In one aspect, provided herein are uses of dsRNA agents, conjugates, vectors, carriers, and pharmaceutical compositions in the manufacture of a medicament for use in a method of treating, ameliorating, or preventing an inherited blood disorder in a subject, the method comprising administering to the subject a dsRNA agent described herein, a conjugate described herein, a vector described herein, a carrier described herein, or a pharmaceutical composition described herein, to thereby treat, ameliorate, or prevent the inherited blood disorder in the subject.

[0652] In some embodiments, the agent (e.g., RNAi agent, dsRNA agent, sense strand, antisense strand, ASO, ssRNA agent, etc.), conjugate, vector, carrier, or pharmaceutical composition is administered to the subject in an amount and for a time sufficient to treat, ameliorate, or prevent the inherited blood disorder in the subject.

[0653] In some embodiments, the inherited blood disorder is a hemoglobinopathy (e.g., a hemoglobinopathy described herein). In some embodiments, the hemoglobinopathy is sickle cell disease, sickle cell trait, hemoglobin C disease, hemoglobin C trait, hemoglobin S/C disease, hemoglobin D disease, hemoglobin E disease, a thalassemia (e.g., α-thalassemia, β-thalassemia, δ-thalassemia, or γ-thalassemia), a condition associated with hemoglobin with increased oxygen affinity, a condition associated with hemoglobin with decreased oxygen affinity, unstable hemoglobin disease, or methemoglobinemia.

[0654] In some embodiments, the inherited blood disorder is an inherited bone marrow failure syndrome (e.g., an inherited bone marrow failure syndrome described herein). In some embodiments, inherited bone marrow failure syndrome is amegakaryocytic thrombocytopenia (Amega), diamond blackfan anemia (DBA), dyskeratosis congenita (DC), Fanconi anemia (FA), Pearson syndrome, severe congenital neutropenia (SCN), Schwachman diamond syndrome (SDS), GATA2 deficiency, cyclic neutropenia, Dubowitz syndrome, Kostmann syndrome, refractory cytopenia, thrombocytopenia absent radii (TAR), a SAMD9/SAMD9L disorder, or a MECOM-associated syndrome.

### 4.13.6 Methods of Treating, Ameliorating, or Preventing a Hemoglobinopathy

[0655] In one aspect, provided herein are methods of treating, ameliorate, or preventing an hemoglobinopathy in a subject, the method comprising administering to the subject any one more agent described herein (e.g., an RNAi agent, a dsRNA agent, a sense strand, an antisense strand, an ASO, a ssRNA agent, etc.); a vector described herein; a conjugate described herein; a carrier described herein; a host cell described herein; and/or a pharmaceutical composition described herein, to thereby treat, ameliorate, or prevent the hemoglobinopathy in the subject. In some embodiments, the agent (e.g., RNAi agent, dsRNA agent, sense strand, antisense strand, ASO, ssRNA agent, etc.), conjugate, vector, carrier, or pharmaceutical composition is administered to the subject in an amount and for a time sufficient to treat, ameliorate, or prevent the hemoglobinopathy in the subject.

[0656] In some embodiments, the hemoglobinopathy is sickle cell disease, sickle cell trait, hemoglobin C disease, hemoglobin C trait, hemoglobin S/C disease, hemoglobin D disease, hemoglobin E disease, a thalassemia (e.g., α-thalassemia, β-thalassemia, δ-thalassemia, or γ-thalassemia), a condition associated with hemoglobin with increased oxygen affinity, a condition associated with hemoglobin with decreased oxygen affinity, unstable hemoglobin disease, methemoglobinemia, or any combination thereof. In some embodiments, the hemoglobinopathy is sickle cell disease or a thalassemia (e.g., α-thalassemia, β-thalassemia, δ-thalassemia, or γ-thalassemia). In some embodiments, the hemoglobinopathy is sickle cell disease. In some embodiments, the hemoglobinopathy is β-thalassemia.

[0657] In some embodiments, the subject is suspected of having or has been diagnosed with sickle cell disease, sickle cell trait, hemoglobin C disease, hemoglobin C trait, hemoglobin S/C disease, hemoglobin D disease, hemoglobin E disease, a thalassemia (e.g., α-thalassemia, β-thalassemia, δ-thalassemia, or γ-thalassemia), a condition associated with hemoglobin with increased oxygen affinity, a condition associated with hemoglobin with decreased oxygen affinity, unstable hemoglobin disease, methemoglobinemia, or any combination thereof. In some embodiments, the subject is suspected of having or has been diagnosed with sickle cell disease or a thalassemia (e.g., α-thalassemia, β-thalassemia, δ-thalassemia, or γ-thalassemia).

[0658] In one aspect, provided herein are dsRNA agents, conjugates, vectors, carriers, and pharmaceutical compositions for use in a method of treating, ameliorating, or preventing an hemoglobinopathy in a subject, the method comprising administering to the subject a dsRNA agent described herein, a conjugate described herein, a vector described herein, a carrier described herein, or a pharmaceutical composition described herein, to thereby treat, ameliorate, or prevent the hemoglobinopathy in the subject.

[0659] In some embodiments, the agent (e.g., RNAi agent, dsRNA agent, sense strand, antisense strand, ASO, ssRNA agent, etc.), conjugate, vector, carrier, or pharmaceutical composition is administered to the subject in an amount and for a time sufficient to treat, ameliorate, or prevent the hemoglobinopathy in the subject.

[0660] In some embodiments, the hemoglobinopathy is sickle cell disease, sickle cell trait, hemoglobin C disease, hemoglobin C trait, hemoglobin S/C disease, hemoglobin D disease, hemoglobin E disease, a thalassemia (e.g., α-thalassemia, β-thalassemia, δ-thalassemia, or γ-thalassemia), a condition associated with hemoglobin with increased oxygen affinity, a condition associated with hemoglobin with decreased oxygen affinity, unstable hemoglobin disease, methemoglobinemia, or any combination thereof. In some embodiments, the hemoglobinopathy is sickle cell disease or a thalassemia (e.g., α-thalassemia, β-thalassemia, δ-thalassemia, or γ-thalassemia). In some embodiments, the hemoglobinopathy is sickle cell disease. In some embodiments, the hemoglobinopathy is β-thalassemia.

[0661] In some embodiments, the subject is suspected of having or has been diagnosed with sickle cell disease, sickle cell trait, hemoglobin C disease, hemoglobin C trait, hemoglobin S/C disease, hemoglobin D disease, hemoglobin E disease, a thalassemia (e.g., α-thalassemia, β-thalassemia, δ-thalassemia, or γ-thalassemia), a condition associated with hemoglobin with increased oxygen affinity, a condition associated with hemoglobin with decreased oxygen affinity, unstable hemoglobin disease, methemoglobinemia, or any combination thereof. In some embodiments, the subject is suspected of having or has been diagnosed with sickle cell disease or a thalassemia (e.g., α-thalassemia, β-thalassemia, δ-thalassemia, or γ-thalassemia).

[0662] In one aspect, provided herein are uses of dsRNA agents, conjugates, vectors, carriers, and pharmaceutical compositions in the manufacture of a medicament for the treatment, amelioration, or prevention of an hemoglobinopathy in a subject.

[0663] In some embodiments, the agent (e.g., RNAi agent, dsRNA agent, sense strand, antisense strand, ASO, ssRNA agent, etc.), conjugate, vector, carrier, or pharmaceutical composition is administered to the subject in an amount and for a time sufficient to treat, ameliorate, or prevent the hemoglobinopathy in the subject.

[0664] In some embodiments, the hemoglobinopathy is sickle cell disease, sickle cell trait, hemoglobin C disease, hemoglobin C trait, hemoglobin S/C disease, hemoglobin D disease, hemoglobin E disease, a thalassemia (e.g., α-thalassemia, β-thalassemia, δ-thalassemia, or γ-thalassemia), a condition associated with hemoglobin with increased oxygen affinity, a condition associated with hemoglobin with decreased oxygen affinity, unstable hemoglobin disease, methemoglobinemia, or any combination thereof. In some embodiments, the hemoglobinopathy is sickle cell disease or a thalassemia (e.g., α-thalassemia, β-thalassemia, δ-thalassemia, or γ-thalassemia). In some embodiments, the hemoglobinopathy is sickle cell disease. In some embodiments, the hemoglobinopathy is β-thalassemia.

[0665] In some embodiments, the subject is suspected of having or has been diagnosed with sickle cell disease, sickle cell trait, hemoglobin C disease, hemoglobin C trait, hemoglobin S/C disease, hemoglobin D disease, hemoglobin E disease, a thalassemia (e.g., α-thalassemia, β-thalassemia, δ-thalassemia, or γ-thalassemia), a condition associated with hemoglobin with increased oxygen affinity, a condition associated with hemoglobin with decreased oxygen affinity, unstable hemoglobin disease, methemoglobinemia, or any combination thereof. In some embodiments, the subject is suspected of having or has been diagnosed with sickle cell disease or a thalassemia (e.g., α-thalassemia, β-thalassemia, δ-thalassemia, or γ-thalassemia).

[0666] In one aspect, provided herein are uses of dsRNA agents, conjugates, vectors, carriers, and pharmaceutical compositions in the manufacture of a medicament for use in a method of treating, ameliorating, or preventing an hemoglobinopathy in a subject, the method comprising administering to the subject a dsRNA agent described herein, a conjugate described herein, a vector described herein, a carrier described herein, or a pharmaceutical composition described herein, to thereby treat, ameliorate, or prevent the hemoglobinopathy in the subject.

[0667] In some embodiments, the agent (e.g., RNAi agent, dsRNA agent, sense strand, antisense strand, ASO, ssRNA agent, etc.), conjugate, vector, carrier, or pharmaceutical composition is administered to the subject in an amount and for a time sufficient to treat, ameliorate, or prevent the hemoglobinopathy in the subject.

[0668] In some embodiments, the hemoglobinopathy is sickle cell disease, sickle cell trait, hemoglobin C disease, hemoglobin C trait, hemoglobin S/C disease, hemoglobin D disease, hemoglobin E disease, a thalassemia (e.g., α-thalassemia, β-thalassemia, δ-thalassemia, or γ-thalassemia), a condition associated with hemoglobin with increased oxygen affinity, a condition associated with hemoglobin with decreased oxygen affinity, unstable hemoglobin disease, methemoglobinemia, or any combination thereof. In some embodiments, the hemoglobinopathy is sickle cell disease or a thalassemia (e.g., α-thalassemia, β-thalassemia, δ-thalassemia, or γ-thalassemia). In some embodiments, the hemoglobinopathy is sickle cell disease. In some embodiments, the hemoglobinopathy is β-thalassemia.

[0669] In some embodiments, the subject is suspected of having or has been diagnosed with sickle cell disease, sickle cell trait, hemoglobin C disease, hemoglobin C trait, hemoglobin S/C disease, hemoglobin D disease, hemoglobin E disease, a thalassemia (e.g., α-thalassemia, β-thalassemia, δ-thalassemia, or γ-thalassemia), a condition associated with hemoglobin with increased oxygen affinity, a condition associated with hemoglobin with decreased oxygen affinity, unstable hemoglobin disease, methemoglobinemia, or any combination thereof. In some embodiments, the subject is suspected of having or has been diagnosed with sickle cell disease or a thalassemia (e.g., α-thalassemia, β-thalassemia, δ-thalassemia, or γ-thalassemia).

### 4.13.7 Methods of Treating, Ameliorating, or Preventing an Inherited Bone Marrow Failure Syndrome

[0670] In one aspect, provided herein are methods of treating, ameliorate, or preventing an inherited bone marrow failure syndrome in a subject, the method comprising administering to the subject any one more agent described herein (e.g., an RNAi agent, a dsRNA agent, a sense strand, an antisense strand, an ASO, a ssRNA agent, etc.); a vector described herein; a conjugate described herein; a carrier described herein; a host cell described herein; and/or a pharmaceutical composition described herein, to thereby treat, ameliorate, or prevent the inherited bone marrow failure syndrome in the subject. In some embodiments, the agent (e.g., RNAi agent, dsRNA agent, sense strand, antisense strand, ASO, ssRNA agent, etc.), conjugate, vector, carrier, or pharmaceutical composition is administered to the subject in an amount and for a time sufficient to treat, ameliorate, or prevent the inherited bone marrow failure syndrome in the subject.

[0671] In some embodiments, the inherited bone marrow failure syndrome is amegakaryocytic thrombocytopenia (Amega), diamond blackfan anemia (DBA), dyskeratosis congenita (DC), Fanconi anemia (FA), Pearson syndrome, severe congenital neutropenia (SCN), Schwachman diamond syndrome (SDS), GATA2 deficiency, cyclic neutropenia, Dubowitz syndrome, Kostmann syndrome, refractory cytopenia, thrombocytopenia absent radii (TAR), a SAMD9/SAMD9L disorder, or a MECOM-associated syndrome.

[0672] In some embodiments, the subject is suspected of having or has been diagnosed with amegakaryocytic thrombocytopenia (Amega), diamond blackfan anemia (DBA), dyskeratosis congenita (DC), Fanconi anemia (FA), Pearson syndrome, severe congenital neutropenia (SCN), Schwachman diamond syndrome (SDS), GATA2 deficiency, cyclic neutropenia, Dubowitz syndrome, Kostmann syndrome, refractory cytopenia, or thrombocytopenia absent radii (TAR).

[0673] In one aspect, provided herein are dsRNA agents, conjugates, vectors, carriers, and pharmaceutical compositions for use in a method of treating, ameliorating, or preventing an inherited bone marrow failure syndrome in a subject, the method comprising administering to the subject a dsRNA agent described herein, a conjugate described herein, a vector described herein, a carrier described herein, or a pharmaceutical composition described herein, to thereby treat, ameliorate, or prevent the inherited bone marrow failure syndrome in the subject.

[0674] In some embodiments, the agent (e.g., RNAi agent, dsRNA agent, sense strand, antisense strand, ASO, ssRNA agent, etc.), conjugate, vector, carrier, or pharmaceutical composition is administered to the subject in an amount and for a time sufficient to treat, ameliorate, or prevent the inherited bone marrow failure syndrome in the subject.

[0675] In some embodiments, the inherited bone marrow failure syndrome is amegakaryocytic thrombocytopenia (Amega), diamond blackfan anemia (DBA), dyskeratosis congenita (DC), Fanconi anemia (FA), Pearson syndrome, severe congenital neutropenia (SCN), Schwachman diamond syndrome (SDS), GATA2 deficiency, cyclic neutropenia, Dubowitz syndrome, Kostmann syndrome, refractory cytopenia, thrombocytopenia absent radii (TAR), a SAMD9/SAMD9L disorder, or a MECOM-associated syndrome.

[0676] In some embodiments, the subject is suspected of having or has been diagnosed with amegakaryocytic thrombocytopenia (Amega), diamond blackfan anemia (DBA), dyskeratosis congenita (DC), Fanconi anemia (FA), Pearson syndrome, severe congenital neutropenia (SCN), Schwachman diamond syndrome (SDS), GATA2 deficiency, cyclic neutropenia, Dubowitz syndrome, Kostmann syndrome, refractory cytopenia, or thrombocytopenia absent radii (TAR).

[0677] In one aspect, provided herein are uses of dsRNA agents, conjugates, vectors, carriers, and pharmaceutical compositions in the manufacture of a medicament for the treatment, amelioration, or prevention of an inherited bone marrow failure syndrome in a subject.

[0678] In some embodiments, the agent (e.g., RNAi agent, dsRNA agent, sense strand, antisense strand, ASO, ssRNA agent, etc.), conjugate, vector, carrier, or pharmaceutical composition is administered to the subject in an amount and for a time sufficient to treat, ameliorate, or prevent the inherited bone marrow failure syndrome in the subject.

[0679] In some embodiments, the inherited bone marrow failure syndrome is amegakaryocytic thrombocytopenia (Amega), diamond blackfan anemia (DBA), dyskeratosis congenita (DC), Fanconi anemia (FA), Pearson syndrome, severe congenital neutropenia (SCN), Schwachman diamond syndrome (SDS), GATA2 deficiency, cyclic neutropenia, Dubowitz syndrome, Kostmann syndrome, refractory cytopenia, thrombocytopenia absent radii (TAR), a SAMD9/SAMD9L disorder, or a MECOM-associated syndrome.

[0680] In some embodiments, the subject is suspected of having or has been diagnosed with amegakaryocytic thrombocytopenia (Amega), diamond blackfan anemia (DBA), dyskeratosis congenita (DC), Fanconi anemia (FA), Pearson syndrome, severe congenital neutropenia (SCN), Schwachman diamond syndrome (SDS), GATA2 deficiency, cyclic neutropenia, Dubowitz syndrome, Kostmann syndrome, refractory cytopenia, or thrombocytopenia absent radii (TAR).

[0681] In one aspect, provided herein are uses of dsRNA agents, conjugates, vectors, carriers, and pharmaceutical compositions in the manufacture of a medicament for use in a method of treating, ameliorating, or preventing an inherited bone marrow failure syndrome in a subject, the method comprising administering to the subject a dsRNA agent described herein, a conjugate described herein, a vector described herein, a carrier described herein, or a pharmaceutical composition described herein, to thereby treat, ameliorate, or prevent the inherited bone marrow failure syndrome in the subject.

[0682] In some embodiments, the agent (e.g., RNAi agent, dsRNA agent, sense strand, antisense strand, ASO, ssRNA agent, etc.), conjugate, vector, carrier, or pharmaceutical composition is administered to the subject in an amount and for a time sufficient to treat, ameliorate, or prevent the inherited bone marrow failure syndrome in the subject.

[0683] In some embodiments, the inherited bone marrow failure syndrome is amegakaryocytic thrombocytopenia (Amega), diamond blackfan anemia (DBA), dyskeratosis congenita (DC), Fanconi anemia (FA), Pearson syndrome, severe congenital neutropenia (SCN), Schwachman diamond syndrome (SDS), GATA2 deficiency, cyclic neutropenia, Dubowitz syndrome, Kostmann syndrome, refractory cytopenia, thrombocytopenia absent radii (TAR), a SAMD9/SAMD9L disorder, or a MECOM-associated syndrome.

[0684] In some embodiments, the subject is suspected of having or has been diagnosed with amegakaryocytic thrombocytopenia (Amega), diamond blackfan anemia (DBA), dyskeratosis congenita (DC), Fanconi anemia (FA), Pearson syndrome, severe congenital neutropenia (SCN), Schwachman diamond syndrome (SDS), GATA2 deficiency, cyclic neutropenia, Dubowitz syndrome, Kostmann syndrome, refractory cytopenia, or thrombocytopenia absent radii (TAR).

### 4.14 Kits

[0685] In a one aspect, provided herein are kits comprising any one or more agent described herein (e.g., an RNAi agent, a dsRNA agent, a sense strand, an antisense strand, an ASO, a ssRNA agent, etc.) (see, e.g., §§ 4.2, 4.3, 4.4); a vector described herein (see, e.g., § 4.9); a conjugate described herein (see, e.g., § 4.5); a carrier described herein (see, e.g., § 4.10); a host cell described herein (see, e.g., § 4.11); and/or a pharmaceutical composition described herein (see, e.g., § 4.12); or any combination thereof. In addition, the kit may comprise a liquid vehicle for solubilizing or diluting, and/or technical instructions. The technical instructions of the kit may contain information about administration and dosage and subject groups.

[0686] In some embodiments, the agent (e.g., described herein) (e.g., RNAi agent, dsRNA agent, sense strand, antisense strand, ASO, ssRNA agent, etc.), vector (e.g., described herein), conjugate (e.g., described herein), carrier (e.g., described herein), host cell (e.g., described herein), and/or pharmaceutical composition (e.g., described herein) is provided in a separate part of the kit. In some embodiments, the agent (e.g., described herein) (e.g., RNAi agent, dsRNA agent, sense strand, antisense strand, ASO, ssRNA agent, etc.), vector (e.g., described herein), conjugate (e.g., described herein), carrier (e.g., described herein), host cell (e.g., described herein), and/or pharmaceutical composition (e.g., described herein) is optionally lyophilized, spray-dried, or spray-freeze dried. The kit may further contain as a part a vehicle (e.g., buffer solution) for solubilizing the dried or lyophilized any agent (e.g., described herein) (e.g., RNAi agent, dsRNA agent, sense strand, antisense strand, ASO, ssRNA agent, etc.), vector (e.g., described herein), conjugate (e.g., described herein), carrier (e.g., described herein), host cell (e.g., described herein), and/or pharmaceutical composition (e.g., described herein).

[0687] In some embodiments, the kit comprises a single dose container. In some embodiments, the kit comprises a multi-dose container. In some embodiments, the kit comprises an administration device (e.g., an injector for intradermal injection or a syringe for intramuscular injection).

[0688] Any of the kits described herein may be used in any of the methods described herein (see, e.g., § 4.13).

### 5. EXAMPLES

TABLE OF CONTENTS

| | |
|---|---|
| 5.1 | Example 1. Design of BCL11A Targeting RNA Agents. |
| 5.2 | Example 2. Synthesis of BCL11A Targeting RNA Agents. |
| 5.3 | Example 3. In Vitro RNA Agent Mediated Knockdown of hBCL11A in HEK293 |
| | Cells. |
| 5.5 | Example 4. In Vitro RNA Agent Mediated Knockdown of hBCL11A in HUDEP2 |
| | Cells. |

### 5.5 Example 5. In Vitro RNA Agent Mediated Knockdown of hBCL11A in HEK293 Cells

### 5.1 Example 1. Design of BCL11A Targeting RNA Agents

[0689] The inventors, inter alia, designed RNA agents (including dsRNA agents and ASO agents) targeting BCL11A. The nucleotide sequence of the unmodified BCL11A sense and antisense strands of each of the dsRNA agents are set forth in Tables 2-3; and the nucleotide sequence of the exemplary modified BCL11A sense and antisense strands of each of the dsRNA agents are set forth in Tables 4-5. The inventors, inter alia, designed ASO agents targeting BCL11A. The nucleotide sequence of the unmodified and modified ASOs is set forth in Tables 7 and Table 9.

### 5.2 Example 2. Synthesis of BCL11A Targeting RNA Agents

[0690] The RNA agents designed in Example 1 were synthesized using standard methods known in the art and described herein. Briefly, the RNA agents were synthesized using a Mermade 192 synthesizer (BioAutomation) on controlled pore glass (500-1000 A) solid supports loaded with a first nucleotide of interest. Upon completion of the solid phase synthesis, solid-supported polynucleotides were treated with Methylamine (40% aqueous) at room temperature in 96 well plates for approximately 2 hours to afford cleavage from the solid support and subsequent removal of relevant protecting groups. Polynucleotides were precipitated by the addition of 1 mL of 9:1 acetontrile:ethanol or 1:1 ethanol:isopropanol. The plates were then centrifuged at 4° C. for 45 minutes and the supernatant removed. The polynucleotide pellet was resuspended in 20 mM NaOAc and subsequently desalted using a HiTrap size exclusion column (5 mL, GE Healthcare) on an Agilent LC system equipped with an autosampler, UV detector, conductivity meter, and fraction collector. Desalted samples were collected in 96 well plates and then analyzed by LC-MS and UV spectrometry to confirm identity and quantify the amount of material, respectively.

[0691] Duplexing of single strands for dsRNA agents was performed on a Tecan liquid handling robot. Sense and antisense single strands were combined in an equimolar ratio to a final concentration of 10 μM in lx PBS in 96 well plates, the plate was sealed, incubated at 100° C. for 10 minutes, and was subsequently allowed to return slowly to room temperature over a period of 2-3 hours. The concentration and identity of each duplex was confirmed and was then subsequently utilized for screening assays.

### 5.3 Example 3. In Vitro RNA Agent Mediated Knockdown of hBCL11A in HEK293 Cells

[0692] Each of the indicated dsRNA Agents from Table 3 (modified agents) and the ASO Agents indicated from Table 9 (modified agents) above were evaluated for their ability to knockdown hBCL11A expression in vitro in HEK293 cells.

[0693] Briefly, HEK293 cells were seeded at 2.0e5 cells per well in a standard 96 well plate. The cells were transfected with the indicated hBCL11A targeting dsRNA agent (2 nM and 0.2 nM) using Opti-MEM/LF2000 mix according to the manufacturer's instructions and incubated for 24 hours. The level of hBCL11A was assessed utilizing a standard bDNA assay according to the manufacturer's instructions. The expression of hBCL11A was normalized to the expression of human GAPDH. Each treatment group was run in quadruplicate, the mean and standard deviation calculated.

[0694] Table 19 shows the percent of maximum inhibition of hBCL11A mRNA after treatment with the indicated RNA agent (normalized to GAPDH). “MV” in Table 19 indicates the mean value; and “SD” indicates the standard deviation, with

TABLE 19
Maximum Inhibition of hBCL11A mRNA (Normalized to GAPDH).

| | 2 nM | | | | 0.2 nM | | | |
|---|---|---|---|---|---|---|---|---|
| RNA | MV | SD | | | MV | SD | | |
| Agent | hBCL11a/ | hBCL11a/ | MV | SD | hBCL11a/ | hsBCL11a/ | MV | SD |
| ID | hGAPDH | hGAPDH | hGAPDH | hGAPDH | hGAPDH | hGAPDH | hGAPDH | hGAPDH |
| dsRNA 1399 | 85.5 | 1.8 | 71.2 | 9.8 | 88.1 | 2.3 | 79.5 | 10.1 |
| dsRNA 1400 | 81.0 | 6.9 | 57.6 | 1.8 | 92.9 | 8.1 | 81.3 | 12.8 |
| dsRNA 1401 | 35.2 | 3.1 | 83.0 | 7.0 | 38.0 | 6.0 | 100.9 | 6.6 |
| dsRNA 1402 | 33.2 | 3.1 | 80.4 | 9.7 | 32.3 | 4.0 | 92.8 | 8.5 |
| dsRNA 772 | 29.5 | 5.1 | 76.5 | 9.8 | 30.8 | 3.4 | 80.9 | 10.0 |
| dsRNA 1403 | 40.5 | 6.2 | 74.1 | 3.0 | 40.5 | 4.4 | 78.7 | 7.4 |
| dsRNA 1403 | 38.1 | 4.7 | 57.5 | 1.2 | 43.9 | 3.4 | 78.0 | 10.8 |
| dsRNA 780 | 32.2 | 5.0 | 79.0 | 3.2 | 36.6 | 3.8 | 68.5 | 6.1 |
| dsRNA 780 | 33.8 | 3.6 | 59.4 | 2.2 | 38.7 | 3.2 | 75.1 | 9.8 |
| dsRNA 1404 | 43.6 | 4.7 | 73.4 | 2.1 | 57.2 | 7.3 | 71.4 | 13.2 |
| dsRNA 1404 | 48.9 | 5.6 | 47.9 | 1.8 | 57.7 | 5.4 | 67.4 | 5.0 |
| dsRNA 1405 | 39.1 | 5.6 | 53.8 | 2.3 | 46.5 | 6.2 | 62.6 | 6.5 |
| dsRNA 1406 | 34.1 | 2.9 | 82.3 | 4.7 | 40.1 | 6.4 | 79.4 | 13.2 |
| dsRNA 1406 | 32.5 | 2.2 | 56.7 | 1.5 | 39.9 | 3.9 | 72.8 | 5.8 |
| dsRNA 1407 | 66.7 | 6.3 | 74.1 | 4.3 | 71.2 | 6.8 | 80.1 | 11.2 |
| dsRNA 1408 | 49.5 | 2.3 | 73.0 | 3.5 | 67.9 | 7.3 | 77.2 | 3.9 |
| ASO 60 | 18.3 | 2.5 | 84.3 | 6.0 | 55.8 | 4.2 | 79.8 | 4.2 |
| dsRNA 1409 | 45.6 | 1.6 | 85.8 | 7.1 | 47.6 | 6.9 | 98.8 | 4.7 |
| ASO 61 | 19.5 | 2.1 | 96.3 | 6.0 | 28.9 | 2.2 | 94.1 | 5.2 |
| dsRNA 1410 | 68.5 | 5.1 | 77.1 | 6.5 | 69.3 | 12.0 | 94.6 | 5.2 |
| dsRNA 1410 | 71.0 | 4.0 | 57.7 | 3.8 | 81.7 | 4.9 | 75.6 | 10.2 |
| ASO 62 | 14.2 | 1.0 | 75.0 | 5.5 | 26.4 | 4.1 | 81.0 | 1.9 |
| dsRNA 1411 | 26.8 | 1.5 | 78.6 | 6.1 | 29.3 | 4.1 | 76.6 | 5.8 |
| ASO 63 | 12.6 | 1.5 | 53.4 | 2.5 | 24.3 | 4.1 | 76.4 | 11.0 |
| dsRNA 1412 | 26.5 | 2.3 | 77.2 | 3.8 | 31.7 | 2.6 | 73.3 | 3.1 |
| dsRNA 1413 | 40.9 | 4.5 | 86.0 | 4.5 | 45.0 | 5.6 | 74.8 | 8.6 |
| dsRNA 1414 | 67.7 | 2.9 | 65.3 | 1.7 | 60.2 | 4.5 | 74.6 | 8.1 |
| dsRNA 1415 | 35.1 | 5.1 | 59.0 | 2.1 | 37.5 | 2.7 | 70.9 | 8.0 |
| dsRNA 1416 | 62.9 | 6.5 | 70.1 | 2.4 | 69.0 | 4.5 | 81.9 | 14.1 |
| dsRNA 1417 | 71.2 | 4.0 | 84.9 | 5.5 | 79.4 | 6.7 | 99.2 | 7.0 |
| dsRNA 1418 | 49.8 | 5.2 | 75.2 | 8.1 | 65.5 | 7.1 | 87.6 | 8.5 |
| dsRNA 1419 | 46.3 | 5.4 | 46.4 | 2.8 | 76.6 | 8.4 | 86.3 | 13.7 |
| dsRNA 1420 | 53.9 | 2.7 | 46.4 | 2.7 | 77.2 | 8.9 | 81.1 | 9.9 |
| dsRNA 1421 | 43.9 | 3.7 | 60.7 | 4.9 | 53.0 | 4.8 | 80.8 | 12.1 |
| dsRNA 782 | 34.4 | 1.9 | 90.3 | 3.4 | 48.8 | 4.2 | 78.2 | 3.9 |
| dsRNA 1422 | 62.2 | 2.1 | 86.4 | 3.6 | 74.4 | 3.3 | 71.5 | 8.2 |
| dsRNA 1423 | 45.9 | 5.3 | 70.4 | 1.2 | 51.0 | 1.4 | 70.0 | 8.8 |
| dsRNA 1424 | 51.0 | 3.3 | 71.7 | 5.5 | 51.6 | 0.6 | 70.9 | 11.3 |
| dsRNA 1425 | 43.2 | 3.4 | 74.6 | 6.0 | 49.8 | 4.7 | 75.0 | 9.8 |
| dsRNA 1426 | 49.2 | 3.1 | 75.4 | 3.0 | 54.9 | 4.5 | 82.2 | 5.9 |
| dsRNA 1427 | 33.7 | 2.1 | 97.8 | 2.2 | 40.9 | 7.6 | 100.5 | 4.7 |
| dsRNA 1428 | 48.3 | 3.3 | 98.2 | 6.4 | 51.6 | 7.4 | 91.2 | 1.1 |
| dsRNA 1429 | 35.5 | 3.1 | 99.3 | 11.4 | 37.5 | 6.7 | 85.7 | 6.0 |
| dsRNA 1430 | 27.9 | 2.7 | 101.3 | 6.4 | 33.0 | 5.3 | 79.1 | 6.1 |
| dsRNA 1431 | 30.0 | 3.3 | 105.8 | 8.2 | 41.5 | 7.5 | 70.2 | 4.7 |
| dsRNA 1432 | 38.6 | 5.4 | 99.9 | 7.6 | 52.8 | 6.0 | 64.7 | 7.9 |
| dsRNA 1433 | 30.9 | 4.3 | 96.5 | 8.2 | 39.4 | 5.3 | 68.1 | 7.1 |
| dsRNA 1434 | 36.4 | 2.1 | 95.3 | 7.4 | 40.2 | 5.0 | 69.3 | 5.7 |
| dsRNA 1435 | 42.3 | 2.5 | 83.9 | 2.1 | 46.9 | 5.9 | 80.3 | 9.5 |
| dsRNA 1436 | 40.5 | 2.2 | 89.6 | 6.6 | 39.4 | 1.3 | 88.9 | 3.3 |
| dsRNA 1437 | 51.3 | 2.0 | 86.9 | 4.0 | 58.6 | 5.9 | 82.3 | 3.3 |
| dsRNA 1438 | 46.5 | 3.6 | 81.8 | 2.1 | 44.5 | 5.5 | 76.4 | 5.2 |
| dsRNA 1439 | 48.2 | 4.1 | 76.7 | 1.5 | 48.6 | 7.5 | 73.6 | 4.7 |
| dsRNA 1440 | 43.8 | 4.9 | 80.7 | 3.8 | 50.9 | 6.6 | 69.5 | 5.2 |
| dsRNA 1441 | 35.1 | 4.2 | 88.9 | 4.3 | 40.6 | 3.5 | 70.1 | 9.9 |
| dsRNA 777 | 33.3 | 4.5 | 85.6 | 2.0 | 35.0 | 1.9 | 70.0 | 11.1 |
| dsRNA 1442 | 33.0 | 3.4 | 86.3 | 4.5 | 37.9 | 2.6 | 68.9 | 7.7 |
| dsRNA 1443 | 33.1 | 2.5 | 81.0 | 6.7 | 39.3 | 2.4 | 65.7 | 4.8 |
| dsRNA 1444 | 33.8 | 0.5 | 81.6 | 4.3 | 40.0 | 1.0 | 74.9 | 10.2 |
| dsRNA 1445 | 41.0 | 4.2 | 83.9 | 0.9 | 45.5 | 0.7 | 91.0 | 10.9 |
| dsRNA 1446 | 38.4 | 1.9 | 105.3 | 4.5 | 39.5 | 4.8 | 101.8 | 8.4 |
| dsRNA 1447 | 51.7 | 6.5 | 94.7 | 4.3 | 39.5 | 3.3 | 95.7 | 9.9 |
| dsRNA 1448 | 37.4 | 5.0 | 90.7 | 7.7 | 31.4 | 2.1 | 98.2 | 8.0 |
| dsRNA 779 | 38.5 | 3.5 | 75.5 | 9.1 | 34.7 | 5.0 | 84.6 | 8.0 |
| dsRNA 1449 | 83.8 | 5.3 | 86.3 | 11.0 | 84.2 | 5.0 | 67.7 | 6.1 |
| dsRNA 1450 | 81.6 | 6.2 | 82.8 | 12.6 | 88.7 | 7.8 | 61.3 | 6.1 |
| dsRNA 1451 | 64.6 | 8.7 | 89.8 | 4.7 | 75.9 | 9.9 | 64.4 | 3.8 |
| dsRNA 1452 | 64.7 | 8.2 | 93.5 | 4.0 | 64.7 | 4.5 | 61.4 | 3.0 |
| dsRNA 1453 | 49.2 | 2.1 | 56.1 | 9.0 | 59.5 | 6.3 | 80.6 | 12.0 |
| dsRNA 1454 | 56.8 | 8.0 | 86.0 | 3.3 | 65.0 | 13.0 | 64.9 | 4.2 |
| dsRNA 1455 | 69.6 | 13.7 | 83.7 | 3.7 | 78.1 | 8.2 | 61.7 | 1.6 |
| dsRNA 1456 | 72.4 | 1.9 | 66.0 | 11.7 | 76.8 | 5.8 | 80.9 | 8.8 |
| dsRNA 1457 | 51.0 | 5.2 | 82.1 | 5.7 | 54.4 | 4.8 | 66.9 | 6.7 |
| dsRNA 1458 | 44.8 | 2.7 | 73.4 | 6.9 | 55.7 | 2.0 | 84.6 | 7.0 |
| dsRNA 1459 | 57.1 | 3.3 | 68.3 | 6.9 | 58.1 | 4.7 | 93.2 | 8.5 |
| dsRNA 1460 | 83.6 | 6.8 | 85.1 | 8.6 | 83.7 | 4.7 | 63.2 | 2.0 |
| dsRNA 1461 | 56.4 | 1.3 | 94.7 | 3.5 | 69.3 | 8.1 | 78.8 | 7.3 |
| dsRNA 1462 | 48.6 | 3.2 | 61.3 | 3.1 | 57.5 | 5.3 | 88.4 | 14.5 |
| dsRNA 1463 | 53.0 | 3.4 | 86.2 | 6.2 | 61.0 | 7.2 | 80.2 | 4.9 |
| dsRNA 1464 | 46.4 | 3.9 | 74.4 | 4.0 | 55.8 | 3.3 | 69.7 | 6.9 |
| dsRNA 1465 | 64.8 | 1.3 | 96.6 | 11.8 | 59.7 | 3.4 | 90.5 | 7.1 |
| dsRNA 1466 | 58.8 | 4.1 | 71.6 | 1.5 | 68.0 | 8.9 | 64.7 | 6.7 |
| dsRNA 1467 | 50.2 | 4.1 | 79.2 | 3.1 | 68.6 | 8.8 | 65.7 | 5.8 |
| dsRNA 1468 | 43.3 | 3.5 | 61.4 | 2.4 | 56.7 | 7.3 | 82.1 | 10.6 |
| dsRNA 1469 | 73.0 | 11.0 | 85.3 | 6.0 | 79.1 | 4.6 | 69.2 | 5.9 |
| dsRNA 1470 | 67.6 | 3.0 | 76.1 | 3.8 | 78.3 | 9.9 | 77.3 | 13.0 |
| dsRNA 1471 | 50.8 | 4.6 | 78.9 | 1.4 | 51.0 | 7.3 | 77.4 | 4.4 |
| dsRNA 1472 | 52.1 | 0.8 | 74.5 | 6.7 | 60.7 | 6.7 | 73.6 | 4.0 |
| dsRNA 1473 | 84.1 | 5.4 | 83.5 | 8.5 | 80.9 | 7.9 | 81.6 | 8.2 |
| dsRNA 1474 | 83.2 | 4.1 | 94.5 | 8.9 | 87.2 | 6.2 | 92.8 | 13.1 |
| dsRNA 1475 | 77.5 | 4.7 | 78.2 | 4.6 | 77.1 | 5.8 | 86.8 | 10.9 |
| dsRNA 1476 | 76.3 | 5.2 | 69.5 | 4.6 | 85.0 | 7.5 | 68.8 | 6.1 |
| dsRNA 1477 | 70.5 | 7.1 | 68.3 | 11.4 | 70.2 | 8.5 | 73.1 | 8.0 |
| dsRNA 1478 | 46.6 | 3.5 | 80.1 | 9.9 | 54.2 | 8.0 | 75.4 | 10.6 |
| dsRNA 783 | 36.2 | 3.7 | 80.1 | 4.3 | 48.2 | 6.7 | 78.9 | 3.1 |
| dsRNA 1479 | 57.7 | 6.4 | 77.0 | 6.6 | 72.0 | 13.4 | 79.9 | 3.8 |
| dsRNA 1480 | 45.6 | 3.6 | 54.4 | 3.6 | 55.3 | 6.5 | 66.4 | 9.4 |
| dsRNA 1481 | 39.3 | 4.5 | 73.9 | 7.8 | 53.2 | 7.9 | 82.0 | 2.9 |
| dsRNA 1482 | 70.0 | 7.0 | 73.3 | 4.6 | 70.3 | 7.2 | 86.3 | 7.2 |
| dsRNA 1483 | 69.4 | 4.8 | 72.6 | 5.0 | 77.8 | 7.7 | 91.7 | 7.9 |
| dsRNA 1484 | 64.3 | 4.0 | 78.5 | 5.9 | 82.7 | 4.3 | 91.2 | 3.7 |
| dsRNA 1485 | 92.2 | 3.1 | 80.2 | 8.8 | 92.0 | 7.8 | 80.1 | 9.0 |
| dsRNA 1486 | 83.1 | 4.1 | 70.0 | 6.4 | 84.1 | 6.2 | 73.5 | 11.6 |
| dsRNA 1487 | 87.0 | 4.7 | 66.6 | 5.6 | 89.4 | 11.0 | 63.6 | 1.1 |
| dsRNA 1488 | 74.1 | 6.0 | 64.1 | 5.6 | 79.7 | 10.1 | 63.2 | 5.1 |
| dsRNA 1489 | 42.4 | 1.7 | 83.5 | 7.6 | 53.8 | 4.8 | 76.0 | 6.6 |
| dsRNA 1490 | 74.4 | 3.5 | 63.6 | 2.8 | 72.1 | 10.4 | 72.8 | 5.4 |
| dsRNA 1491 | 52.7 | 4.9 | 68.1 | 5.4 | 45.4 | 2.8 | 82.7 | 6.2 |
| dsRNA 1492 | 54.8 | 0.9 | 67.3 | 4.0 | 56.1 | 8.8 | 88.7 | 7.5 |
| dsRNA 1493 | 77.9 | 4.5 | 74.8 | 7.8 | 69.5 | 11.9 | 98.9 | 10.7 |
| dsRNA 1494 | 57.3 | 4.8 | 80.9 | 15.2 | 58.4 | 5.2 | 93.6 | 1.5 |
| dsRNA 1495 | 67.8 | 5.0 | 82.8 | 5.6 | 85.1 | 7.5 | 95.3 | 2.0 |
| dsRNA 1496 | 55.6 | 2.0 | 85.0 | 2.7 | 56.8 | 4.1 | 89.1 | 6.3 |
| dsRNA 1497 | 99.5 | 7.3 | 70.8 | 1.8 | 88.9 | 4.9 | 76.6 | 8.1 |
| dsRNA 1498 | 95.8 | 6.5 | 59.2 | 5.8 | 87.0 | 4.6 | 72.4 | 10.5 |
| dsRNA 1499 | 74.6 | 7.6 | 56.4 | 3.5 | 63.9 | 3.3 | 76.1 | 7.7 |
| dsRNA 1500 | 49.9 | 3.7 | 82.4 | 12.9 | 56.9 | 4.9 | 71.4 | 11.9 |
| dsRNA 1501 | 50.4 | 3.1 | 57.6 | 5.8 | 53.3 | 8.3 | 77.4 | 7.4 |
| dsRNA 784 | 38.5 | 3.0 | 72.4 | 7.0 | 49.1 | 5.0 | 62.8 | 2.9 |
| dsRNA 1502 | 46.5 | 3.4 | 66.1 | 8.0 | 57.8 | 5.1 | 61.5 | 6.7 |
| dsRNA 1503 | 51.9 | 5.3 | 59.2 | 9.3 | 58.8 | 6.1 | 59.6 | 3.6 |
| dsRNA 1504 | 101.8 | 2.5 | 27.2 | 6.9 | 93.9 | 4.5 | 34.7 | 7.3 |
| dsRNA 1505 | 54.6 | 5.9 | 78.8 | 5.0 | 52.3 | 7.5 | 84.5 | 8.3 |
| dsRNA 1506 | 67.9 | 3.1 | 76.1 | 6.8 | 55.6 | 4.8 | 83.6 | 13.0 |
| dsRNA 1507 | 65.4 | 6.1 | 72.0 | 9.4 | 60.9 | 8.3 | 80.5 | 11.0 |
| dsRNA 1508 | 72.7 | 6.4 | 59.7 | 6.1 | 73.7 | 6.6 | 60.0 | 4.7 |
| dsRNA 1509 | 61.3 | 6.4 | 68.6 | 9.0 | 67.6 | 3.7 | 71.8 | 9.5 |
| dsRNA 1510 | 73.7 | 2.2 | 78.1 | 7.4 | 81.1 | 3.0 | 79.7 | 8.6 |
| dsRNA 1511 | 49.4 | 4.3 | 86.5 | 3.3 | 53.9 | 5.9 | 86.5 | 3.1 |
| dsRNA 1512 | 52.2 | 7.3 | 93.2 | 5.9 | 55.2 | 9.4 | 77.8 | 2.9 |
| dsRNA 1513 | 56.8 | 7.7 | 81.2 | 3.8 | 59.3 | 8.5 | 70.6 | 7.7 |
| dsRNA 1514 | 53.1 | 5.1 | 68.8 | 3.3 | 57.2 | 7.7 | 70.0 | 7.1 |
| dsRNA 1515 | 51.7 | 2.8 | 71.3 | 5.9 | 56.5 | 4.8 | 72.8 | 10.4 |
| dsRNA 1516 | 45.6 | 2.8 | 62.3 | 0.9 | 49.1 | 4.9 | 78.4 | 5.9 |
| dsRNA 1517 | 54.2 | 1.5 | 55.6 | 1.3 | 53.0 | 1.6 | 75.8 | 8.7 |
| dsRNA 1518 | 57.9 | 4.6 | 62.9 | 11.5 | 63.0 | 4.6 | 59.4 | 6.8 |
| dsRNA 1519 | 69.2 | 6.2 | 58.6 | 2.2 | 71.2 | 13.3 | 82.0 | 4.3 |
| dsRNA 1520 | 87.8 | 5.9 | 54.2 | 5.7 | 82.4 | 14.9 | 79.5 | 7.3 |
| dsRNA 1521 | 57.2 | 2.3 | 62.4 | 3.7 | 58.6 | 12.0 | 85.3 | 7.7 |
| dsRNA 1522 | 68.3 | 2.9 | 61.0 | 5.5 | 66.0 | 7.2 | 78.5 | 5.1 |
| dsRNA 1523 | 62.5 | 3.1 | 68.5 | 2.4 | 66.7 | 8.0 | 83.0 | 4.6 |
| dsRNA 1524 | 69.4 | 0.8 | 86.4 | 5.0 | 71.4 | 1.6 | 78.0 | 7.6 |
| dsRNA 1525 | 85.0 | 2.5 | 73.7 | 6.7 | 77.2 | 1.4 | 71.6 | 8.9 |
| dsRNA 1526 | 70.4 | 4.1 | 63.0 | 3.9 | 62.6 | 3.4 | 68.9 | 8.8 |
| dsRNA 1527 | 69.1 | 5.8 | 57.7 | 4.0 | 61.3 | 4.4 | 70.5 | 7.5 |
| dsRNA 1528 | 83.2 | 7.4 | 43.9 | 2.5 | 71.5 | 6.4 | 61.6 | 6.7 |
| dsRNA 1529 | 76.5 | 6.8 | 48.7 | 3.6 | 65.1 | 8.8 | 70.0 | 3.4 |
| dsRNA 1530 | 66.4 | 5.8 | 49.9 | 2.9 | 54.6 | 7.6 | 80.8 | 6.1 |
| dsRNA 1531 | 61.0 | 5.4 | 60.5 | 2.1 | 49.9 | 8.7 | 85.0 | 2.3 |
| dsRNA 1532 | 70.3 | 1.7 | 64.6 | 3.2 | 65.8 | 3.8 | 86.4 | 7.3 |
| dsRNA 1533 | 64.6 | 2.9 | 85.5 | 6.8 | 74.4 | 7.0 | 87.0 | 5.2 |
| dsRNA 1534 | 74.3 | 3.2 | 77.9 | 3.6 | 70.0 | 5.3 | 77.8 | 5.0 |
| dsRNA 1535 | 64.6 | 1.8 | 73.2 | 5.5 | 62.3 | 5.0 | 80.8 | 3.7 |
| dsRNA 1536 | 80.1 | 6.1 | 68.4 | 12.8 | 76.4 | 7.9 | 74.6 | 7.1 |
| dsRNA 1537 | 64.2 | 4.9 | 66.9 | 9.3 | 60.5 | 6.8 | 75.9 | 3.0 |
| dsRNA 1538 | 64.4 | 2.4 | 54.7 | 2.7 | 66.9 | 7.1 | 73.6 | 3.0 |
| dsRNA 1539 | 81.7 | 6.8 | 59.5 | 3.4 | 74.5 | 9.2 | 84.8 | 2.8 |
| dsRNA 1540 | 43.8 | 2.6 | 60.0 | 5.0 | 45.6 | 7.7 | 104.0 | 6.7 |
| dsRNA 1541 | 58.3 | 0.7 | 67.5 | 4.7 | 54.1 | 9.0 | 103.9 | 3.9 |
| dsRNA 1542 | 57.0 | 4.6 | 66.5 | 6.2 | 51.1 | 3.5 | 95.5 | 2.6 |
| dsRNA 1543 | 65.8 | 6.8 | 82.2 | 5.9 | 66.7 | 4.3 | 102.4 | 4.7 |
| dsRNA 1544 | 55.8 | 3.8 | 89.4 | 3.4 | 59.6 | 1.1 | 88.6 | 4.5 |
| dsRNA 1545 | 76.6 | 2.7 | 73.8 | 3.1 | 64.0 | 3.0 | 84.2 | 6.8 |
| dsRNA 1546 | 70.1 | 3.1 | 75.3 | 8.7 | 63.7 | 5.7 | 78.2 | 4.1 |
| dsRNA 1547 | 60.7 | 4.9 | 63.5 | 6.0 | 56.1 | 8.5 | 82.7 | 7.3 |
| dsRNA 1548 | 63.4 | 2.6 | 62.0 | 8.0 | 58.7 | 7.2 | 79.9 | 7.0 |
| dsRNA 1549 | 56.7 | 2.3 | 60.2 | 4.2 | 56.0 | 6.9 | 85.7 | 7.3 |
| dsRNA 1550 | 62.4 | 3.2 | 55.5 | 3.5 | 57.8 | 7.5 | 86.8 | 3.2 |
| dsRNA 1551 | 55.5 | 2.5 | 54.3 | 3.7 | 54.5 | 9.3 | 81.5 | 5.7 |
| dsRNA 1552 | 68.4 | 6.4 | 66.0 | 4.1 | 65.8 | 7.7 | 86.1 | 5.3 |
| dsRNA 1553 | 60.1 | 4.8 | 86.4 | 3.9 | 72.0 | 4.9 | 88.2 | 6.1 |
| dsRNA 1554 | 61.2 | 2.7 | 91.1 | 2.6 | 69.5 | 5.2 | 90.5 | 9.8 |
| dsRNA 1555 | 57.7 | 4.1 | 82.1 | 6.3 | 72.5 | 6.2 | 97.5 | 7.9 |
| dsRNA 1556 | 62.1 | 1.6 | 68.7 | 5.3 | 64.8 | 11.0 | 94.4 | 12.9 |
| dsRNA 1557 | 65.1 | 2.5 | 65.5 | 2.7 | 65.2 | 6.8 | 100.9 | 8.0 |
| dsRNA 1558 | 70.1 | 4.7 | 61.9 | 2.9 | 63.2 | 7.2 | 93.9 | 2.2 |
| dsRNA 1559 | 74.8 | 2.3 | 58.8 | 4.0 | 64.2 | 5.0 | 100.1 | 2.7 |
| dsRNA 1560 | 94.8 | 6.4 | 54.5 | 2.0 | 69.2 | 7.0 | 92.0 | 0.9 |
| dsRNA 1561 | 80.2 | 2.8 | 74.1 | 6.3 | 76.0 | 9.2 | 108.7 | 4.7 |
| dsRNA 1562 | 52.2 | 5.0 | 83.7 | 5.6 | 53.8 | 6.6 | 115.5 | 11.5 |
| dsRNA 1563 | 52.6 | 5.7 | 94.0 | 4.1 | 54.9 | 6.6 | 111.8 | 11.8 |
| dsRNA 1564 | 70.2 | 4.9 | 88.5 | 4.2 | 59.1 | 4.3 | 90.9 | 10.6 |
| dsRNA 1565 | 69.9 | 6.9 | 72.4 | 3.4 | 57.0 | 3.7 | 88.9 | 8.1 |
| dsRNA 1566 | 58.8 | 4.1 | 67.8 | 2.3 | 52.9 | 4.5 | 93.8 | 9.3 |
| dsRNA 1567 | 65.0 | 0.5 | 64.1 | 0.7 | 56.2 | 5.5 | 93.0 | 6.5 |
| dsRNA 1568 | 64.7 | 2.6 | 69.1 | 9.7 | 55.4 | 6.9 | 96.9 | 6.4 |
| dsRNA 1569 | 72.3 | 5.6 | 66.9 | 8.7 | 57.9 | 6.5 | 101.5 | 8.4 |
| dsRNA 1570 | 69.4 | 6.8 | 63.7 | 2.6 | 56.2 | 8.4 | 97.4 | 6.9 |
| dsRNA 1571 | 73.6 | 7.3 | 64.8 | 0.9 | 57.6 | 8.0 | 96.7 | 6.7 |
| dsRNA 1572 | 75.2 | 6.3 | 51.8 | 1.7 | 63.7 | 6.3 | 74.5 | 5.6 |
| dsRNA 1573 | 65.2 | 4.4 | 78.2 | 1.2 | 64.0 | 7.0 | 94.1 | 4.7 |
| dsRNA 1574 | 64.1 | 3.1 | 73.3 | 7.3 | 67.9 | 5.3 | 105.1 | 6.8 |

### 5.4 Example 4. In Vitro RNA Agent Mediated Knockdown of hBCL11A in HUDEP2 Cells

[0695] Each of the indicated dsRNA Agents set forth in Table 2 above (unmodified) were evaluated for their ability to knockdown hBCL11A expression in vitro in HUDEP2 cells.

[0696] Briefly, HUDEP2 were seeded at 2.0e5 cells per well in a 96 well nucleofector plate. The cells were nucleofected in a dose response (3000-3 nM) with the indicated hBCL11A targeting dsRNA agent according to the manufacturer's instructions and incubated for 72 hours. The level of hBCL11A was assessed utilizing a standard bDNA assay according to the manufacturer's instructions. The expression of hBCL11A was normalized to the expression of human GUSB. Each treatment group was run in quadruplicate, the mean and standard deviation calculated.

[0697] Table 20 shows the percent of maximum inhibition of hBCL11A mRNA after treatment with the indicated RNA agent (normalized to GUSB).

TABLE 20
Maximum Inhibition of hBCL11A mRNA (Normalized to GUSB).

| RNA Agent ID | IC50 nM | % Max Inhibition |
|---|---|---|
| dsRNA Agent - 1 | 433 | 55.75 |
| dsRNA Agent - 2 | 808 | 41.25 |
| dsRNA Agent - 4 | 3 | 47.25 |
| dsRNA Agent - 5 | 798 | 69 |
| dsRNA Agent - 6 | 188 | 46.25 |
| dsRNA Agent - 7 | 409 | 41.25 |
| dsRNA Agent - 8 | 808 | 41.25 |
| dsRNA Agent - 9 | 725 | 62.5 |
| dsRNA Agent - 12 | 586 | 54.25 |
| dsRNA Agent - 16 | 372 | 62.5 |

### 5.5 Example 5. In Vitro RNA Agent Mediated Knockdown of hBCL11A in HEK293 Cells

[0698] Each of the indicated dsRNA Agents set forth in Table 5 (modified agents) and ASO Agents 52 and 53 (modified agents) set forth in Table 9 above were evaluated for their ability to knockdown hBCL11A expression in vitro in HEK293 cells.

[0699] Briefly, HEK293 cells were seeded at 2.0e5 cells per well in a standard 96 well plate. The cells were transfected with the indicated hBCL11A targeting dsRNA agent (10-0.2 nM) using Opti-MEM/LF2000 mix according to the manufacturer's instructions and incubated for 24 hours. The level of hBCL11A was assessed utilizing a standard bDNA assay according to the manufacturer's instructions. The expression of hBCL11A was normalized to the expression of human GAPDH. Each treatment group was run in quadruplicate, the mean and standard deviation calculated.

[0700] Table 21 shows the percent of maximum inhibition of hBCL11A mRNA after treatment with the indicated RNA agent (normalized to GAPDH).

TABLE 21
Maximum Inhibition of hBCL11A
mRNA (Normalized to GAPDH).

| RNA Agent ID | IC50 nM | % Max Inhibition |
|---|---|---|
| dsRNA Agent - 770 | 0.002 | 65.4 |
| dsRNA Agent - 771 | 0.009 | 72.4 |
| dsRNA Agent - 772 | 0.010 | 73.7 |
| dsRNA Agent - 773 | 0.011 | 64.7 |
| dsRNA Agent - 774 | 0.012 | 61.3 |
| dsRNA Agent - 775 | 0.013 | 61.8 |
| dsRNA Agent - 776 | 0.019 | 67.4 |
| dsRNA Agent - 777 | 0.028 | 68.3 |
| dsRNA Agent - 778 | 0.029 | 66.8 |
| dsRNA Agent - 779 | 0.029 | 64.5 |
| dsRNA Agent - 780 | 0.035 | 71.9 |
| dsRNA Agent - 781 | 0.083 | 57.4 |
| dsRNA Agent - 782 | 0.205 | 66.3 |
| dsRNA Agent - 783 | 0.211 | 59.9 |
| dsRNA Agent - 784 | 0.493 | 56.4 |
| dsRNA Agent - 785 | 0.629 | 51.5 |
| ASO Agent - 56 | 0.056 | 88.7 |
| ASO Agent - 58 | 0.083 | 85.1 |

[0701] The invention is not to be limited in scope by the specific embodiments described herein. Indeed, various modifications of the invention in addition to those described will become apparent to those skilled in the art from the foregoing description and accompanying figures. Such modifications are intended to fall within the scope of the appended claims.

[0702] All references (e.g., publications or patents or patent applications) cited herein are incorporated herein by reference in their entireties and for all purposes to the same extent as if each individual reference (e.g., publication or patent or patent application) was specifically and individually indicated to be incorporated by reference in its entirety for all purposes.

[0703] Other embodiments are within the following claims.

The application's sequence listing, which the Patent Office published only in electronic form, follows.

SEQUENCE LISTING (4433 sequences)

SEQ ID NO: 1 - RNA, 6102 nt, Homo sapiens
  source 1..6102: mol_type = genomic RNA
gtctctgtccatccagactcctgacgttcaagttcgcagggacgtcacgtccgcacttgaacttgcagctcaggggggcttttgccatttttttcatctctctctctctctctccctctatctctcttctctctctctccctctttttttttttttttttttttttttttttgcttaaaaaaaagccatgacggctctcccacaattcatcttccctgcgccatctttgtattatttctaatttattttggatgtcaaaaggcactgatgaagatattttctctggagtctccttctttctaacccggctctcccgatgtgaaccgagccgtcgtccgcccgccgccgccgccgccgccgccgccgcccgccccgcagcccaccatgtctcgccgcaagcaaggcaaaccccagcacttaagcaaacgggaattctcgcccgagcctcttgaagccattcttacagatgatgaaccagaccacggcccgttgggagctccagaaggggatcatgacctcctcacctgtgggcagtgccagatgaacttcccattgggggacattcttatttttatcgagcacaaacggaaacaatgcaatggcagcctctgcttagaaaaagctgtggataagccaccttccccttcaccaatcgagatgaaaaaagcatccaatcccgtggaggttggcatccaggtcacgccagaggatgacgattgtttatcaacgtcatctagaggaatttgccccaaacaggaacacatagcagataaacttctgcactggaggggcctctcctcccctcgttctgcacatggagctctaatccccacgcctgggatgagtgcagaatatgccccgcagggtatttgtaaagatgagcccagcagctacacatgtacaacttgcaaacagccattcaccagtgcatggtttctcttgcaacacgcacagaacactcatggattaagaatctacttagaaagcgaacacggaagtcccctgaccccgcgggttggtatcccttcaggactaggtgcagaatgtccttcccagccacctctccatgggattcatattgcagacaataacccctttaacctgctaagaataccaggatcagtatcgagagaggcttccggcctggcagaagggcgctttccacccactccccccctgtttagtccaccaccgagacatcacttggacccccaccgcatagagcgcctgggggcggaagagatggccctggccacccatcacccgagtgcctttgacagggtgctgcggttgaatccaatggctatggagcctcccgccatggatttctctaggagacttagagagctggcagggaacacgtctagcccaccgctgtccccaggccggcccagccctatgcaaaggttactgcaaccattccagccaggtagcaagccgcccttcctggcgacgccccccctccctcctctgcaatccgcccctcctccctcccagcccccggtcaagtccaagtcatgcgagttctgcggcaagacgttcaaatttcagagcaacctggtggtgcaccggcgcagccacacgggcgagaagccctacaagtgcaacctgtgcgaccacgcgtgcacccaggccagcaagctgaagcgccacatgaagacgcacatgcacaaatcgtcccccatgacggtcaagtccgacgacggtctctccaccgccagctccccggaacccggcaccagcgacttggtgggcagcgccagcagcgcgctcaagtccgtggtggccaagttcaagagcgagaacgaccccaacctgatcccggagaacggggacgaggaggaagaggaggacgacgaggaagaggaagaagaggaggaagaggaggaggaggagctgacggagagcgagagggtggactacggcttcgggctgagcctggaggcggcgcgccaccacgagaacagctcgcggggcgcggtcgtgggcgtgggcgacgagagccgcgccctgcccgacgtcatgcagggcatggtgctcagctccatgcagcacttcagcgaggccttccaccaggtcctgggcgagaagcataagcgcggccacctggccgaggccgagggccacagggacacttgcgacgaagactcggtggccggcgagtcggaccgcatagacgatggcactgttaatggccgcggctgctccccgggcgagtcggcctcggggggcctgtccaaaaagctgctgctgggcagccccagctcgctgagccccttctctaagcgcatcaagctcgagaaggagttcgacctgcccccggccgcgatgcccaacacggagaacgtgtactcgcagtggctcgccggctacgcggcctccaggcagctcaaagatcccttccttagcttcggagactccagacaatcgccttttgcctcctcgtcggagcactcctcggagaacgggagtttgcgcttctccacaccgcccggggagctggacggagggatctcggggcgcagcggcacgggaagtggagggagcacgccccatattagtggtccgggcccgggcaggcccagctcaaaagagggcagacgcagcgacacttgtgagtactgtgggaaagtcttcaagaactgtagcaatctcactgtccacaggagaagccacacgggcgaaaggccttataaatgcgagctgtgcaactatgcctgtgcccagagtagcaagctcaccaggcacatgaaaacgcatggccaggtggggaaggacgtttacaaatgtgaaatttgtaagatgccttttagcgtgtacagtaccctggagaaacacatgaaaaaatggcacagtgatcgagtgttgaataatgatataaaaactgaatagaggtatattaatacccctccctcactcccacctgacaccccctttttcaccactccccttccccatcgccctccagccccactccctgtaggatttttttctagtcccatgtgatttaaacaaacaaacaaacaaacagaagtaacgaagctaagaatatgagagtgcttgtcaccagcacacctgttttttttctttttctttttcttttttctttttccttttttttttttttcctttatgttctcaccgtttgaatgcatgatctgtatggggcaatactattgcattttacgcaaactttgagcctttctcttgtgcaataatttacatgttgtgtatgtttttttttaaacttagacagcatgtatggtatgttatggctattttaaattgtccctaattcgttgctgagcaaacatgttgctgtttccagttccgttctgagagaaaaagagagagagagagaaaaagaccatgctgcatacattctgtaatacatatcatgtacagttttattttataacgtgaggaggaaaaacagtctttggattaaccctctatagacagaatagatagcactgaaaaaaaatctctatgagctaaatgtctgtctctaaagggttaaatgtatcaattggaaaggaagaaaaaaggccttgaattgacaaattaacagaaaaacagaacaagtttattctatcatttggttttaaaatatgagtgccttggatctattaaaaccacatcgatggttctttctacttgttataaacttgtagcttaattcagcattgggtgaggtaataaaccttaggaactagcatataattctatattgtatttctcacaacaatggctacctaaaaagatgacccattatgtcctagttaatcatcatttttcctttagtttaattttataaacaaaactgattataccagtataaaagctactttgctcctggtgagagcttaaaagaaatgggctgttttgcccaaagttttattttttttaaacaatgattaaattgaatgtgtaatgtgcaaaagccctggaacgcaattaaatacactagtaaggagttcattttatgaagatatttgctttaataatgtctttttaaaaatactggcaccaaaagaaatagatccagatctacttggttgtcaagtggacaatcaaatgataaactttaagaccttgtataccatattgaaaggaagaggctgacaataaggtttgacagaggggaacagaagaaaataatatgatttattagcacaacgtggtactatttgccatttaaaactagaacaggtatataagctaatattgatacaatgatgattaactatgaattcttaagacttgcatttaaatgtgacattcttaaaaaaagaagagaaagaattttaagagtagcagtatatatgtctgtgctccctaaaagttgtacttcatttcttttccatacactgtgtgctatttgtgttaacatggaagaggattcattgtttttatttttatttttttaattttttcttttttattaagctagcatctgccccagttggtgttcaaatagcacttgactctgcctgtgatatctgtatcttttctctaatcagagatacagaggttgagtataaaataaacctgctcagataggacaattaagtgcactgtacaattttcccagtttacaggtctatacttaagggaaaagttgcaagaatgctgaaaaaaaattgaacacaatctcattgaggagcattttttaaaaactaaaaaaaaaaaaactttgccagccatttacttgactattgagcttacttacttggacgcaacattgcaagcgctgtgaatggaaacagaatacacttaacatagaaatgaatgattgctttcgcttctacagtgcaaggatttttttgtacaaaacttttttaaatataaatgttaagaaaaattttttttaaaaaacacttcattatgtttaggggggaactgcattttagggttccattgtcttggtggtgttacaagacttgttatccatttaaaaatggtagtggaaattctatgccttggatacacaccgctcttcaggttgtaaaaaaaaaaaacatacattggggaaaggtttaagattatatagtacttaaatataggaaaatgcacactcatgttgattcctatgctaaaatacatttatggtcttttttctgtatttctagaatggtatttgaattaaatgttcatctagtgttaggcactatagtatttatattgaagcttgtatttttaactgttgcttgttctcttaaaaggtatcaatgtaccttttttggtagtggaaaaaaaaaagacaggctgccacagtatatttttttaatttggcaggataatatagtgcaaattatttgtatgcttcaaaaaaaaaaaaaagagagaaacaaaaaagtgtgacattacagatgagaagccatataatggcggtttgggggagcctgctagaatgtcacatggatggctgtcataggggttgtacatatccttttttgttcctttttcctgctgccatactgtatgcagtactgcaagctaataacgttggtttgttatgtagtgtgctttttgtccctttccttctatcaccctacattccagcatcttaccttcatatgcagtaaaagaaagaaagaaaaaaaaaggaaaaaaaaaaaaaaaccaatgttttgcagtttttttcattgccaaaaactaaatggtgctttatatttagattggaaagaatttcatatgcaaagcatattaaagagaaagcccgctttagtcaatacttttttgtaaatggcaatgcagaatattttgttattggccttttctattcctgtaatgaaagctgtttgtcgtaacttgaaattttatcttttactatgggagtcactatttattattgcttatgtgccctgttcaaaacagaggcacttaatttgatcttttatttttctttgtttttatttttttttttatttagatgaccaaaggtcattacaacctggctttttattgtatttgtttctggtctttgttaagttctattggaaaaaccactgtctgtgtttttttggcagttgtctgcattaacctgttcatacacccattttgtccctttattgaaaaaataaaaaaaattaaagtaca

SEQ ID NO: 2 - RNA, 6102 nt, Homo sapiens
  source 1..6102: mol_type = genomic RNA
tgtactttaattttttttattttttcaataaagggacaaaatgggtgtatgaacaggttaatgcagacaactgccaaaaaaacacagacagtggtttttccaatagaacttaacaaagaccagaaacaaatacaataaaaagccaggttgtaatgacctttggtcatctaaataaaaaaaaaaataaaaacaaagaaaaataaaagatcaaattaagtgcctctgttttgaacagggcacataagcaataataaatagtgactcccatagtaaaagataaaatttcaagttacgacaaacagctttcattacaggaatagaaaaggccaataacaaaatattctgcattgccatttacaaaaaagtattgactaaagcgggctttctctttaatatgctttgcatatgaaattctttccaatctaaatataaagcaccatttagtttttggcaatgaaaaaaactgcaaaacattggtttttttttttttttcctttttttttctttctttcttttactgcatatgaaggtaagatgctggaatgtagggtgatagaaggaaagggacaaaaagcacactacataacaaaccaacgttattagcttgcagtactgcatacagtatggcagcaggaaaaaggaacaaaaaaggatatgtacaacccctatgacagccatccatgtgacattctagcaggctcccccaaaccgccattatatggcttctcatctgtaatgtcacacttttttgtttctctcttttttttttttttgaagcatacaaataatttgcactatattatcctgccaaattaaaaaaatatactgtggcagcctgtcttttttttttccactaccaaaaaaggtacattgataccttttaagagaacaagcaacagttaaaaatacaagcttcaatataaatactatagtgcctaacactagatgaacatttaattcaaataccattctagaaatacagaaaaaagaccataaatgtattttagcataggaatcaacatgagtgtgcattttcctatatttaagtactatataatcttaaacctttccccaatgtatgttttttttttttacaacctgaagagcggtgtgtatccaaggcatagaatttccactaccatttttaaatggataacaagtcttgtaacaccaccaagacaatggaaccctaaaatgcagttcccccctaaacataatgaagtgttttttaaaaaaaatttttcttaacatttatatttaaaaaagttttgtacaaaaaaatccttgcactgtagaagcgaaagcaatcattcatttctatgttaagtgtattctgtttccattcacagcgcttgcaatgttgcgtccaagtaagtaagctcaatagtcaagtaaatggctggcaaagtttttttttttttagtttttaaaaaatgctcctcaatgagattgtgttcaattttttttcagcattcttgcaacttttcccttaagtatagacctgtaaactgggaaaattgtacagtgcacttaattgtcctatctgagcaggtttattttatactcaacctctgtatctctgattagagaaaagatacagatatcacaggcagagtcaagtgctatttgaacaccaactggggcagatgctagcttaataaaaaagaaaaaattaaaaaaataaaaataaaaacaatgaatcctcttccatgttaacacaaatagcacacagtgtatggaaaagaaatgaagtacaacttttagggagcacagacatatatactgctactcttaaaattctttctcttctttttttaagaatgtcacatttaaatgcaagtcttaagaattcatagttaatcatcattgtatcaatattagcttatatacctgttctagttttaaatggcaaatagtaccacgttgtgctaataaatcatattattttcttctgttcccctctgtcaaaccttattgtcagcctcttcctttcaatatggtatacaaggtcttaaagtttatcatttgattgtccacttgacaaccaagtagatctggatctatttcttttggtgccagtatttttaaaaagacattattaaagcaaatatcttcataaaatgaactccttactagtgtatttaattgcgttccagggcttttgcacattacacattcaatttaatcattgtttaaaaaaaataaaactttgggcaaaacagcccatttcttttaagctctcaccaggagcaaagtagcttttatactggtataatcagttttgtttataaaattaaactaaaggaaaaatgatgattaactaggacataatgggtcatctttttaggtagccattgttgtgagaaatacaatatagaattatatgctagttcctaaggtttattacctcacccaatgctgaattaagctacaagtttataacaagtagaaagaaccatcgatgtggttttaatagatccaaggcactcatattttaaaaccaaatgatagaataaacttgttctgtttttctgttaatttgtcaattcaaggccttttttcttcctttccaattgatacatttaaccctttagagacagacatttagctcatagagattttttttcagtgctatctattctgtctatagagggttaatccaaagactgtttttcctcctcacgttataaaataaaactgtacatgatatgtattacagaatgtatgcagcatggtctttttctctctctctctctttttctctcagaacggaactggaaacagcaacatgtttgctcagcaacgaattagggacaatttaaaatagccataacataccatacatgctgtctaagtttaaaaaaaaacatacacaacatgtaaattattgcacaagagaaaggctcaaagtttgcgtaaaatgcaatagtattgccccatacagatcatgcattcaaacggtgagaacataaaggaaaaaaaaaaaaaaggaaaaagaaaaaagaaaaagaaaaagaaaaaaaacaggtgtgctggtgacaagcactctcatattcttagcttcgttacttctgtttgtttgtttgtttgtttaaatcacatgggactagaaaaaaatcctacagggagtggggctggagggcgatggggaaggggagtggtgaaaaagggggtgtcaggtgggagtgagggaggggtattaatatacctctattcagtttttatatcattattcaacactcgatcactgtgccattttttcatgtgtttctccagggtactgtacacgctaaaaggcatcttacaaatttcacatttgtaaacgtccttccccacctggccatgcgttttcatgtgcctggtgagcttgctactctgggcacaggcatagttgcacagctcgcatttataaggcctttcgcccgtgtggcttctcctgtggacagtgagattgctacagttcttgaagactttcccacagtactcacaagtgtcgctgcgtctgccctcttttgagctgggcctgcccgggcccggaccactaatatggggcgtgctccctccacttcccgtgccgctgcgccccgagatccctccgtccagctccccgggcggtgtggagaagcgcaaactcccgttctccgaggagtgctccgacgaggaggcaaaaggcgattgtctggagtctccgaagctaaggaagggatctttgagctgcctggaggccgcgtagccggcgagccactgcgagtacacgttctccgtgttgggcatcgcggccgggggcaggtcgaactccttctcgagcttgatgcgcttagagaaggggctcagcgagctggggctgcccagcagcagctttttggacaggccccccgaggccgactcgcccggggagcagccgcggccattaacagtgccatcgtctatgcggtccgactcgccggccaccgagtcttcgtcgcaagtgtccctgtggccctcggcctcggccaggtggccgcgcttatgcttctcgcccaggacctggtggaaggcctcgctgaagtgctgcatggagctgagcaccatgccctgcatgacgtcgggcagggcgcggctctcgtcgcccacgcccacgaccgcgccccgcgagctgttctcgtggtggcgcgccgcctccaggctcagcccgaagccgtagtccaccctctcgctctccgtcagctcctcctcctcctcttcctcctcttcttcctcttcctcgtcgtcctcctcttcctcctcgtccccgttctccgggatcaggttggggtcgttctcgctcttgaacttggccaccacggacttgagcgcgctgctggcgctgcccaccaagtcgctggtgccgggttccggggagctggcggtggagagaccgtcgtcggacttgaccgtcatgggggacgatttgtgcatgtgcgtcttcatgtggcgcttcagcttgctggcctgggtgcacgcgtggtcgcacaggttgcacttgtagggcttctcgcccgtgtggctgcgccggtgcaccaccaggttgctctgaaatttgaacgtcttgccgcagaactcgcatgacttggacttgaccgggggctgggagggaggaggggcggattgcagaggagggagggggggcgtcgccaggaagggcggcttgctacctggctggaatggttgcagtaacctttgcatagggctgggccggcctggggacagcggtgggctagacgtgttccctgccagctctctaagtctcctagagaaatccatggcgggaggctccatagccattggattcaaccgcagcaccctgtcaaaggcactcgggtgatgggtggccagggccatctcttccgcccccaggcgctctatgcggtgggggtccaagtgatgtctcggtggtggactaaacagggggggagtgggtggaaagcgcccttctgccaggccggaagcctctctcgatactgatcctggtattcttagcaggttaaaggggttattgtctgcaatatgaatcccatggagaggtggctgggaaggacattctgcacctagtcctgaagggataccaacccgcggggtcaggggacttccgtgttcgctttctaagtagattcttaatccatgagtgttctgtgcgtgttgcaagagaaaccatgcactggtgaatggctgtttgcaagttgtacatgtgtagctgctgggctcatctttacaaataccctgcggggcatattctgcactcatcccaggcgtggggattagagctccatgtgcagaacgaggggaggagaggcccctccagtgcagaagtttatctgctatgtgttcctgtttggggcaaattcctctagatgacgttgataaacaatcgtcatcctctggcgtgacctggatgccaacctccacgggattggatgcttttttcatctcgattggtgaaggggaaggtggcttatccacagctttttctaagcagaggctgccattgcattgtttccgtttgtgctcgataaaaataagaatgtcccccaatgggaagttcatctggcactgcccacaggtgaggaggtcatgatccccttctggagctcccaacgggccgtggtctggttcatcatctgtaagaatggcttcaagaggctcgggcgagaattcccgtttgcttaagtgctggggtttgccttgcttgcggcgagacatggtgggctgcggggcgggcggcggcggcggcggcggcggcggcgggcggacgacggctcggttcacatcgggagagccgggttagaaagaaggagactccagagaaaatatcttcatcagtgccttttgacatccaaaataaattagaaataatacaaagatggcgcagggaagatgaattgtgggagagccgtcatggcttttttttaagcaaaaaaaaaaaaaaaaaaaaaaaaaaaaagagggagagagagagaagagagatagagggagagagagagagagagatgaaaaaaatggcaaaagcccccctgagctgcaagttcaagtgcggacgtgacgtccctgcgaacttgaacgtcaggagtctggatggacagagac

SEQ ID NO: 3 - protein, 835 aa, Homo sapiens
MSRRKQGKPQHLSKREFSPEPLEAILTDDEPDHGPLGAPEGDHDLLTCGQCQMNFPLGDILIFIEHKRKQCNGSLCLEKAVDKPPSPSPIEMKKASNPVEVGIQVTPEDDDCLSTSSRGICPKQEHIADKLLHWRGLSSPRSAHGALIPTPGMSAEYAPQGICKDEPSSYTCTTCKQPFTSAWFLLQHAQNTHGLRIYLESEHGSPLTPRVGIPSGLGAECPSQPPLHGIHIADNNPFNLLRIPGSVSREASGLAEGRFPPTPPLFSPPPRHHLDPHRIERLGAEEMALATHHPSAFDRVLRLNPMAMEPPAMDFSRRLRELAGNTSSPPLSPGRPSPMQRLLQPFQPGSKPPFLATPPLPPLQSAPPPSQPPVKSKSCEFCGKTFKFQSNLVVHRRSHTGEKPYKCNLCDHACTQASKLKRHMKTHMHKSSPMTVKSDDGLSTASSPEPGTSDLVGSASSALKSVVAKFKSENDPNLIPENGDEEEEEDDEEEEEEEEEEEEELTESERVDYGFGLSLEAARHHENSSRGAVVGVGDESRALPDVMQGMVLSSMQHFSEAFHQVLGEKHKRGHLAEAEGHRDTCDEDSVAGESDRIDDGTVNGRGCSPGESASGGLSKKLLLGSPSSLSPFSKRIKLEKEFDLPPAAMPNTENVYSQWLAGYAASRQLKDPFLSFGDSRQSPFASSSEHSSENGSLRFSTPPGELDGGISGRSGTGSGGSTPHISGPGPGRPSSKEGRRSDTCEYCGKVFKNCSNLTVHRRSHTGERPYKCELCNYACAQSSKLTRHMKTHGQVGKDVYKCEICKMPFSVYSTLEKHMKKWHSDRVLNNDIKTE

SEQ ID NO: 4 - RNA, 23 nt, synthetic construct
  source 1..23: mol_type = other RNA
tctaagtagattcttaatccatg

SEQ ID NO: 5 - RNA, 23 nt, synthetic construct
  source 1..23: mol_type = other RNA
attgcattgtttccgtttgtgct

SEQ ID NO: 6 - RNA, 23 nt, synthetic construct
  source 1..23: mol_type = other RNA
tctcgataaaaataagaatgtcc

SEQ ID NO: 7 - RNA, 23 nt, synthetic construct
  source 1..23: mol_type = other RNA
aactggtgaatggctgtttgcaa

SEQ ID NO: 8 - RNA, 23 nt, synthetic construct
  source 1..23: mol_type = other RNA
tgctgtttgcaagttgtacatgt

SEQ ID NO: 9 - RNA, 23 nt, synthetic construct
  source 1..23: mol_type = other RNA
aatgagtgttctgtgcgtgttgc

SEQ ID NO: 10 - RNA, 23 nt, synthetic construct
  source 1..23: mol_type = other RNA
tgcaagttgtacatgtgtagctg

SEQ ID NO: 11 - RNA, 23 nt, synthetic construct
  source 1..23: mol_type = other RNA
tgtttgcaagttgtacatgtgta

SEQ ID NO: 12 - RNA, 23 nt, synthetic construct
  source 1..23: mol_type = other RNA
tgtgaatggctgtttgcaagttg

SEQ ID NO: 13 - RNA, 23 nt, synthetic construct
  source 1..23: mol_type = other RNA
tatccatgagtgttctgtgcgtg

SEQ ID NO: 14 - RNA, 23 nt, synthetic construct
  source 1..23: mol_type = other RNA
ttgctcgataaaaataagaatgt

SEQ ID NO: 15 - RNA, 23 nt, synthetic construct
  source 1..23: mol_type = other RNA
ttgcaagagaaaccatgcactgg

SEQ ID NO: 16 - RNA, 23 nt, synthetic construct
  source 1..23: mol_type = other RNA
tgggcaaattcctctagatgacg

SEQ ID NO: 17 - RNA, 23 nt, synthetic construct
  source 1..23: mol_type = other RNA
tccgcgcttatgcttctcgccca

SEQ ID NO: 18 - RNA, 23 nt, synthetic construct
  source 1..23: mol_type = other RNA
tcacgctaaaaggcatcttacaa

SEQ ID NO: 19 - RNA, 23 nt, synthetic construct
  source 1..23: mol_type = other RNA
attgtctgcaatatgaatcccat

SEQ ID NO: 20 - RNA, 23 nt, synthetic construct
  source 1..23: mol_type = other RNA
ctttctaagtagattcttaatcc

SEQ ID NO: 21 - RNA, 23 nt, synthetic construct
  source 1..23: mol_type = other RNA
tcacatttgtaaacgtccttccc

SEQ ID NO: 22 - RNA, 23 nt, synthetic construct
  source 1..23: mol_type = other RNA
aaggcatcttacaaatttcacat

SEQ ID NO: 23 - RNA, 23 nt, synthetic construct
  source 1..23: mol_type = other RNA
gttgctctgaaatttgaacgtct

SEQ ID NO: 24 - RNA, 23 nt, synthetic construct
  source 1..23: mol_type = other RNA
tagattcttaatccatgagtgtt

SEQ ID NO: 25 - RNA, 23 nt, synthetic construct
  source 1..23: mol_type = other RNA
aaattcctctagatgacgttgat

SEQ ID NO: 26 - RNA, 23 nt, synthetic construct
  source 1..23: mol_type = other RNA
agctctctaagtctcctagagaa

SEQ ID NO: 27 - RNA, 23 nt, synthetic construct
  source 1..23: mol_type = other RNA
cttaatccatgagtgttctgtgc

SEQ ID NO: 28 - RNA, 23 nt, synthetic construct
  source 1..23: mol_type = other RNA
ttcaaccgcagcaccctgtcaaa

SEQ ID NO: 29 - RNA, 23 nt, synthetic construct
  source 1..23: mol_type = other RNA
atatcattattcaacactcgatc

SEQ ID NO: 30 - RNA, 23 nt, synthetic construct
  source 1..23: mol_type = other RNA
acgttgataaacaatcgtcatcc

SEQ ID NO: 31 - RNA, 23 nt, synthetic construct
  source 1..23: mol_type = other RNA
aagtctcctagagaaatccatgg

SEQ ID NO: 32 - RNA, 23 nt, synthetic construct
  source 1..23: mol_type = other RNA
ggatctttgagctgcctggaggc

SEQ ID NO: 33 - RNA, 23 nt, synthetic construct
  source 1..23: mol_type = other RNA
tggacagtgagattgctacagtt

SEQ ID NO: 34 - RNA, 23 nt, synthetic construct
  source 1..23: mol_type = other RNA
cattgtttccgtttgtgctcgat

SEQ ID NO: 35 - RNA, 23 nt, synthetic construct
  source 1..23: mol_type = other RNA
aattcctctagatgacgttgata

SEQ ID NO: 36 - RNA, 23 nt, synthetic construct
  source 1..23: mol_type = other RNA
tagccattggattcaaccgcagc

SEQ ID NO: 37 - RNA, 23 nt, synthetic construct
  source 1..23: mol_type = other RNA
tgacgttgataaacaatcgtcat

SEQ ID NO: 38 - RNA, 23 nt, synthetic construct
  source 1..23: mol_type = other RNA
gttagaaagaaggagactccaga

SEQ ID NO: 39 - RNA, 23 nt, synthetic construct
  source 1..23: mol_type = other RNA
aggcatcttacaaatttcacatt

SEQ ID NO: 40 - RNA, 23 nt, synthetic construct
  source 1..23: mol_type = other RNA
gatgaattgtgggagagccgtca

SEQ ID NO: 41 - RNA, 23 nt, synthetic construct
  source 1..23: mol_type = other RNA
tacagttcttgaagactttccca

SEQ ID NO: 42 - RNA, 23 nt, synthetic construct
  source 1..23: mol_type = other RNA
gggatctttgagctgcctggagg

SEQ ID NO: 43 - RNA, 23 nt, synthetic construct
  source 1..23: mol_type = other RNA
gttgataaacaatcgtcatcctc

SEQ ID NO: 44 - RNA, 23 nt, synthetic construct
  source 1..23: mol_type = other RNA
agccattggattcaaccgcagca

SEQ ID NO: 45 - RNA, 23 nt, synthetic construct
  source 1..23: mol_type = other RNA
gacgttgataaacaatcgtcatc

SEQ ID NO: 46 - RNA, 23 nt, synthetic construct
  source 1..23: mol_type = other RNA
gaggctccatagccattggattc

SEQ ID NO: 47 - RNA, 23 nt, synthetic construct
  source 1..23: mol_type = other RNA
cacagctcgcatttataaggcct

SEQ ID NO: 48 - RNA, 23 nt, synthetic construct
  source 1..23: mol_type = other RNA
gaattcccgtttgcttaagtgct

SEQ ID NO: 49 - RNA, 23 nt, synthetic construct
  source 1..23: mol_type = other RNA
ttctaagtagattcttaatccat

SEQ ID NO: 50 - RNA, 23 nt, synthetic construct
  source 1..23: mol_type = other RNA
ctcctgtggacagtgagattgct

SEQ ID NO: 51 - RNA, 23 nt, synthetic construct
  source 1..23: mol_type = other RNA
tcacatcgggagagccgggttag

SEQ ID NO: 52 - RNA, 23 nt, synthetic construct
  source 1..23: mol_type = other RNA
agattcttaatccatgagtgttc

SEQ ID NO: 53 - RNA, 23 nt, synthetic construct
  source 1..23: mol_type = other RNA
aattgtgggagagccgtcatggc

SEQ ID NO: 54 - RNA, 23 nt, synthetic construct
  source 1..23: mol_type = other RNA
atttcacatttgtaaacgtcctt

SEQ ID NO: 55 - RNA, 23 nt, synthetic construct
  source 1..23: mol_type = other RNA
gaattgtgggagagccgtcatgg

SEQ ID NO: 56 - RNA, 23 nt, synthetic construct
  source 1..23: mol_type = other RNA
tgcattgtttccgtttgtgctcg

SEQ ID NO: 57 - RNA, 23 nt, synthetic construct
  source 1..23: mol_type = other RNA
ggcacaggcatagttgcacagct

SEQ ID NO: 58 - RNA, 23 nt, synthetic construct
  source 1..23: mol_type = other RNA
ggtttgccttgcttgcggcgaga

SEQ ID NO: 59 - RNA, 23 nt, synthetic construct
  source 1..23: mol_type = other RNA
tgttctgtgcgtgttgcaagaga

SEQ ID NO: 60 - RNA, 23 nt, synthetic construct
  source 1..23: mol_type = other RNA
gcaaattcctctagatgacgttg

SEQ ID NO: 61 - RNA, 23 nt, synthetic construct
  source 1..23: mol_type = other RNA
tagaaagaaggagactccagaga

SEQ ID NO: 62 - RNA, 23 nt, synthetic construct
  source 1..23: mol_type = other RNA
cacatcgggagagccgggttaga

SEQ ID NO: 63 - RNA, 23 nt, synthetic construct
  source 1..23: mol_type = other RNA
attcccgtttgcttaagtgctgg

SEQ ID NO: 64 - RNA, 23 nt, synthetic construct
  source 1..23: mol_type = other RNA
gccattgcattgtttccgtttgt

SEQ ID NO: 65 - RNA, 23 nt, synthetic construct
  source 1..23: mol_type = other RNA
ctaagtagattcttaatccatga

SEQ ID NO: 66 - RNA, 23 nt, synthetic construct
  source 1..23: mol_type = other RNA
tgcaagttcaagtgcggacgtga

SEQ ID NO: 67 - RNA, 23 nt, synthetic construct
  source 1..23: mol_type = other RNA
cagaagtttatctgctatgtgtt

SEQ ID NO: 68 - RNA, 23 nt, synthetic construct
  source 1..23: mol_type = other RNA
agtgctgcatggagctgagcacc

SEQ ID NO: 69 - RNA, 23 nt, synthetic construct
  source 1..23: mol_type = other RNA
gcagaagtttatctgctatgtgt

SEQ ID NO: 70 - RNA, 23 nt, synthetic construct
  source 1..23: mol_type = other RNA
catgagtgttctgtgcgtgttgc

SEQ ID NO: 71 - RNA, 23 nt, synthetic construct
  source 1..23: mol_type = other RNA
gccattggattcaaccgcagcac

SEQ ID NO: 72 - RNA, 23 nt, synthetic construct
  source 1..23: mol_type = other RNA
agctgcaagttcaagtgcggacg

SEQ ID NO: 73 - RNA, 23 nt, synthetic construct
  source 1..23: mol_type = other RNA
tccatagccattggattcaaccg

SEQ ID NO: 74 - RNA, 23 nt, synthetic construct
  source 1..23: mol_type = other RNA
gacagtgagattgctacagttct

SEQ ID NO: 75 - RNA, 23 nt, synthetic construct
  source 1..23: mol_type = other RNA
ggttcacatcgggagagccgggt

SEQ ID NO: 76 - RNA, 23 nt, synthetic construct
  source 1..23: mol_type = other RNA
tacaaagatggcgcagggaagat

SEQ ID NO: 77 - RNA, 23 nt, synthetic construct
  source 1..23: mol_type = other RNA
ttctaagcagaggctgccattgc

SEQ ID NO: 78 - RNA, 23 nt, synthetic construct
  source 1..23: mol_type = other RNA
ctctgaaatttgaacgtcttgcc

SEQ ID NO: 79 - RNA, 23 nt, synthetic construct
  source 1..23: mol_type = other RNA
tttgagctgggcctgcccgggcc

SEQ ID NO: 80 - RNA, 23 nt, synthetic construct
  source 1..23: mol_type = other RNA
caggcatagttgcacagctcgca

SEQ ID NO: 81 - RNA, 23 nt, synthetic construct
  source 1..23: mol_type = other RNA
attcaaccgcagcaccctgtcaa

SEQ ID NO: 82 - RNA, 23 nt, synthetic construct
  source 1..23: mol_type = other RNA
ggctccatagccattggattcaa

SEQ ID NO: 83 - RNA, 23 nt, synthetic construct
  source 1..23: mol_type = other RNA
ctgggcacaggcatagttgcaca

SEQ ID NO: 84 - RNA, 23 nt, synthetic construct
  source 1..23: mol_type = other RNA
cagctcgcatttataaggccttt

SEQ ID NO: 85 - RNA, 23 nt, synthetic construct
  source 1..23: mol_type = other RNA
tgtcaaaggcactcgggtgatgg

SEQ ID NO: 86 - RNA, 23 nt, synthetic construct
  source 1..23: mol_type = other RNA
ctcgggtgatgggtggccagggc

SEQ ID NO: 87 - RNA, 23 nt, synthetic construct
  source 1..23: mol_type = other RNA
atggcgcagggaagatgaattgt

SEQ ID NO: 88 - RNA, 23 nt, synthetic construct
  source 1..23: mol_type = other RNA
taatacaaagatggcgcagggaa

SEQ ID NO: 89 - RNA, 23 nt, synthetic construct
  source 1..23: mol_type = other RNA
aggcactcgggtgatgggtggcc

SEQ ID NO: 90 - RNA, 23 nt, synthetic construct
  source 1..23: mol_type = other RNA
tgcgtgttgcaagagaaaccatg

SEQ ID NO: 91 - RNA, 23 nt, synthetic construct
  source 1..23: mol_type = other RNA
tctttgagctgcctggaggccgc

SEQ ID NO: 92 - RNA, 23 nt, synthetic construct
  source 1..23: mol_type = other RNA
ccatgcactggtgaatggctgtt

SEQ ID NO: 93 - RNA, 23 nt, synthetic construct
  source 1..23: mol_type = other RNA
ttgccttgcttgcggcgagacat

SEQ ID NO: 94 - RNA, 23 nt, synthetic construct
  source 1..23: mol_type = other RNA
aaccgcagcaccctgtcaaaggc

SEQ ID NO: 95 - RNA, 23 nt, synthetic construct
  source 1..23: mol_type = other RNA
agatggcgcagggaagatgaatt

SEQ ID NO: 96 - RNA, 23 nt, synthetic construct
  source 1..23: mol_type = other RNA
gtagctgctgggctcatctttac

SEQ ID NO: 97 - RNA, 23 nt, synthetic construct
  source 1..23: mol_type = other RNA
agcaccctgtcaaaggcactcgg

SEQ ID NO: 98 - RNA, 23 nt, synthetic construct
  source 1..23: mol_type = other RNA
gtgtcgctgcgtctgccctcttt

SEQ ID NO: 99 - RNA, 23 nt, synthetic construct
  source 1..23: mol_type = other RNA
caaagatggcgcagggaagatga

SEQ ID NO: 100 - RNA, 23 nt, synthetic construct
  source 1..23: mol_type = other RNA
tggttcatcatctgtaagaatgg

SEQ ID NO: 101 - RNA, 23 nt, synthetic construct
  source 1..23: mol_type = other RNA
ctcgcatgacttggacttgaccg

SEQ ID NO: 102 - RNA, 23 nt, synthetic construct
  source 1..23: mol_type = other RNA
ctgtcaaaggcactcgggtgatg

SEQ ID NO: 103 - RNA, 23 nt, synthetic construct
  source 1..23: mol_type = other RNA
ggcaaattcctctagatgacgtt

SEQ ID NO: 104 - RNA, 23 nt, synthetic construct
  source 1..23: mol_type = other RNA
tgggcacaggcatagttgcacag

SEQ ID NO: 105 - RNA, 23 nt, synthetic construct
  source 1..23: mol_type = other RNA
aagatgaattgtgggagagccgt

SEQ ID NO: 106 - RNA, 23 nt, synthetic construct
  source 1..23: mol_type = other RNA
gcgagaattcccgtttgcttaag

SEQ ID NO: 107 - RNA, 23 nt, synthetic construct
  source 1..23: mol_type = other RNA
gggtgatgggtggccagggccat

SEQ ID NO: 108 - RNA, 23 nt, synthetic construct
  source 1..23: mol_type = other RNA
cctttcgcccgtgtggcttctcc

SEQ ID NO: 109 - RNA, 23 nt, synthetic construct
  source 1..23: mol_type = other RNA
gttcacatcgggagagccgggtt

SEQ ID NO: 110 - RNA, 23 nt, synthetic construct
  source 1..23: mol_type = other RNA
tttcgcccgtgtggcttctcctg

SEQ ID NO: 111 - RNA, 23 nt, synthetic construct
  source 1..23: mol_type = other RNA
taagcagaggctgccattgcatt

SEQ ID NO: 112 - RNA, 23 nt, synthetic construct
  source 1..23: mol_type = other RNA
ctcccgttctccgaggagtgctc

SEQ ID NO: 113 - RNA, 23 nt, synthetic construct
  source 1..23: mol_type = other RNA
ctagatgacgttgataaacaatc

SEQ ID NO: 114 - RNA, 23 nt, synthetic construct
  source 1..23: mol_type = other RNA
ggattcaaccgcagcaccctgtc

SEQ ID NO: 115 - RNA, 23 nt, synthetic construct
  source 1..23: mol_type = other RNA
tgtttccgtttgtgctcgataaa

SEQ ID NO: 116 - RNA, 23 nt, synthetic construct
  source 1..23: mol_type = other RNA
ggcggattgcagaggagggaggg

SEQ ID NO: 117 - RNA, 23 nt, synthetic construct
  source 1..23: mol_type = other RNA
cacctagtcctgaagggatacca

SEQ ID NO: 118 - RNA, 23 nt, synthetic construct
  source 1..23: mol_type = other RNA
gagccgggttagaaagaaggaga

SEQ ID NO: 119 - RNA, 23 nt, synthetic construct
  source 1..23: mol_type = other RNA
attgtgggagagccgtcatggct

SEQ ID NO: 120 - RNA, 23 nt, synthetic construct
  source 1..23: mol_type = other RNA
caaccgcagcaccctgtcaaagg

SEQ ID NO: 121 - RNA, 23 nt, synthetic construct
  source 1..23: mol_type = other RNA
cctgaagggataccaacccgcgg

SEQ ID NO: 122 - RNA, 23 nt, synthetic construct
  source 1..23: mol_type = other RNA
gggcacaggcatagttgcacagc

SEQ ID NO: 123 - RNA, 23 nt, synthetic construct
  source 1..23: mol_type = other RNA
cattggattcaaccgcagcaccc

SEQ ID NO: 124 - RNA, 23 nt, synthetic construct
  source 1..23: mol_type = other RNA
ttcccgtttgcttaagtgctggg

SEQ ID NO: 125 - RNA, 23 nt, synthetic construct
  source 1..23: mol_type = other RNA
ctccatagccattggattcaacc

SEQ ID NO: 126 - RNA, 23 nt, synthetic construct
  source 1..23: mol_type = other RNA
tggaaagcgcccttctgccaggc

SEQ ID NO: 127 - RNA, 23 nt, synthetic construct
  source 1..23: mol_type = other RNA
gggcatattctgcactcatccca

SEQ ID NO: 128 - RNA, 23 nt, synthetic construct
  source 1..23: mol_type = other RNA
gccgggttagaaagaaggagact

SEQ ID NO: 129 - RNA, 23 nt, synthetic construct
  source 1..23: mol_type = other RNA
ccattggattcaaccgcagcacc

SEQ ID NO: 130 - RNA, 23 nt, synthetic construct
  source 1..23: mol_type = other RNA
ggttagaaagaaggagactccag

SEQ ID NO: 131 - RNA, 23 nt, synthetic construct
  source 1..23: mol_type = other RNA
cgggtgatgggtggccagggcca

SEQ ID NO: 132 - RNA, 23 nt, synthetic construct
  source 1..23: mol_type = other RNA
agatgaattgtgggagagccgtc

SEQ ID NO: 133 - RNA, 23 nt, synthetic construct
  source 1..23: mol_type = other RNA
ctttcgcccgtgtggcttctcct

SEQ ID NO: 134 - RNA, 23 nt, synthetic construct
  source 1..23: mol_type = other RNA
ggtgatgggtggccagggccatc

SEQ ID NO: 135 - RNA, 23 nt, synthetic construct
  source 1..23: mol_type = other RNA
ccctccagtgcagaagtttatct

SEQ ID NO: 136 - RNA, 23 nt, synthetic construct
  source 1..23: mol_type = other RNA
acatcgggagagccgggttagaa

SEQ ID NO: 137 - RNA, 23 nt, synthetic construct
  source 1..23: mol_type = other RNA
ctctaagtctcctagagaaatcc

SEQ ID NO: 138 - RNA, 23 nt, synthetic construct
  source 1..23: mol_type = other RNA
ggagagccgggttagaaagaagg

SEQ ID NO: 139 - RNA, 23 nt, synthetic construct
  source 1..23: mol_type = other RNA
tcaaccgcagcaccctgtcaaag

SEQ ID NO: 140 - RNA, 23 nt, synthetic construct
  source 1..23: mol_type = other RNA
tcccgttctccgaggagtgctcc

SEQ ID NO: 141 - RNA, 23 nt, synthetic construct
  source 1..23: mol_type = other RNA
tcgggtgatgggtggccagggcc

SEQ ID NO: 142 - RNA, 23 nt, synthetic construct
  source 1..23: mol_type = other RNA
gggcgagaattcccgtttgctta

SEQ ID NO: 143 - RNA, 23 nt, synthetic construct
  source 1..23: mol_type = other RNA
ctagacgtgttccctgccagctc

SEQ ID NO: 144 - RNA, 23 nt, synthetic construct
  source 1..23: mol_type = other RNA
tgcagtaacctttgcatagggct

SEQ ID NO: 145 - RNA, 23 nt, synthetic construct
  source 1..23: mol_type = other RNA
aagatggcgcagggaagatgaat

SEQ ID NO: 146 - RNA, 23 nt, synthetic construct
  source 1..23: mol_type = other RNA
gagagccgggttagaaagaagga

SEQ ID NO: 147 - RNA, 23 nt, synthetic construct
  source 1..23: mol_type = other RNA
caagtgatgtctcggtggtggac

SEQ ID NO: 148 - RNA, 23 nt, synthetic construct
  source 1..23: mol_type = other RNA
tgctacctggctggaatggttgc

SEQ ID NO: 149 - RNA, 23 nt, synthetic construct
  source 1..23: mol_type = other RNA
acaaagatggcgcagggaagatg

SEQ ID NO: 150 - RNA, 23 nt, synthetic construct
  source 1..23: mol_type = other RNA
actcgggtgatgggtggccaggg

SEQ ID NO: 151 - RNA, 23 nt, synthetic construct
  source 1..23: mol_type = other RNA
agtgtcgctgcgtctgccctctt

SEQ ID NO: 152 - RNA, 23 nt, synthetic construct
  source 1..23: mol_type = other RNA
gcgcagggaagatgaattgtggg

SEQ ID NO: 153 - RNA, 23 nt, synthetic construct
  source 1..23: mol_type = other RNA
tcaaaggcactcgggtgatgggt

SEQ ID NO: 154 - RNA, 23 nt, synthetic construct
  source 1..23: mol_type = other RNA
ccatgagtgttctgtgcgtgttg

SEQ ID NO: 155 - RNA, 23 nt, synthetic construct
  source 1..23: mol_type = other RNA
gcctttcgcccgtgtggcttctc

SEQ ID NO: 156 - RNA, 23 nt, synthetic construct
  source 1..23: mol_type = other RNA
gtcaaaggcactcgggtgatggg

SEQ ID NO: 157 - RNA, 23 nt, synthetic construct
  source 1..23: mol_type = other RNA
gtgacgtccctgcgaacttgaac

SEQ ID NO: 158 - RNA, 23 nt, synthetic construct
  source 1..23: mol_type = other RNA
catcgggagagccgggttagaaa

SEQ ID NO: 159 - RNA, 23 nt, synthetic construct
  source 1..23: mol_type = other RNA
ggcgtgctccctccacttcccgt

SEQ ID NO: 160 - RNA, 23 nt, synthetic construct
  source 1..23: mol_type = other RNA
gtttgccttgcttgcggcgagac

SEQ ID NO: 161 - RNA, 23 nt, synthetic construct
  source 1..23: mol_type = other RNA
agacgtgttccctgccagctctc

SEQ ID NO: 162 - RNA, 23 nt, synthetic construct
  source 1..23: mol_type = other RNA
caagagaaaccatgcactggtga

SEQ ID NO: 163 - RNA, 23 nt, synthetic construct
  source 1..23: mol_type = other RNA
actccttctcgagcttgatgcgc

SEQ ID NO: 164 - RNA, 23 nt, synthetic construct
  source 1..23: mol_type = other RNA
gagtctccgaagctaaggaaggg

SEQ ID NO: 165 - RNA, 23 nt, synthetic construct
  source 1..23: mol_type = other RNA
tgataaacaatcgtcatcctctg

SEQ ID NO: 166 - RNA, 23 nt, synthetic construct
  source 1..23: mol_type = other RNA
tgaacgtcaggagtctggatgga

SEQ ID NO: 167 - RNA, 23 nt, synthetic construct
  source 1..23: mol_type = other RNA
tcttcgtcgcaagtgtccctgtg

SEQ ID NO: 168 - RNA, 23 nt, synthetic construct
  source 1..23: mol_type = other RNA
caggttgtaatgacctttggtca

SEQ ID NO: 169 - RNA, 23 nt, synthetic construct
  source 1..23: mol_type = other RNA
ggttgctctgaaatttgaacgtc

SEQ ID NO: 170 - RNA, 23 nt, synthetic construct
  source 1..23: mol_type = other RNA
agtaacctttgcatagggctggg

SEQ ID NO: 171 - RNA, 23 nt, synthetic construct
  source 1..23: mol_type = other RNA
ttcgtcgcaagtgtccctgtggc

SEQ ID NO: 172 - RNA, 23 nt, synthetic construct
  source 1..23: mol_type = other RNA
aacctccacgggattggatgctt

SEQ ID NO: 173 - RNA, 23 nt, synthetic construct
  source 1..23: mol_type = other RNA
tacacgttctccgtgttgggcat

SEQ ID NO: 174 - RNA, 23 nt, synthetic construct
  source 1..23: mol_type = other RNA
atcccatggagaggtggctggga

SEQ ID NO: 175 - RNA, 23 nt, synthetic construct
  source 1..23: mol_type = other RNA
atgaatcccatggagaggtggct

SEQ ID NO: 176 - RNA, 23 nt, synthetic construct
  source 1..23: mol_type = other RNA
cctttgcatagggctgggccggc

SEQ ID NO: 177 - RNA, 23 nt, synthetic construct
  source 1..23: mol_type = other RNA
tcaacactcgatcactgtgccat

SEQ ID NO: 178 - RNA, 23 nt, synthetic construct
  source 1..23: mol_type = other RNA
cgcttatgcttctcgcccaggac

SEQ ID NO: 179 - RNA, 23 nt, synthetic construct
  source 1..23: mol_type = other RNA
ctgcgaacttgaacgtcaggagt

SEQ ID NO: 180 - RNA, 23 nt, synthetic construct
  source 1..23: mol_type = other RNA
atcattattcaacactcgatcac

SEQ ID NO: 181 - RNA, 23 nt, synthetic construct
  source 1..23: mol_type = other RNA
acaatcgtcatcctctggcgtga

SEQ ID NO: 182 - RNA, 23 nt, synthetic construct
  source 1..23: mol_type = other RNA
ggcgtgacctggatgccaacctc

SEQ ID NO: 183 - RNA, 23 nt, synthetic construct
  source 1..23: mol_type = other RNA
ctcgctcttgaacttggccacca

SEQ ID NO: 184 - RNA, 23 nt, synthetic construct
  source 1..23: mol_type = other RNA
gtcgcacaggttgcacttgtagg

SEQ ID NO: 185 - RNA, 23 nt, synthetic construct
  source 1..23: mol_type = other RNA
ccgaagctaaggaagggatcttt

SEQ ID NO: 186 - RNA, 23 nt, synthetic construct
  source 1..23: mol_type = other RNA
cttgaacgtcaggagtctggatg

SEQ ID NO: 187 - RNA, 23 nt, synthetic construct
  source 1..23: mol_type = other RNA
cgagatccctccgtccagctccc

SEQ ID NO: 188 - RNA, 23 nt, synthetic construct
  source 1..23: mol_type = other RNA
cttcgtcgcaagtgtccctgtgg

SEQ ID NO: 189 - RNA, 23 nt, synthetic construct
  source 1..23: mol_type = other RNA
agtctccgaagctaaggaaggga

SEQ ID NO: 190 - RNA, 23 nt, synthetic construct
  source 1..23: mol_type = other RNA
tatgcttctcgcccaggacctgg

SEQ ID NO: 191 - RNA, 23 nt, synthetic construct
  source 1..23: mol_type = other RNA
accaccaggttgctctgaaattt

SEQ ID NO: 192 - RNA, 23 nt, synthetic construct
  source 1..23: mol_type = other RNA
gataaacaatcgtcatcctctgg

SEQ ID NO: 193 - RNA, 23 nt, synthetic construct
  source 1..23: mol_type = other RNA
cgctcttgaacttggccaccacg

SEQ ID NO: 194 - RNA, 23 nt, synthetic construct
  source 1..23: mol_type = other RNA
tttgcatagggctgggccggcct

SEQ ID NO: 195 - RNA, 23 nt, synthetic construct
  source 1..23: mol_type = other RNA
gaatcccatggagaggtggctgg

SEQ ID NO: 196 - RNA, 23 nt, synthetic construct
  source 1..23: mol_type = other RNA
ctcgagcttgatgcgcttagaga

SEQ ID NO: 197 - RNA, 23 nt, synthetic construct
  source 1..23: mol_type = other RNA
ggtgggctagacgtgttccctgc

SEQ ID NO: 198 - RNA, 23 nt, synthetic construct
  source 1..23: mol_type = other RNA
gttcatctggcactgcccacagg

SEQ ID NO: 199 - RNA, 23 nt, synthetic construct
  source 1..23: mol_type = other RNA
tgaatcccatggagaggtggctg

SEQ ID NO: 200 - RNA, 23 nt, synthetic construct
  source 1..23: mol_type = other RNA
agtacacgttctccgtgttgggc

SEQ ID NO: 201 - RNA, 23 nt, synthetic construct
  source 1..23: mol_type = other RNA
ctcgatactgatcctggtattct

SEQ ID NO: 202 - RNA, 23 nt, synthetic construct
  source 1..23: mol_type = other RNA
cactgcccacaggtgaggaggtc

SEQ ID NO: 203 - RNA, 23 nt, synthetic construct
  source 1..23: mol_type = other RNA
agcttgatgcgcttagagaaggg

SEQ ID NO: 204 - RNA, 23 nt, synthetic construct
  source 1..23: mol_type = other RNA
gggaagttcatctggcactgccc

SEQ ID NO: 205 - RNA, 23 nt, synthetic construct
  source 1..23: mol_type = other RNA
gatttgtgcatgtgcgtcttcat

SEQ ID NO: 206 - RNA, 23 nt, synthetic construct
  source 1..23: mol_type = other RNA
ggctagacgtgttccctgccagc

SEQ ID NO: 207 - RNA, 23 nt, synthetic construct
  source 1..23: mol_type = other RNA
ccatggcgggaggctccatagcc

SEQ ID NO: 208 - RNA, 23 nt, synthetic construct
  source 1..23: mol_type = other RNA
caatcgtcatcctctggcgtgac

SEQ ID NO: 209 - RNA, 23 nt, synthetic construct
  source 1..23: mol_type = other RNA
gtaacctttgcatagggctgggc

SEQ ID NO: 210 - RNA, 23 nt, synthetic construct
  source 1..23: mol_type = other RNA
tcccaacgggccgtggtctggtt

SEQ ID NO: 211 - RNA, 23 nt, synthetic construct
  source 1..23: mol_type = other RNA
tcgagcttgatgcgcttagagaa

SEQ ID NO: 212 - RNA, 23 nt, synthetic construct
  source 1..23: mol_type = other RNA
gagtcttcgtcgcaagtgtccct

SEQ ID NO: 213 - RNA, 23 nt, synthetic construct
  source 1..23: mol_type = other RNA
cgtcgcaagtgtccctgtggccc

SEQ ID NO: 214 - RNA, 23 nt, synthetic construct
  source 1..23: mol_type = other RNA
tggatgccaacctccacgggatt

SEQ ID NO: 215 - RNA, 23 nt, synthetic construct
  source 1..23: mol_type = other RNA
gcgcttatgcttctcgcccagga

SEQ ID NO: 216 - RNA, 23 nt, synthetic construct
  source 1..23: mol_type = other RNA
gagtacacgttctccgtgttggg

SEQ ID NO: 217 - RNA, 23 nt, synthetic construct
  source 1..23: mol_type = other RNA
gagctcccaacgggccgtggtct

SEQ ID NO: 218 - RNA, 23 nt, synthetic construct
  source 1..23: mol_type = other RNA
catcctctggcgtgacctggatg

SEQ ID NO: 219 - RNA, 23 nt, synthetic construct
  source 1..23: mol_type = other RNA
gtaatgacctttggtcatctaaa

SEQ ID NO: 220 - RNA, 23 nt, synthetic construct
  source 1..23: mol_type = other RNA
aggtggccgcgcttatgcttctc

SEQ ID NO: 221 - RNA, 23 nt, synthetic construct
  source 1..23: mol_type = other RNA
gtggtcgcacaggttgcacttgt

SEQ ID NO: 222 - RNA, 23 nt, synthetic construct
  source 1..23: mol_type = other RNA
cgtggtcgcacaggttgcacttg

SEQ ID NO: 223 - RNA, 23 nt, synthetic construct
  source 1..23: mol_type = other RNA
ccctgcatgacgtcgggcagggc

SEQ ID NO: 224 - RNA, 23 nt, synthetic construct
  source 1..23: mol_type = other RNA
tgcgaacttgaacgtcaggagtc

SEQ ID NO: 225 - RNA, 23 nt, synthetic construct
  source 1..23: mol_type = other RNA
gcgtggtcgcacaggttgcactt

SEQ ID NO: 226 - RNA, 23 nt, synthetic construct
  source 1..23: mol_type = other RNA
ttatgcttctcgcccaggacctg

SEQ ID NO: 227 - RNA, 23 nt, synthetic construct
  source 1..23: mol_type = other RNA
gtcgcaagtgtccctgtggccct

SEQ ID NO: 228 - RNA, 23 nt, synthetic construct
  source 1..23: mol_type = other RNA
cgatactgatcctggtattctta

SEQ ID NO: 229 - RNA, 23 nt, synthetic construct
  source 1..23: mol_type = other RNA
caacgggccgtggtctggttcat

SEQ ID NO: 230 - RNA, 23 nt, synthetic construct
  source 1..23: mol_type = other RNA
aaatccatggcgggaggctccat

SEQ ID NO: 231 - RNA, 23 nt, synthetic construct
  source 1..23: mol_type = other RNA
aacgggccgtggtctggttcatc

SEQ ID NO: 232 - RNA, 23 nt, synthetic construct
  source 1..23: mol_type = other RNA
agggcggcttgctacctggctgg

SEQ ID NO: 233 - RNA, 23 nt, synthetic construct
  source 1..23: mol_type = other RNA
gaacttgaacgtcaggagtctgg

SEQ ID NO: 234 - RNA, 23 nt, synthetic construct
  source 1..23: mol_type = other RNA
aatcgtcatcctctggcgtgacc

SEQ ID NO: 235 - RNA, 23 nt, synthetic construct
  source 1..23: mol_type = other RNA
atcgtcatcctctggcgtgacct

SEQ ID NO: 236 - RNA, 23 nt, synthetic construct
  source 1..23: mol_type = other RNA
gccaacctccacgggattggatg

SEQ ID NO: 237 - RNA, 23 nt, synthetic construct
  source 1..23: mol_type = other RNA
ctcccaacgggccgtggtctggt

SEQ ID NO: 238 - RNA, 23 nt, synthetic construct
  source 1..23: mol_type = other RNA
gttctcgctcttgaacttggcca

SEQ ID NO: 239 - RNA, 23 nt, synthetic construct
  source 1..23: mol_type = other RNA
tgtaatgacctttggtcatctaa

SEQ ID NO: 240 - RNA, 23 nt, synthetic construct
  source 1..23: mol_type = other RNA
tctccgaagctaaggaagggatc

SEQ ID NO: 241 - RNA, 23 nt, synthetic construct
  source 1..23: mol_type = other RNA
acagcggtgggctagacgtgttc

SEQ ID NO: 242 - RNA, 23 nt, synthetic construct
  source 1..23: mol_type = other RNA
gctcttgaacttggccaccacgg

SEQ ID NO: 243 - RNA, 23 nt, synthetic construct
  source 1..23: mol_type = other RNA
gtctccgaagctaaggaagggat

SEQ ID NO: 244 - RNA, 23 nt, synthetic construct
  source 1..23: mol_type = other RNA
acacgttctccgtgttgggcatc

SEQ ID NO: 245 - RNA, 23 nt, synthetic construct
  source 1..23: mol_type = other RNA
gccggaagcctctctcgatactg

SEQ ID NO: 246 - RNA, 23 nt, synthetic construct
  source 1..23: mol_type = other RNA
gggacagcggtgggctagacgtg

SEQ ID NO: 247 - RNA, 23 nt, synthetic construct
  source 1..23: mol_type = other RNA
gcgtgacctggatgccaacctcc

SEQ ID NO: 248 - RNA, 23 nt, synthetic construct
  source 1..23: mol_type = other RNA
tccatggcgggaggctccatagc

SEQ ID NO: 249 - RNA, 23 nt, synthetic construct
  source 1..23: mol_type = other RNA
gatgccaacctccacgggattgg

SEQ ID NO: 250 - RNA, 23 nt, synthetic construct
  source 1..23: mol_type = other RNA
ctggcgtgacctggatgccaacc

SEQ ID NO: 251 - RNA, 23 nt, synthetic construct
  source 1..23: mol_type = other RNA
tctggagtctccgaagctaagga

SEQ ID NO: 252 - RNA, 23 nt, synthetic construct
  source 1..23: mol_type = other RNA
gacagcggtgggctagacgtgtt

SEQ ID NO: 253 - RNA, 23 nt, synthetic construct
  source 1..23: mol_type = other RNA
ccaacgggccgtggtctggttca

SEQ ID NO: 254 - RNA, 23 nt, synthetic construct
  source 1..23: mol_type = other RNA
cagcggtgggctagacgtgttcc

SEQ ID NO: 255 - RNA, 23 nt, synthetic construct
  source 1..23: mol_type = other RNA
acgtcaggagtctggatggacag

SEQ ID NO: 256 - RNA, 23 nt, synthetic construct
  source 1..23: mol_type = other RNA
ccgagatccctccgtccagctcc

SEQ ID NO: 257 - RNA, 23 nt, synthetic construct
  source 1..23: mol_type = other RNA
tctcgagcttgatgcgcttagag

SEQ ID NO: 258 - RNA, 23 nt, synthetic construct
  source 1..23: mol_type = other RNA
tggcgtgacctggatgccaacct

SEQ ID NO: 259 - RNA, 23 nt, synthetic construct
  source 1..23: mol_type = other RNA
gaagggcggcttgctacctggct

SEQ ID NO: 260 - RNA, 23 nt, synthetic construct
  source 1..23: mol_type = other RNA
ggcggcttgctacctggctggaa

SEQ ID NO: 261 - RNA, 23 nt, synthetic construct
  source 1..23: mol_type = other RNA
gtcttcgtcgcaagtgtccctgt

SEQ ID NO: 262 - RNA, 23 nt, synthetic construct
  source 1..23: mol_type = other RNA
ggtcgcacaggttgcacttgtag

SEQ ID NO: 263 - RNA, 23 nt, synthetic construct
  source 1..23: mol_type = other RNA
cccgagatccctccgtccagctc

SEQ ID NO: 264 - RNA, 23 nt, synthetic construct
  source 1..23: mol_type = other RNA
accaggttgctctgaaatttgaa

SEQ ID NO: 265 - RNA, 23 nt, synthetic construct
  source 1..23: mol_type = other RNA
gtcaggagtctggatggacagag

SEQ ID NO: 266 - RNA, 23 nt, synthetic construct
  source 1..23: mol_type = other RNA
ggatgccaacctccacgggattg

SEQ ID NO: 267 - RNA, 23 nt, synthetic construct
  source 1..23: mol_type = other RNA
gcttatgcttctcgcccaggacc

SEQ ID NO: 268 - RNA, 23 nt, synthetic construct
  source 1..23: mol_type = other RNA
ggccggaagcctctctcgatact

SEQ ID NO: 269 - RNA, 23 nt, synthetic construct
  source 1..23: mol_type = other RNA
ccatgccctgcatgacgtcgggc

SEQ ID NO: 270 - RNA, 23 nt, synthetic construct
  source 1..23: mol_type = other RNA
cgtcaggagtctggatggacaga

SEQ ID NO: 271 - RNA, 23 nt, synthetic construct
  source 1..23: mol_type = other RNA
cgcaagtgtccctgtggccctcg

SEQ ID NO: 272 - RNA, 23 nt, synthetic construct
  source 1..23: mol_type = other RNA
cccaacgggccgtggtctggttc

SEQ ID NO: 273 - RNA, 23 nt, synthetic construct
  source 1..23: mol_type = other RNA
gccaggtggccgcgcttatgctt

SEQ ID NO: 274 - RNA, 23 nt, synthetic construct
  source 1..23: mol_type = other RNA
ggcgggaggctccatagccattg

SEQ ID NO: 275 - RNA, 23 nt, synthetic construct
  source 1..23: mol_type = other RNA
tttatctgctatgtgttcctgtt

SEQ ID NO: 276 - RNA, 23 nt, synthetic construct
  source 1..23: mol_type = other RNA
gtttatctgctatgtgttcctgt

SEQ ID NO: 277 - RNA, 23 nt, synthetic construct
  source 1..23: mol_type = other RNA
agtttatctgctatgtgttcctg

SEQ ID NO: 278 - RNA, 23 nt, synthetic construct
  source 1..23: mol_type = other RNA
aagtttatctgctatgtgttcct

SEQ ID NO: 279 - RNA, 23 nt, synthetic construct
  source 1..23: mol_type = other RNA
gaagtttatctgctatgtgttcc

SEQ ID NO: 280 - RNA, 23 nt, synthetic construct
  source 1..23: mol_type = other RNA
tgtacatgtgtagctgctgggct

SEQ ID NO: 281 - RNA, 23 nt, synthetic construct
  source 1..23: mol_type = other RNA
gttgtacatgtgtagctgctggg

SEQ ID NO: 282 - RNA, 23 nt, synthetic construct
  source 1..23: mol_type = other RNA
aagttgtacatgtgtagctgctg

SEQ ID NO: 283 - RNA, 23 nt, synthetic construct
  source 1..23: mol_type = other RNA
gcaagttgtacatgtgtagctgc

SEQ ID NO: 284 - RNA, 23 nt, synthetic construct
  source 1..23: mol_type = other RNA
ttgcaagttgtacatgtgtagct

SEQ ID NO: 285 - RNA, 23 nt, synthetic construct
  source 1..23: mol_type = other RNA
tttgcaagttgtacatgtgtagc

SEQ ID NO: 286 - RNA, 23 nt, synthetic construct
  source 1..23: mol_type = other RNA
atgtttgcaagttgtacatgtgt

SEQ ID NO: 287 - RNA, 23 nt, synthetic construct
  source 1..23: mol_type = other RNA
gctgtttgcaagttgtacatgtg

SEQ ID NO: 288 - RNA, 23 nt, synthetic construct
  source 1..23: mol_type = other RNA
ggctgtttgcaagttgtacatgt

SEQ ID NO: 289 - RNA, 23 nt, synthetic construct
  source 1..23: mol_type = other RNA
tggctgtttgcaagttgtacatg

SEQ ID NO: 290 - RNA, 23 nt, synthetic construct
  source 1..23: mol_type = other RNA
atggctgtttgcaagttgtacat

SEQ ID NO: 291 - RNA, 23 nt, synthetic construct
  source 1..23: mol_type = other RNA
aatggctgtttgcaagttgtaca

SEQ ID NO: 292 - RNA, 23 nt, synthetic construct
  source 1..23: mol_type = other RNA
gaatggctgtttgcaagttgtac

SEQ ID NO: 293 - RNA, 23 nt, synthetic construct
  source 1..23: mol_type = other RNA
tgaatggctgtttgcaagttgta

SEQ ID NO: 294 - RNA, 23 nt, synthetic construct
  source 1..23: mol_type = other RNA
gtgaatggctgtttgcaagttgt

SEQ ID NO: 295 - RNA, 23 nt, synthetic construct
  source 1..23: mol_type = other RNA
ggtgaatggctgtttgcaagttg

SEQ ID NO: 296 - RNA, 23 nt, synthetic construct
  source 1..23: mol_type = other RNA
tggtgaatggctgtttgcaagtt

SEQ ID NO: 297 - RNA, 23 nt, synthetic construct
  source 1..23: mol_type = other RNA
atggtgaatggctgtttgcaagt

SEQ ID NO: 298 - RNA, 23 nt, synthetic construct
  source 1..23: mol_type = other RNA
actggtgaatggctgtttgcaag

SEQ ID NO: 299 - RNA, 23 nt, synthetic construct
  source 1..23: mol_type = other RNA
cactggtgaatggctgtttgcaa

SEQ ID NO: 300 - RNA, 23 nt, synthetic construct
  source 1..23: mol_type = other RNA
gcactggtgaatggctgtttgca

SEQ ID NO: 301 - RNA, 23 nt, synthetic construct
  source 1..23: mol_type = other RNA
tgcactggtgaatggctgtttgc

SEQ ID NO: 302 - RNA, 23 nt, synthetic construct
  source 1..23: mol_type = other RNA
atgcactggtgaatggctgtttg

SEQ ID NO: 303 - RNA, 23 nt, synthetic construct
  source 1..23: mol_type = other RNA
aatgcactggtgaatggctgttt

SEQ ID NO: 304 - RNA, 23 nt, synthetic construct
  source 1..23: mol_type = other RNA
acatgcactggtgaatggctgtt

SEQ ID NO: 305 - RNA, 23 nt, synthetic construct
  source 1..23: mol_type = other RNA
accatgcactggtgaatggctgt

SEQ ID NO: 306 - RNA, 23 nt, synthetic construct
  source 1..23: mol_type = other RNA
aaccatgcactggtgaatggctg

SEQ ID NO: 307 - RNA, 23 nt, synthetic construct
  source 1..23: mol_type = other RNA
aaaccatgcactggtgaatggct

SEQ ID NO: 308 - RNA, 23 nt, synthetic construct
  source 1..23: mol_type = other RNA
gaaaccatgcactggtgaatggc

SEQ ID NO: 309 - RNA, 23 nt, synthetic construct
  source 1..23: mol_type = other RNA
agaaaccatgcactggtgaatgg

SEQ ID NO: 310 - RNA, 23 nt, synthetic construct
  source 1..23: mol_type = other RNA
gagaaaccatgcactggtgaatg

SEQ ID NO: 311 - RNA, 23 nt, synthetic construct
  source 1..23: mol_type = other RNA
agagaaaccatgcactggtgaat

SEQ ID NO: 312 - RNA, 23 nt, synthetic construct
  source 1..23: mol_type = other RNA
aagagaaaccatgcactggtgaa

SEQ ID NO: 313 - RNA, 23 nt, synthetic construct
  source 1..23: mol_type = other RNA
aaagagaaaccatgcactggtga

SEQ ID NO: 314 - RNA, 23 nt, synthetic construct
  source 1..23: mol_type = other RNA
gtgcgtgttgcaagagaaaccat

SEQ ID NO: 315 - RNA, 23 nt, synthetic construct
  source 1..23: mol_type = other RNA
tgtgcgtgttgcaagagaaacca

SEQ ID NO: 316 - RNA, 23 nt, synthetic construct
  source 1..23: mol_type = other RNA
tctgtgcgtgttgcaagagaaac

SEQ ID NO: 317 - RNA, 23 nt, synthetic construct
  source 1..23: mol_type = other RNA
ttctgtgcgtgttgcaagagaaa

SEQ ID NO: 318 - RNA, 23 nt, synthetic construct
  source 1..23: mol_type = other RNA
gtgttctgtgcgtgttgcaagag

SEQ ID NO: 319 - RNA, 23 nt, synthetic construct
  source 1..23: mol_type = other RNA
agtgttctgtgcgtgttgcaaga

SEQ ID NO: 320 - RNA, 23 nt, synthetic construct
  source 1..23: mol_type = other RNA
tgagtgttctgtgcgtgttgcaa

SEQ ID NO: 321 - RNA, 23 nt, synthetic construct
  source 1..23: mol_type = other RNA
atgagtgttctgtgcgtgttgca

SEQ ID NO: 322 - RNA, 23 nt, synthetic construct
  source 1..23: mol_type = other RNA
acatgagtgttctgtgcgtgttg

SEQ ID NO: 323 - RNA, 23 nt, synthetic construct
  source 1..23: mol_type = other RNA
tccatgagtgttctgtgcgtgtt

SEQ ID NO: 324 - RNA, 23 nt, synthetic construct
  source 1..23: mol_type = other RNA
atccatgagtgttctgtgcgtgt

SEQ ID NO: 325 - RNA, 23 nt, synthetic construct
  source 1..23: mol_type = other RNA
aatccatgagtgttctgtgcgtg

SEQ ID NO: 326 - RNA, 23 nt, synthetic construct
  source 1..23: mol_type = other RNA
taatccatgagtgttctgtgcgt

SEQ ID NO: 327 - RNA, 23 nt, synthetic construct
  source 1..23: mol_type = other RNA
ttaatccatgagtgttctgtgcg

SEQ ID NO: 328 - RNA, 23 nt, synthetic construct
  source 1..23: mol_type = other RNA
attaatccatgagtgttctgtgc

SEQ ID NO: 329 - RNA, 23 nt, synthetic construct
  source 1..23: mol_type = other RNA
tcttaatccatgagtgttctgtg

SEQ ID NO: 330 - RNA, 23 nt, synthetic construct
  source 1..23: mol_type = other RNA
ttcttaatccatgagtgttctgt

SEQ ID NO: 331 - RNA, 23 nt, synthetic construct
  source 1..23: mol_type = other RNA
attcttaatccatgagtgttctg

SEQ ID NO: 332 - RNA, 23 nt, synthetic construct
  source 1..23: mol_type = other RNA
gattcttaatccatgagtgttct

SEQ ID NO: 333 - RNA, 23 nt, synthetic construct
  source 1..23: mol_type = other RNA
gctttctaagtagattcttaatc

SEQ ID NO: 334 - RNA, 23 nt, synthetic construct
  source 1..23: mol_type = other RNA
agtcctgaagggataccaacccg

SEQ ID NO: 335 - RNA, 23 nt, synthetic construct
  source 1..23: mol_type = other RNA
tagtcctgaagggataccaaccc

SEQ ID NO: 336 - RNA, 23 nt, synthetic construct
  source 1..23: mol_type = other RNA
atagtcctgaagggataccaacc

SEQ ID NO: 337 - RNA, 23 nt, synthetic construct
  source 1..23: mol_type = other RNA
actagtcctgaagggataccaac

SEQ ID NO: 338 - RNA, 23 nt, synthetic construct
  source 1..23: mol_type = other RNA
acctagtcctgaagggataccaa

SEQ ID NO: 339 - RNA, 23 nt, synthetic construct
  source 1..23: mol_type = other RNA
tgcacctagtcctgaagggatac

SEQ ID NO: 340 - RNA, 23 nt, synthetic construct
  source 1..23: mol_type = other RNA
ttctgcacctagtcctgaaggga

SEQ ID NO: 341 - RNA, 23 nt, synthetic construct
  source 1..23: mol_type = other RNA
aattctgcacctagtcctgaagg

SEQ ID NO: 342 - RNA, 23 nt, synthetic construct
  source 1..23: mol_type = other RNA
acattctgcacctagtcctgaag

SEQ ID NO: 343 - RNA, 23 nt, synthetic construct
  source 1..23: mol_type = other RNA
gacattctgcacctagtcctgaa

SEQ ID NO: 344 - RNA, 23 nt, synthetic construct
  source 1..23: mol_type = other RNA
ggacattctgcacctagtcctga

SEQ ID NO: 345 - RNA, 23 nt, synthetic construct
  source 1..23: mol_type = other RNA
aggacattctgcacctagtcctg

SEQ ID NO: 346 - RNA, 23 nt, synthetic construct
  source 1..23: mol_type = other RNA
aaggacattctgcacctagtcct

SEQ ID NO: 347 - RNA, 23 nt, synthetic construct
  source 1..23: mol_type = other RNA
tatgaatcccatggagaggtggc

SEQ ID NO: 348 - RNA, 23 nt, synthetic construct
  source 1..23: mol_type = other RNA
atatgaatcccatggagaggtgg

SEQ ID NO: 349 - RNA, 23 nt, synthetic construct
  source 1..23: mol_type = other RNA
aatatgaatcccatggagaggtg

SEQ ID NO: 350 - RNA, 23 nt, synthetic construct
  source 1..23: mol_type = other RNA
aaatatgaatcccatggagaggt

SEQ ID NO: 351 - RNA, 23 nt, synthetic construct
  source 1..23: mol_type = other RNA
gcaatatgaatcccatggagagg

SEQ ID NO: 352 - RNA, 23 nt, synthetic construct
  source 1..23: mol_type = other RNA
tgcaatatgaatcccatggagag

SEQ ID NO: 353 - RNA, 23 nt, synthetic construct
  source 1..23: mol_type = other RNA
atgcaatatgaatcccatggaga

SEQ ID NO: 354 - RNA, 23 nt, synthetic construct
  source 1..23: mol_type = other RNA
tctgcaatatgaatcccatggag

SEQ ID NO: 355 - RNA, 23 nt, synthetic construct
  source 1..23: mol_type = other RNA
gtctgcaatatgaatcccatgga

SEQ ID NO: 356 - RNA, 23 nt, synthetic construct
  source 1..23: mol_type = other RNA
tgtctgcaatatgaatcccatgg

SEQ ID NO: 357 - RNA, 23 nt, synthetic construct
  source 1..23: mol_type = other RNA
ttgtctgcaatatgaatcccatg

SEQ ID NO: 358 - RNA, 23 nt, synthetic construct
  source 1..23: mol_type = other RNA
tattgtctgcaatatgaatccca

SEQ ID NO: 359 - RNA, 23 nt, synthetic construct
  source 1..23: mol_type = other RNA
ttattgtctgcaatatgaatccc

SEQ ID NO: 360 - RNA, 23 nt, synthetic construct
  source 1..23: mol_type = other RNA
gttattgtctgcaatatgaatcc

SEQ ID NO: 361 - RNA, 23 nt, synthetic construct
  source 1..23: mol_type = other RNA
ggttattgtctgcaatatgaatc

SEQ ID NO: 362 - RNA, 23 nt, synthetic construct
  source 1..23: mol_type = other RNA
gggttattgtctgcaatatgaat

SEQ ID NO: 363 - RNA, 23 nt, synthetic construct
  source 1..23: mol_type = other RNA
ggtattcttagcaggttaaaggg

SEQ ID NO: 364 - RNA, 23 nt, synthetic construct
  source 1..23: mol_type = other RNA
tggtattcttagcaggttaaagg

SEQ ID NO: 365 - RNA, 23 nt, synthetic construct
  source 1..23: mol_type = other RNA
atggtattcttagcaggttaaag

SEQ ID NO: 366 - RNA, 23 nt, synthetic construct
  source 1..23: mol_type = other RNA
actggtattcttagcaggttaaa

SEQ ID NO: 367 - RNA, 23 nt, synthetic construct
  source 1..23: mol_type = other RNA
tcctggtattcttagcaggttaa

SEQ ID NO: 368 - RNA, 23 nt, synthetic construct
  source 1..23: mol_type = other RNA
atcctggtattcttagcaggtta

SEQ ID NO: 369 - RNA, 23 nt, synthetic construct
  source 1..23: mol_type = other RNA
gatcctggtattcttagcaggtt

SEQ ID NO: 370 - RNA, 23 nt, synthetic construct
  source 1..23: mol_type = other RNA
tgatcctggtattcttagcaggt

SEQ ID NO: 371 - RNA, 23 nt, synthetic construct
  source 1..23: mol_type = other RNA
atgatcctggtattcttagcagg

SEQ ID NO: 372 - RNA, 23 nt, synthetic construct
  source 1..23: mol_type = other RNA
actgatcctggtattcttagcag

SEQ ID NO: 373 - RNA, 23 nt, synthetic construct
  source 1..23: mol_type = other RNA
tactgatcctggtattcttagca

SEQ ID NO: 374 - RNA, 23 nt, synthetic construct
  source 1..23: mol_type = other RNA
atactgatcctggtattcttagc

SEQ ID NO: 375 - RNA, 23 nt, synthetic construct
  source 1..23: mol_type = other RNA
gatactgatcctggtattcttag

SEQ ID NO: 376 - RNA, 23 nt, synthetic construct
  source 1..23: mol_type = other RNA
agatactgatcctggtattctta

SEQ ID NO: 377 - RNA, 23 nt, synthetic construct
  source 1..23: mol_type = other RNA
tcgatactgatcctggtattctt

SEQ ID NO: 378 - RNA, 23 nt, synthetic construct
  source 1..23: mol_type = other RNA
atcgatactgatcctggtattct

SEQ ID NO: 379 - RNA, 23 nt, synthetic construct
  source 1..23: mol_type = other RNA
tctcgatactgatcctggtattc

SEQ ID NO: 380 - RNA, 23 nt, synthetic construct
  source 1..23: mol_type = other RNA
atctcgatactgatcctggtatt

SEQ ID NO: 381 - RNA, 23 nt, synthetic construct
  source 1..23: mol_type = other RNA
tctctcgatactgatcctggtat

SEQ ID NO: 382 - RNA, 23 nt, synthetic construct
  source 1..23: mol_type = other RNA
atctctcgatactgatcctggta

SEQ ID NO: 383 - RNA, 23 nt, synthetic construct
  source 1..23: mol_type = other RNA
actctctcgatactgatcctggt

SEQ ID NO: 384 - RNA, 23 nt, synthetic construct
  source 1..23: mol_type = other RNA
gcctctctcgatactgatcctgg

SEQ ID NO: 385 - RNA, 23 nt, synthetic construct
  source 1..23: mol_type = other RNA
ggaaagcgcccttctgccaggcc

SEQ ID NO: 386 - RNA, 23 nt, synthetic construct
  source 1..23: mol_type = other RNA
gtgggtggaaagcgcccttctgc

SEQ ID NO: 387 - RNA, 23 nt, synthetic construct
  source 1..23: mol_type = other RNA
agtgggtggaaagcgcccttctg

SEQ ID NO: 388 - RNA, 23 nt, synthetic construct
  source 1..23: mol_type = other RNA
tctcggtggtggactaaacaggg

SEQ ID NO: 389 - RNA, 23 nt, synthetic construct
  source 1..23: mol_type = other RNA
gtctcggtggtggactaaacagg

SEQ ID NO: 390 - RNA, 23 nt, synthetic construct
  source 1..23: mol_type = other RNA
tgtctcggtggtggactaaacag

SEQ ID NO: 391 - RNA, 23 nt, synthetic construct
  source 1..23: mol_type = other RNA
atgtctcggtggtggactaaaca

SEQ ID NO: 392 - RNA, 23 nt, synthetic construct
  source 1..23: mol_type = other RNA
gatgtctcggtggtggactaaac

SEQ ID NO: 393 - RNA, 23 nt, synthetic construct
  source 1..23: mol_type = other RNA
tgatgtctcggtggtggactaaa

SEQ ID NO: 394 - RNA, 23 nt, synthetic construct
  source 1..23: mol_type = other RNA
gtgatgtctcggtggtggactaa

SEQ ID NO: 395 - RNA, 23 nt, synthetic construct
  source 1..23: mol_type = other RNA
agtgatgtctcggtggtggacta

SEQ ID NO: 396 - RNA, 23 nt, synthetic construct
  source 1..23: mol_type = other RNA
aaagtgatgtctcggtggtggac

SEQ ID NO: 397 - RNA, 23 nt, synthetic construct
  source 1..23: mol_type = other RNA
acaagtgatgtctcggtggtgga

SEQ ID NO: 398 - RNA, 23 nt, synthetic construct
  source 1..23: mol_type = other RNA
tccaagtgatgtctcggtggtgg

SEQ ID NO: 399 - RNA, 23 nt, synthetic construct
  source 1..23: mol_type = other RNA
gtccaagtgatgtctcggtggtg

SEQ ID NO: 400 - RNA, 23 nt, synthetic construct
  source 1..23: mol_type = other RNA
acattggattcaaccgcagcacc

SEQ ID NO: 401 - RNA, 23 nt, synthetic construct
  source 1..23: mol_type = other RNA
agaaatccatggcgggaggctcc

SEQ ID NO: 402 - RNA, 23 nt, synthetic construct
  source 1..23: mol_type = other RNA
gagaaatccatggcgggaggctc

SEQ ID NO: 403 - RNA, 23 nt, synthetic construct
  source 1..23: mol_type = other RNA
tagagaaatccatggcgggaggc

SEQ ID NO: 404 - RNA, 23 nt, synthetic construct
  source 1..23: mol_type = other RNA
atagagaaatccatggcgggagg

SEQ ID NO: 405 - RNA, 23 nt, synthetic construct
  source 1..23: mol_type = other RNA
actagagaaatccatggcgggag

SEQ ID NO: 406 - RNA, 23 nt, synthetic construct
  source 1..23: mol_type = other RNA
atcctagagaaatccatggcggg

SEQ ID NO: 407 - RNA, 23 nt, synthetic construct
  source 1..23: mol_type = other RNA
gccagctctctaagtctcctaga

SEQ ID NO: 408 - RNA, 23 nt, synthetic construct
  source 1..23: mol_type = other RNA
tgccagctctctaagtctcctag

SEQ ID NO: 409 - RNA, 23 nt, synthetic construct
  source 1..23: mol_type = other RNA
gcggtgggctagacgtgttccct

SEQ ID NO: 410 - RNA, 23 nt, synthetic construct
  source 1..23: mol_type = other RNA
ttgcagtaacctttgcatagggc

SEQ ID NO: 411 - RNA, 23 nt, synthetic construct
  source 1..23: mol_type = other RNA
gttgcagtaacctttgcataggg

SEQ ID NO: 412 - RNA, 23 nt, synthetic construct
  source 1..23: mol_type = other RNA
ggttgcagtaacctttgcatagg

SEQ ID NO: 413 - RNA, 23 nt, synthetic construct
  source 1..23: mol_type = other RNA
atggttgcagtaacctttgcata

SEQ ID NO: 414 - RNA, 23 nt, synthetic construct
  source 1..23: mol_type = other RNA
aatggttgcagtaacctttgcat

SEQ ID NO: 415 - RNA, 23 nt, synthetic construct
  source 1..23: mol_type = other RNA
gaatggttgcagtaacctttgca

SEQ ID NO: 416 - RNA, 23 nt, synthetic construct
  source 1..23: mol_type = other RNA
ggaatggttgcagtaacctttgc

SEQ ID NO: 417 - RNA, 23 nt, synthetic construct
  source 1..23: mol_type = other RNA
tggaatggttgcagtaacctttg

SEQ ID NO: 418 - RNA, 23 nt, synthetic construct
  source 1..23: mol_type = other RNA
atggaatggttgcagtaaccttt

SEQ ID NO: 419 - RNA, 23 nt, synthetic construct
  source 1..23: mol_type = other RNA
gctggaatggttgcagtaacctt

SEQ ID NO: 420 - RNA, 23 nt, synthetic construct
  source 1..23: mol_type = other RNA
atggctggaatggttgcagtaac

SEQ ID NO: 421 - RNA, 23 nt, synthetic construct
  source 1..23: mol_type = other RNA
agcatgacttggacttgaccggg

SEQ ID NO: 422 - RNA, 23 nt, synthetic construct
  source 1..23: mol_type = other RNA
tcgcatgacttggacttgaccgg

SEQ ID NO: 423 - RNA, 23 nt, synthetic construct
  source 1..23: mol_type = other RNA
atcgcatgacttggacttgaccg

SEQ ID NO: 424 - RNA, 23 nt, synthetic construct
  source 1..23: mol_type = other RNA
actcgcatgacttggacttgacc

SEQ ID NO: 425 - RNA, 23 nt, synthetic construct
  source 1..23: mol_type = other RNA
aactcgcatgacttggacttgac

SEQ ID NO: 426 - RNA, 23 nt, synthetic construct
  source 1..23: mol_type = other RNA
gaactcgcatgacttggacttga

SEQ ID NO: 427 - RNA, 23 nt, synthetic construct
  source 1..23: mol_type = other RNA
agaactcgcatgacttggacttg

SEQ ID NO: 428 - RNA, 23 nt, synthetic construct
  source 1..23: mol_type = other RNA
aagaactcgcatgacttggactt

SEQ ID NO: 429 - RNA, 23 nt, synthetic construct
  source 1..23: mol_type = other RNA
gcagaactcgcatgacttggact

SEQ ID NO: 430 - RNA, 23 nt, synthetic construct
  source 1..23: mol_type = other RNA
agcagaactcgcatgacttggac

SEQ ID NO: 431 - RNA, 23 nt, synthetic construct
  source 1..23: mol_type = other RNA
acgcagaactcgcatgacttgga

SEQ ID NO: 432 - RNA, 23 nt, synthetic construct
  source 1..23: mol_type = other RNA
tgccgcagaactcgcatgacttg

SEQ ID NO: 433 - RNA, 23 nt, synthetic construct
  source 1..23: mol_type = other RNA
ttgccgcagaactcgcatgactt

SEQ ID NO: 434 - RNA, 23 nt, synthetic construct
  source 1..23: mol_type = other RNA
attgccgcagaactcgcatgact

SEQ ID NO: 435 - RNA, 23 nt, synthetic construct
  source 1..23: mol_type = other RNA
acgtcttgccgcagaactcgcat

SEQ ID NO: 436 - RNA, 23 nt, synthetic construct
  source 1..23: mol_type = other RNA
aacgtcttgccgcagaactcgca

SEQ ID NO: 437 - RNA, 23 nt, synthetic construct
  source 1..23: mol_type = other RNA
gaacgtcttgccgcagaactcgc

SEQ ID NO: 438 - RNA, 23 nt, synthetic construct
  source 1..23: mol_type = other RNA
tgaacgtcttgccgcagaactcg

SEQ ID NO: 439 - RNA, 23 nt, synthetic construct
  source 1..23: mol_type = other RNA
ttgaacgtcttgccgcagaactc

SEQ ID NO: 440 - RNA, 23 nt, synthetic construct
  source 1..23: mol_type = other RNA
tttgaacgtcttgccgcagaact

SEQ ID NO: 441 - RNA, 23 nt, synthetic construct
  source 1..23: mol_type = other RNA
atttgaacgtcttgccgcagaac

SEQ ID NO: 442 - RNA, 23 nt, synthetic construct
  source 1..23: mol_type = other RNA
aatttgaacgtcttgccgcagaa

SEQ ID NO: 443 - RNA, 23 nt, synthetic construct
  source 1..23: mol_type = other RNA
aaatttgaacgtcttgccgcaga

SEQ ID NO: 444 - RNA, 23 nt, synthetic construct
  source 1..23: mol_type = other RNA
gaaatttgaacgtcttgccgcag

SEQ ID NO: 445 - RNA, 23 nt, synthetic construct
  source 1..23: mol_type = other RNA
tcgtcggacttgaccgtcatggg

SEQ ID NO: 446 - RNA, 23 nt, synthetic construct
  source 1..23: mol_type = other RNA
aacttggccaccacggacttgag

SEQ ID NO: 447 - RNA, 23 nt, synthetic construct
  source 1..23: mol_type = other RNA
gaacttggccaccacggacttga

SEQ ID NO: 448 - RNA, 23 nt, synthetic construct
  source 1..23: mol_type = other RNA
attgaacttggccaccacggact

SEQ ID NO: 449 - RNA, 23 nt, synthetic construct
  source 1..23: mol_type = other RNA
tcttcctcgtcgtcctcctcttc

SEQ ID NO: 450 - RNA, 23 nt, synthetic construct
  source 1..23: mol_type = other RNA
atcttcctcgtcgtcctcctctt

SEQ ID NO: 451 - RNA, 23 nt, synthetic construct
  source 1..23: mol_type = other RNA
atctcgctctccgtcagctcctc

SEQ ID NO: 452 - RNA, 23 nt, synthetic construct
  source 1..23: mol_type = other RNA
acctctcgctctccgtcagctcc

SEQ ID NO: 453 - RNA, 23 nt, synthetic construct
  source 1..23: mol_type = other RNA
accctctcgctctccgtcagctc

SEQ ID NO: 454 - RNA, 23 nt, synthetic construct
  source 1..23: mol_type = other RNA
aaccctctcgctctccgtcagct

SEQ ID NO: 455 - RNA, 23 nt, synthetic construct
  source 1..23: mol_type = other RNA
gcctcgctgaagtgctgcatgga

SEQ ID NO: 456 - RNA, 23 nt, synthetic construct
  source 1..23: mol_type = other RNA
aggcctcgctgaagtgctgcatg

SEQ ID NO: 457 - RNA, 23 nt, synthetic construct
  source 1..23: mol_type = other RNA
actggtggaaggcctcgctgaag

SEQ ID NO: 458 - RNA, 23 nt, synthetic construct
  source 1..23: mol_type = other RNA
aagtgccatcgtctatgcggtcc

SEQ ID NO: 459 - RNA, 23 nt, synthetic construct
  source 1..23: mol_type = other RNA
aacagtgccatcgtctatgcggt

SEQ ID NO: 460 - RNA, 23 nt, synthetic construct
  source 1..23: mol_type = other RNA
ttaacagtgccatcgtctatgcg

SEQ ID NO: 461 - RNA, 23 nt, synthetic construct
  source 1..23: mol_type = other RNA
gaagggatctttgagctgcctgg

SEQ ID NO: 462 - RNA, 23 nt, synthetic construct
  source 1..23: mol_type = other RNA
ggaagggatctttgagctgcctg

SEQ ID NO: 463 - RNA, 23 nt, synthetic construct
  source 1..23: mol_type = other RNA
aggaagggatctttgagctgcct

SEQ ID NO: 464 - RNA, 23 nt, synthetic construct
  source 1..23: mol_type = other RNA
gcgattgtctggagtctccgaag

SEQ ID NO: 465 - RNA, 23 nt, synthetic construct
  source 1..23: mol_type = other RNA
ggcgattgtctggagtctccgaa

SEQ ID NO: 466 - RNA, 23 nt, synthetic construct
  source 1..23: mol_type = other RNA
aggcgattgtctggagtctccga

SEQ ID NO: 467 - RNA, 23 nt, synthetic construct
  source 1..23: mol_type = other RNA
aaggcgattgtctggagtctccg

SEQ ID NO: 468 - RNA, 23 nt, synthetic construct
  source 1..23: mol_type = other RNA
aaaggcgattgtctggagtctcc

SEQ ID NO: 469 - RNA, 23 nt, synthetic construct
  source 1..23: mol_type = other RNA
aaaaggcgattgtctggagtctc

SEQ ID NO: 470 - RNA, 23 nt, synthetic construct
  source 1..23: mol_type = other RNA
aaaaaggcgattgtctggagtct

SEQ ID NO: 471 - RNA, 23 nt, synthetic construct
  source 1..23: mol_type = other RNA
gcaaaaggcgattgtctggagtc

SEQ ID NO: 472 - RNA, 23 nt, synthetic construct
  source 1..23: mol_type = other RNA
aggcaaaaggcgattgtctggag

SEQ ID NO: 473 - RNA, 23 nt, synthetic construct
  source 1..23: mol_type = other RNA
gaggcaaaaggcgattgtctgga

SEQ ID NO: 474 - RNA, 23 nt, synthetic construct
  source 1..23: mol_type = other RNA
actcacaagtgtcgctgcgtctg

SEQ ID NO: 475 - RNA, 23 nt, synthetic construct
  source 1..23: mol_type = other RNA
gtactcacaagtgtcgctgcgtc

SEQ ID NO: 476 - RNA, 23 nt, synthetic construct
  source 1..23: mol_type = other RNA
agtactcacaagtgtcgctgcgt

SEQ ID NO: 477 - RNA, 23 nt, synthetic construct
  source 1..23: mol_type = other RNA
aagtactcacaagtgtcgctgcg

SEQ ID NO: 478 - RNA, 23 nt, synthetic construct
  source 1..23: mol_type = other RNA
accacagtactcacaagtgtcgc

SEQ ID NO: 479 - RNA, 23 nt, synthetic construct
  source 1..23: mol_type = other RNA
tcccacagtactcacaagtgtcg

SEQ ID NO: 480 - RNA, 23 nt, synthetic construct
  source 1..23: mol_type = other RNA
ttcccacagtactcacaagtgtc

SEQ ID NO: 481 - RNA, 23 nt, synthetic construct
  source 1..23: mol_type = other RNA
tttcccacagtactcacaagtgt

SEQ ID NO: 482 - RNA, 23 nt, synthetic construct
  source 1..23: mol_type = other RNA
atttcccacagtactcacaagtg

SEQ ID NO: 483 - RNA, 23 nt, synthetic construct
  source 1..23: mol_type = other RNA
actttcccacagtactcacaagt

SEQ ID NO: 484 - RNA, 23 nt, synthetic construct
  source 1..23: mol_type = other RNA
gactttcccacagtactcacaag

SEQ ID NO: 485 - RNA, 23 nt, synthetic construct
  source 1..23: mol_type = other RNA
agactttcccacagtactcacaa

SEQ ID NO: 486 - RNA, 23 nt, synthetic construct
  source 1..23: mol_type = other RNA
attgctacagttcttgaagactt

SEQ ID NO: 487 - RNA, 23 nt, synthetic construct
  source 1..23: mol_type = other RNA
gattgctacagttcttgaagact

SEQ ID NO: 488 - RNA, 23 nt, synthetic construct
  source 1..23: mol_type = other RNA
agattgctacagttcttgaagac

SEQ ID NO: 489 - RNA, 23 nt, synthetic construct
  source 1..23: mol_type = other RNA
gagattgctacagttcttgaaga

SEQ ID NO: 490 - RNA, 23 nt, synthetic construct
  source 1..23: mol_type = other RNA
tgagattgctacagttcttgaag

SEQ ID NO: 491 - RNA, 23 nt, synthetic construct
  source 1..23: mol_type = other RNA
gtgagattgctacagttcttgaa

SEQ ID NO: 492 - RNA, 23 nt, synthetic construct
  source 1..23: mol_type = other RNA
agtgagattgctacagttcttga

SEQ ID NO: 493 - RNA, 23 nt, synthetic construct
  source 1..23: mol_type = other RNA
atttcgcccgtgtggcttctcct

SEQ ID NO: 494 - RNA, 23 nt, synthetic construct
  source 1..23: mol_type = other RNA
aggcctttcgcccgtgtggcttc

SEQ ID NO: 495 - RNA, 23 nt, synthetic construct
  source 1..23: mol_type = other RNA
aaggcctttcgcccgtgtggctt

SEQ ID NO: 496 - RNA, 23 nt, synthetic construct
  source 1..23: mol_type = other RNA
tataaggcctttcgcccgtgtgg

SEQ ID NO: 497 - RNA, 23 nt, synthetic construct
  source 1..23: mol_type = other RNA
ttataaggcctttcgcccgtgtg

SEQ ID NO: 498 - RNA, 23 nt, synthetic construct
  source 1..23: mol_type = other RNA
tttataaggcctttcgcccgtgt

SEQ ID NO: 499 - RNA, 23 nt, synthetic construct
  source 1..23: mol_type = other RNA
atttataaggcctttcgcccgtg

SEQ ID NO: 500 - RNA, 23 nt, synthetic construct
  source 1..23: mol_type = other RNA
aatttataaggcctttcgcccgt

SEQ ID NO: 501 - RNA, 23 nt, synthetic construct
  source 1..23: mol_type = other RNA
gcatttataaggcctttcgcccg

SEQ ID NO: 502 - RNA, 23 nt, synthetic construct
  source 1..23: mol_type = other RNA
agcatttataaggcctttcgccc

SEQ ID NO: 503 - RNA, 23 nt, synthetic construct
  source 1..23: mol_type = other RNA
atcgcatttataaggcctttcgc

SEQ ID NO: 504 - RNA, 23 nt, synthetic construct
  source 1..23: mol_type = other RNA
gctcgcatttataaggcctttcg

SEQ ID NO: 505 - RNA, 23 nt, synthetic construct
  source 1..23: mol_type = other RNA
agctcgcatttataaggcctttc

SEQ ID NO: 506 - RNA, 23 nt, synthetic construct
  source 1..23: mol_type = other RNA
aagctcgcatttataaggccttt

SEQ ID NO: 507 - RNA, 23 nt, synthetic construct
  source 1..23: mol_type = other RNA
acagctcgcatttataaggcctt

SEQ ID NO: 508 - RNA, 23 nt, synthetic construct
  source 1..23: mol_type = other RNA
aacagctcgcatttataaggcct

SEQ ID NO: 509 - RNA, 23 nt, synthetic construct
  source 1..23: mol_type = other RNA
gcacagctcgcatttataaggcc

SEQ ID NO: 510 - RNA, 23 nt, synthetic construct
  source 1..23: mol_type = other RNA
tgcacagctcgcatttataaggc

SEQ ID NO: 511 - RNA, 23 nt, synthetic construct
  source 1..23: mol_type = other RNA
ttgcacagctcgcatttataagg

SEQ ID NO: 512 - RNA, 23 nt, synthetic construct
  source 1..23: mol_type = other RNA
gttgcacagctcgcatttataag

SEQ ID NO: 513 - RNA, 23 nt, synthetic construct
  source 1..23: mol_type = other RNA
agttgcacagctcgcatttataa

SEQ ID NO: 514 - RNA, 23 nt, synthetic construct
  source 1..23: mol_type = other RNA
tagttgcacagctcgcatttata

SEQ ID NO: 515 - RNA, 23 nt, synthetic construct
  source 1..23: mol_type = other RNA
atagttgcacagctcgcatttat

SEQ ID NO: 516 - RNA, 23 nt, synthetic construct
  source 1..23: mol_type = other RNA
aatagttgcacagctcgcattta

SEQ ID NO: 517 - RNA, 23 nt, synthetic construct
  source 1..23: mol_type = other RNA
gcatagttgcacagctcgcattt

SEQ ID NO: 518 - RNA, 23 nt, synthetic construct
  source 1..23: mol_type = other RNA
aggcatagttgcacagctcgcat

SEQ ID NO: 519 - RNA, 23 nt, synthetic construct
  source 1..23: mol_type = other RNA
acaggcatagttgcacagctcgc

SEQ ID NO: 520 - RNA, 23 nt, synthetic construct
  source 1..23: mol_type = other RNA
gcacaggcatagttgcacagctc

SEQ ID NO: 521 - RNA, 23 nt, synthetic construct
  source 1..23: mol_type = other RNA
acatttgtaaacgtccttcccca

SEQ ID NO: 522 - RNA, 23 nt, synthetic construct
  source 1..23: mol_type = other RNA
aacatttgtaaacgtccttcccc

SEQ ID NO: 523 - RNA, 23 nt, synthetic construct
  source 1..23: mol_type = other RNA
acgctaaaaggcatcttacaaat

SEQ ID NO: 524 - RNA, 23 nt, synthetic construct
  source 1..23: mol_type = other RNA
aacgctaaaaggcatcttacaaa

SEQ ID NO: 525 - RNA, 23 nt, synthetic construct
  source 1..23: mol_type = other RNA
acacgctaaaaggcatcttacaa

SEQ ID NO: 526 - RNA, 23 nt, synthetic construct
  source 1..23: mol_type = other RNA
tacacgctaaaaggcatcttaca

SEQ ID NO: 527 - RNA, 23 nt, synthetic construct
  source 1..23: mol_type = other RNA
gtacacgctaaaaggcatcttac

SEQ ID NO: 528 - RNA, 23 nt, synthetic construct
  source 1..23: mol_type = other RNA
tgtacacgctaaaaggcatctta

SEQ ID NO: 529 - RNA, 23 nt, synthetic construct
  source 1..23: mol_type = other RNA
actgtacacgctaaaaggcatct

SEQ ID NO: 530 - RNA, 23 nt, synthetic construct
  source 1..23: mol_type = other RNA
tactgtacacgctaaaaggcatc

SEQ ID NO: 531 - RNA, 23 nt, synthetic construct
  source 1..23: mol_type = other RNA
gtactgtacacgctaaaaggcat

SEQ ID NO: 532 - RNA, 23 nt, synthetic construct
  source 1..23: mol_type = other RNA
ggtactgtacacgctaaaaggca

SEQ ID NO: 533 - RNA, 23 nt, synthetic construct
  source 1..23: mol_type = other RNA
gggtactgtacacgctaaaaggc

SEQ ID NO: 534 - RNA, 23 nt, synthetic construct
  source 1..23: mol_type = other RNA
agggtactgtacacgctaaaagg

SEQ ID NO: 535 - RNA, 23 nt, synthetic construct
  source 1..23: mol_type = other RNA
aagggtactgtacacgctaaaag

SEQ ID NO: 536 - RNA, 23 nt, synthetic construct
  source 1..23: mol_type = other RNA
acagggtactgtacacgctaaaa

SEQ ID NO: 537 - RNA, 23 nt, synthetic construct
  source 1..23: mol_type = other RNA
tccagggtactgtacacgctaaa

SEQ ID NO: 538 - RNA, 23 nt, synthetic construct
  source 1..23: mol_type = other RNA
atccagggtactgtacacgctaa

SEQ ID NO: 539 - RNA, 23 nt, synthetic construct
  source 1..23: mol_type = other RNA
tttctccagggtactgtacacgc

SEQ ID NO: 540 - RNA, 23 nt, synthetic construct
  source 1..23: mol_type = other RNA
gtttctccagggtactgtacacg

SEQ ID NO: 541 - RNA, 23 nt, synthetic construct
  source 1..23: mol_type = other RNA
aacactcgatcactgtgccattt

SEQ ID NO: 542 - RNA, 23 nt, synthetic construct
  source 1..23: mol_type = other RNA
aaacactcgatcactgtgccatt

SEQ ID NO: 543 - RNA, 23 nt, synthetic construct
  source 1..23: mol_type = other RNA
attcaacactcgatcactgtgcc

SEQ ID NO: 544 - RNA, 23 nt, synthetic construct
  source 1..23: mol_type = other RNA
tattcaacactcgatcactgtgc

SEQ ID NO: 545 - RNA, 23 nt, synthetic construct
  source 1..23: mol_type = other RNA
ttattcaacactcgatcactgtg

SEQ ID NO: 546 - RNA, 23 nt, synthetic construct
  source 1..23: mol_type = other RNA
attattcaacactcgatcactgt

SEQ ID NO: 547 - RNA, 23 nt, synthetic construct
  source 1..23: mol_type = other RNA
aattattcaacactcgatcactg

SEQ ID NO: 548 - RNA, 23 nt, synthetic construct
  source 1..23: mol_type = other RNA
tgggctagacgtgttccctgcca

SEQ ID NO: 549 - RNA, 23 nt, synthetic construct
  source 1..23: mol_type = other RNA
gcaccaccaggttgctctgaaat

SEQ ID NO: 550 - RNA, 23 nt, synthetic construct
  source 1..23: mol_type = other RNA
gtcgtcggacttgaccgtcatgg

SEQ ID NO: 551 - RNA, 23 nt, synthetic construct
  source 1..23: mol_type = other RNA
agtcgtcggacttgaccgtcatg

SEQ ID NO: 552 - RNA, 23 nt, synthetic construct
  source 1..23: mol_type = other RNA
accgtcgtcggacttgaccgtca

SEQ ID NO: 553 - RNA, 23 nt, synthetic construct
  source 1..23: mol_type = other RNA
gagagaccgtcgtcggacttgac

SEQ ID NO: 554 - RNA, 23 nt, synthetic construct
  source 1..23: mol_type = other RNA
tggccaccacggacttgagcgcg

SEQ ID NO: 555 - RNA, 23 nt, synthetic construct
  source 1..23: mol_type = other RNA
acttggccaccacggacttgagc

SEQ ID NO: 556 - RNA, 23 nt, synthetic construct
  source 1..23: mol_type = other RNA
agctcttgaacttggccaccacg

SEQ ID NO: 557 - RNA, 23 nt, synthetic construct
  source 1..23: mol_type = other RNA
tcgctcttgaacttggccaccac

SEQ ID NO: 558 - RNA, 23 nt, synthetic construct
  source 1..23: mol_type = other RNA
actcttcctcgtcgtcctcctct

SEQ ID NO: 559 - RNA, 23 nt, synthetic construct
  source 1..23: mol_type = other RNA
ttcctcttcctcgtcgtcctcct

SEQ ID NO: 560 - RNA, 23 nt, synthetic construct
  source 1..23: mol_type = other RNA
aactccttctcgagcttgatgcg

SEQ ID NO: 561 - RNA, 23 nt, synthetic construct
  source 1..23: mol_type = other RNA
gaactccttctcgagcttgatgc

SEQ ID NO: 562 - RNA, 23 nt, synthetic construct
  source 1..23: mol_type = other RNA
tcgaactccttctcgagcttgat

SEQ ID NO: 563 - RNA, 23 nt, synthetic construct
  source 1..23: mol_type = other RNA
tggagtctccgaagctaaggaag

SEQ ID NO: 564 - RNA, 23 nt, synthetic construct
  source 1..23: mol_type = other RNA
atggagtctccgaagctaaggaa

SEQ ID NO: 565 - RNA, 23 nt, synthetic construct
  source 1..23: mol_type = other RNA
tgtctggagtctccgaagctaag

SEQ ID NO: 566 - RNA, 23 nt, synthetic construct
  source 1..23: mol_type = other RNA
ttgtctggagtctccgaagctaa

SEQ ID NO: 567 - RNA, 23 nt, synthetic construct
  source 1..23: mol_type = other RNA
attgtctggagtctccgaagcta

SEQ ID NO: 568 - RNA, 23 nt, synthetic construct
  source 1..23: mol_type = other RNA
gattgtctggagtctccgaagct

SEQ ID NO: 569 - RNA, 23 nt, synthetic construct
  source 1..23: mol_type = other RNA
agtgctccgacgaggaggcaaaa

SEQ ID NO: 570 - RNA, 23 nt, synthetic construct
  source 1..23: mol_type = other RNA
gagtgctccgacgaggaggcaaa

SEQ ID NO: 571 - RNA, 23 nt, synthetic construct
  source 1..23: mol_type = other RNA
tcgataaaaataagaatgtcccc

SEQ ID NO: 572 - RNA, 23 nt, synthetic construct
  source 1..23: mol_type = other RNA
ctcgataaaaataagaatgtccc

SEQ ID NO: 573 - RNA, 23 nt, synthetic construct
  source 1..23: mol_type = other RNA
gctcgataaaaataagaatgtcc

SEQ ID NO: 574 - RNA, 23 nt, synthetic construct
  source 1..23: mol_type = other RNA
tgctcgataaaaataagaatgtc

SEQ ID NO: 575 - RNA, 23 nt, synthetic construct
  source 1..23: mol_type = other RNA
gtgctcgataaaaataagaatgt

SEQ ID NO: 576 - RNA, 23 nt, synthetic construct
  source 1..23: mol_type = other RNA
tgtgctcgataaaaataagaatg

SEQ ID NO: 577 - RNA, 23 nt, synthetic construct
  source 1..23: mol_type = other RNA
ttgtgctcgataaaaataagaat

SEQ ID NO: 578 - RNA, 23 nt, synthetic construct
  source 1..23: mol_type = other RNA
tttgtgctcgataaaaataagaa

SEQ ID NO: 579 - RNA, 23 nt, synthetic construct
  source 1..23: mol_type = other RNA
gtttgtgctcgataaaaataaga

SEQ ID NO: 580 - RNA, 23 nt, synthetic construct
  source 1..23: mol_type = other RNA
cgtttgtgctcgataaaaataag

SEQ ID NO: 581 - RNA, 23 nt, synthetic construct
  source 1..23: mol_type = other RNA
ccgtttgtgctcgataaaaataa

SEQ ID NO: 582 - RNA, 23 nt, synthetic construct
  source 1..23: mol_type = other RNA
tccgtttgtgctcgataaaaata

SEQ ID NO: 583 - RNA, 23 nt, synthetic construct
  source 1..23: mol_type = other RNA
ttccgtttgtgctcgataaaaat

SEQ ID NO: 584 - RNA, 23 nt, synthetic construct
  source 1..23: mol_type = other RNA
tttccgtttgtgctcgataaaaa

SEQ ID NO: 585 - RNA, 23 nt, synthetic construct
  source 1..23: mol_type = other RNA
gtttccgtttgtgctcgataaaa

SEQ ID NO: 586 - RNA, 23 nt, synthetic construct
  source 1..23: mol_type = other RNA
acaaataccctgcggggcatatt

SEQ ID NO: 587 - RNA, 23 nt, synthetic construct
  source 1..23: mol_type = other RNA
catctttacaaataccctgcggg

SEQ ID NO: 588 - RNA, 23 nt, synthetic construct
  source 1..23: mol_type = other RNA
tcatctttacaaataccctgcgg

SEQ ID NO: 589 - RNA, 23 nt, synthetic construct
  source 1..23: mol_type = other RNA
ctcatctttacaaataccctgcg

SEQ ID NO: 590 - RNA, 23 nt, synthetic construct
  source 1..23: mol_type = other RNA
gctcatctttacaaataccctgc

SEQ ID NO: 591 - RNA, 23 nt, synthetic construct
  source 1..23: mol_type = other RNA
gggctcatctttacaaatacctg

SEQ ID NO: 592 - RNA, 23 nt, synthetic construct
  source 1..23: mol_type = other RNA
tgggctcatctttacaaatacct

SEQ ID NO: 593 - RNA, 23 nt, synthetic construct
  source 1..23: mol_type = other RNA
ctgggctcatctttacaaatacc

SEQ ID NO: 594 - RNA, 23 nt, synthetic construct
  source 1..23: mol_type = other RNA
gctgggctcatctttacaaatac

SEQ ID NO: 595 - RNA, 23 nt, synthetic construct
  source 1..23: mol_type = other RNA
tgctgggctcatctttacaaata

SEQ ID NO: 596 - RNA, 23 nt, synthetic construct
  source 1..23: mol_type = other RNA
ctgctgggctcatctttacaaat

SEQ ID NO: 597 - RNA, 23 nt, synthetic construct
  source 1..23: mol_type = other RNA
gctgctgggctcatctttacaaa

SEQ ID NO: 598 - RNA, 23 nt, synthetic construct
  source 1..23: mol_type = other RNA
agctgctgggctcatctttacaa

SEQ ID NO: 599 - RNA, 23 nt, synthetic construct
  source 1..23: mol_type = other RNA
tagctgctgggctcatctttaca

SEQ ID NO: 600 - RNA, 23 nt, synthetic construct
  source 1..23: mol_type = other RNA
tgtagctgctgggctcatcttta

SEQ ID NO: 601 - RNA, 23 nt, synthetic construct
  source 1..23: mol_type = other RNA
gtgtagctgctgggctcatcttt

SEQ ID NO: 602 - RNA, 23 nt, synthetic construct
  source 1..23: mol_type = other RNA
tgtgtagctgctgggctcatctt

SEQ ID NO: 603 - RNA, 23 nt, synthetic construct
  source 1..23: mol_type = other RNA
atgtgtagctgctgggctcatct

SEQ ID NO: 604 - RNA, 23 nt, synthetic construct
  source 1..23: mol_type = other RNA
catgtgtagctgctgggctcatc

SEQ ID NO: 605 - RNA, 23 nt, synthetic construct
  source 1..23: mol_type = other RNA
gtttgcaagttgtacatgtgtag

SEQ ID NO: 606 - RNA, 23 nt, synthetic construct
  source 1..23: mol_type = other RNA
ctgtttgcaagttgtacatgtgt

SEQ ID NO: 607 - RNA, 23 nt, synthetic construct
  source 1..23: mol_type = other RNA
gagtgttctgtgcgtgttgcaag

SEQ ID NO: 608 - RNA, 23 nt, synthetic construct
  source 1..23: mol_type = other RNA
tgtttctccagggtactgtacac

SEQ ID NO: 609 - RNA, 23 nt, synthetic construct
  source 1..23: mol_type = other RNA
gtgtttctccagggtactgtaca

SEQ ID NO: 610 - RNA, 23 nt, synthetic construct
  source 1..23: mol_type = other RNA
tgtgtttctccagggtactgtac

SEQ ID NO: 611 - RNA, 23 nt, synthetic construct
  source 1..23: mol_type = other RNA
atgtgtttctccagggtactgta

SEQ ID NO: 612 - RNA, 23 nt, synthetic construct
  source 1..23: mol_type = other RNA
catgtgtttctccagggtactgt

SEQ ID NO: 613 - RNA, 23 nt, synthetic construct
  source 1..23: mol_type = other RNA
tcatgtgtttctccagggtactg

SEQ ID NO: 614 - RNA, 23 nt, synthetic construct
  source 1..23: mol_type = other RNA
ttcatgtgtttctccagggtact

SEQ ID NO: 615 - RNA, 23 nt, synthetic construct
  source 1..23: mol_type = other RNA
tttcatgtgtttctccagggtac

SEQ ID NO: 616 - RNA, 23 nt, synthetic construct
  source 1..23: mol_type = other RNA
ttttcatgtgtttctccagggta

SEQ ID NO: 617 - RNA, 23 nt, synthetic construct
  source 1..23: mol_type = other RNA
tttttcatgtgtttctccagggt

SEQ ID NO: 618 - RNA, 23 nt, synthetic construct
  source 1..23: mol_type = other RNA
ttttttcatgtgtttctccaggg

SEQ ID NO: 619 - RNA, 23 nt, synthetic construct
  source 1..23: mol_type = other RNA
attttttcatgtgtttctccagg

SEQ ID NO: 620 - RNA, 23 nt, synthetic construct
  source 1..23: mol_type = other RNA
cattttttcatgtgtttctccag

SEQ ID NO: 621 - RNA, 23 nt, synthetic construct
  source 1..23: mol_type = other RNA
tcaacgggccgtggtctggttca

SEQ ID NO: 622 - RNA, 23 nt, synthetic construct
  source 1..23: mol_type = other RNA
tccaacgggccgtggtctggttc

SEQ ID NO: 623 - RNA, 23 nt, synthetic construct
  source 1..23: mol_type = other RNA
ttcgataaaaataagaatgtccc

SEQ ID NO: 624 - RNA, 23 nt, synthetic construct
  source 1..23: mol_type = other RNA
ttttgtgctcgataaaaataaga

SEQ ID NO: 625 - RNA, 23 nt, synthetic construct
  source 1..23: mol_type = other RNA
tgtttgtgctcgataaaaataag

SEQ ID NO: 626 - RNA, 23 nt, synthetic construct
  source 1..23: mol_type = other RNA
tcgtttgtgctcgataaaaataa

SEQ ID NO: 627 - RNA, 23 nt, synthetic construct
  source 1..23: mol_type = other RNA
ttttccgtttgtgctcgataaaa

SEQ ID NO: 628 - RNA, 23 nt, synthetic construct
  source 1..23: mol_type = other RNA
ttcgattggtgaaggggaaggtg

SEQ ID NO: 629 - RNA, 23 nt, synthetic construct
  source 1..23: mol_type = other RNA
ttttcatctcgattggtgaaggg

SEQ ID NO: 630 - RNA, 23 nt, synthetic construct
  source 1..23: mol_type = other RNA
ttccacgggattggatgcttttt

SEQ ID NO: 631 - RNA, 23 nt, synthetic construct
  source 1..23: mol_type = other RNA
tacctccacgggattggatgctt

SEQ ID NO: 632 - RNA, 23 nt, synthetic construct
  source 1..23: mol_type = other RNA
tatcgtcatcctctggcgtgacc

SEQ ID NO: 633 - RNA, 23 nt, synthetic construct
  source 1..23: mol_type = other RNA
tcgttgataaacaatcgtcatcc

SEQ ID NO: 634 - RNA, 23 nt, synthetic construct
  source 1..23: mol_type = other RNA
tacgttgataaacaatcgtcatc

SEQ ID NO: 635 - RNA, 23 nt, synthetic construct
  source 1..23: mol_type = other RNA
ttagatgacgttgataaacaatc

SEQ ID NO: 636 - RNA, 23 nt, synthetic construct
  source 1..23: mol_type = other RNA
tcaaataccctgcggggcatatt

SEQ ID NO: 637 - RNA, 23 nt, synthetic construct
  source 1..23: mol_type = other RNA
tatctttacaaataccctgcggg

SEQ ID NO: 638 - RNA, 23 nt, synthetic construct
  source 1..23: mol_type = other RNA
ttcatctttacaaataccctgcg

SEQ ID NO: 639 - RNA, 23 nt, synthetic construct
  source 1..23: mol_type = other RNA
tctcatctttacaaataccctgc

SEQ ID NO: 640 - RNA, 23 nt, synthetic construct
  source 1..23: mol_type = other RNA
tggctcatctttacaaatacctg

SEQ ID NO: 641 - RNA, 23 nt, synthetic construct
  source 1..23: mol_type = other RNA
ttgggctcatctttacaaatacc

SEQ ID NO: 642 - RNA, 23 nt, synthetic construct
  source 1..23: mol_type = other RNA
tctgggctcatctttacaaatac

SEQ ID NO: 643 - RNA, 23 nt, synthetic construct
  source 1..23: mol_type = other RNA
ttgctgggctcatctttacaaat

SEQ ID NO: 644 - RNA, 23 nt, synthetic construct
  source 1..23: mol_type = other RNA
tctgctgggctcatctttacaaa

SEQ ID NO: 645 - RNA, 23 nt, synthetic construct
  source 1..23: mol_type = other RNA
tgctgctgggctcatctttacaa

SEQ ID NO: 646 - RNA, 23 nt, synthetic construct
  source 1..23: mol_type = other RNA
ttgtagctgctgggctcatcttt

SEQ ID NO: 647 - RNA, 23 nt, synthetic construct
  source 1..23: mol_type = other RNA
ttgtgtagctgctgggctcatct

SEQ ID NO: 648 - RNA, 23 nt, synthetic construct
  source 1..23: mol_type = other RNA
tatgtgtagctgctgggctcatc

SEQ ID NO: 649 - RNA, 23 nt, synthetic construct
  source 1..23: mol_type = other RNA
ttttgcaagttgtacatgtgtag

SEQ ID NO: 650 - RNA, 23 nt, synthetic construct
  source 1..23: mol_type = other RNA
ttgtttgcaagttgtacatgtgt

SEQ ID NO: 651 - RNA, 23 nt, synthetic construct
  source 1..23: mol_type = other RNA
tagtgttctgtgcgtgttgcaag

SEQ ID NO: 652 - RNA, 23 nt, synthetic construct
  source 1..23: mol_type = other RNA
ttgagtgttctgtgcgtgttgca

SEQ ID NO: 653 - RNA, 23 nt, synthetic construct
  source 1..23: mol_type = other RNA
tatgagtgttctgtgcgtgttgc

SEQ ID NO: 654 - RNA, 23 nt, synthetic construct
  source 1..23: mol_type = other RNA
tcatgagtgttctgtgcgtgttg

SEQ ID NO: 655 - RNA, 23 nt, synthetic construct
  source 1..23: mol_type = other RNA
taccaacccgcggggtcagggga

SEQ ID NO: 656 - RNA, 23 nt, synthetic construct
  source 1..23: mol_type = other RNA
tataccaacccgcggggtcaggg

SEQ ID NO: 657 - RNA, 23 nt, synthetic construct
  source 1..23: mol_type = other RNA
tggataccaacccgcggggtcag

SEQ ID NO: 658 - RNA, 23 nt, synthetic construct
  source 1..23: mol_type = other RNA
tgggataccaacccgcggggtca

SEQ ID NO: 659 - RNA, 23 nt, synthetic construct
  source 1..23: mol_type = other RNA
tacctagtcctgaagggatacca

SEQ ID NO: 660 - RNA, 23 nt, synthetic construct
  source 1..23: mol_type = other RNA
tgttaaaggggttattgtctgca

SEQ ID NO: 661 - RNA, 23 nt, synthetic construct
  source 1..23: mol_type = other RNA
tggttaaaggggttattgtctgc

SEQ ID NO: 662 - RNA, 23 nt, synthetic construct
  source 1..23: mol_type = other RNA
ttcgatactgatcctggtattct

SEQ ID NO: 663 - RNA, 23 nt, synthetic construct
  source 1..23: mol_type = other RNA
ttcggtggtggactaaacagggg

SEQ ID NO: 664 - RNA, 23 nt, synthetic construct
  source 1..23: mol_type = other RNA
tactcgcatgacttggacttgac

SEQ ID NO: 665 - RNA, 23 nt, synthetic construct
  source 1..23: mol_type = other RNA
taactcgcatgacttggacttga

SEQ ID NO: 666 - RNA, 23 nt, synthetic construct
  source 1..23: mol_type = other RNA
tgggtgcacgcgtggtcgcacag

SEQ ID NO: 667 - RNA, 23 nt, synthetic construct
  source 1..23: mol_type = other RNA
tgtcggacttgaccgtcatgggg

SEQ ID NO: 668 - RNA, 23 nt, synthetic construct
  source 1..23: mol_type = other RNA
ttcgtcggacttgaccgtcatgg

SEQ ID NO: 669 - RNA, 23 nt, synthetic construct
  source 1..23: mol_type = other RNA
tgtcgtcggacttgaccgtcatg

SEQ ID NO: 670 - RNA, 23 nt, synthetic construct
  source 1..23: mol_type = other RNA
tcgtcgtcggacttgaccgtcat

SEQ ID NO: 671 - RNA, 23 nt, synthetic construct
  source 1..23: mol_type = other RNA
tccgtcgtcggacttgaccgtca

SEQ ID NO: 672 - RNA, 23 nt, synthetic construct
  source 1..23: mol_type = other RNA
taccgtcgtcggacttgaccgtc

SEQ ID NO: 673 - RNA, 23 nt, synthetic construct
  source 1..23: mol_type = other RNA
tgaccgtcgtcggacttgaccgt

SEQ ID NO: 674 - RNA, 23 nt, synthetic construct
  source 1..23: mol_type = other RNA
tagagaccgtcgtcggacttgac

SEQ ID NO: 675 - RNA, 23 nt, synthetic construct
  source 1..23: mol_type = other RNA
tacggacttgagcgcgctgctgg

SEQ ID NO: 676 - RNA, 23 nt, synthetic construct
  source 1..23: mol_type = other RNA
tcacggacttgagcgcgctgctg

SEQ ID NO: 677 - RNA, 23 nt, synthetic construct
  source 1..23: mol_type = other RNA
tatcaggttggggtcgttctcgc

SEQ ID NO: 678 - RNA, 23 nt, synthetic construct
  source 1..23: mol_type = other RNA
taccctctcgctctccgtcagct

SEQ ID NO: 679 - RNA, 23 nt, synthetic construct
  source 1..23: mol_type = other RNA
tgtagtccaccctctcgctctcc

SEQ ID NO: 680 - RNA, 23 nt, synthetic construct
  source 1..23: mol_type = other RNA
tgccgtagtccaccctctcgctc

SEQ ID NO: 681 - RNA, 23 nt, synthetic construct
  source 1..23: mol_type = other RNA
tagccgtagtccaccctctcgct

SEQ ID NO: 682 - RNA, 23 nt, synthetic construct
  source 1..23: mol_type = other RNA
tcgaagccgtagtccaccctctc

SEQ ID NO: 683 - RNA, 23 nt, synthetic construct
  source 1..23: mol_type = other RNA
tccccgcgagctgttctcgtggt

SEQ ID NO: 684 - RNA, 23 nt, synthetic construct
  source 1..23: mol_type = other RNA
tcgcgcttatgcttctcgcccag

SEQ ID NO: 685 - RNA, 23 nt, synthetic construct
  source 1..23: mol_type = other RNA
ttggccgcgcttatgcttctcgc

SEQ ID NO: 686 - RNA, 23 nt, synthetic construct
  source 1..23: mol_type = other RNA
tgccaccgagtcttcgtcgcaag

SEQ ID NO: 687 - RNA, 23 nt, synthetic construct
  source 1..23: mol_type = other RNA
tgactcgccggccaccgagtctt

SEQ ID NO: 688 - RNA, 23 nt, synthetic construct
  source 1..23: mol_type = other RNA
tatgcggtccgactcgccggcca

SEQ ID NO: 689 - RNA, 23 nt, synthetic construct
  source 1..23: mol_type = other RNA
tctatgcggtccgactcgccggc

SEQ ID NO: 690 - RNA, 23 nt, synthetic construct
  source 1..23: mol_type = other RNA
ttctatgcggtccgactcgccgg

SEQ ID NO: 691 - RNA, 23 nt, synthetic construct
  source 1..23: mol_type = other RNA
ttcgtctatgcggtccgactcgc

SEQ ID NO: 692 - RNA, 23 nt, synthetic construct
  source 1..23: mol_type = other RNA
tatcgtctatgcggtccgactcg

SEQ ID NO: 693 - RNA, 23 nt, synthetic construct
  source 1..23: mol_type = other RNA
tcatcgtctatgcggtccgactc

SEQ ID NO: 694 - RNA, 23 nt, synthetic construct
  source 1..23: mol_type = other RNA
taggcgattgtctggagtctccg

SEQ ID NO: 695 - RNA, 23 nt, synthetic construct
  source 1..23: mol_type = other RNA
tccgacgaggaggcaaaaggcga

SEQ ID NO: 696 - RNA, 23 nt, synthetic construct
  source 1..23: mol_type = other RNA
tccgaggagtgctccgacgagga

SEQ ID NO: 697 - RNA, 23 nt, synthetic construct
  source 1..23: mol_type = other RNA
tctccgaggagtgctccgacgag

SEQ ID NO: 698 - RNA, 23 nt, synthetic construct
  source 1..23: mol_type = other RNA
tccgttctccgaggagtgctccg

SEQ ID NO: 699 - RNA, 23 nt, synthetic construct
  source 1..23: mol_type = other RNA
tcactaatatggggcgtgctccc

SEQ ID NO: 700 - RNA, 23 nt, synthetic construct
  source 1..23: mol_type = other RNA
tccactaatatggggcgtgctcc

SEQ ID NO: 701 - RNA, 23 nt, synthetic construct
  source 1..23: mol_type = other RNA
tgaccactaatatggggcgtgct

SEQ ID NO: 702 - RNA, 23 nt, synthetic construct
  source 1..23: mol_type = other RNA
tgcccggaccactaatatggggc

SEQ ID NO: 703 - RNA, 23 nt, synthetic construct
  source 1..23: mol_type = other RNA
tccgggcccggaccactaatatg

SEQ ID NO: 704 - RNA, 23 nt, synthetic construct
  source 1..23: mol_type = other RNA
tgctaaaaggcatcttacaaatt

SEQ ID NO: 705 - RNA, 23 nt, synthetic construct
  source 1..23: mol_type = other RNA
tcgctaaaaggcatcttacaaat

SEQ ID NO: 706 - RNA, 23 nt, synthetic construct
  source 1..23: mol_type = other RNA
tacgctaaaaggcatcttacaaa

SEQ ID NO: 707 - RNA, 23 nt, synthetic construct
  source 1..23: mol_type = other RNA
ttacacgctaaaaggcatcttac

SEQ ID NO: 708 - RNA, 23 nt, synthetic construct
  source 1..23: mol_type = other RNA
tggtactgtacacgctaaaaggc

SEQ ID NO: 709 - RNA, 23 nt, synthetic construct
  source 1..23: mol_type = other RNA
tgggtactgtacacgctaaaagg

SEQ ID NO: 710 - RNA, 23 nt, synthetic construct
  source 1..23: mol_type = other RNA
ttgtttctccagggtactgtaca

SEQ ID NO: 711 - RNA, 23 nt, synthetic construct
  source 1..23: mol_type = other RNA
ttgtgtttctccagggtactgta

SEQ ID NO: 712 - RNA, 23 nt, synthetic construct
  source 1..23: mol_type = other RNA
tatgtgtttctccagggtactgt

SEQ ID NO: 713 - RNA, 23 nt, synthetic construct
  source 1..23: mol_type = other RNA
tttttttcatgtgtttctccagg

SEQ ID NO: 714 - RNA, 23 nt, synthetic construct
  source 1..23: mol_type = other RNA
tattttttcatgtgtttctccag

SEQ ID NO: 715 - RNA, 23 nt, synthetic construct
  source 1..23: mol_type = other RNA
tacactcgatcactgtgccattt

SEQ ID NO: 716 - RNA, 23 nt, synthetic construct
  source 1..23: mol_type = other RNA
tgggttaatccaaagactgtttt

SEQ ID NO: 717 - RNA, 23 nt, synthetic construct
  source 1..23: mol_type = other RNA
ttgtctatagagggttaatccaa

SEQ ID NO: 718 - RNA, 23 nt, synthetic construct
  source 1..23: mol_type = other RNA
tgtgctatctattctgtctatag

SEQ ID NO: 719 - RNA, 23 nt, synthetic construct
  source 1..23: mol_type = other RNA
tctagttcctaaggtttattacc

SEQ ID NO: 720 - RNA, 23 nt, synthetic construct
  source 1..23: mol_type = other RNA
tactaggacataatgggtcatct

SEQ ID NO: 721 - RNA, 23 nt, synthetic construct
  source 1..23: mol_type = other RNA
tgtagcttttatactggtataat

SEQ ID NO: 722 - RNA, 23 nt, synthetic construct
  source 1..23: mol_type = other RNA
ttaattgcgttccagggcttttg

SEQ ID NO: 723 - RNA, 23 nt, synthetic construct
  source 1..23: mol_type = other RNA
tccttactagtgtatttaattgc

SEQ ID NO: 724 - RNA, 23 nt, synthetic construct
  source 1..23: mol_type = other RNA
ttccttactagtgtatttaattg

SEQ ID NO: 725 - RNA, 23 nt, synthetic construct
  source 1..23: mol_type = other RNA
tcgttgtgctaataaatcatatt

SEQ ID NO: 726 - RNA, 23 nt, synthetic construct
  source 1..23: mol_type = other RNA
tacgttgtgctaataaatcatat

SEQ ID NO: 727 - RNA, 23 nt, synthetic construct
  source 1..23: mol_type = other RNA
tccacgttgtgctaataaatcat

SEQ ID NO: 728 - RNA, 23 nt, synthetic construct
  source 1..23: mol_type = other RNA
taccacgttgtgctaataaatca

SEQ ID NO: 729 - RNA, 23 nt, synthetic construct
  source 1..23: mol_type = other RNA
tgtaccacgttgtgctaataaat

SEQ ID NO: 730 - RNA, 23 nt, synthetic construct
  source 1..23: mol_type = other RNA
taatagtaccacgttgtgctaat

SEQ ID NO: 731 - RNA, 23 nt, synthetic construct
  source 1..23: mol_type = other RNA
tgatgctagcttaataaaaaaga

SEQ ID NO: 732 - RNA, 23 nt, synthetic construct
  source 1..23: mol_type = other RNA
tgcagatgctagcttaataaaaa

SEQ ID NO: 733 - RNA, 23 nt, synthetic construct
  source 1..23: mol_type = other RNA
tgtatctctgattagagaaaaga

SEQ ID NO: 734 - RNA, 23 nt, synthetic construct
  source 1..23: mol_type = other RNA
tttatactcaacctctgtatctc

SEQ ID NO: 735 - RNA, 23 nt, synthetic construct
  source 1..23: mol_type = other RNA
tgcacttaattgtcctatctgag

SEQ ID NO: 736 - RNA, 23 nt, synthetic construct
  source 1..23: mol_type = other RNA
tgtgcacttaattgtcctatctg

SEQ ID NO: 737 - RNA, 23 nt, synthetic construct
  source 1..23: mol_type = other RNA
tgtatagacctgtaaactgggaa

SEQ ID NO: 738 - RNA, 23 nt, synthetic construct
  source 1..23: mol_type = other RNA
tgtccaagtaagtaagctcaata

SEQ ID NO: 739 - RNA, 23 nt, synthetic construct
  source 1..23: mol_type = other RNA
ttgcgtccaagtaagtaagctca

SEQ ID NO: 740 - RNA, 23 nt, synthetic construct
  source 1..23: mol_type = other RNA
tcgcttgcaatgttgcgtccaag

SEQ ID NO: 741 - RNA, 23 nt, synthetic construct
  source 1..23: mol_type = other RNA
tgcgcttgcaatgttgcgtccaa

SEQ ID NO: 742 - RNA, 23 nt, synthetic construct
  source 1..23: mol_type = other RNA
tagcgcttgcaatgttgcgtcca

SEQ ID NO: 743 - RNA, 23 nt, synthetic construct
  source 1..23: mol_type = other RNA
tcacagcgcttgcaatgttgcgt

SEQ ID NO: 744 - RNA, 23 nt, synthetic construct
  source 1..23: mol_type = other RNA
tgcgaaagcaatcattcatttct

SEQ ID NO: 745 - RNA, 23 nt, synthetic construct
  source 1..23: mol_type = other RNA
tagcgaaagcaatcattcatttc

SEQ ID NO: 746 - RNA, 23 nt, synthetic construct
  source 1..23: mol_type = other RNA
ttagaagcgaaagcaatcattca

SEQ ID NO: 747 - RNA, 23 nt, synthetic construct
  source 1..23: mol_type = other RNA
tgtagaagcgaaagcaatcattc

SEQ ID NO: 748 - RNA, 23 nt, synthetic construct
  source 1..23: mol_type = other RNA
ttgtagaagcgaaagcaatcatt

SEQ ID NO: 749 - RNA, 23 nt, synthetic construct
  source 1..23: mol_type = other RNA
tagacaatggaaccctaaaatgc

SEQ ID NO: 750 - RNA, 23 nt, synthetic construct
  source 1..23: mol_type = other RNA
ttgtaacaccaccaagacaatgg

SEQ ID NO: 751 - RNA, 23 nt, synthetic construct
  source 1..23: mol_type = other RNA
tgcatagaatttccactaccatt

SEQ ID NO: 752 - RNA, 23 nt, synthetic construct
  source 1..23: mol_type = other RNA
ttttacaacctgaagagcggtgt

SEQ ID NO: 753 - RNA, 23 nt, synthetic construct
  source 1..23: mol_type = other RNA
tatagtgcctaacactagatgaa

SEQ ID NO: 754 - RNA, 23 nt, synthetic construct
  source 1..23: mol_type = other RNA
ttatagtgcctaacactagatga

SEQ ID NO: 755 - RNA, 23 nt, synthetic construct
  source 1..23: mol_type = other RNA
ttaaatactatagtgcctaacac

SEQ ID NO: 756 - RNA, 23 nt, synthetic construct
  source 1..23: mol_type = other RNA
taggtacattgataccttttaag

SEQ ID NO: 757 - RNA, 23 nt, synthetic construct
  source 1..23: mol_type = other RNA
tatttgcactatattatcctgcc

SEQ ID NO: 758 - RNA, 23 nt, synthetic construct
  source 1..23: mol_type = other RNA
tccgccattatatggcttctcat

SEQ ID NO: 759 - RNA, 23 nt, synthetic construct
  source 1..23: mol_type = other RNA
taaccgccattatatggcttctc

SEQ ID NO: 760 - RNA, 23 nt, synthetic construct
  source 1..23: mol_type = other RNA
ttattagcttgcagtactgcata

SEQ ID NO: 761 - RNA, 23 nt, synthetic construct
  source 1..23: mol_type = other RNA
tccaacgttattagcttgcagta

SEQ ID NO: 762 - RNA, 23 nt, synthetic construct
  source 1..23: mol_type = other RNA
taccaacgttattagcttgcagt

SEQ ID NO: 763 - RNA, 23 nt, synthetic construct
  source 1..23: mol_type = other RNA
taaccaacgttattagcttgcag

SEQ ID NO: 764 - RNA, 23 nt, synthetic construct
  source 1..23: mol_type = other RNA
tataacaaaccaacgttattagc

SEQ ID NO: 765 - RNA, 23 nt, synthetic construct
  source 1..23: mol_type = other RNA
tttgactaaagcgggctttctct

SEQ ID NO: 766 - RNA, 23 nt, synthetic construct
  source 1..23: mol_type = other RNA
tattgactaaagcgggctttctc

SEQ ID NO: 767 - RNA, 23 nt, synthetic construct
  source 1..23: mol_type = other RNA
ttattgactaaagcgggctttct

SEQ ID NO: 768 - RNA, 23 nt, synthetic construct
  source 1..23: mol_type = other RNA
taagtattgactaaagcgggctt

SEQ ID NO: 769 - RNA, 23 nt, synthetic construct
  source 1..23: mol_type = other RNA
taacaggttaatgcagacaactg

SEQ ID NO: 770 - RNA, 23 nt, synthetic construct
  source 1..23: mol_type = other RNA
tgacaaaatgggtgtatgaacag

SEQ ID NO: 771 - RNA, 23 nt, synthetic construct
  source 1..23: mol_type = other RNA
tgggacaaaatgggtgtatgaac

SEQ ID NO: 772 - RNA, 23 nt, synthetic construct
  source 1..23: mol_type = other RNA
  modified_base 1: mod_base = OTHER; note = 5'-(E)-vinylphosphonate 2'-O-methylated uridine with phosphorothioate linkage
  modified_base 2: mod_base = OTHER; note = 2'-fluorocytidine with phosphorothioate linkage
  modified_base 3: mod_base = OTHER; note = 2'-O-methyluridine
  modified_base 4: mod_base = OTHER; note = 2'-O-methyladenosine
  modified_base 5: mod_base = OTHER; note = 2'-O-methyladenosine
  modified_base 6: mod_base = OTHER; note = 2'-fluoroguanosine
  modified_base 7: mod_base = OTHER; note = 2'-O-methyluridine
  modified_base 8: mod_base = OTHER; note = 2'-fluoroadenosine
  modified_base 9: mod_base = OTHER; note = 2'-fluoroguanosine
  modified_base 10: mod_base = OTHER; note = 2'-O-methyladenosine
  modified_base 11: mod_base = OTHER; note = 2'-O-methyluridine
  modified_base 12: mod_base = OTHER; note = 2'-O-methyluridine
  modified_base 13: mod_base = OTHER; note = 2'-O-methylcytidine
  modified_base 14: mod_base = OTHER; note = 2'-fluorouridine
  modified_base 15: mod_base = OTHER; note = 2'-O-methyluridine
  modified_base 16: mod_base = OTHER; note = 2'-fluoroadenosine
  modified_base 17: mod_base = OTHER; note = 2'-O-methyladenosine
  modified_base 18: mod_base = OTHER; note = 1-N-Methylpseudouridine 2'-O-methylated
  modified_base 19: mod_base = OTHER; note = 2'-O-methylcytidine
  modified_base 20: mod_base = OTHER; note = 2'-O-methylcytidine
  modified_base 21: mod_base = OTHER; note = 2'-O-methyladenosine with phosphorothioate linkage
  modified_base 22: mod_base = OTHER; note = 2'-O-methyluridine with phosphorothioate linkage
  modified_base 23: mod_base = OTHER; note = 2'-O-methylguanosine
tctaagtagattcttaanccatg

SEQ ID NO: 773 - RNA, 23 nt, synthetic construct
  source 1..23: mol_type = other RNA
  modified_base 1: mod_base = OTHER; note = 5'-(E)-vinylphosphonate 2'-O-methylated adenosine with phosphorothioate linkage
  modified_base 2: mod_base = OTHER; note = 2'-fluorouridine with phosphorothioate linkage
  modified_base 3: mod_base = OTHER; note = 2'-O-methyluridine
  modified_base 4: mod_base = OTHER; note = 2'-O-methylguanosine
  modified_base 5: mod_base = OTHER; note = 2'-O-methylcytidine
  modified_base 6: mod_base = OTHER; note = 2'-fluoroadenosine
  modified_base 7: mod_base = OTHER; note = 2'-O-methyluridine
  modified_base 8: mod_base = OTHER; note = 2'-fluorouridine
  modified_base 9: mod_base = OTHER; note = 2'-fluoroguanosine
  modified_base 10: mod_base = OTHER; note = 2'-O-methyluridine
  modified_base 11: mod_base = OTHER; note = 2'-O-methyluridine
  modified_base 12: mod_base = OTHER; note = 2'-O-methyluridine
  modified_base 13: mod_base = OTHER; note = 2'-O-methylcytidine
  modified_base 14: mod_base = OTHER; note = 2'-fluorocytidine
  modified_base 15: mod_base = OTHER; note = 2'-O-methylguanosine
  modified_base 16: mod_base = OTHER; note = 2'-fluorouridine
  modified_base 17: mod_base = OTHER; note = 2'-O-methyluridine
  modified_base 18: mod_base = OTHER; note = 2'-O-methyluridine
  modified_base 19: mod_base = OTHER; note = 2'-O-methylguanosine
  modified_base 20: mod_base = OTHER; note = 1-N-Methylpseudouridine 2'-O-methylated
  modified_base 21: mod_base = OTHER; note = 2'-O-methylguanosine with phosphorothioate linkage
  modified_base 22: mod_base = OTHER; note = 2'-O-methylcytidine with phosphorothioate linkage
  modified_base 23: mod_base = OTHER; note = 2'-O-methyluridine
attgcattgtttccgtttgngct

SEQ ID NO: 774 - RNA, 23 nt, synthetic construct
  source 1..23: mol_type = other RNA
  modified_base 1: mod_base = OTHER; note = 5'-(E)-vinylphosphonate 2'-O-methylated uridine with phosphorothioate linkage
  modified_base 2: mod_base = OTHER; note = 2'-fluorocytidine with phosphorothioate linkage
  modified_base 3: mod_base = OTHER; note = 2'-O-methyluridine
  modified_base 4: mod_base = OTHER; note = 2'-O-methylcytidine
  modified_base 5: mod_base = OTHER; note = 2'-O-methylguanosine
  modified_base 6: mod_base = OTHER; note = 2'-fluoroadenosine
  modified_base 7: mod_base = OTHER; note = 2'-O-methyluridine
  modified_base 8: mod_base = OTHER; note = 2'-O-methyladenosine
  modified_base 9: mod_base = OTHER; note = 2'-O-methyladenosine
  modified_base 10: mod_base = OTHER; note = 2'-O-methyladenosine
  modified_base 11: mod_base = OTHER; note = 2'-O-methyladenosine
  modified_base 12: mod_base = OTHER; note = 2'-O-methyladenosine
  modified_base 13: mod_base = OTHER; note = 2'-O-methyluridine
  modified_base 14: mod_base = OTHER; note = 2'-fluoroadenosine
  modified_base 15: mod_base = OTHER; note = 2'-O-methyladenosine
  modified_base 16: mod_base = OTHER; note = 2'-fluoroguanosine
  modified_base 17: mod_base = OTHER; note = 2'-O-methyladenosine
  modified_base 18: mod_base = OTHER; note = 2'-O-methyladenosine
  modified_base 19: mod_base = OTHER; note = 2'-O-methyluridine
  modified_base 20: mod_base = OTHER; note = 2'-O-methylguanosine
  modified_base 21: mod_base = OTHER; note = 2'-O-methyluridine with phosphorothioate linkage
  modified_base 22: mod_base = OTHER; note = 2'-O-methylcytidine with phosphorothioate linkage
  modified_base 23: mod_base = OTHER; note = 2'-O-methylcytidine
tctcgataaaaataagaatgtcc

SEQ ID NO: 775 - RNA, 23 nt, synthetic construct
  source 1..23: mol_type = other RNA
  modified_base 1: mod_base = OTHER; note = 5'-(E)-vinylphosphonate 2'-O-methylated adenosine with phosphorothioate linkage
  modified_base 2: mod_base = OTHER; note = 2'-fluoroadenosine with phosphorothioate linkage
  modified_base 3: mod_base = OTHER; note = 2'-O-methylcytidine
  modified_base 4: mod_base = OTHER; note = 2'-O-methyluridine
  modified_base 5: mod_base = OTHER; note = 2'-O-methylguanosine
  modified_base 6: mod_base = OTHER; note = 2'-fluoroguanosine
  modified_base 7: mod_base = OTHER; note = 2'-O-methyluridine
  modified_base 8: mod_base = OTHER; note = 2'-fluoroguanosine
  modified_base 9: mod_base = OTHER; note = 2'-fluoroadenosine
  modified_base 10: mod_base = OTHER; note = 2'-O-methyladenosine
  modified_base 11: mod_base = OTHER; note = 2'-O-methyluridine
  modified_base 12: mod_base = OTHER; note = 2'-O-methylguanosine
  misc_difference 13: note = Any nucleotide (a, g, c, u, t) modified or unmodified
  modified_base 14: mod_base = OTHER; note = 2'-fluorocytidine
  modified_base 15: mod_base = OTHER; note = 2'-O-methyluridine
  modified_base 16: mod_base = OTHER; note = 2'-fluoroguanosine
  modified_base 17: mod_base = OTHER; note = 2'-O-methyluridine
  modified_base 18: mod_base = OTHER; note = 1-N-Methylpseudouridine 2'-O-methylated
  modified_base 19: mod_base = OTHER; note = 2'-O-methyluridine
  modified_base 20: mod_base = OTHER; note = 2'-O-methylguanosine
  modified_base 21: mod_base = OTHER; note = 2'-O-methylcytidine with phosphorothioate linkage
  modified_base 22: mod_base = OTHER; note = 2'-O-methyladenosine with phosphorothioate linkage
  modified_base 23: mod_base = OTHER; note = 2'-O-methyladenosine
aactggtgaatgnctgtntgcaa

SEQ ID NO: 776 - RNA, 23 nt, synthetic construct
  source 1..23: mol_type = other RNA
  modified_base 1: mod_base = OTHER; note = 5'-(E)-vinylphosphonate 2'-O-methylated uridine with phosphorothioate linkage
  modified_base 2: mod_base = OTHER; note = 2'-fluoroguanosine with phosphorothioate linkage
  modified_base 3: mod_base = OTHER; note = 2'-O-methylcytidine
  modified_base 4: mod_base = OTHER; note = 2'-O-methyluridine
  modified_base 5: mod_base = OTHER; note = 2'-O-methylguanosine
  modified_base 6: mod_base = OTHER; note = 2'-fluorouridine
  modified_base 7: mod_base = OTHER; note = 2'-O-methyluridine
  modified_base 8: mod_base = OTHER; note = 2'-fluorouridine
  modified_base 9: mod_base = OTHER; note = 2'-fluoroguanosine
  modified_base 10: mod_base = OTHER; note = 2'-O-methylcytidine
  modified_base 11: mod_base = OTHER; note = 2'-O-methyladenosine
  modified_base 12: mod_base = OTHER; note = 2'-O-methyladenosine
  modified_base 13: mod_base = OTHER; note = 2'-O-methylguanosine
  modified_base 14: mod_base = OTHER; note = 2'-fluorouridine
  modified_base 15: mod_base = OTHER; note = 2'-O-methyluridine
  modified_base 16: mod_base = OTHER; note = 2'-fluoroguanosine
  modified_base 17: mod_base = OTHER; note = 2'-O-methyluridine
  modified_base 18: mod_base = OTHER; note = 2'-O-methyladenosine
  modified_base 19: mod_base = OTHER; note = 2'-O-methylcytidine
  modified_base 20: mod_base = OTHER; note = 2'-O-methyladenosine
  modified_base 21: mod_base = OTHER; note = 2'-O-methyluridine with phosphorothioate linkage
  modified_base 22: mod_base = OTHER; note = 2'-O-methylguanosine with phosphorothioate linkage
  modified_base 23: mod_base = OTHER; note = 2'-O-methyluridine
tgctgtttgcaagttgtacatgt

SEQ ID NO: 777 - RNA, 23 nt, synthetic construct
  source 1..23: mol_type = other RNA
  modified_base 1: mod_base = OTHER; note = 5'-(E)-vinylphosphonate 2'-O-methylated adenosine with phosphorothioate linkage
  modified_base 2: mod_base = OTHER; note = 2'-fluoroadenosine with phosphorothioate linkage
  modified_base 3: mod_base = OTHER; note = 2'-O-methyluridine
  modified_base 4: mod_base = OTHER; note = 2'-O-methylguanosine
  modified_base 5: mod_base = OTHER; note = 2'-O-methyladenosine
  modified_base 6: mod_base = OTHER; note = 2'-fluoroguanosine
  modified_base 7: mod_base = OTHER; note = 2'-O-methyluridine
  modified_base 8: mod_base = OTHER; note = 2'-fluoroguanosine
  modified_base 9: mod_base = OTHER; note = 2'-fluorouridine
  modified_base 10: mod_base = OTHER; note = 2'-O-methyluridine
  modified_base 11: mod_base = OTHER; note = 2'-O-methylcytidine
  modified_base 12: mod_base = OTHER; note = 2'-O-methyluridine
  modified_base 13: mod_base = OTHER; note = 2'-O-methylguanosine
  modified_base 14: mod_base = OTHER; note = 2'-fluorouridine
  modified_base 15: mod_base = OTHER; note = 2'-O-methylguanosine
  modified_base 16: mod_base = OTHER; note = 2'-fluorocytidine
  modified_base 17: mod_base = OTHER; note = 2'-O-methylguanosine
  modified_base 18: mod_base = OTHER; note = 2'-O-methyluridine
  modified_base 19: mod_base = OTHER; note = 2'-O-methylguanosine
  modified_base 20: mod_base = OTHER; note = 2'-O-methyluridine
  modified_base 21: mod_base = OTHER; note = 2'-O-methyluridine with phosphorothioate linkage
  modified_base 22: mod_base = OTHER; note = 2'-O-methylguanosine with phosphorothioate linkage
  modified_base 23: mod_base = OTHER; note = 2'-O-methylcytidine
aatgagtgttctgtgcgtgttgc

SEQ ID NO: 778 - RNA, 23 nt, synthetic construct
  source 1..23: mol_type = other RNA
  modified_base 1: mod_base = OTHER; note = 5'-(E)-vinylphosphonate 2'-O-methylated uridine with phosphorothioate linkage
  modified_base 2: mod_base = OTHER; note = 2'-fluoroguanosine with phosphorothioate linkage
  modified_base 3: mod_base = OTHER; note = 2'-O-methylcytidine
  modified_base 4: mod_base = OTHER; note = 2'-O-methyladenosine
  modified_base 5: mod_base = OTHER; note = 2'-O-methyladenosine
  modified_base 6: mod_base = OTHER; note = 2'-fluoroguanosine
  modified_base 7: mod_base = OTHER; note = 2'-O-methyluridine
  modified_base 8: mod_base = OTHER; note = 2'-fluorouridine
  modified_base 9: mod_base = OTHER; note = 2'-fluoroguanosine
  modified_base 10: mod_base = OTHER; note = 2'-O-methyluridine
  modified_base 11: mod_base = OTHER; note = 2'-O-methyladenosine
  modified_base 12: mod_base = OTHER; note = 2'-O-methylcytidine
  modified_base 13: mod_base = OTHER; note = 2'-O-methyladenosine
  modified_base 14: mod_base = OTHER; note = 2'-fluorouridine
  modified_base 15: mod_base = OTHER; note = 2'-O-methylguanosine
  modified_base 16: mod_base = OTHER; note = 2'-fluorouridine
  modified_base 17: mod_base = OTHER; note = 2'-O-methylguanosine
  modified_base 18: mod_base = OTHER; note = 1-N-Methylpseudouridine 2'-O-methylated
  modified_base 19: mod_base = OTHER; note = 2'-O-methyladenosine
  modified_base 20: mod_base = OTHER; note = 2'-O-methylguanosine
  modified_base 21: mod_base = OTHER; note = 2'-O-methylcytidine with phosphorothioate linkage
  modified_base 22: mod_base = OTHER; note = 2'-O-methyluridine with phosphorothioate linkage
  modified_base 23: mod_base = OTHER; note = 2'-O-methylguanosine
tgcaagttgtacatgtgnagctg

SEQ ID NO: 779 - RNA, 23 nt, synthetic construct
  source 1..23: mol_type = other RNA
  modified_base 1: mod_base = OTHER; note = 5'-(E)-vinylphosphonate 2'-O-methylated uridine with phosphorothioate linkage
  modified_base 2: mod_base = OTHER; note = 2'-fluoroguanosine with phosphorothioate linkage
  modified_base 3: mod_base = OTHER; note = 2'-O-methyluridine
  modified_base 4: mod_base = OTHER; note = 2'-O-methyluridine
  modified_base 5: mod_base = OTHER; note = 2'-O-methyluridine
  modified_base 6: mod_base = OTHER; note = 2'-fluoroguanosine
  modified_base 7: mod_base = OTHER; note = 2'-O-methylcytidine
  modified_base 8: mod_base = OTHER; note = 2'-O-methyladenosine
  modified_base 9: mod_base = OTHER; note = 2'-O-methyladenosine
  modified_base 10: mod_base = OTHER; note = 2'-O-methylguanosine
  modified_base 11: mod_base = OTHER; note = 2'-O-methyluridine
  modified_base 12: mod_base = OTHER; note = 2'-O-methyluridine
  modified_base 13: mod_base = OTHER; note = 2'-O-methylguanosine
  modified_base 14: mod_base = OTHER; note = 2'-fluorouridine
  modified_base 15: mod_base = OTHER; note = 2'-O-methyladenosine
  modified_base 16: mod_base = OTHER; note = 2'-fluorocytidine
  modified_base 17: mod_base = OTHER; note = 2'-O-methyladenosine
  modified_base 18: mod_base = OTHER; note = 2'-O-methyluridine
  modified_base 19: mod_base = OTHER; note = 2'-O-methylguanosine
  modified_base 20: mod_base = OTHER; note = 2'-O-methyluridine
  modified_base 21: mod_base = OTHER; note = 2'-O-methylguanosine with phosphorothioate linkage
  modified_base 22: mod_base = OTHER; note = 2'-O-methyluridine with phosphorothioate linkage
  modified_base 23: mod_base = OTHER; note = 2'-O-methyladenosine
tgtttgcaagttgtacatgtgta

SEQ ID NO: 780 - RNA, 23 nt, synthetic construct
  source 1..23: mol_type = other RNA
  modified_base 1: mod_base = OTHER; note = 5'-(E)-vinylphosphonate 2'-O-methylated uridine with phosphorothioate linkage
  modified_base 2: mod_base = OTHER; note = 2'-fluoroguanosine with phosphorothioate linkage
  modified_base 3: mod_base = OTHER; note = 2'-O-methyluridine
  modified_base 4: mod_base = OTHER; note = 2'-O-methylguanosine
  modified_base 5: mod_base = OTHER; note = 2'-O-methyladenosine
  modified_base 6: mod_base = OTHER; note = 2'-fluoroadenosine
  modified_base 7: mod_base = OTHER; note = 2'-O-methyluridine
  modified_base 8: mod_base = OTHER; note = 2'-fluoroguanosine
  modified_base 9: mod_base = OTHER; note = 2'-fluoroguanosine
  modified_base 10: mod_base = OTHER; note = 2'-O-methylcytidine
  modified_base 11: mod_base = OTHER; note = 2'-O-methyluridine
  modified_base 12: mod_base = OTHER; note = 2'-O-methylguanosine
  modified_base 13: mod_base = OTHER; note = 2'-O-methyluridine
  modified_base 14: mod_base = OTHER; note = 2'-fluorouridine
  modified_base 15: mod_base = OTHER; note = 2'-O-methyluridine
  modified_base 16: mod_base = OTHER; note = 2'-fluoroguanosine
  modified_base 17: mod_base = OTHER; note = 2'-O-methylcytidine
  modified_base 18: mod_base = OTHER; note = 2'-O-methyladenosine
  modified_base 19: mod_base = OTHER; note = 2'-O-methyladenosine
  modified_base 20: mod_base = OTHER; note = 2'-O-methylguanosine
  modified_base 21: mod_base = OTHER; note = 1-N-Methylpseudouridine 2'-O-methylated with phosphorothioate linkage
  modified_base 22: mod_base = OTHER; note = 2'-O-methyluridine with phosphorothioate linkage
  modified_base 23: mod_base = OTHER; note = 2'-O-methylguanosine
tgtgaatggctgtttgcaagntg

SEQ ID NO: 781 - RNA, 23 nt, synthetic construct
  source 1..23: mol_type = other RNA
  modified_base 1: mod_base = OTHER; note = 5'-(E)-vinylphosphonate 2'-O-methylated uridine with phosphorothioate linkage
  modified_base 2: mod_base = OTHER; note = 2'-fluoroadenosine with phosphorothioate linkage
  modified_base 3: mod_base = OTHER; note = 2'-O-methyluridine
  modified_base 4: mod_base = OTHER; note = 2'-O-methylcytidine
  modified_base 5: mod_base = OTHER; note = 2'-O-methylcytidine
  modified_base 6: mod_base = OTHER; note = 2'-fluoroadenosine
  modified_base 7: mod_base = OTHER; note = 2'-O-methyluridine
  modified_base 8: mod_base = OTHER; note = 2'-O-methylguanosine
  modified_base 9: mod_base = OTHER; note = 2'-O-methyladenosine
  modified_base 10: mod_base = OTHER; note = 2'-O-methylguanosine
  modified_base 11: mod_base = OTHER; note = 2'-O-methyluridine
  modified_base 12: mod_base = OTHER; note = 2'-O-methylguanosine
  modified_base 13: mod_base = OTHER; note = 2'-O-methyluridine
  modified_base 14: mod_base = OTHER; note = 2'-fluorouridine
  modified_base 15: mod_base = OTHER; note = 2'-O-methylcytidine
  modified_base 16: mod_base = OTHER; note = 2'-fluorouridine
  modified_base 17: mod_base = OTHER; note = 2'-O-methylguanosine
  modified_base 18: mod_base = OTHER; note = 2'-O-methyluridine
  modified_base 19: mod_base = OTHER; note = 2'-O-methylguanosine
  modified_base 20: mod_base = OTHER; note = 2'-O-methylcytidine
  modified_base 21: mod_base = OTHER; note = 2'-O-methylguanosine with phosphorothioate linkage
  modified_base 22: mod_base = OTHER; note = 2'-O-methyluridine with phosphorothioate linkage
  modified_base 23: mod_base = OTHER; note = 2'-O-methylguanosine
tatccatgagtgttctgtgcgtg

SEQ ID NO: 782 - RNA, 23 nt, synthetic construct
  source 1..23: mol_type = other RNA
  modified_base 1: mod_base = OTHER; note = 5'-(E)-vinylphosphonate 2'-O-methylated uridine with phosphorothioate linkage
  modified_base 2: mod_base = OTHER; note = 2'-fluorouridine with phosphorothioate linkage
  modified_base 3: mod_base = OTHER; note = 2'-O-methylguanosine
  modified_base 4: mod_base = OTHER; note = 2'-O-methylcytidine
  modified_base 5: mod_base = OTHER; note = 2'-O-methyluridine
  modified_base 6: mod_base = OTHER; note = 2'-fluorocytidine
  modified_base 7: mod_base = OTHER; note = 2'-O-methylguanosine
  modified_base 8: mod_base = OTHER; note = 2'-O-methyladenosine
  modified_base 9: mod_base = OTHER; note = 2'-O-methyluridine
  modified_base 10: mod_base = OTHER; note = 2'-O-methyladenosine
  modified_base 11: mod_base = OTHER; note = 2'-O-methyladenosine
  modified_base 12: mod_base = OTHER; note = 2'-O-methyladenosine
  modified_base 13: mod_base = OTHER; note = 2'-O-methyladenosine
  modified_base 14: mod_base = OTHER; note = 2'-fluoroadenosine
  modified_base 15: mod_base = OTHER; note = 2'-O-methyluridine
  modified_base 16: mod_base = OTHER; note = 2'-fluoroadenosine
  modified_base 17: mod_base = OTHER; note = 2'-O-methyladenosine
  modified_base 18: mod_base = OTHER; note = 2'-O-methylguanosine
  modified_base 19: mod_base = OTHER; note = 2'-O-methyladenosine
  modified_base 20: mod_base = OTHER; note = 2'-O-methyladenosine
  modified_base 21: mod_base = OTHER; note = 2'-O-methyluridine with phosphorothioate linkage
  modified_base 22: mod_base = OTHER; note = 2'-O-methylguanosine with phosphorothioate linkage
  modified_base 23: mod_base = OTHER; note = 2'-O-methyluridine
ttgctcgataaaaataagaatgt

SEQ ID NO: 783 - RNA, 23 nt, synthetic construct
  source 1..23: mol_type = other RNA
  modified_base 1: mod_base = OTHER; note = 5'-(E)-vinylphosphonate 2'-O-methylated uridine with phosphorothioate linkage
  modified_base 2: mod_base = OTHER; note = 2'-fluorouridine with phosphorothioate linkage
  modified_base 3: mod_base = OTHER; note = 2'-O-methylguanosine
  modified_base 4: mod_base = OTHER; note = 2'-O-methylcytidine
  modified_base 5: mod_base = OTHER; note = 2'-O-methyladenosine
  modified_base 6: mod_base = OTHER; note = 2'-fluoroadenosine
  modified_base 7: mod_base = OTHER; note = 2'-O-methylguanosine
  modified_base 8: mod_base = OTHER; note = 2'-fluoroadenosine
  modified_base 9: mod_base = OTHER; note = 2'-fluoroguanosine
  modified_base 10: mod_base = OTHER; note = 2'-O-methyladenosine
  modified_base 11: mod_base = OTHER; note = 2'-O-methyladenosine
  modified_base 12: mod_base = OTHER; note = 2'-O-methyladenosine
  modified_base 13: mod_base = OTHER; note = 2'-O-methylcytidine
  modified_base 14: mod_base = OTHER; note = 2'-fluorocytidine
  modified_base 15: mod_base = OTHER; note = 2'-O-methyladenosine
  modified_base 16: mod_base = OTHER; note = 2'-fluorouridine
  modified_base 17: mod_base = OTHER; note = 2'-O-methylguanosine
  modified_base 18: mod_base = OTHER; note = 2'-O-methylcytidine
  modified_base 19: mod_base = OTHER; note = 2'-O-methyladenosine
  modified_base 20: mod_base = OTHER; note = 2'-O-methylcytidine
  modified_base 21: mod_base = OTHER; note = 1-N-Methylpseudouridine 2'-O-methylated with phosphorothioate linkage
  modified_base 22: mod_base = OTHER; note = 2'-O-methylguanosine with phosphorothioate linkage
  modified_base 23: mod_base = OTHER; note = 2'-O-methylguanosine
ttgcaagagaaaccatgcacngg

SEQ ID NO: 784 - RNA, 23 nt, synthetic construct
  source 1..23: mol_type = other RNA
  modified_base 1: mod_base = OTHER; note = 5'-(E)-vinylphosphonate 2'-O-methylated uridine with phosphorothioate linkage
  modified_base 2: mod_base = OTHER; note = 2'-fluoroguanosine with phosphorothioate linkage
  modified_base 3: mod_base = OTHER; note = 2'-O-methylguanosine
  modified_base 4: mod_base = OTHER; note = 2'-O-methylguanosine
  modified_base 5: mod_base = OTHER; note = 2'-O-methylcytidine
  modified_base 6: mod_base = OTHER; note = 2'-fluoroadenosine
  modified_base 7: mod_base = OTHER; note = 2'-O-methyladenosine
  modified_base 8: mod_base = OTHER; note = 2'-O-methyladenosine
  modified_base 9: mod_base = OTHER; note = 2'-O-methyluridine
  modified_base 10: mod_base = OTHER; note = 2'-O-methyluridine
  modified_base 11: mod_base = OTHER; note = 2'-O-methylcytidine
  modified_base 12: mod_base = OTHER; note = 2'-O-methylcytidine
  modified_base 13: mod_base = OTHER; note = 2'-O-methyluridine
  modified_base 14: mod_base = OTHER; note = 2'-fluorocytidine
  modified_base 15: mod_base = OTHER; note = 2'-O-methyluridine
  modified_base 16: mod_base = OTHER; note = 2'-fluoroadenosine
  modified_base 17: mod_base = OTHER; note = 2'-O-methylguanosine
  modified_base 18: mod_base = OTHER; note = 2'-O-methyladenosine
  modified_base 19: mod_base = OTHER; note = 2'-O-methyluridine
  modified_base 20: mod_base = OTHER; note = 2'-O-methylguanosine
  modified_base 21: mod_base = OTHER; note = 2'-O-methyladenosine with phosphorothioate linkage
  modified_base 22: mod_base = OTHER; note = 2'-O-methylcytidine with phosphorothioate linkage
  modified_base 23: mod_base = OTHER; note = 2'-O-methylguanosine
tgggcaaattcctctagatgacg

SEQ ID NO: 785 - RNA, 23 nt, synthetic construct
  source 1..23: mol_type = other RNA
  modified_base 1: mod_base = OTHER; note = 5'-(E)-vinylphosphonate 2'-O-methylated uridine with phosphorothioate linkage
  modified_base 2: mod_base = OTHER; note = 2'-fluorocytidine with phosphorothioate linkage
  modified_base 3: mod_base = OTHER; note = 2'-O-methylcytidine
  modified_base 4: mod_base = OTHER; note = 2'-O-methylguanosine
  modified_base 5: mod_base = OTHER; note = 2'-O-methylcytidine
  modified_base 6: mod_base = OTHER; note = 2'-fluoroguanosine
  modified_base 7: mod_base = OTHER; note = 2'-O-methylcytidine
  modified_base 8: mod_base = OTHER; note = 2'-O-methyluridine
  modified_base 9: mod_base = OTHER; note = 2'-O-methyluridine
  modified_base 10: mod_base = OTHER; note = 2'-O-methyladenosine
  modified_base 11: mod_base = OTHER; note = 2'-O-methyluridine
  modified_base 12: mod_base = OTHER; note = 2'-O-methylguanosine
  modified_base 13: mod_base = OTHER; note = 2'-O-methylcytidine
  modified_base 14: mod_base = OTHER; note = 2'-fluorouridine
  modified_base 15: mod_base = OTHER; note = 2'-O-methyluridine
  modified_base 16: mod_base = OTHER; note = 2'-fluorocytidine
  modified_base 17: mod_base = OTHER; note = 2'-O-methyluridine
  modified_base 18: mod_base = OTHER; note = 2'-O-methylcytidine
  modified_base 19: mod_base = OTHER; note = 2'-O-methylguanosine
  modified_base 20: mod_base = OTHER; note = 2'-O-methylcytidine
  modified_base 21: mod_base = OTHER; note = 2'-O-methylcytidine with phosphorothioate linkage
  modified_base 22: mod_base = OTHER; note = 2'-O-methylcytidine with phosphorothioate linkage
  modified_base 23: mod_base = OTHER; note = 2'-O-methyladenosine
tccgcgcttatgcttctcgccca

SEQ ID NO: 786 - RNA, 23 nt, synthetic construct
  source 1..23: mol_type = other RNA
  modified_base 1: mod_base = OTHER; note = 5'-(E)-vinylphosphonate 2'-O-methylated uridine with phosphorothioate linkage
  modified_base 2: mod_base = OTHER; note = 2'-fluorocytidine with phosphorothioate linkage
  modified_base 3: mod_base = OTHER; note = 2'-O-methyladenosine
  modified_base 4: mod_base = OTHER; note = 2'-O-methylcytidine
  modified_base 5: mod_base = OTHER; note = 2'-O-methylguanosine
  modified_base 6: mod_base = OTHER; note = 2'-fluorocytidine
  modified_base 7: mod_base = OTHER; note = 2'-O-methyluridine
  modified_base 8: mod_base = OTHER; note = 2'-O-methyladenosine
  modified_base 9: mod_base = OTHER; note = 2'-O-methyladenosine
  modified_base 10: mod_base = OTHER; note = 2'-O-methyladenosine
  modified_base 11: mod_base = OTHER; note = 2'-O-methyladenosine
  modified_base 12: mod_base = OTHER; note = 2'-O-methylguanosine
  modified_base 13: mod_base = OTHER; note = 2'-O-methylguanosine
  modified_base 14: mod_base = OTHER; note = 2'-fluorocytidine
  modified_base 15: mod_base = OTHER; note = 2'-O-methyladenosine
  modified_base 16: mod_base = OTHER; note = 2'-fluorouridine
  modified_base 17: mod_base = OTHER; note = 2'-O-methylcytidine
  modified_base 18: mod_base = OTHER; note = 2'-O-methyluridine
  modified_base 19: mod_base = OTHER; note = 2'-O-methyluridine
  modified_base 20: mod_base = OTHER; note = 2'-O-methyladenosine
  modified_base 21: mod_base = OTHER; note = 2'-O-methylcytidine with phosphorothioate linkage
  modified_base 22: mod_base = OTHER; note = 2'-O-methyladenosine with phosphorothioate linkage
  modified_base 23: mod_base = OTHER; note = 2'-O-methyladenosine
tcacgctaaaaggcatcttacaa

SEQ ID NO: 787 - RNA, 23 nt, synthetic construct
  source 1..23: mol_type = other RNA
  modified_base 1: mod_base = OTHER; note = 5'-(E)-vinylphosphonate 2'-O-methylated adenosine with phosphorothioate linkage
  modified_base 2: mod_base = OTHER; note = 2'-fluorouridine with phosphorothioate linkage
  modified_base 3: mod_base = OTHER; note = 2'-O-methyluridine
  modified_base 4: mod_base = OTHER; note = 2'-O-methylguanosine
  modified_base 5: mod_base = OTHER; note = 2'-O-methyluridine
  modified_base 6: mod_base = OTHER; note = 2'-fluorocytidine
  modified_base 7: mod_base = OTHER; note = 2'-O-methyluridine
  modified_base 8: mod_base = OTHER; note = 2'-fluoroguanosine
  modified_base 9: mod_base = OTHER; note = 2'-fluorocytidine
  modified_base 10: mod_base = OTHER; note = 2'-O-methyladenosine
  modified_base 11: mod_base = OTHER; note = 2'-O-methyladenosine
  modified_base 12: mod_base = OTHER; note = 2'-O-methyluridine
  modified_base 13: mod_base = OTHER; note = 2'-O-methyladenosine
  modified_base 14: mod_base = OTHER; note = 2'-fluorouridine
  modified_base 15: mod_base = OTHER; note = 2'-O-methylguanosine
  modified_base 16: mod_base = OTHER; note = 2'-fluoroadenosine
  modified_base 17: mod_base = OTHER; note = 2'-O-methyladenosine
  modified_base 18: mod_base = OTHER; note = 1-N-Methylpseudouridine 2'-O-methylated
  modified_base 19: mod_base = OTHER; note = 2'-O-methylcytidine
  modified_base 20: mod_base = OTHER; note = 2'-O-methylcytidine
  modified_base 21: mod_base = OTHER; note = 2'-O-methylcytidine with phosphorothioate linkage
  modified_base 22: mod_base = OTHER; note = 2'-O-methyladenosine with phosphorothioate linkage
  modified_base 23: mod_base = OTHER; note = 2'-O-methyluridine
attgtctgcaatatgaancccat

SEQ ID NO: 788 - RNA, 23 nt, synthetic construct
  source 1..23: mol_type = other RNA
  modified_base 1: mod_base = OTHER; note = 5'-(E)-vinylphosphonate 2'-O-methylated uridine with phosphorothioate linkage
  modified_base 2: mod_base = OTHER; note = 2'-fluorouridine with phosphorothioate linkage
  modified_base 3: mod_base = OTHER; note = 2'-O-methyluridine
  modified_base 4: mod_base = OTHER; note = 2'-fluorouridine
  modified_base 5: mod_base = OTHER; note = 2'-O-methylcytidine
  modified_base 6: mod_base = OTHER; note = 2'-fluorouridine
  modified_base 7: mod_base = OTHER; note = 2'-O-methyladenosine
  modified_base 8: mod_base = OTHER; note = 2'-fluoroadenosine
  modified_base 9: mod_base = OTHER; note = 2'-O-methylguanosine
  modified_base 10: mod_base = OTHER; note = 2'-fluorouridine
  modified_base 11: mod_base = OTHER; note = 2'-O-methyladenosine
  modified_base 12: mod_base = OTHER; note = 2'-fluoroguanosine
  modified_base 13: mod_base = OTHER; note = 2'-O-methyladenosine
  modified_base 14: mod_base = OTHER; note = 2'-fluorouridine
  modified_base 15: mod_base = OTHER; note = 2'-O-methyluridine
  modified_base 16: mod_base = OTHER; note = 2'-fluorocytidine
  modified_base 17: mod_base = OTHER; note = 2'-O-methyluridine
  modified_base 18: mod_base = OTHER; note = 2'-fluorouridine
  modified_base 19: mod_base = OTHER; note = 2'-O-methyladenosine
  modified_base 20: mod_base = OTHER; note = 2'-fluoroadenosine
  modified_base 21: mod_base = OTHER; note = 2'-O-methyluridine with phosphorothioate linkage
  modified_base 22: mod_base = OTHER; note = 2'-O-methylcytidine with phosphorothioate linkage
  modified_base 23: mod_base = OTHER; note = 2'-O-methylcytidine
ttttctaagtagattcttaatcc

SEQ ID NO: 789 - RNA, 23 nt, synthetic construct
  source 1..23: mol_type = other RNA
  modified_base 1: mod_base = OTHER; note = 5'-(E)-vinylphosphonate 2'-O-methylated uridine with phosphorothioate linkage
  modified_base 2: mod_base = OTHER; note = 2'-fluorocytidine with phosphorothioate linkage
  modified_base 3: mod_base = OTHER; note = 2'-O-methyladenosine
  modified_base 4: mod_base = OTHER; note = 2'-fluorocytidine
  modified_base 5: mod_base = OTHER; note = 2'-O-methyladenosine
  modified_base 6: mod_base = OTHER; note = 2'-fluorouridine
  modified_base 7: mod_base = OTHER; note = 2'-O-methyluridine
  modified_base 8: mod_base = OTHER; note = 2'-fluorouridine
  modified_base 9: mod_base = OTHER; note = 2'-O-methylguanosine
  modified_base 10: mod_base = OTHER; note = 2'-fluorouridine
  modified_base 11: mod_base = OTHER; note = 2'-O-methyladenosine
  modified_base 12: mod_base = OTHER; note = 2'-fluoroadenosine
  modified_base 13: mod_base = OTHER; note = 2'-O-methyladenosine
  modified_base 14: mod_base = OTHER; note = 2'-fluorocytidine
  modified_base 15: mod_base = OTHER; note = 2'-O-methylguanosine
  modified_base 16: mod_base = OTHER; note = 2'-fluorouridine
  modified_base 17: mod_base = OTHER; note = 2'-O-methylcytidine
  modified_base 18: mod_base = OTHER; note = 2'-fluorocytidine
  modified_base 19: mod_base = OTHER; note = 2'-O-methyluridine
  modified_base 20: mod_base = OTHER; note = 2'-fluorouridine
  modified_base 21: mod_base = OTHER; note = 2'-O-methylcytidine with phosphorothioate linkage
  modified_base 22: mod_base = OTHER; note = 2'-O-methylcytidine with phosphorothioate linkage
  modified_base 23: mod_base = OTHER; note = 2'-O-methylcytidine
tcacatttgtaaacgtccttccc

SEQ ID NO: 790 - RNA, 23 nt, synthetic construct
  source 1..23: mol_type = other RNA
  modified_base 1: mod_base = OTHER; note = 5'-(E)-vinylphosphonate 2'-O-methylated uridine with phosphorothioate linkage
  modified_base 2: mod_base = OTHER; note = 2'-fluoroadenosine with phosphorothioate linkage
  modified_base 3: mod_base = OTHER; note = 2'-O-methyladenosine
  modified_base 4: mod_base = OTHER; note = 2'-fluorouridine
  modified_base 5: mod_base = OTHER; note = 2'-O-methylcytidine
  modified_base 6: mod_base = OTHER; note = 2'-fluorocytidine
  modified_base 7: mod_base = OTHER; note = 2'-O-methyladenosine
  modified_base 8: mod_base = OTHER; note = 2'-fluorouridine
  modified_base 9: mod_base = OTHER; note = 2'-O-methylguanosine
  modified_base 10: mod_base = OTHER; note = 2'-fluoroadenosine
  modified_base 11: mod_base = OTHER; note = 2'-O-methylguanosine
  modified_base 12: mod_base = OTHER; note = 2'-fluorouridine
  modified_base 13: mod_base = OTHER; note = 2'-O-methylguanosine
  modified_base 14: mod_base = OTHER; note = 2'-fluorouridine
  modified_base 15: mod_base = OTHER; note = 2'-O-methyluridine
  modified_base 16: mod_base = OTHER; note = 2'-fluorocytidine
  modified_base 17: mod_base = OTHER; note = 2'-O-methyluridine
  modified_base 18: mod_base = OTHER; note = 2'-fluoroguanosine
  modified_base 19: mod_base = OTHER; note = 2'-O-methyluridine
  modified_base 20: mod_base = OTHER; note = 2'-fluoroguanosine
  modified_base 21: mod_base = OTHER; note = 2'-O-methylcytidine with phosphorothioate linkage
  modified_base 22: mod_base = OTHER; note = 2'-O-methylguanosine with phosphorothioate linkage
  modified_base 23: mod_base = OTHER; note = 2'-O-methyluridine
taatccatgagtgttctgtgcgt

SEQ ID NO: 791 - RNA, 23 nt, synthetic construct
  source 1..23: mol_type = other RNA
  modified_base 1: mod_base = OTHER; note = 5'-(E)-vinylphosphonate 2'-O-methylated adenosine with phosphorothioate linkage
  modified_base 2: mod_base = OTHER; note = 2'-fluoroguanosine with phosphorothioate linkage
  modified_base 3: mod_base = OTHER; note = 2'-O-methylguanosine
  modified_base 4: mod_base = OTHER; note = 2'-fluoroadenosine
  modified_base 5: mod_base = OTHER; note = 2'-O-methylcytidine
  modified_base 6: mod_base = OTHER; note = 2'-fluoroadenosine
  modified_base 7: mod_base = OTHER; note = 2'-O-methyluridine
  modified_base 8: mod_base = OTHER; note = 2'-fluorouridine
  modified_base 9: mod_base = OTHER; note = 2'-O-methylcytidine
  modified_base 10: mod_base = OTHER; note = 2'-fluorouridine
  modified_base 11: mod_base = OTHER; note = 2'-O-methylguanosine
  modified_base 12: mod_base = OTHER; note = 2'-fluorocytidine
  modified_base 13: mod_base = OTHER; note = 2'-O-methyladenosine
  modified_base 14: mod_base = OTHER; note = 2'-fluorocytidine
  modified_base 15: mod_base = OTHER; note = 2'-O-methylcytidine
  modified_base 16: mod_base = OTHER; note = 2'-fluorouridine
  modified_base 17: mod_base = OTHER; note = 2'-O-methyladenosine
  modified_base 18: mod_base = OTHER; note = 2'-fluoroguanosine
  modified_base 19: mod_base = OTHER; note = 2'-O-methyluridine
  modified_base 20: mod_base = OTHER; note = 2'-fluorocytidine
  modified_base 21: mod_base = OTHER; note = 2'-O-methylcytidine with phosphorothioate linkage
  modified_base 22: mod_base = OTHER; note = 2'-O-methyluridine with phosphorothioate linkage
  modified_base 23: mod_base = OTHER; note = 2'-O-methylguanosine
aggacattctgcacctagtcctg

SEQ ID NO: 792 - RNA, 23 nt, synthetic construct
  source 1..23: mol_type = other RNA
  modified_base 1: mod_base = OTHER; note = 5'-(E)-vinylphosphonate 2'-O-methylated adenosine with phosphorothioate linkage
  modified_base 2: mod_base = OTHER; note = 2'-fluoroadenosine with phosphorothioate linkage
  modified_base 3: mod_base = OTHER; note = 2'-O-methylguanosine
  modified_base 4: mod_base = OTHER; note = 2'-fluoroguanosine
  modified_base 5: mod_base = OTHER; note = 2'-O-methylcytidine
  modified_base 6: mod_base = OTHER; note = 2'-fluoroadenosine
  modified_base 7: mod_base = OTHER; note = 2'-O-methyluridine
  modified_base 8: mod_base = OTHER; note = 2'-fluorocytidine
  modified_base 9: mod_base = OTHER; note = 2'-O-methyluridine
  modified_base 10: mod_base = OTHER; note = 2'-fluorouridine
  modified_base 11: mod_base = OTHER; note = 2'-O-methyladenosine
  modified_base 12: mod_base = OTHER; note = 2'-fluorocytidine
  modified_base 13: mod_base = OTHER; note = 2'-O-methyladenosine
  modified_base 14: mod_base = OTHER; note = 2'-fluoroadenosine
  modified_base 15: mod_base = OTHER; note = 2'-O-methyladenosine
  modified_base 16: mod_base = OTHER; note = 2'-fluorouridine
  modified_base 17: mod_base = OTHER; note = 2'-O-methyluridine
  modified_base 18: mod_base = OTHER; note = 2'-fluorouridine
  modified_base 19: mod_base = OTHER; note = 2'-O-methylcytidine
  modified_base 20: mod_base = OTHER; note = 2'-fluoroadenosine
  modified_base 21: mod_base = OTHER; note = 2'-O-methylcytidine with phosphorothioate linkage
  modified_base 22: mod_base = OTHER; note = 2'-O-methyladenosine with phosphorothioate linkage
  modified_base 23: mod_base = OTHER; note = 2'-O-methyluridine
aaggcatcttacaaatttcacat

SEQ ID NO: 793 - RNA, 23 nt, synthetic construct
  source 1..23: mol_type = other RNA
  modified_base 1: mod_base = OTHER; note = 5'-(E)-vinylphosphonate 2'-O-methylated guanosine with phosphorothioate linkage
  modified_base 2: mod_base = OTHER; note = 2'-fluorouridine with phosphorothioate linkage
  modified_base 3: mod_base = OTHER; note = 2'-O-methyluridine
  modified_base 4: mod_base = OTHER; note = 2'-fluoroguanosine
  modified_base 5: mod_base = OTHER; note = 2'-O-methylcytidine
  modified_base 6: mod_base = OTHER; note = 2'-fluorouridine
  modified_base 7: mod_base = OTHER; note = 2'-O-methylcytidine
  modified_base 8: mod_base = OTHER; note = 2'-fluorouridine
  modified_base 9: mod_base = OTHER; note = 2'-O-methylguanosine
  modified_base 10: mod_base = OTHER; note = 2'-fluoroadenosine
  modified_base 11: mod_base = OTHER; note = 2'-O-methyladenosine
  modified_base 12: mod_base = OTHER; note = 2'-fluoroadenosine
  modified_base 13: mod_base = OTHER; note = 2'-O-methyluridine
  modified_base 14: mod_base = OTHER; note = 2'-fluorouridine
  modified_base 15: mod_base = OTHER; note = 2'-O-methyluridine
  modified_base 16: mod_base = OTHER; note = 2'-fluoroguanosine
  modified_base 17: mod_base = OTHER; note = 2'-O-methyladenosine
  modified_base 18: mod_base = OTHER; note = 2'-fluoroadenosine
  modified_base 19: mod_base = OTHER; note = 2'-O-methylcytidine
  modified_base 20: mod_base = OTHER; note = 2'-fluoroguanosine
  modified_base 21: mod_base = OTHER; note = 2'-O-methyluridine with phosphorothioate linkage
  modified_base 22: mod_base = OTHER; note = 2'-O-methylcytidine with phosphorothioate linkage
  modified_base 23: mod_base = OTHER; note = 2'-O-methyluridine
gttgctctgaaatttgaacgtct

SEQ ID NO: 794 - RNA, 23 nt, synthetic construct
  source 1..23: mol_type = other RNA
  modified_base 1: mod_base = OTHER; note = 5'-(E)-vinylphosphonate 2'-O-methylated uridine with phosphorothioate linkage
  modified_base 2: mod_base = OTHER; note = 2'-fluoroadenosine with phosphorothioate linkage
  modified_base 3: mod_base = OTHER; note = 2'-O-methylguanosine
  modified_base 4: mod_base = OTHER; note = 2'-fluoroadenosine
  modified_base 5: mod_base = OTHER; note = 2'-O-methyluridine
  modified_base 6: mod_base = OTHER; note = 2'-fluorouridine
  modified_base 7: mod_base = OTHER; note = 2'-O-methylcytidine
  modified_base 8: mod_base = OTHER; note = 2'-fluorouridine
  modified_base 9: mod_base = OTHER; note = 2'-O-methyluridine
  modified_base 10: mod_base = OTHER; note = 2'-fluoroadenosine
  modified_base 11: mod_base = OTHER; note = 2'-O-methyladenosine
  modified_base 12: mod_base = OTHER; note = 2'-fluorouridine
  modified_base 13: mod_base = OTHER; note = 2'-O-methylcytidine
  modified_base 14: mod_base = OTHER; note = 2'-fluorocytidine
  modified_base 15: mod_base = OTHER; note = 2'-O-methyladenosine
  modified_base 16: mod_base = OTHER; note = 2'-fluorouridine
  modified_base 17: mod_base = OTHER; note = 2'-O-methylguanosine
  modified_base 18: mod_base = OTHER; note = 2'-fluoroadenosine
  modified_base 19: mod_base = OTHER; note = 2'-O-methylguanosine
  modified_base 20: mod_base = OTHER; note = 2'-fluorouridine
  modified_base 21: mod_base = OTHER; note = 2'-O-methylguanosine with phosphorothioate linkage
  modified_base 22: mod_base = OTHER; note = 2'-O-methyluridine with phosphorothioate linkage
  modified_base 23: mod_base = OTHER; note = 2'-O-methyluridine
tagattcttaatccatgagtgtt

SEQ ID NO: 795 - RNA, 23 nt, synthetic construct
  source 1..23: mol_type = other RNA
  modified_base 1: mod_base = OTHER; note = 5'-(E)-vinylphosphonate 2'-O-methylated adenosine with phosphorothioate linkage
  modified_base 2: mod_base = OTHER; note = 2'-fluoroadenosine with phosphorothioate linkage
  modified_base 3: mod_base = OTHER; note = 2'-O-methyladenosine
  modified_base 4: mod_base = OTHER; note = 2'-fluorouridine
  modified_base 5: mod_base = OTHER; note = 2'-O-methyluridine
  modified_base 6: mod_base = OTHER; note = 2'-fluorocytidine
  modified_base 7: mod_base = OTHER; note = 2'-O-methylcytidine
  modified_base 8: mod_base = OTHER; note = 2'-fluorouridine
  modified_base 9: mod_base = OTHER; note = 2'-O-methylcytidine
  modified_base 10: mod_base = OTHER; note = 2'-fluorouridine
  modified_base 11: mod_base = OTHER; note = 2'-O-methyladenosine
  modified_base 12: mod_base = OTHER; note = 2'-fluoroguanosine
  modified_base 13: mod_base = OTHER; note = 2'-O-methyladenosine
  modified_base 14: mod_base = OTHER; note = 2'-fluorouridine
  modified_base 15: mod_base = OTHER; note = 2'-O-methylguanosine
  modified_base 16: mod_base = OTHER; note = 2'-fluoroadenosine
  modified_base 17: mod_base = OTHER; note = 2'-O-methylcytidine
  modified_base 18: mod_base = OTHER; note = 2'-fluoroguanosine
  modified_base 19: mod_base = OTHER; note = 2'-O-methyluridine
  modified_base 20: mod_base = OTHER; note = 2'-fluorouridine
  modified_base 21: mod_base = OTHER; note = 2'-O-methylguanosine with phosphorothioate linkage
  modified_base 22: mod_base = OTHER; note = 2'-O-methyladenosine with phosphorothioate linkage
  modified_base 23: mod_base = OTHER; note = 2'-O-methyluridine
aaattcctctagatgacgttgat

SEQ ID NO: 796 - RNA, 23 nt, synthetic construct
  source 1..23: mol_type = other RNA
  modified_base 1: mod_base = OTHER; note = 5'-(E)-vinylphosphonate 2'-O-methylated adenosine with phosphorothioate linkage
  modified_base 2: mod_base = OTHER; note = 2'-fluoroguanosine with phosphorothioate linkage
  modified_base 3: mod_base = OTHER; note = 2'-O-methylcytidine
  modified_base 4: mod_base = OTHER; note = 2'-fluorouridine
  modified_base 5: mod_base = OTHER; note = 2'-O-methylcytidine
  modified_base 6: mod_base = OTHER; note = 2'-fluorouridine
  modified_base 7: mod_base = OTHER; note = 2'-O-methylcytidine
  modified_base 8: mod_base = OTHER; note = 2'-fluorouridine
  modified_base 9: mod_base = OTHER; note = 2'-O-methyladenosine
  modified_base 10: mod_base = OTHER; note = 2'-fluoroadenosine
  modified_base 11: mod_base = OTHER; note = 2'-O-methylguanosine
  modified_base 12: mod_base = OTHER; note = 2'-fluorouridine
  modified_base 13: mod_base = OTHER; note = 2'-O-methylcytidine
  modified_base 14: mod_base = OTHER; note = 2'-fluorouridine
  modified_base 15: mod_base = OTHER; note = 2'-O-methylcytidine
  modified_base 16: mod_base = OTHER; note = 2'-fluorocytidine
  modified_base 17: mod_base = OTHER; note = 2'-O-methyluridine
  modified_base 18: mod_base = OTHER; note = 2'-fluoroadenosine
  modified_base 19: mod_base = OTHER; note = 2'-O-methylguanosine
  modified_base 20: mod_base = OTHER; note = 2'-fluoroadenosine
  modified_base 21: mod_base = OTHER; note = 2'-O-methylguanosine with phosphorothioate linkage
  modified_base 22: mod_base = OTHER; note = 2'-O-methyladenosine with phosphorothioate linkage
  modified_base 23: mod_base = OTHER; note = 2'-O-methyladenosine
agctctctaagtctcctagagaa

SEQ ID NO: 797 - RNA, 23 nt, synthetic construct
  source 1..23: mol_type = other RNA
  modified_base 1: mod_base = OTHER; note = 5'-(E)-vinylphosphonate 2'-O-methylated uridine with phosphorothioate linkage
  modified_base 2: mod_base = OTHER; note = 2'-fluorouridine with phosphorothioate linkage
  modified_base 3: mod_base = OTHER; note = 2'-O-methyluridine
  modified_base 4: mod_base = OTHER; note = 2'-fluoroadenosine
  modified_base 5: mod_base = OTHER; note = 2'-O-methyladenosine
  modified_base 6: mod_base = OTHER; note = 2'-fluorouridine
  modified_base 7: mod_base = OTHER; note = 2'-O-methylcytidine
  modified_base 8: mod_base = OTHER; note = 2'-fluorocytidine
  modified_base 9: mod_base = OTHER; note = 2'-O-methyladenosine
  modified_base 10: mod_base = OTHER; note = 2'-fluorouridine
  modified_base 11: mod_base = OTHER; note = 2'-O-methylguanosine
  modified_base 12: mod_base = OTHER; note = 2'-fluoroadenosine
  modified_base 13: mod_base = OTHER; note = 2'-O-methylguanosine
  modified_base 14: mod_base = OTHER; note = 2'-fluorouridine
  modified_base 15: mod_base = OTHER; note = 2'-O-methylguanosine
  modified_base 16: mod_base = OTHER; note = 2'-fluorouridine
  modified_base 17: mod_base = OTHER; note = 2'-O-methyluridine
  modified_base 18: mod_base = OTHER; note = 2'-fluorocytidine
  modified_base 19: mod_base = OTHER; note = 2'-O-methyluridine
  modified_base 20: mod_base = OTHER; note = 2'-fluoroguanosine
  modified_base 21: mod_base = OTHER; note = 2'-O-methyluridine with phosphorothioate linkage
  modified_base 22: mod_base = OTHER; note = 2'-O-methylguanosine with phosphorothioate linkage
  modified_base 23: mod_base = OTHER; note = 2'-O-methylcytidine
tttaatccatgagtgttctgtgc

SEQ ID NO: 798 - RNA, 23 nt, synthetic construct
  source 1..23: mol_type = other RNA
  modified_base 1: mod_base = OTHER; note = 5'-(E)-vinylphosphonate 2'-O-methylated adenosine with phosphorothioate linkage
  modified_base 2: mod_base = OTHER; note = 2'-fluorouridine with phosphorothioate linkage
  modified_base 3: mod_base = OTHER; note = 2'-O-methyluridine
  modified_base 4: mod_base = OTHER; note = 2'-fluoroguanosine
  modified_base 5: mod_base = OTHER; note = 2'-O-methyluridine
  modified_base 6: mod_base = OTHER; note = 2'-fluorocytidine
  modified_base 7: mod_base = OTHER; note = 2'-O-methyluridine
  modified_base 8: mod_base = OTHER; note = 2'-fluoroguanosine
  modified_base 9: mod_base = OTHER; note = 2'-O-methylguanosine
  modified_base 10: mod_base = OTHER; note = 2'-fluoroadenosine
  modified_base 11: mod_base = OTHER; note = 2'-O-methylguanosine
  modified_base 12: mod_base = OTHER; note = 2'-fluorouridine
  modified_base 13: mod_base = OTHER; note = 2'-O-methylcytidine
  modified_base 14: mod_base = OTHER; note = 2'-fluorouridine
  modified_base 15: mod_base = OTHER; note = 2'-O-methylcytidine
  modified_base 16: mod_base = OTHER; note = 2'-fluorocytidine
  modified_base 17: mod_base = OTHER; note = 2'-O-methylguanosine
  modified_base 18: mod_base = OTHER; note = 2'-fluoroadenosine
  modified_base 19: mod_base = OTHER; note = 2'-O-methyladenosine
  modified_base 20: mod_base = OTHER; note = 2'-fluoroguanosine
  modified_base 21: mod_base = OTHER; note = 2'-O-methylcytidine with phosphorothioate linkage
  modified_base 22: mod_base = OTHER; note = 2'-O-methyluridine with phosphorothioate linkage
  modified_base 23: mod_base = OTHER; note = 2'-O-methyladenosine
attgtctggagtctccgaagcta

SEQ ID NO: 799 - RNA, 23 nt, synthetic construct
  source 1..23: mol_type = other RNA
  modified_base 1: mod_base = OTHER; note = 5'-(E)-vinylphosphonate 2'-O-methylated guanosine with phosphorothioate linkage
  modified_base 2: mod_base = OTHER; note = 2'-fluoroadenosine with phosphorothioate linkage
  modified_base 3: mod_base = OTHER; note = 2'-O-methyluridine
  modified_base 4: mod_base = OTHER; note = 2'-fluorouridine
  modified_base 5: mod_base = OTHER; note = 2'-O-methylcytidine
  modified_base 6: mod_base = OTHER; note = 2'-fluorouridine
  modified_base 7: mod_base = OTHER; note = 2'-O-methyluridine
  modified_base 8: mod_base = OTHER; note = 2'-fluoroadenosine
  modified_base 9: mod_base = OTHER; note = 2'-O-methyladenosine
  modified_base 10: mod_base = OTHER; note = 2'-fluorouridine
  modified_base 11: mod_base = OTHER; note = 2'-O-methylcytidine
  modified_base 12: mod_base = OTHER; note = 2'-fluorocytidine
  modified_base 13: mod_base = OTHER; note = 2'-O-methyladenosine
  modified_base 14: mod_base = OTHER; note = 2'-fluorouridine
  modified_base 15: mod_base = OTHER; note = 2'-O-methylguanosine
  modified_base 16: mod_base = OTHER; note = 2'-fluoroadenosine
  modified_base 17: mod_base = OTHER; note = 2'-O-methylguanosine
  modified_base 18: mod_base = OTHER; note = 2'-fluorouridine
  modified_base 19: mod_base = OTHER; note = 2'-O-methylguanosine
  modified_base 20: mod_base = OTHER; note = 2'-fluorouridine
  modified_base 21: mod_base = OTHER; note = 2'-O-methyluridine with phosphorothioate linkage
  modified_base 22: mod_base = OTHER; note = 2'-O-methylcytidine with phosphorothioate linkage
  modified_base 23: mod_base = OTHER; note = 2'-O-methyluridine
gattcttaatccatgagtgttct

SEQ ID NO: 800 - RNA, 23 nt, synthetic construct
  source 1..23: mol_type = other RNA
  modified_base 1: mod_base = OTHER; note = 5'-(E)-vinylphosphonate 2'-O-methylated uridine with phosphorothioate linkage
  modified_base 2: mod_base = OTHER; note = 2'-fluorouridine with phosphorothioate linkage
  modified_base 3: mod_base = OTHER; note = 2'-O-methylcytidine
  modified_base 4: mod_base = OTHER; note = 2'-fluoroadenosine
  modified_base 5: mod_base = OTHER; note = 2'-O-methyladenosine
  modified_base 6: mod_base = OTHER; note = 2'-fluorocytidine
  modified_base 7: mod_base = OTHER; note = 2'-O-methylcytidine
  modified_base 8: mod_base = OTHER; note = 2'-fluoroguanosine
  modified_base 9: mod_base = OTHER; note = 2'-O-methylcytidine
  modified_base 10: mod_base = OTHER; note = 2'-fluoroadenosine
  modified_base 11: mod_base = OTHER; note = 2'-O-methylguanosine
  modified_base 12: mod_base = OTHER; note = 2'-fluorocytidine
  modified_base 13: mod_base = OTHER; note = 2'-O-methyladenosine
  modified_base 14: mod_base = OTHER; note = 2'-fluorocytidine
  modified_base 15: mod_base = OTHER; note = 2'-O-methylcytidine
  modified_base 16: mod_base = OTHER; note = 2'-fluorocytidine
  modified_base 17: mod_base = OTHER; note = 2'-O-methyluridine
  modified_base 18: mod_base = OTHER; note = 2'-fluoroguanosine
  modified_base 19: mod_base = OTHER; note = 2'-O-methyluridine
  modified_base 20: mod_base = OTHER; note = 2'-fluorocytidine
  modified_base 21: mod_base = OTHER; note = 2'-O-methyladenosine with phosphorothioate linkage
  modified_base 22: mod_base = OTHER; note = 2'-O-methyladenosine with phosphorothioate linkage
  modified_base 23: mod_base = OTHER; note = 2'-O-methyladenosine
ttcaaccgcagcaccctgtcaaa

SEQ ID NO: 801 - RNA, 23 nt, synthetic construct
  source 1..23: mol_type = other RNA
  modified_base 1: mod_base = OTHER; note = 5'-(E)-vinylphosphonate 2'-O-methylated adenosine with phosphorothioate linkage
  modified_base 2: mod_base = OTHER; note = 2'-fluorouridine with phosphorothioate linkage
  modified_base 3: mod_base = OTHER; note = 2'-O-methyladenosine
  modified_base 4: mod_base = OTHER; note = 2'-fluorouridine
  modified_base 5: mod_base = OTHER; note = 2'-O-methylcytidine
  modified_base 6: mod_base = OTHER; note = 2'-fluoroadenosine
  modified_base 7: mod_base = OTHER; note = 2'-O-methyluridine
  modified_base 8: mod_base = OTHER; note = 2'-fluorouridine
  modified_base 9: mod_base = OTHER; note = 2'-O-methyladenosine
  modified_base 10: mod_base = OTHER; note = 2'-fluorouridine
  modified_base 11: mod_base = OTHER; note = 2'-O-methyluridine
  modified_base 12: mod_base = OTHER; note = 2'-fluorocytidine
  modified_base 13: mod_base = OTHER; note = 2'-O-methyladenosine
  modified_base 14: mod_base = OTHER; note = 2'-fluoroadenosine
  modified_base 15: mod_base = OTHER; note = 2'-O-methylcytidine
  modified_base 16: mod_base = OTHER; note = 2'-fluoroadenosine
  modified_base 17: mod_base = OTHER; note = 2'-O-methylcytidine
  modified_base 18: mod_base = OTHER; note = 2'-fluorouridine
  modified_base 19: mod_base = OTHER; note = 2'-O-methylcytidine
  modified_base 20: mod_base = OTHER; note = 2'-fluoroguanosine
  modified_base 21: mod_base = OTHER; note = 2'-O-methyladenosine with phosphorothioate linkage
  modified_base 22: mod_base = OTHER; note = 2'-O-methyluridine with phosphorothioate linkage
  modified_base 23: mod_base = OTHER; note = 2'-O-methylcytidine
atatcattattcaacactcgatc

SEQ ID NO: 802 - RNA, 23 nt, synthetic construct
  source 1..23: mol_type = other RNA
  modified_base 1: mod_base = OTHER; note = 5'-(E)-vinylphosphonate 2'-O-methylated adenosine with phosphorothioate linkage
  modified_base 2: mod_base = OTHER; note = 2'-fluorocytidine with phosphorothioate linkage
  modified_base 3: mod_base = OTHER; note = 2'-O-methylguanosine
  modified_base 4: mod_base = OTHER; note = 2'-fluorouridine
  modified_base 5: mod_base = OTHER; note = 2'-O-methyluridine
  modified_base 6: mod_base = OTHER; note = 2'-fluoroguanosine
  modified_base 7: mod_base = OTHER; note = 2'-O-methyladenosine
  modified_base 8: mod_base = OTHER; note = 2'-fluorouridine
  modified_base 9: mod_base = OTHER; note = 2'-O-methyladenosine
  modified_base 10: mod_base = OTHER; note = 2'-fluoroadenosine
  modified_base 11: mod_base = OTHER; note = 2'-O-methyladenosine
  modified_base 12: mod_base = OTHER; note = 2'-fluorocytidine
  modified_base 13: mod_base = OTHER; note = 2'-O-methyladenosine
  modified_base 14: mod_base = OTHER; note = 2'-fluoroadenosine
  modified_base 15: mod_base = OTHER; note = 2'-O-methyluridine
  modified_base 16: mod_base = OTHER; note = 2'-fluorocytidine
  modified_base 17: mod_base = OTHER; note = 2'-O-methylguanosine
  modified_base 18: mod_base = OTHER; note = 2'-fluorouridine
  modified_base 19: mod_base = OTHER; note = 2'-O-methylcytidine
  modified_base 20: mod_base = OTHER; note = 2'-fluoroadenosine
  modified_base 21: mod_base = OTHER; note = 2'-O-methyluridine with phosphorothioate linkage
  modified_base 22: mod_base = OTHER; note = 2'-O-methylcytidine with phosphorothioate linkage
  modified_base 23: mod_base = OTHER; note = 2'-O-methylcytidine
acgttgataaacaatcgtcatcc

SEQ ID NO: 803 - RNA, 23 nt, synthetic construct
  source 1..23: mol_type = other RNA
  modified_base 1: mod_base = OTHER; note = 5'-(E)-vinylphosphonate 2'-O-methylated adenosine with phosphorothioate linkage
  modified_base 2: mod_base = OTHER; note = 2'-fluoroadenosine with phosphorothioate linkage
  modified_base 3: mod_base = OTHER; note = 2'-O-methylguanosine
  modified_base 4: mod_base = OTHER; note = 2'-fluorouridine
  modified_base 5: mod_base = OTHER; note = 2'-O-methylcytidine
  modified_base 6: mod_base = OTHER; note = 2'-fluorouridine
  modified_base 7: mod_base = OTHER; note = 2'-O-methylcytidine
  modified_base 8: mod_base = OTHER; note = 2'-fluorocytidine
  modified_base 9: mod_base = OTHER; note = 2'-O-methyluridine
  modified_base 10: mod_base = OTHER; note = 2'-fluoroadenosine
  modified_base 11: mod_base = OTHER; note = 2'-O-methylguanosine
  modified_base 12: mod_base = OTHER; note = 2'-fluoroadenosine
  modified_base 13: mod_base = OTHER; note = 2'-O-methylguanosine
  modified_base 14: mod_base = OTHER; note = 2'-fluoroadenosine
  modified_base 15: mod_base = OTHER; note = 2'-O-methyladenosine
  modified_base 16: mod_base = OTHER; note = 2'-fluoroadenosine
  modified_base 17: mod_base = OTHER; note = 2'-O-methyluridine
  modified_base 18: mod_base = OTHER; note = 2'-fluorocytidine
  modified_base 19: mod_base = OTHER; note = 2'-O-methylcytidine
  modified_base 20: mod_base = OTHER; note = 2'-fluoroadenosine
  modified_base 21: mod_base = OTHER; note = 2'-O-methyluridine with phosphorothioate linkage
  modified_base 22: mod_base = OTHER; note = 2'-O-methylguanosine with phosphorothioate linkage
  modified_base 23: mod_base = OTHER; note = 2'-O-methylguanosine
aagtctcctagagaaatccatgg

SEQ ID NO: 804 - RNA, 23 nt, synthetic construct
  source 1..23: mol_type = other RNA
  modified_base 1: mod_base = OTHER; note = 5'-(E)-vinylphosphonate 2'-O-methylated guanosine with phosphorothioate linkage
  modified_base 2: mod_base = OTHER; note = 2'-fluoroadenosine with phosphorothioate linkage
  modified_base 3: mod_base = OTHER; note = 2'-O-methylcytidine
  modified_base 4: mod_base = OTHER; note = 2'-fluorouridine
  modified_base 5: mod_base = OTHER; note = 2'-O-methyluridine
  modified_base 6: mod_base = OTHER; note = 2'-fluorouridine
  modified_base 7: mod_base = OTHER; note = 2'-O-methylcytidine
  modified_base 8: mod_base = OTHER; note = 2'-fluorocytidine
  modified_base 9: mod_base = OTHER; note = 2'-O-methylcytidine
  modified_base 10: mod_base = OTHER; note = 2'-fluoroadenosine
  modified_base 11: mod_base = OTHER; note = 2'-O-methylcytidine
  modified_base 12: mod_base = OTHER; note = 2'-fluoroadenosine
  modified_base 13: mod_base = OTHER; note = 2'-O-methylguanosine
  modified_base 14: mod_base = OTHER; note = 2'-fluorouridine
  modified_base 15: mod_base = OTHER; note = 2'-O-methyladenosine
  modified_base 16: mod_base = OTHER; note = 2'-fluorocytidine
  modified_base 17: mod_base = OTHER; note = 2'-O-methyluridine
  modified_base 18: mod_base = OTHER; note = 2'-fluorocytidine
  modified_base 19: mod_base = OTHER; note = 2'-O-methyladenosine
  modified_base 20: mod_base = OTHER; note = 2'-fluorocytidine
  modified_base 21: mod_base = OTHER; note = 2'-O-methyladenosine with phosphorothioate linkage
  modified_base 22: mod_base = OTHER; note = 2'-O-methyladenosine with phosphorothioate linkage
  modified_base 23: mod_base = OTHER; note = 2'-O-methylguanosine
gactttcccacagtactcacaag

SEQ ID NO: 805 - RNA, 23 nt, synthetic construct
  source 1..23: mol_type = other RNA
  modified_base 1: mod_base = OTHER; note = 5'-(E)-vinylphosphonate 2'-O-methylated guanosine with phosphorothioate linkage
  modified_base 2: mod_base = OTHER; note = 2'-fluoroguanosine with phosphorothioate linkage
  modified_base 3: mod_base = OTHER; note = 2'-O-methyladenosine
  modified_base 4: mod_base = OTHER; note = 2'-fluorouridine
  modified_base 5: mod_base = OTHER; note = 2'-O-methylcytidine
  modified_base 6: mod_base = OTHER; note = 2'-fluorouridine
  modified_base 7: mod_base = OTHER; note = 2'-O-methyluridine
  modified_base 8: mod_base = OTHER; note = 2'-fluorouridine
  modified_base 9: mod_base = OTHER; note = 2'-O-methylguanosine
  modified_base 10: mod_base = OTHER; note = 2'-fluoroadenosine
  modified_base 11: mod_base = OTHER; note = 2'-O-methylguanosine
  modified_base 12: mod_base = OTHER; note = 2'-fluorocytidine
  modified_base 13: mod_base = OTHER; note = 2'-O-methyluridine
  modified_base 14: mod_base = OTHER; note = 2'-fluoroguanosine
  modified_base 15: mod_base = OTHER; note = 2'-O-methylcytidine
  modified_base 16: mod_base = OTHER; note = 2'-fluorocytidine
  modified_base 17: mod_base = OTHER; note = 2'-O-methyluridine
  modified_base 18: mod_base = OTHER; note = 2'-fluoroguanosine
  modified_base 19: mod_base = OTHER; note = 2'-O-methylguanosine
  modified_base 20: mod_base = OTHER; note = 2'-fluoroadenosine
  modified_base 21: mod_base = OTHER; note = 2'-O-methylguanosine with phosphorothioate linkage
  modified_base 22: mod_base = OTHER; note = 2'-O-methylguanosine with phosphorothioate linkage
  modified_base 23: mod_base = OTHER; note = 2'-O-methylcytidine
ggatctttgagctgcctggaggc

SEQ ID NO: 806 - RNA, 23 nt, synthetic construct
  source 1..23: mol_type = other RNA
  modified_base 1: mod_base = OTHER; note = 5'-(E)-vinylphosphonate 2'-O-methylated adenosine with phosphorothioate linkage
  modified_base 2: mod_base = OTHER; note = 2'-fluoroguanosine with phosphorothioate linkage
  modified_base 3: mod_base = OTHER; note = 2'-O-methyluridine
  modified_base 4: mod_base = OTHER; note = 2'-fluoroadenosine
  modified_base 5: mod_base = OTHER; note = 2'-O-methylcytidine
  modified_base 6: mod_base = OTHER; note = 2'-fluorouridine
  modified_base 7: mod_base = OTHER; note = 2'-O-methylcytidine
  modified_base 8: mod_base = OTHER; note = 2'-fluoroadenosine
  modified_base 9: mod_base = OTHER; note = 2'-O-methylcytidine
  modified_base 10: mod_base = OTHER; note = 2'-fluoroadenosine
  modified_base 11: mod_base = OTHER; note = 2'-O-methyladenosine
  modified_base 12: mod_base = OTHER; note = 2'-fluoroguanosine
  modified_base 13: mod_base = OTHER; note = 2'-O-methyluridine
  modified_base 14: mod_base = OTHER; note = 2'-fluoroguanosine
  modified_base 15: mod_base = OTHER; note = 2'-O-methyluridine
  modified_base 16: mod_base = OTHER; note = 2'-fluorocytidine
  modified_base 17: mod_base = OTHER; note = 2'-O-methylguanosine
  modified_base 18: mod_base = OTHER; note = 2'-fluorocytidine
  modified_base 19: mod_base = OTHER; note = 2'-O-methyluridine
  modified_base 20: mod_base = OTHER; note = 2'-fluoroguanosine
  modified_base 21: mod_base = OTHER; note = 2'-O-methylcytidine with phosphorothioate linkage
  modified_base 22: mod_base = OTHER; note = 2'-O-methylguanosine with phosphorothioate linkage
  modified_base 23: mod_base = OTHER; note = 2'-O-methyluridine
agtactcacaagtgtcgctgcgt

SEQ ID NO: 807 - RNA, 23 nt, synthetic construct
  source 1..23: mol_type = other RNA
  modified_base 1: mod_base = OTHER; note = 5'-(E)-vinylphosphonate 2'-O-methylated uridine with phosphorothioate linkage
  modified_base 2: mod_base = OTHER; note = 2'-fluoroguanosine with phosphorothioate linkage
  modified_base 3: mod_base = OTHER; note = 2'-O-methylguanosine
  modified_base 4: mod_base = OTHER; note = 2'-fluoroadenosine
  modified_base 5: mod_base = OTHER; note = 2'-O-methylcytidine
  modified_base 6: mod_base = OTHER; note = 2'-fluoroadenosine
  modified_base 7: mod_base = OTHER; note = 2'-O-methylguanosine
  modified_base 8: mod_base = OTHER; note = 2'-fluorouridine
  modified_base 9: mod_base = OTHER; note = 2'-O-methylguanosine
  modified_base 10: mod_base = OTHER; note = 2'-fluoroadenosine
  modified_base 11: mod_base = OTHER; note = 2'-O-methylguanosine
  modified_base 12: mod_base = OTHER; note = 2'-fluoroadenosine
  modified_base 13: mod_base = OTHER; note = 2'-O-methyluridine
  modified_base 14: mod_base = OTHER; note = 2'-fluorouridine
  modified_base 15: mod_base = OTHER; note = 2'-O-methylguanosine
  modified_base 16: mod_base = OTHER; note = 2'-fluorocytidine
  modified_base 17: mod_base = OTHER; note = 2'-O-methyluridine
  modified_base 18: mod_base = OTHER; note = 2'-fluoroadenosine
  modified_base 19: mod_base = OTHER; note = 2'-O-methylcytidine
  modified_base 20: mod_base = OTHER; note = 2'-fluoroadenosine
  modified_base 21: mod_base = OTHER; note = 2'-O-methylguanosine with phosphorothioate linkage
  modified_base 22: mod_base = OTHER; note = 2'-O-methyluridine with phosphorothioate linkage
  modified_base 23: mod_base = OTHER; note = 2'-O-methyluridine
tggacagtgagattgctacagtt

SEQ ID NO: 808 - RNA, 23 nt, synthetic construct
  source 1..23: mol_type = other RNA
  modified_base 1: mod_base = OTHER; note = 5'-(E)-vinylphosphonate 2'-O-methylated guanosine with phosphorothioate linkage
  modified_base 2: mod_base = OTHER; note = 2'-fluoroadenosine with phosphorothioate linkage
  modified_base 3: mod_base = OTHER; note = 2'-O-methyluridine
  modified_base 4: mod_base = OTHER; note = 2'-fluorouridine
  modified_base 5: mod_base = OTHER; note = 2'-O-methylguanosine
  modified_base 6: mod_base = OTHER; note = 2'-fluorocytidine
  modified_base 7: mod_base = OTHER; note = 2'-O-methyluridine
  modified_base 8: mod_base = OTHER; note = 2'-fluoroadenosine
  modified_base 9: mod_base = OTHER; note = 2'-O-methylcytidine
  modified_base 10: mod_base = OTHER; note = 2'-fluoroadenosine
  modified_base 11: mod_base = OTHER; note = 2'-O-methylguanosine
  modified_base 12: mod_base = OTHER; note = 2'-fluorouridine
  modified_base 13: mod_base = OTHER; note = 2'-O-methyluridine
  modified_base 14: mod_base = OTHER; note = 2'-fluorocytidine
  modified_base 15: mod_base = OTHER; note = 2'-O-methyluridine
  modified_base 16: mod_base = OTHER; note = 2'-fluorouridine
  modified_base 17: mod_base = OTHER; note = 2'-O-methylguanosine
  modified_base 18: mod_base = OTHER; note = 2'-fluoroadenosine
  modified_base 19: mod_base = OTHER; note = 2'-O-methyladenosine
  modified_base 20: mod_base = OTHER; note = 2'-fluoroguanosine
  modified_base 21: mod_base = OTHER; note = 2'-O-methyladenosine with phosphorothioate linkage
  modified_base 22: mod_base = OTHER; note = 2'-O-methylcytidine with phosphorothioate linkage
  modified_base 23: mod_base = OTHER; note = 2'-O-methyluridine
gattgctacagttcttgaagact

SEQ ID NO: 809 - RNA, 23 nt, synthetic construct
  source 1..23: mol_type = other RNA
  modified_base 1: mod_base = OTHER; note = 5'-(E)-vinylphosphonate 2'-O-methylated uridine with phosphorothioate linkage
  modified_base 2: mod_base = OTHER; note = 2'-fluoroguanosine with phosphorothioate linkage
  modified_base 3: mod_base = OTHER; note = 2'-O-methyladenosine
  modified_base 4: mod_base = OTHER; note = 2'-fluorouridine
  modified_base 5: mod_base = OTHER; note = 2'-O-methylcytidine
  modified_base 6: mod_base = OTHER; note = 2'-fluorocytidine
  modified_base 7: mod_base = OTHER; note = 2'-O-methyluridine
  modified_base 8: mod_base = OTHER; note = 2'-fluoroguanosine
  modified_base 9: mod_base = OTHER; note = 2'-O-methylguanosine
  modified_base 10: mod_base = OTHER; note = 2'-fluorouridine
  modified_base 11: mod_base = OTHER; note = 2'-O-methyladenosine
  modified_base 12: mod_base = OTHER; note = 2'-fluorouridine
  modified_base 13: mod_base = OTHER; note = 2'-O-methyluridine
  modified_base 14: mod_base = OTHER; note = 2'-fluorocytidine
  modified_base 15: mod_base = OTHER; note = 2'-O-methyluridine
  modified_base 16: mod_base = OTHER; note = 2'-fluorouridine
  modified_base 17: mod_base = OTHER; note = 2'-O-methyladenosine
  modified_base 18: mod_base = OTHER; note = 2'-fluoroguanosine
  modified_base 19: mod_base = OTHER; note = 2'-O-methylcytidine
  modified_base 20: mod_base = OTHER; note = 2'-fluoroadenosine
  modified_base 21: mod_base = OTHER; note = 2'-O-methylguanosine with phosphorothioate linkage
  modified_base 22: mod_base = OTHER; note = 2'-O-methylguanosine with phosphorothioate linkage
  modified_base 23: mod_base = OTHER; note = 2'-O-methyluridine
tgatcctggtattcttagcaggt

SEQ ID NO: 810 - RNA, 23 nt, synthetic construct
  source 1..23: mol_type = other RNA
  modified_base 1: mod_base = OTHER; note = 5'-(E)-vinylphosphonate 2'-O-methylated adenosine with phosphorothioate linkage
  modified_base 2: mod_base = OTHER; note = 2'-fluoroguanosine with phosphorothioate linkage
  modified_base 3: mod_base = OTHER; note = 2'-O-methyluridine
  modified_base 4: mod_base = OTHER; note = 2'-fluorocytidine
  modified_base 5: mod_base = OTHER; note = 2'-O-methylcytidine
  modified_base 6: mod_base = OTHER; note = 2'-fluorouridine
  modified_base 7: mod_base = OTHER; note = 2'-O-methylguanosine
  modified_base 8: mod_base = OTHER; note = 2'-fluoroadenosine
  modified_base 9: mod_base = OTHER; note = 2'-O-methyladenosine
  modified_base 10: mod_base = OTHER; note = 2'-fluoroguanosine
  modified_base 11: mod_base = OTHER; note = 2'-O-methylguanosine
  modified_base 12: mod_base = OTHER; note = 2'-fluoroguanosine
  modified_base 13: mod_base = OTHER; note = 2'-O-methyladenosine
  modified_base 14: mod_base = OTHER; note = 2'-fluorouridine
  modified_base 15: mod_base = OTHER; note = 2'-O-methyladenosine
  modified_base 16: mod_base = OTHER; note = 2'-fluorocytidine
  modified_base 17: mod_base = OTHER; note = 2'-O-methylcytidine
  modified_base 18: mod_base = OTHER; note = 2'-fluoroadenosine
  modified_base 19: mod_base = OTHER; note = 2'-O-methyladenosine
  modified_base 20: mod_base = OTHER; note = 2'-fluorocytidine
  modified_base 21: mod_base = OTHER; note = 2'-O-methylcytidine with phosphorothioate linkage
  modified_base 22: mod_base = OTHER; note = 2'-O-methylcytidine with phosphorothioate linkage
  modified_base 23: mod_base = OTHER; note = 2'-O-methylguanosine
agtcctgaagggataccaacccg

SEQ ID NO: 811 - RNA, 23 nt, synthetic construct
  source 1..23: mol_type = other RNA
  modified_base 1: mod_base = OTHER; note = 5'-(E)-vinylphosphonate 2'-O-methylated guanosine with phosphorothioate linkage
  modified_base 2: mod_base = OTHER; note = 2'-fluorouridine with phosphorothioate linkage
  modified_base 3: mod_base = OTHER; note = 2'-O-methyladenosine
  modified_base 4: mod_base = OTHER; note = 2'-fluorocytidine
  modified_base 5: mod_base = OTHER; note = 2'-O-methyluridine
  modified_base 6: mod_base = OTHER; note = 2'-fluorocytidine
  modified_base 7: mod_base = OTHER; note = 2'-O-methyladenosine
  modified_base 8: mod_base = OTHER; note = 2'-fluorocytidine
  modified_base 9: mod_base = OTHER; note = 2'-O-methyladenosine
  modified_base 10: mod_base = OTHER; note = 2'-fluoroadenosine
  modified_base 11: mod_base = OTHER; note = 2'-O-methylguanosine
  modified_base 12: mod_base = OTHER; note = 2'-fluorouridine
  modified_base 13: mod_base = OTHER; note = 2'-O-methylguanosine
  modified_base 14: mod_base = OTHER; note = 2'-fluorouridine
  modified_base 15: mod_base = OTHER; note = 2'-O-methylcytidine
  modified_base 16: mod_base = OTHER; note = 2'-fluoroguanosine
  modified_base 17: mod_base = OTHER; note = 2'-O-methylcytidine
  modified_base 18: mod_base = OTHER; note = 2'-fluorouridine
  modified_base 19: mod_base = OTHER; note = 2'-O-methylguanosine
  modified_base 20: mod_base = OTHER; note = 2'-fluorocytidine
  modified_base 21: mod_base = OTHER; note = 2'-O-methylguanosine with phosphorothioate linkage
  modified_base 22: mod_base = OTHER; note = 2'-O-methyluridine with phosphorothioate linkage
  modified_base 23: mod_base = OTHER; note = 2'-O-methylcytidine
gtactcacaagtgtcgctgcgtc

SEQ ID NO: 812 - RNA, 23 nt, synthetic construct
  source 1..23: mol_type = other RNA
  modified_base 1: mod_base = OTHER; note = 5'-(E)-vinylphosphonate 2'-O-methylated uridine with phosphorothioate linkage
  modified_base 2: mod_base = OTHER; note = 2'-fluoroadenosine with phosphorothioate linkage
  modified_base 3: mod_base = OTHER; note = 2'-O-methyluridine
  modified_base 4: mod_base = OTHER; note = 2'-fluorouridine
  modified_base 5: mod_base = OTHER; note = 2'-O-methylguanosine
  modified_base 6: mod_base = OTHER; note = 2'-fluorouridine
  modified_base 7: mod_base = OTHER; note = 2'-O-methyluridine
  modified_base 8: mod_base = OTHER; note = 2'-fluorouridine
  modified_base 9: mod_base = OTHER; note = 2'-O-methylcytidine
  modified_base 10: mod_base = OTHER; note = 2'-fluorocytidine
  modified_base 11: mod_base = OTHER; note = 2'-O-methylguanosine
  modified_base 12: mod_base = OTHER; note = 2'-fluorouridine
  modified_base 13: mod_base = OTHER; note = 2'-O-methyluridine
  modified_base 14: mod_base = OTHER; note = 2'-fluorouridine
  modified_base 15: mod_base = OTHER; note = 2'-O-methylguanosine
  modified_base 16: mod_base = OTHER; note = 2'-fluorouridine
  modified_base 17: mod_base = OTHER; note = 2'-O-methylguanosine
  modified_base 18: mod_base = OTHER; note = 2'-fluorocytidine
  modified_base 19: mod_base = OTHER; note = 2'-O-methyluridine
  modified_base 20: mod_base = OTHER; note = 2'-fluorocytidine
  modified_base 21: mod_base = OTHER; note = 2'-O-methylguanosine with phosphorothioate linkage
  modified_base 22: mod_base = OTHER; note = 2'-O-methyladenosine with phosphorothioate linkage
  modified_base 23: mod_base = OTHER; note = 2'-O-methyluridine
tattgtttccgtttgtgctcgat

SEQ ID NO: 813 - RNA, 23 nt, synthetic construct
  source 1..23: mol_type = other RNA
  modified_base 1: mod_base = OTHER; note = 5'-(E)-vinylphosphonate 2'-O-methylated adenosine with phosphorothioate linkage
  modified_base 2: mod_base = OTHER; note = 2'-fluoroadenosine with phosphorothioate linkage
  modified_base 3: mod_base = OTHER; note = 2'-O-methyluridine
  modified_base 4: mod_base = OTHER; note = 2'-fluorouridine
  modified_base 5: mod_base = OTHER; note = 2'-O-methylcytidine
  modified_base 6: mod_base = OTHER; note = 2'-fluorocytidine
  modified_base 7: mod_base = OTHER; note = 2'-O-methyluridine
  modified_base 8: mod_base = OTHER; note = 2'-fluorocytidine
  modified_base 9: mod_base = OTHER; note = 2'-O-methyluridine
  modified_base 10: mod_base = OTHER; note = 2'-fluoroadenosine
  modified_base 11: mod_base = OTHER; note = 2'-O-methylguanosine
  modified_base 12: mod_base = OTHER; note = 2'-fluoroadenosine
  modified_base 13: mod_base = OTHER; note = 2'-O-methyluridine
  modified_base 14: mod_base = OTHER; note = 2'-fluoroguanosine
  modified_base 15: mod_base = OTHER; note = 2'-O-methyladenosine
  modified_base 16: mod_base = OTHER; note = 2'-fluorocytidine
  modified_base 17: mod_base = OTHER; note = 2'-O-methylguanosine
  modified_base 18: mod_base = OTHER; note = 2'-fluorouridine
  modified_base 19: mod_base = OTHER; note = 2'-O-methyluridine
  modified_base 20: mod_base = OTHER; note = 2'-fluoroguanosine
  modified_base 21: mod_base = OTHER; note = 2'-O-methyladenosine with phosphorothioate linkage
  modified_base 22: mod_base = OTHER; note = 2'-O-methyluridine with phosphorothioate linkage
  modified_base 23: mod_base = OTHER; note = 2'-O-methyladenosine
aattcctctagatgacgttgata

SEQ ID NO: 814 - RNA, 23 nt, synthetic construct
  source 1..23: mol_type = other RNA
  modified_base 1: mod_base = OTHER; note = 5'-(E)-vinylphosphonate 2'-O-methylated uridine with phosphorothioate linkage
  modified_base 2: mod_base = OTHER; note = 2'-fluoroadenosine with phosphorothioate linkage
  modified_base 3: mod_base = OTHER; note = 2'-O-methylguanosine
  modified_base 4: mod_base = OTHER; note = 2'-fluorocytidine
  modified_base 5: mod_base = OTHER; note = 2'-O-methylcytidine
  modified_base 6: mod_base = OTHER; note = 2'-fluoroadenosine
  modified_base 7: mod_base = OTHER; note = 2'-O-methyluridine
  modified_base 8: mod_base = OTHER; note = 2'-fluorouridine
  modified_base 9: mod_base = OTHER; note = 2'-O-methylguanosine
  modified_base 10: mod_base = OTHER; note = 2'-fluoroguanosine
  modified_base 11: mod_base = OTHER; note = 2'-O-methyladenosine
  modified_base 12: mod_base = OTHER; note = 2'-fluorouridine
  modified_base 13: mod_base = OTHER; note = 2'-O-methyluridine
  modified_base 14: mod_base = OTHER; note = 2'-fluorocytidine
  modified_base 15: mod_base = OTHER; note = 2'-O-methyladenosine
  modified_base 16: mod_base = OTHER; note = 2'-fluoroadenosine
  modified_base 17: mod_base = OTHER; note = 2'-O-methylcytidine
  modified_base 18: mod_base = OTHER; note = 2'-fluorocytidine
  modified_base 19: mod_base = OTHER; note = 2'-O-methylguanosine
  modified_base 20: mod_base = OTHER; note = 2'-fluorocytidine
  modified_base 21: mod_base = OTHER; note = 2'-O-methyladenosine with phosphorothioate linkage
  modified_base 22: mod_base = OTHER; note = 2'-O-methylguanosine with phosphorothioate linkage
  modified_base 23: mod_base = OTHER; note = 2'-O-methylcytidine
tagccattggattcaaccgcagc

SEQ ID NO: 815 - RNA, 23 nt, synthetic construct
  source 1..23: mol_type = other RNA
  modified_base 1: mod_base = OTHER; note = 5'-(E)-vinylphosphonate 2'-O-methylated uridine with phosphorothioate linkage
  modified_base 2: mod_base = OTHER; note = 2'-fluoroguanosine with phosphorothioate linkage
  modified_base 3: mod_base = OTHER; note = 2'-O-methyladenosine
  modified_base 4: mod_base = OTHER; note = 2'-fluorocytidine
  modified_base 5: mod_base = OTHER; note = 2'-O-methylguanosine
  modified_base 6: mod_base = OTHER; note = 2'-fluorouridine
  modified_base 7: mod_base = OTHER; note = 2'-O-methyluridine
  modified_base 8: mod_base = OTHER; note = 2'-fluoroguanosine
  modified_base 9: mod_base = OTHER; note = 2'-O-methyladenosine
  modified_base 10: mod_base = OTHER; note = 2'-fluorouridine
  modified_base 11: mod_base = OTHER; note = 2'-O-methyladenosine
  modified_base 12: mod_base = OTHER; note = 2'-fluoroadenosine
  modified_base 13: mod_base = OTHER; note = 2'-O-methyladenosine
  modified_base 14: mod_base = OTHER; note = 2'-fluorocytidine
  modified_base 15: mod_base = OTHER; note = 2'-O-methyladenosine
  modified_base 16: mod_base = OTHER; note = 2'-fluoroadenosine
  modified_base 17: mod_base = OTHER; note = 2'-O-methyluridine
  modified_base 18: mod_base = OTHER; note = 2'-fluorocytidine
  modified_base 19: mod_base = OTHER; note = 2'-O-methylguanosine
  modified_base 20: mod_base = OTHER; note = 2'-fluorouridine
  modified_base 21: mod_base = OTHER; note = 2'-O-methylcytidine with phosphorothioate linkage
  modified_base 22: mod_base = OTHER; note = 2'-O-methyladenosine with phosphorothioate linkage
  modified_base 23: mod_base = OTHER; note = 2'-O-methyluridine
tgacgttgataaacaatcgtcat

SEQ ID NO: 816 - RNA, 23 nt, synthetic construct
  source 1..23: mol_type = other RNA
  modified_base 1: mod_base = OTHER; note = 5'-(E)-vinylphosphonate 2'-O-methylated guanosine with phosphorothioate linkage
  modified_base 2: mod_base = OTHER; note = 2'-fluorouridine with phosphorothioate linkage
  modified_base 3: mod_base = OTHER; note = 2'-O-methyluridine
  modified_base 4: mod_base = OTHER; note = 2'-fluoroadenosine
  modified_base 5: mod_base = OTHER; note = 2'-O-methylguanosine
  modified_base 6: mod_base = OTHER; note = 2'-fluoroadenosine
  modified_base 7: mod_base = OTHER; note = 2'-O-methyladenosine
  modified_base 8: mod_base = OTHER; note = 2'-fluoroadenosine
  modified_base 9: mod_base = OTHER; note = 2'-O-methylguanosine
  modified_base 10: mod_base = OTHER; note = 2'-fluoroadenosine
  modified_base 11: mod_base = OTHER; note = 2'-O-methyladenosine
  modified_base 12: mod_base = OTHER; note = 2'-fluoroguanosine
  modified_base 13: mod_base = OTHER; note = 2'-O-methylguanosine
  modified_base 14: mod_base = OTHER; note = 2'-fluoroadenosine
  modified_base 15: mod_base = OTHER; note = 2'-O-methylguanosine
  modified_base 16: mod_base = OTHER; note = 2'-fluoroadenosine
  modified_base 17: mod_base = OTHER; note = 2'-O-methylcytidine
  modified_base 18: mod_base = OTHER; note = 2'-fluorouridine
  modified_base 19: mod_base = OTHER; note = 2'-O-methylcytidine
  modified_base 20: mod_base = OTHER; note = 2'-fluorocytidine
  modified_base 21: mod_base = OTHER; note = 2'-O-methyladenosine with phosphorothioate linkage
  modified_base 22: mod_base = OTHER; note = 2'-O-methylguanosine with phosphorothioate linkage
  modified_base 23: mod_base = OTHER; note = 2'-O-methyladenosine
gttagaaagaaggagactccaga

SEQ ID NO: 817 - RNA, 23 nt, synthetic construct
  source 1..23: mol_type = other RNA
  modified_base 1: mod_base = OTHER; note = 5'-(E)-vinylphosphonate 2'-O-methylated adenosine with phosphorothioate linkage
  modified_base 2: mod_base = OTHER; note = 2'-fluoroadenosine with phosphorothioate linkage
  modified_base 3: mod_base = OTHER; note = 2'-O-methylcytidine
  modified_base 4: mod_base = OTHER; note = 2'-fluoroadenosine
  modified_base 5: mod_base = OTHER; note = 2'-O-methylguanosine
  modified_base 6: mod_base = OTHER; note = 2'-fluorouridine
  modified_base 7: mod_base = OTHER; note = 2'-O-methylguanosine
  modified_base 8: mod_base = OTHER; note = 2'-fluorocytidine
  modified_base 9: mod_base = OTHER; note = 2'-O-methylcytidine
  modified_base 10: mod_base = OTHER; note = 2'-fluoroadenosine
  modified_base 11: mod_base = OTHER; note = 2'-O-methyluridine
  modified_base 12: mod_base = OTHER; note = 2'-fluorocytidine
  modified_base 13: mod_base = OTHER; note = 2'-O-methylguanosine
  modified_base 14: mod_base = OTHER; note = 2'-fluorouridine
  modified_base 15: mod_base = OTHER; note = 2'-O-methylcytidine
  modified_base 16: mod_base = OTHER; note = 2'-fluorouridine
  modified_base 17: mod_base = OTHER; note = 2'-O-methyladenosine
  modified_base 18: mod_base = OTHER; note = 2'-fluorouridine
  modified_base 19: mod_base = OTHER; note = 2'-O-methylguanosine
  modified_base 20: mod_base = OTHER; note = 2'-fluorocytidine
  modified_base 21: mod_base = OTHER; note = 2'-O-methylguanosine with phosphorothioate linkage
  modified_base 22: mod_base = OTHER; note = 2'-O-methylguanosine with phosphorothioate linkage
  modified_base 23: mod_base = OTHER; note = 2'-O-methyluridine
aacagtgccatcgtctatgcggt

SEQ ID NO: 818 - RNA, 23 nt, synthetic construct
  source 1..23: mol_type = other RNA
  modified_base 1: mod_base = OTHER; note = 5'-(E)-vinylphosphonate 2'-O-methylated adenosine with phosphorothioate linkage
  modified_base 2: mod_base = OTHER; note = 2'-fluoroguanosine with phosphorothioate linkage
  modified_base 3: mod_base = OTHER; note = 2'-O-methylguanosine
  modified_base 4: mod_base = OTHER; note = 2'-fluorocytidine
  modified_base 5: mod_base = OTHER; note = 2'-O-methyladenosine
  modified_base 6: mod_base = OTHER; note = 2'-fluorouridine
  modified_base 7: mod_base = OTHER; note = 2'-O-methylcytidine
  modified_base 8: mod_base = OTHER; note = 2'-fluorouridine
  modified_base 9: mod_base = OTHER; note = 2'-O-methyluridine
  modified_base 10: mod_base = OTHER; note = 2'-fluoroadenosine
  modified_base 11: mod_base = OTHER; note = 2'-O-methylcytidine
  modified_base 12: mod_base = OTHER; note = 2'-fluoroadenosine
  modified_base 13: mod_base = OTHER; note = 2'-O-methyladenosine
  modified_base 14: mod_base = OTHER; note = 2'-fluoroadenosine
  modified_base 15: mod_base = OTHER; note = 2'-O-methyluridine
  modified_base 16: mod_base = OTHER; note = 2'-fluorouridine
  modified_base 17: mod_base = OTHER; note = 2'-O-methyluridine
  modified_base 18: mod_base = OTHER; note = 2'-fluorocytidine
  modified_base 19: mod_base = OTHER; note = 2'-O-methyladenosine
  modified_base 20: mod_base = OTHER; note = 2'-fluorocytidine
  modified_base 21: mod_base = OTHER; note = 2'-O-methyladenosine with phosphorothioate linkage
  modified_base 22: mod_base = OTHER; note = 2'-O-methyluridine with phosphorothioate linkage
  modified_base 23: mod_base = OTHER; note = 2'-O-methyluridine
aggcatcttacaaatttcacatt

SEQ ID NO: 819 - RNA, 23 nt, synthetic construct
  source 1..23: mol_type = other RNA
  modified_base 1: mod_base = OTHER; note = 5'-(E)-vinylphosphonate 2'-O-methylated uridine with phosphorothioate linkage
  modified_base 2: mod_base = OTHER; note = 2'-fluorocytidine with phosphorothioate linkage
  modified_base 3: mod_base = OTHER; note = 2'-O-methyluridine
  modified_base 4: mod_base = OTHER; note = 2'-fluorouridine
  modified_base 5: mod_base = OTHER; note = 2'-O-methyladenosine
  modified_base 6: mod_base = OTHER; note = 2'-fluoroadenosine
  modified_base 7: mod_base = OTHER; note = 2'-O-methyluridine
  modified_base 8: mod_base = OTHER; note = 2'-fluorocytidine
  modified_base 9: mod_base = OTHER; note = 2'-O-methylcytidine
  modified_base 10: mod_base = OTHER; note = 2'-fluoroadenosine
  modified_base 11: mod_base = OTHER; note = 2'-O-methyluridine
  modified_base 12: mod_base = OTHER; note = 2'-fluoroguanosine
  modified_base 13: mod_base = OTHER; note = 2'-O-methyladenosine
  modified_base 14: mod_base = OTHER; note = 2'-fluoroguanosine
  modified_base 15: mod_base = OTHER; note = 2'-O-methyluridine
  modified_base 16: mod_base = OTHER; note = 2'-fluoroguanosine
  modified_base 17: mod_base = OTHER; note = 2'-O-methyluridine
  modified_base 18: mod_base = OTHER; note = 2'-fluorouridine
  modified_base 19: mod_base = OTHER; note = 2'-O-methylcytidine
  modified_base 20: mod_base = OTHER; note = 2'-fluorouridine
  modified_base 21: mod_base = OTHER; note = 2'-O-methylguanosine with phosphorothioate linkage
  modified_base 22: mod_base = OTHER; note = 2'-O-methyluridine with phosphorothioate linkage
  modified_base 23: mod_base = OTHER; note = 2'-O-methylguanosine
tcttaatccatgagtgttctgtg

SEQ ID NO: 820 - RNA, 23 nt, synthetic construct
  source 1..23: mol_type = other RNA
  modified_base 1: mod_base = OTHER; note = 5'-(E)-vinylphosphonate 2'-O-methylated guanosine with phosphorothioate linkage
  modified_base 2: mod_base = OTHER; note = 2'-fluoroadenosine with phosphorothioate linkage
  modified_base 3: mod_base = OTHER; note = 2'-O-methyluridine
  modified_base 4: mod_base = OTHER; note = 2'-fluoroguanosine
  modified_base 5: mod_base = OTHER; note = 2'-O-methyladenosine
  modified_base 6: mod_base = OTHER; note = 2'-fluoroadenosine
  modified_base 7: mod_base = OTHER; note = 2'-O-methyluridine
  modified_base 8: mod_base = OTHER; note = 2'-fluorouridine
  modified_base 9: mod_base = OTHER; note = 2'-O-methylguanosine
  modified_base 10: mod_base = OTHER; note = 2'-fluorouridine
  modified_base 11: mod_base = OTHER; note = 2'-O-methylguanosine
  modified_base 12: mod_base = OTHER; note = 2'-fluoroguanosine
  modified_base 13: mod_base = OTHER; note = 2'-O-methylguanosine
  modified_base 14: mod_base = OTHER; note = 2'-fluoroadenosine
  modified_base 15: mod_base = OTHER; note = 2'-O-methylguanosine
  modified_base 16: mod_base = OTHER; note = 2'-fluoroadenosine
  modified_base 17: mod_base = OTHER; note = 2'-O-methylguanosine
  modified_base 18: mod_base = OTHER; note = 2'-fluorocytidine
  modified_base 19: mod_base = OTHER; note = 2'-O-methylcytidine
  modified_base 20: mod_base = OTHER; note = 2'-fluoroguanosine
  modified_base 21: mod_base = OTHER; note = 2'-O-methyluridine with phosphorothioate linkage
  modified_base 22: mod_base = OTHER; note = 2'-O-methylcytidine with phosphorothioate linkage
  modified_base 23: mod_base = OTHER; note = 2'-O-methyladenosine
gatgaattgtgggagagccgtca

SEQ ID NO: 821 - RNA, 23 nt, synthetic construct
  source 1..23: mol_type = other RNA
  modified_base 1: mod_base = OTHER; note = 5'-(E)-vinylphosphonate 2'-O-methylated uridine with phosphorothioate linkage
  modified_base 2: mod_base = OTHER; note = 2'-fluoroadenosine with phosphorothioate linkage
  modified_base 3: mod_base = OTHER; note = 2'-O-methylcytidine
  modified_base 4: mod_base = OTHER; note = 2'-fluoroadenosine
  modified_base 5: mod_base = OTHER; note = 2'-O-methylguanosine
  modified_base 6: mod_base = OTHER; note = 2'-fluorouridine
  modified_base 7: mod_base = OTHER; note = 2'-O-methyluridine
  modified_base 8: mod_base = OTHER; note = 2'-fluorocytidine
  modified_base 9: mod_base = OTHER; note = 2'-O-methyluridine
  modified_base 10: mod_base = OTHER; note = 2'-fluorouridine
  modified_base 11: mod_base = OTHER; note = 2'-O-methylguanosine
  modified_base 12: mod_base = OTHER; note = 2'-fluoroadenosine
  modified_base 13: mod_base = OTHER; note = 2'-O-methyladenosine
  modified_base 14: mod_base = OTHER; note = 2'-fluoroguanosine
  modified_base 15: mod_base = OTHER; note = 2'-O-methyladenosine
  modified_base 16: mod_base = OTHER; note = 2'-fluorocytidine
  modified_base 17: mod_base = OTHER; note = 2'-O-methyluridine
  modified_base 18: mod_base = OTHER; note = 2'-fluorouridine
  modified_base 19: mod_base = OTHER; note = 2'-O-methyluridine
  modified_base 20: mod_base = OTHER; note = 2'-fluorocytidine
  modified_base 21: mod_base = OTHER; note = 2'-O-methylcytidine with phosphorothioate linkage
  modified_base 22: mod_base = OTHER; note = 2'-O-methylcytidine with phosphorothioate linkage
  modified_base 23: mod_base = OTHER; note = 2'-O-methyladenosine
tacagttcttgaagactttccca

SEQ ID NO: 822 - RNA, 23 nt, synthetic construct
  source 1..23: mol_type = other RNA
  modified_base 1: mod_base = OTHER; note = 5'-(E)-vinylphosphonate 2'-O-methylated uridine with phosphorothioate linkage
  modified_base 2: mod_base = OTHER; note = 2'-fluoroguanosine with phosphorothioate linkage
  modified_base 3: mod_base = OTHER; note = 2'-O-methylcytidine
  modified_base 4: mod_base = OTHER; note = 2'-fluoroadenosine
  modified_base 5: mod_base = OTHER; note = 2'-O-methylcytidine
  modified_base 6: mod_base = OTHER; note = 2'-fluoroadenosine
  modified_base 7: mod_base = OTHER; note = 2'-O-methylguanosine
  modified_base 8: mod_base = OTHER; note = 2'-fluorocytidine
  modified_base 9: mod_base = OTHER; note = 2'-O-methyluridine
  modified_base 10: mod_base = OTHER; note = 2'-fluorocytidine
  modified_base 11: mod_base = OTHER; note = 2'-O-methylguanosine
  modified_base 12: mod_base = OTHER; note = 2'-fluorocytidine
  modified_base 13: mod_base = OTHER; note = 2'-O-methyladenosine
  modified_base 14: mod_base = OTHER; note = 2'-fluorouridine
  modified_base 15: mod_base = OTHER; note = 2'-O-methyluridine
  modified_base 16: mod_base = OTHER; note = 2'-fluorouridine
  modified_base 17: mod_base = OTHER; note = 2'-O-methyladenosine
  modified_base 18: mod_base = OTHER; note = 2'-fluorouridine
  modified_base 19: mod_base = OTHER; note = 2'-O-methyladenosine
  modified_base 20: mod_base = OTHER; note = 2'-fluoroadenosine
  modified_base 21: mod_base = OTHER; note = 2'-O-methylguanosine with phosphorothioate linkage
  modified_base 22: mod_base = OTHER; note = 2'-O-methylguanosine with phosphorothioate linkage
  modified_base 23: mod_base = OTHER; note = 2'-O-methylcytidine
tgcacagctcgcatttataaggc

SEQ ID NO: 823 - RNA, 23 nt, synthetic construct
  source 1..23: mol_type = other RNA
  modified_base 1: mod_base = OTHER; note = 5'-(E)-vinylphosphonate 2'-O-methylated guanosine with phosphorothioate linkage
  modified_base 2: mod_base = OTHER; note = 2'-fluoroadenosine with phosphorothioate linkage
  modified_base 3: mod_base = OTHER; note = 2'-O-methylguanosine
  modified_base 4: mod_base = OTHER; note = 2'-fluoroadenosine
  modified_base 5: mod_base = OTHER; note = 2'-O-methyluridine
  modified_base 6: mod_base = OTHER; note = 2'-fluorouridine
  modified_base 7: mod_base = OTHER; note = 2'-O-methylguanosine
  modified_base 8: mod_base = OTHER; note = 2'-fluorocytidine
  modified_base 9: mod_base = OTHER; note = 2'-O-methyluridine
  modified_base 10: mod_base = OTHER; note = 2'-fluoroadenosine
  modified_base 11: mod_base = OTHER; note = 2'-O-methylcytidine
  modified_base 12: mod_base = OTHER; note = 2'-fluoroadenosine
  modified_base 13: mod_base = OTHER; note = 2'-O-methylguanosine
  modified_base 14: mod_base = OTHER; note = 2'-fluorouridine
  modified_base 15: mod_base = OTHER; note = 2'-O-methyluridine
  modified_base 16: mod_base = OTHER; note = 2'-fluorocytidine
  modified_base 17: mod_base = OTHER; note = 2'-O-methyluridine
  modified_base 18: mod_base = OTHER; note = 2'-fluorouridine
  modified_base 19: mod_base = OTHER; note = 2'-O-methylguanosine
  modified_base 20: mod_base = OTHER; note = 2'-fluoroadenosine
  modified_base 21: mod_base = OTHER; note = 2'-O-methyladenosine with phosphorothioate linkage
  modified_base 22: mod_base = OTHER; note = 2'-O-methylguanosine with phosphorothioate linkage
  modified_base 23: mod_base = OTHER; note = 2'-O-methyladenosine
gagattgctacagttcttgaaga

SEQ ID NO: 824 - RNA, 23 nt, synthetic construct
  source 1..23: mol_type = other RNA
  modified_base 1: mod_base = OTHER; note = 5'-(E)-vinylphosphonate 2'-O-methylated guanosine with phosphorothioate linkage
  modified_base 2: mod_base = OTHER; note = 2'-fluoroguanosine with phosphorothioate linkage
  modified_base 3: mod_base = OTHER; note = 2'-O-methylguanosine
  modified_base 4: mod_base = OTHER; note = 2'-fluoroadenosine
  modified_base 5: mod_base = OTHER; note = 2'-O-methyluridine
  modified_base 6: mod_base = OTHER; note = 2'-fluorocytidine
  modified_base 7: mod_base = OTHER; note = 2'-O-methyluridine
  modified_base 8: mod_base = OTHER; note = 2'-fluorouridine
  modified_base 9: mod_base = OTHER; note = 2'-O-methyluridine
  modified_base 10: mod_base = OTHER; note = 2'-fluoroguanosine
  modified_base 11: mod_base = OTHER; note = 2'-O-methyladenosine
  modified_base 12: mod_base = OTHER; note = 2'-fluoroguanosine
  modified_base 13: mod_base = OTHER; note = 2'-O-methylcytidine
  modified_base 14: mod_base = OTHER; note = 2'-fluorouridine
  modified_base 15: mod_base = OTHER; note = 2'-O-methylguanosine
  modified_base 16: mod_base = OTHER; note = 2'-fluorocytidine
  modified_base 17: mod_base = OTHER; note = 2'-O-methylcytidine
  modified_base 18: mod_base = OTHER; note = 2'-fluorouridine
  modified_base 19: mod_base = OTHER; note = 2'-O-methylguanosine
  modified_base 20: mod_base = OTHER; note = 2'-fluoroguanosine
  modified_base 21: mod_base = OTHER; note = 2'-O-methyladenosine with phosphorothioate linkage
  modified_base 22: mod_base = OTHER; note = 2'-O-methylguanosine with phosphorothioate linkage
  modified_base 23: mod_base = OTHER; note = 2'-O-methylguanosine
gggatctttgagctgcctggagg

SEQ ID NO: 825 - RNA, 23 nt, synthetic construct
  source 1..23: mol_type = other RNA
  modified_base 1: mod_base = OTHER; note = 5'-(E)-vinylphosphonate 2'-O-methylated guanosine with phosphorothioate linkage
  modified_base 2: mod_base = OTHER; note = 2'-fluorouridine with phosphorothioate linkage
  modified_base 3: mod_base = OTHER; note = 2'-O-methyluridine
  modified_base 4: mod_base = OTHER; note = 2'-fluoroguanosine
  modified_base 5: mod_base = OTHER; note = 2'-O-methyladenosine
  modified_base 6: mod_base = OTHER; note = 2'-fluorouridine
  modified_base 7: mod_base = OTHER; note = 2'-O-methyladenosine
  modified_base 8: mod_base = OTHER; note = 2'-fluoroadenosine
  modified_base 9: mod_base = OTHER; note = 2'-O-methyladenosine
  modified_base 10: mod_base = OTHER; note = 2'-fluorocytidine
  modified_base 11: mod_base = OTHER; note = 2'-O-methyladenosine
  modified_base 12: mod_base = OTHER; note = 2'-fluoroadenosine
  modified_base 13: mod_base = OTHER; note = 2'-O-methyluridine
  modified_base 14: mod_base = OTHER; note = 2'-fluorocytidine
  modified_base 15: mod_base = OTHER; note = 2'-O-methylguanosine
  modified_base 16: mod_base = OTHER; note = 2'-fluorouridine
  modified_base 17: mod_base = OTHER; note = 2'-O-methylcytidine
  modified_base 18: mod_base = OTHER; note = 2'-fluoroadenosine
  modified_base 19: mod_base = OTHER; note = 2'-O-methyluridine
  modified_base 20: mod_base = OTHER; note = 2'-fluorocytidine
  modified_base 21: mod_base = OTHER; note = 2'-O-methylcytidine with phosphorothioate linkage
  modified_base 22: mod_base = OTHER; note = 2'-O-methyluridine with phosphorothioate linkage
  modified_base 23: mod_base = OTHER; note = 2'-O-methylcytidine
gttgataaacaatcgtcatcctc

SEQ ID NO: 826 - RNA, 23 nt, synthetic construct
  source 1..23: mol_type = other RNA
  modified_base 1: mod_base = OTHER; note = 5'-(E)-vinylphosphonate 2'-O-methylated adenosine with phosphorothioate linkage
  modified_base 2: mod_base = OTHER; note = 2'-fluoroguanosine with phosphorothioate linkage
  modified_base 3: mod_base = OTHER; note = 2'-O-methylcytidine
  modified_base 4: mod_base = OTHER; note = 2'-fluorocytidine
  modified_base 5: mod_base = OTHER; note = 2'-O-methyladenosine
  modified_base 6: mod_base = OTHER; note = 2'-fluorouridine
  modified_base 7: mod_base = OTHER; note = 2'-O-methyluridine
  modified_base 8: mod_base = OTHER; note = 2'-fluoroguanosine
  modified_base 9: mod_base = OTHER; note = 2'-O-methylguanosine
  modified_base 10: mod_base = OTHER; note = 2'-fluoroadenosine
  modified_base 11: mod_base = OTHER; note = 2'-O-methyluridine
  modified_base 12: mod_base = OTHER; note = 2'-fluorouridine
  modified_base 13: mod_base = OTHER; note = 2'-O-methylcytidine
  modified_base 14: mod_base = OTHER; note = 2'-fluoroadenosine
  modified_base 15: mod_base = OTHER; note = 2'-O-methyladenosine
  modified_base 16: mod_base = OTHER; note = 2'-fluorocytidine
  modified_base 17: mod_base = OTHER; note = 2'-O-methylcytidine
  modified_base 18: mod_base = OTHER; note = 2'-fluoroguanosine
  modified_base 19: mod_base = OTHER; note = 2'-O-methylcytidine
  modified_base 20: mod_base = OTHER; note = 2'-fluoroadenosine
  modified_base 21: mod_base = OTHER; note = 2'-O-methylguanosine with phosphorothioate linkage
  modified_base 22: mod_base = OTHER; note = 2'-O-methylcytidine with phosphorothioate linkage
  modified_base 23: mod_base = OTHER; note = 2'-O-methyladenosine
agccattggattcaaccgcagca

SEQ ID NO: 827 - RNA, 23 nt, synthetic construct
  source 1..23: mol_type = other RNA
  modified_base 1: mod_base = OTHER; note = 5'-(E)-vinylphosphonate 2'-O-methylated guanosine with phosphorothioate linkage
  modified_base 2: mod_base = OTHER; note = 2'-fluoroadenosine with phosphorothioate linkage
  modified_base 3: mod_base = OTHER; note = 2'-O-methylcytidine
  modified_base 4: mod_base = OTHER; note = 2'-fluoroguanosine
  modified_base 5: mod_base = OTHER; note = 2'-O-methyluridine
  modified_base 6: mod_base = OTHER; note = 2'-fluorouridine
  modified_base 7: mod_base = OTHER; note = 2'-O-methylguanosine
  modified_base 8: mod_base = OTHER; note = 2'-fluoroadenosine
  modified_base 9: mod_base = OTHER; note = 2'-O-methyluridine
  modified_base 10: mod_base = OTHER; note = 2'-fluoroadenosine
  modified_base 11: mod_base = OTHER; note = 2'-O-methyladenosine
  modified_base 12: mod_base = OTHER; note = 2'-fluoroadenosine
  modified_base 13: mod_base = OTHER; note = 2'-O-methylcytidine
  modified_base 14: mod_base = OTHER; note = 2'-fluoroadenosine
  modified_base 15: mod_base = OTHER; note = 2'-O-methyladenosine
  modified_base 16: mod_base = OTHER; note = 2'-fluorouridine
  modified_base 17: mod_base = OTHER; note = 2'-O-methylcytidine
  modified_base 18: mod_base = OTHER; note = 2'-fluoroguanosine
  modified_base 19: mod_base = OTHER; note = 2'-O-methyluridine
  modified_base 20: mod_base = OTHER; note = 2'-fluorocytidine
  modified_base 21: mod_base = OTHER; note = 2'-O-methyladenosine with phosphorothioate linkage
  modified_base 22: mod_base = OTHER; note = 2'-O-methyluridine with phosphorothioate linkage
  modified_base 23: mod_base = OTHER; note = 2'-O-methylcytidine
gacgttgataaacaatcgtcatc

SEQ ID NO: 828 - RNA, 23 nt, synthetic construct
  source 1..23: mol_type = other RNA
  modified_base 1: mod_base = OTHER; note = 5'-(E)-vinylphosphonate 2'-O-methylated guanosine with phosphorothioate linkage
  modified_base 2: mod_base = OTHER; note = 2'-fluoroadenosine with phosphorothioate linkage
  modified_base 3: mod_base = OTHER; note = 2'-O-methyluridine
  modified_base 4: mod_base = OTHER; note = 2'-fluorouridine
  modified_base 5: mod_base = OTHER; note = 2'-O-methylguanosine
  modified_base 6: mod_base = OTHER; note = 2'-fluorouridine
  modified_base 7: mod_base = OTHER; note = 2'-O-methylcytidine
  modified_base 8: mod_base = OTHER; note = 2'-fluorouridine
  modified_base 9: mod_base = OTHER; note = 2'-O-methylguanosine
  modified_base 10: mod_base = OTHER; note = 2'-fluoroguanosine
  modified_base 11: mod_base = OTHER; note = 2'-O-methyladenosine
  modified_base 12: mod_base = OTHER; note = 2'-fluoroguanosine
  modified_base 13: mod_base = OTHER; note = 2'-O-methyluridine
  modified_base 14: mod_base = OTHER; note = 2'-fluorocytidine
  modified_base 15: mod_base = OTHER; note = 2'-O-methyluridine
  modified_base 16: mod_base = OTHER; note = 2'-fluorocytidine
  modified_base 17: mod_base = OTHER; note = 2'-O-methylcytidine
  modified_base 18: mod_base = OTHER; note = 2'-fluoroguanosine
  modified_base 19: mod_base = OTHER; note = 2'-O-methyladenosine
  modified_base 20: mod_base = OTHER; note = 2'-fluoroadenosine
  modified_base 21: mod_base = OTHER; note = 2'-O-methylguanosine with phosphorothioate linkage
  modified_base 22: mod_base = OTHER; note = 2'-O-methylcytidine with phosphorothioate linkage
  modified_base 23: mod_base = OTHER; note = 2'-O-methyluridine
gattgtctggagtctccgaagct

SEQ ID NO: 829 - RNA, 23 nt, synthetic construct
  source 1..23: mol_type = other RNA
  modified_base 1: mod_base = OTHER; note = 5'-(E)-vinylphosphonate 2'-O-methylated adenosine with phosphorothioate linkage
  modified_base 2: mod_base = OTHER; note = 2'-fluoroguanosine with phosphorothioate linkage
  modified_base 3: mod_base = OTHER; note = 2'-O-methyladenosine
  modified_base 4: mod_base = OTHER; note = 2'-fluorouridine
  modified_base 5: mod_base = OTHER; note = 2'-O-methyluridine
  modified_base 6: mod_base = OTHER; note = 2'-fluoroguanosine
  modified_base 7: mod_base = OTHER; note = 2'-O-methylcytidine
  modified_base 8: mod_base = OTHER; note = 2'-fluorouridine
  modified_base 9: mod_base = OTHER; note = 2'-O-methyladenosine
  modified_base 10: mod_base = OTHER; note = 2'-fluorocytidine
  modified_base 11: mod_base = OTHER; note = 2'-O-methyladenosine
  modified_base 12: mod_base = OTHER; note = 2'-fluoroguanosine
  modified_base 13: mod_base = OTHER; note = 2'-O-methyluridine
  modified_base 14: mod_base = OTHER; note = 2'-fluorouridine
  modified_base 15: mod_base = OTHER; note = 2'-O-methylcytidine
  modified_base 16: mod_base = OTHER; note = 2'-fluorouridine
  modified_base 17: mod_base = OTHER; note = 2'-O-methyluridine
  modified_base 18: mod_base = OTHER; note = 2'-fluoroguanosine
  modified_base 19: mod_base = OTHER; note = 2'-O-methyladenosine
  modified_base 20: mod_base = OTHER; note = 2'-fluoroadenosine
  modified_base 21: mod_base = OTHER; note = 2'-O-methylguanosine with phosphorothioate linkage
  modified_base 22: mod_base = OTHER; note = 2'-O-methyladenosine with phosphorothioate linkage
  modified_base 23: mod_base = OTHER; note = 2'-O-methylcytidine
agattgctacagttcttgaagac

SEQ ID NO: 830 - RNA, 23 nt, synthetic construct
  source 1..23: mol_type = other RNA
  modified_base 1: mod_base = OTHER; note = 5'-(E)-vinylphosphonate 2'-O-methylated adenosine with phosphorothioate linkage
  modified_base 2: mod_base = OTHER; note = 2'-fluoroguanosine with phosphorothioate linkage
  modified_base 3: mod_base = OTHER; note = 2'-O-methylguanosine
  modified_base 4: mod_base = OTHER; note = 2'-fluorocytidine
  modified_base 5: mod_base = OTHER; note = 2'-O-methyladenosine
  modified_base 6: mod_base = OTHER; note = 2'-fluorouridine
  modified_base 7: mod_base = OTHER; note = 2'-O-methyladenosine
  modified_base 8: mod_base = OTHER; note = 2'-fluoroguanosine
  modified_base 9: mod_base = OTHER; note = 2'-O-methyluridine
  modified_base 10: mod_base = OTHER; note = 2'-fluorouridine
  modified_base 11: mod_base = OTHER; note = 2'-O-methylguanosine
  modified_base 12: mod_base = OTHER; note = 2'-fluorocytidine
  modified_base 13: mod_base = OTHER; note = 2'-O-methyladenosine
  modified_base 14: mod_base = OTHER; note = 2'-fluorocytidine
  modified_base 15: mod_base = OTHER; note = 2'-O-methyladenosine
  modified_base 16: mod_base = OTHER; note = 2'-fluoroguanosine
  modified_base 17: mod_base = OTHER; note = 2'-O-methylcytidine
  modified_base 18: mod_base = OTHER; note = 2'-fluorouridine
  modified_base 19: mod_base = OTHER; note = 2'-O-methylcytidine
  modified_base 20: mod_base = OTHER; note = 2'-fluoroguanosine
  modified_base 21: mod_base = OTHER; note = 2'-O-methylcytidine with phosphorothioate linkage
  modified_base 22: mod_base = OTHER; note = 2'-O-methyladenosine with phosphorothioate linkage
  modified_base 23: mod_base = OTHER; note = 2'-O-methyluridine
aggcatagttgcacagctcgcat

SEQ ID NO: 831 - RNA, 23 nt, synthetic construct
  source 1..23: mol_type = other RNA
  modified_base 1: mod_base = OTHER; note = 5'-(E)-vinylphosphonate 2'-O-methylated guanosine with phosphorothioate linkage
  modified_base 2: mod_base = OTHER; note = 2'-fluoroadenosine with phosphorothioate linkage
  modified_base 3: mod_base = OTHER; note = 2'-O-methylguanosine
  modified_base 4: mod_base = OTHER; note = 2'-fluoroguanosine
  modified_base 5: mod_base = OTHER; note = 2'-O-methylcytidine
  modified_base 6: mod_base = OTHER; note = 2'-fluorouridine
  modified_base 7: mod_base = OTHER; note = 2'-O-methylcytidine
  modified_base 8: mod_base = OTHER; note = 2'-fluorocytidine
  modified_base 9: mod_base = OTHER; note = 2'-O-methyladenosine
  modified_base 10: mod_base = OTHER; note = 2'-fluorouridine
  modified_base 11: mod_base = OTHER; note = 2'-O-methyladenosine
  modified_base 12: mod_base = OTHER; note = 2'-fluoroguanosine
  modified_base 13: mod_base = OTHER; note = 2'-O-methylcytidine
  modified_base 14: mod_base = OTHER; note = 2'-fluorocytidine
  modified_base 15: mod_base = OTHER; note = 2'-O-methyladenosine
  modified_base 16: mod_base = OTHER; note = 2'-fluorouridine
  modified_base 17: mod_base = OTHER; note = 2'-O-methyluridine
  modified_base 18: mod_base = OTHER; note = 2'-fluoroguanosine
  modified_base 19: mod_base = OTHER; note = 2'-O-methylguanosine
  modified_base 20: mod_base = OTHER; note = 2'-fluoroadenosine
  modified_base 21: mod_base = OTHER; note = 2'-O-methyluridine with phosphorothioate linkage
  modified_base 22: mod_base = OTHER; note = 2'-O-methyluridine with phosphorothioate linkage
  modified_base 23: mod_base = OTHER; note = 2'-O-methylcytidine
gaggctccatagccattggattc

SEQ ID NO: 832 - RNA, 23 nt, synthetic construct
  source 1..23: mol_type = other RNA
  modified_base 1: mod_base = OTHER; note = 5'-(E)-vinylphosphonate 2'-O-methylated uridine with phosphorothioate linkage
  modified_base 2: mod_base = OTHER; note = 2'-fluoroadenosine with phosphorothioate linkage
  modified_base 3: mod_base = OTHER; note = 2'-O-methylcytidine
  modified_base 4: mod_base = OTHER; note = 2'-fluoroadenosine
  modified_base 5: mod_base = OTHER; note = 2'-O-methylguanosine
  modified_base 6: mod_base = OTHER; note = 2'-fluorocytidine
  modified_base 7: mod_base = OTHER; note = 2'-O-methyluridine
  modified_base 8: mod_base = OTHER; note = 2'-fluorocytidine
  modified_base 9: mod_base = OTHER; note = 2'-O-methylguanosine
  modified_base 10: mod_base = OTHER; note = 2'-fluorocytidine
  modified_base 11: mod_base = OTHER; note = 2'-O-methyladenosine
  modified_base 12: mod_base = OTHER; note = 2'-fluorouridine
  modified_base 13: mod_base = OTHER; note = 2'-O-methyluridine
  modified_base 14: mod_base = OTHER; note = 2'-fluorouridine
  modified_base 15: mod_base = OTHER; note = 2'-O-methyladenosine
  modified_base 16: mod_base = OTHER; note = 2'-fluorouridine
  modified_base 17: mod_base = OTHER; note = 2'-O-methyladenosine
  modified_base 18: mod_base = OTHER; note = 2'-fluoroadenosine
  modified_base 19: mod_base = OTHER; note = 2'-O-methylguanosine
  modified_base 20: mod_base = OTHER; note = 2'-fluoroguanosine
  modified_base 21: mod_base = OTHER; note = 2'-O-methylcytidine with phosphorothioate linkage
  modified_base 22: mod_base = OTHER; note = 2'-O-methylcytidine with phosphorothioate linkage
  modified_base 23: mod_base = OTHER; note = 2'-O-methyluridine
tacagctcgcatttataaggcct

SEQ ID NO: 833 - RNA, 23 nt, synthetic construct
  source 1..23: mol_type = other RNA
  modified_base 1: mod_base = OTHER; note = 5'-(E)-vinylphosphonate 2'-O-methylated guanosine with phosphorothioate linkage
  modified_base 2: mod_base = OTHER; note = 2'-fluoroadenosine with phosphorothioate linkage
  modified_base 3: mod_base = OTHER; note = 2'-O-methyladenosine
  modified_base 4: mod_base = OTHER; note = 2'-fluorouridine
  modified_base 5: mod_base = OTHER; note = 2'-O-methyluridine
  modified_base 6: mod_base = OTHER; note = 2'-fluorocytidine
  modified_base 7: mod_base = OTHER; note = 2'-O-methylcytidine
  modified_base 8: mod_base = OTHER; note = 2'-fluorocytidine
  modified_base 9: mod_base = OTHER; note = 2'-O-methylguanosine
  modified_base 10: mod_base = OTHER; note = 2'-fluorouridine
  modified_base 11: mod_base = OTHER; note = 2'-O-methyluridine
  modified_base 12: mod_base = OTHER; note = 2'-fluorouridine
  modified_base 13: mod_base = OTHER; note = 2'-O-methylguanosine
  modified_base 14: mod_base = OTHER; note = 2'-fluorocytidine
  modified_base 15: mod_base = OTHER; note = 2'-O-methyluridine
  modified_base 16: mod_base = OTHER; note = 2'-fluorouridine
  modified_base 17: mod_base = OTHER; note = 2'-O-methyladenosine
  modified_base 18: mod_base = OTHER; note = 2'-fluoroadenosine
  modified_base 19: mod_base = OTHER; note = 2'-O-methylguanosine
  modified_base 20: mod_base = OTHER; note = 2'-fluorouridine
  modified_base 21: mod_base = OTHER; note = 2'-O-methylguanosine with phosphorothioate linkage
  modified_base 22: mod_base = OTHER; note = 2'-O-methylcytidine with phosphorothioate linkage
  modified_base 23: mod_base = OTHER; note = 2'-O-methyluridine
gaattcccgtttgcttaagtgct

SEQ ID NO: 834 - RNA, 23 nt, synthetic construct
  source 1..23: mol_type = other RNA
  modified_base 1: mod_base = OTHER; note = 5'-(E)-vinylphosphonate 2'-O-methylated adenosine with phosphorothioate linkage
  modified_base 2: mod_base = OTHER; note = 2'-fluoroadenosine with phosphorothioate linkage
  modified_base 3: mod_base = OTHER; note = 2'-O-methylcytidine
  modified_base 4: mod_base = OTHER; note = 2'-fluorouridine
  modified_base 5: mod_base = OTHER; note = 2'-O-methylcytidine
  modified_base 6: mod_base = OTHER; note = 2'-fluoroguanosine
  modified_base 7: mod_base = OTHER; note = 2'-O-methylcytidine
  modified_base 8: mod_base = OTHER; note = 2'-fluoroadenosine
  modified_base 9: mod_base = OTHER; note = 2'-O-methyluridine
  modified_base 10: mod_base = OTHER; note = 2'-fluoroguanosine
  modified_base 11: mod_base = OTHER; note = 2'-O-methyladenosine
  modified_base 12: mod_base = OTHER; note = 2'-fluorocytidine
  modified_base 13: mod_base = OTHER; note = 2'-O-methyluridine
  modified_base 14: mod_base = OTHER; note = 2'-fluorouridine
  modified_base 15: mod_base = OTHER; note = 2'-O-methylguanosine
  modified_base 16: mod_base = OTHER; note = 2'-fluoroguanosine
  modified_base 17: mod_base = OTHER; note = 2'-O-methyladenosine
  modified_base 18: mod_base = OTHER; note = 2'-fluorocytidine
  modified_base 19: mod_base = OTHER; note = 2'-O-methyluridine
  modified_base 20: mod_base = OTHER; note = 2'-fluorouridine
  modified_base 21: mod_base = OTHER; note = 2'-O-methylguanosine with phosphorothioate linkage
  modified_base 22: mod_base = OTHER; note = 2'-O-methyladenosine with phosphorothioate linkage
  modified_base 23: mod_base = OTHER; note = 2'-O-methylcytidine
aactcgcatgacttggacttgac

SEQ ID NO: 835 - RNA, 23 nt, synthetic construct
  source 1..23: mol_type = other RNA
  modified_base 1: mod_base = OTHER; note = 5'-(E)-vinylphosphonate 2'-O-methylated uridine with phosphorothioate linkage
  modified_base 2: mod_base = OTHER; note = 2'-fluorouridine with phosphorothioate linkage
  modified_base 3: mod_base = OTHER; note = 2'-O-methylcytidine
  modified_base 4: mod_base = OTHER; note = 2'-fluorouridine
  modified_base 5: mod_base = OTHER; note = 2'-O-methyladenosine
  modified_base 6: mod_base = OTHER; note = 2'-fluoroadenosine
  modified_base 7: mod_base = OTHER; note = 2'-O-methylguanosine
  modified_base 8: mod_base = OTHER; note = 2'-fluorouridine
  modified_base 9: mod_base = OTHER; note = 2'-O-methyladenosine
  modified_base 10: mod_base = OTHER; note = 2'-fluoroguanosine
  modified_base 11: mod_base = OTHER; note = 2'-O-methyladenosine
  modified_base 12: mod_base = OTHER; note = 2'-fluorouridine
  modified_base 13: mod_base = OTHER; note = 2'-O-methyluridine
  modified_base 14: mod_base = OTHER; note = 2'-fluorocytidine
  modified_base 15: mod_base = OTHER; note = 2'-O-methyluridine
  modified_base 16: mod_base = OTHER; note = 2'-fluorouridine
  modified_base 17: mod_base = OTHER; note = 2'-O-methyladenosine
  modified_base 18: mod_base = OTHER; note = 2'-fluoroadenosine
  modified_base 19: mod_base = OTHER; note = 2'-O-methyluridine
  modified_base 20: mod_base = OTHER; note = 2'-fluorocytidine
  modified_base 21: mod_base = OTHER; note = 2'-O-methylcytidine with phosphorothioate linkage
  modified_base 22: mod_base = OTHER; note = 2'-O-methyladenosine with phosphorothioate linkage
  modified_base 23: mod_base = OTHER; note = 2'-O-methyluridine
ttctaagtagattcttaatccat

SEQ ID NO: 836 - RNA, 23 nt, synthetic construct
  source 1..23: mol_type = other RNA
  modified_base 1: mod_base = OTHER; note = 5'-(E)-vinylphosphonate 2'-O-methylated uridine with phosphorothioate linkage
  modified_base 2: mod_base = OTHER; note = 2'-fluorouridine with phosphorothioate linkage
  modified_base 3: mod_base = OTHER; note = 2'-O-methylcytidine
  modified_base 4: mod_base = OTHER; note = 2'-fluorocytidine
  modified_base 5: mod_base = OTHER; note = 2'-O-methyluridine
  modified_base 6: mod_base = OTHER; note = 2'-fluoroguanosine
  modified_base 7: mod_base = OTHER; note = 2'-O-methyluridine
  modified_base 8: mod_base = OTHER; note = 2'-fluoroguanosine
  modified_base 9: mod_base = OTHER; note = 2'-O-methylguanosine
  modified_base 10: mod_base = OTHER; note = 2'-fluoroadenosine
  modified_base 11: mod_base = OTHER; note = 2'-O-methylcytidine
  modified_base 12: mod_base = OTHER; note = 2'-fluoroadenosine
  modified_base 13: mod_base = OTHER; note = 2'-O-methylguanosine
  modified_base 14: mod_base = OTHER; note = 2'-fluorouridine
  modified_base 15: mod_base = OTHER; note = 2'-O-methylguanosine
  modified_base 16: mod_base = OTHER; note = 2'-fluoroadenosine
  modified_base 17: mod_base = OTHER; note = 2'-O-methylguanosine
  modified_base 18: mod_base = OTHER; note = 2'-fluoroadenosine
  modified_base 19: mod_base = OTHER; note = 2'-O-methyluridine
  modified_base 20: mod_base = OTHER; note = 2'-fluorouridine
  modified_base 21: mod_base = OTHER; note = 2'-O-methylguanosine with phosphorothioate linkage
  modified_base 22: mod_base = OTHER; note = 2'-O-methylcytidine with phosphorothioate linkage
  modified_base 23: mod_base = OTHER; note = 2'-O-methyluridine
ttcctgtggacagtgagattgct

SEQ ID NO: 837 - RNA, 23 nt, synthetic construct
  source 1..23: mol_type = other RNA
  modified_base 1: mod_base = OTHER; note = 5'-(E)-vinylphosphonate 2'-O-methylated uridine with phosphorothioate linkage
  modified_base 2: mod_base = OTHER; note = 2'-fluorocytidine with phosphorothioate linkage
  modified_base 3: mod_base = OTHER; note = 2'-O-methyladenosine
  modified_base 4: mod_base = OTHER; note = 2'-fluorocytidine
  modified_base 5: mod_base = OTHER; note = 2'-O-methyladenosine
  modified_base 6: mod_base = OTHER; note = 2'-fluorouridine
  modified_base 7: mod_base = OTHER; note = 2'-O-methylcytidine
  modified_base 8: mod_base = OTHER; note = 2'-fluoroguanosine
  modified_base 9: mod_base = OTHER; note = 2'-O-methylguanosine
  modified_base 10: mod_base = OTHER; note = 2'-fluoroguanosine
  modified_base 11: mod_base = OTHER; note = 2'-O-methyladenosine
  modified_base 12: mod_base = OTHER; note = 2'-fluoroguanosine
  modified_base 13: mod_base = OTHER; note = 2'-O-methyladenosine
  modified_base 14: mod_base = OTHER; note = 2'-fluoroguanosine
  modified_base 15: mod_base = OTHER; note = 2'-O-methylcytidine
  modified_base 16: mod_base = OTHER; note = 2'-fluorocytidine
  modified_base 17: mod_base = OTHER; note = 2'-O-methylguanosine
  modified_base 18: mod_base = OTHER; note = 2'-fluoroguanosine
  modified_base 19: mod_base = OTHER; note = 2'-O-methylguanosine
  modified_base 20: mod_base = OTHER; note = 2'-fluorouridine
  modified_base 21: mod_base = OTHER; note = 2'-O-methyluridine with phosphorothioate linkage
  modified_base 22: mod_base = OTHER; note = 2'-O-methyladenosine with phosphorothioate linkage
  modified_base 23: mod_base = OTHER; note = 2'-O-methylguanosine
tcacatcgggagagccgggttag

SEQ ID NO: 838 - RNA, 23 nt, synthetic construct
  source 1..23: mol_type = other RNA
  modified_base 1: mod_base = OTHER; note = 5'-(E)-vinylphosphonate 2'-O-methylated adenosine with phosphorothioate linkage
  modified_base 2: mod_base = OTHER; note = 2'-fluoroguanosine with phosphorothioate linkage
  modified_base 3: mod_base = OTHER; note = 2'-O-methyladenosine
  modified_base 4: mod_base = OTHER; note = 2'-fluorouridine
  modified_base 5: mod_base = OTHER; note = 2'-O-methyluridine
  modified_base 6: mod_base = OTHER; note = 2'-fluorocytidine
  modified_base 7: mod_base = OTHER; note = 2'-O-methyluridine
  modified_base 8: mod_base = OTHER; note = 2'-fluorouridine
  modified_base 9: mod_base = OTHER; note = 2'-O-methyladenosine
  modified_base 10: mod_base = OTHER; note = 2'-fluoroadenosine
  modified_base 11: mod_base = OTHER; note = 2'-O-methyluridine
  modified_base 12: mod_base = OTHER; note = 2'-fluorocytidine
  modified_base 13: mod_base = OTHER; note = 2'-O-methylcytidine
  modified_base 14: mod_base = OTHER; note = 2'-fluoroadenosine
  modified_base 15: mod_base = OTHER; note = 2'-O-methyluridine
  modified_base 16: mod_base = OTHER; note = 2'-fluoroguanosine
  modified_base 17: mod_base = OTHER; note = 2'-O-methyladenosine
  modified_base 18: mod_base = OTHER; note = 2'-fluoroguanosine
  modified_base 19: mod_base = OTHER; note = 2'-O-methyluridine
  modified_base 20: mod_base = OTHER; note = 2'-fluoroguanosine
  modified_base 21: mod_base = OTHER; note = 2'-O-methyluridine with phosphorothioate linkage
  modified_base 22: mod_base = OTHER; note = 2'-O-methyluridine with phosphorothioate linkage
  modified_base 23: mod_base = OTHER; note = 2'-O-methylcytidine
agattcttaatccatgagtgttc

SEQ ID NO: 839 - RNA, 23 nt, synthetic construct
  source 1..23: mol_type = other RNA
  modified_base 1: mod_base = OTHER; note = 5'-(E)-vinylphosphonate 2'-O-methylated adenosine with phosphorothioate linkage
  modified_base 2: mod_base = OTHER; note = 2'-fluoroadenosine with phosphorothioate linkage
  modified_base 3: mod_base = OTHER; note = 2'-O-methyluridine
  modified_base 4: mod_base = OTHER; note = 2'-fluorouridine
  modified_base 5: mod_base = OTHER; note = 2'-O-methylguanosine
  modified_base 6: mod_base = OTHER; note = 2'-fluorouridine
  modified_base 7: mod_base = OTHER; note = 2'-O-methylguanosine
  modified_base 8: mod_base = OTHER; note = 2'-fluoroguanosine
  modified_base 9: mod_base = OTHER; note = 2'-O-methylguanosine
  modified_base 10: mod_base = OTHER; note = 2'-fluoroadenosine
  modified_base 11: mod_base = OTHER; note = 2'-O-methylguanosine
  modified_base 12: mod_base = OTHER; note = 2'-fluoroadenosine
  modified_base 13: mod_base = OTHER; note = 2'-O-methylguanosine
  modified_base 14: mod_base = OTHER; note = 2'-fluorocytidine
  modified_base 15: mod_base = OTHER; note = 2'-O-methylcytidine
  modified_base 16: mod_base = OTHER; note = 2'-fluoroguanosine
  modified_base 17: mod_base = OTHER; note = 2'-O-methyluridine
  modified_base 18: mod_base = OTHER; note = 2'-fluorocytidine
  modified_base 19: mod_base = OTHER; note = 2'-O-methyladenosine
  modified_base 20: mod_base = OTHER; note = 2'-fluorouridine
  modified_base 21: mod_base = OTHER; note = 2'-O-methylguanosine with phosphorothioate linkage
  modified_base 22: mod_base = OTHER; note = 2'-O-methylguanosine with phosphorothioate linkage
  modified_base 23: mod_base = OTHER; note = 2'-O-methylcytidine
aattgtgggagagccgtcatggc

SEQ ID NO: 840 - RNA, 23 nt, synthetic construct
  source 1..23: mol_type = other RNA
  modified_base 1: mod_base = OTHER; note = 5'-(E)-vinylphosphonate 2'-O-methylated adenosine with phosphorothioate linkage
  modified_base 2: mod_base = OTHER; note = 2'-fluorouridine with phosphorothioate linkage
  modified_base 3: mod_base = OTHER; note = 2'-O-methyluridine
  modified_base 4: mod_base = OTHER; note = 2'-fluorouridine
  modified_base 5: mod_base = OTHER; note = 2'-O-methylcytidine
  modified_base 6: mod_base = OTHER; note = 2'-fluoroadenosine
  modified_base 7: mod_base = OTHER; note = 2'-O-methylcytidine
  modified_base 8: mod_base = OTHER; note = 2'-fluoroadenosine
  modified_base 9: mod_base = OTHER; note = 2'-O-methyluridine
  modified_base 10: mod_base = OTHER; note = 2'-fluorouridine
  modified_base 11: mod_base = OTHER; note = 2'-O-methyluridine
  modified_base 12: mod_base = OTHER; note = 2'-fluoroguanosine
  modified_base 13: mod_base = OTHER; note = 2'-O-methyluridine
  modified_base 14: mod_base = OTHER; note = 2'-fluoroadenosine
  modified_base 15: mod_base = OTHER; note = 2'-O-methyladenosine
  modified_base 16: mod_base = OTHER; note = 2'-fluoroadenosine
  modified_base 17: mod_base = OTHER; note = 2'-O-methylcytidine
  modified_base 18: mod_base = OTHER; note = 2'-fluoroguanosine
  modified_base 19: mod_base = OTHER; note = 2'-O-methyluridine
  modified_base 20: mod_base = OTHER; note = 2'-fluorocytidine
  modified_base 21: mod_base = OTHER; note = 2'-O-methylcytidine with phosphorothioate linkage
  modified_base 22: mod_base = OTHER; note = 2'-O-methyluridine with phosphorothioate linkage
  modified_base 23: mod_base = OTHER; note = 2'-O-methyluridine
atttcacatttgtaaacgtcctt

SEQ ID NO: 841 - RNA, 23 nt, synthetic construct
  source 1..23: mol_type = other RNA
  modified_base 1: mod_base = OTHER; note = 5'-(E)-vinylphosphonate 2'-O-methylated adenosine with phosphorothioate linkage
  modified_base 2: mod_base = OTHER; note = 2'-fluorouridine with phosphorothioate linkage
  modified_base 3: mod_base = OTHER; note = 2'-O-methyladenosine
  modified_base 4: mod_base = OTHER; note = 2'-fluorocytidine
  modified_base 5: mod_base = OTHER; note = 2'-O-methyluridine
  modified_base 6: mod_base = OTHER; note = 2'-fluoroguanosine
  modified_base 7: mod_base = OTHER; note = 2'-O-methyladenosine
  modified_base 8: mod_base = OTHER; note = 2'-fluorouridine
  modified_base 9: mod_base = OTHER; note = 2'-O-methylcytidine
  modified_base 10: mod_base = OTHER; note = 2'-fluorocytidine
  modified_base 11: mod_base = OTHER; note = 2'-O-methyluridine
  modified_base 12: mod_base = OTHER; note = 2'-fluoroguanosine
  modified_base 13: mod_base = OTHER; note = 2'-O-methylguanosine
  modified_base 14: mod_base = OTHER; note = 2'-fluorouridine
  modified_base 15: mod_base = OTHER; note = 2'-O-methyladenosine
  modified_base 16: mod_base = OTHER; note = 2'-fluorouridine
  modified_base 17: mod_base = OTHER; note = 2'-O-methyluridine
  modified_base 18: mod_base = OTHER; note = 2'-fluorocytidine
  modified_base 19: mod_base = OTHER; note = 2'-O-methyluridine
  modified_base 20: mod_base = OTHER; note = 2'-fluorouridine
  modified_base 21: mod_base = OTHER; note = 2'-O-methyladenosine with phosphorothioate linkage
  modified_base 22: mod_base = OTHER; note = 2'-O-methylguanosine with phosphorothioate linkage
  modified_base 23: mod_base = OTHER; note = 2'-O-methylcytidine
atactgatcctggtattcttagc

SEQ ID NO: 842 - RNA, 23 nt, synthetic construct
  source 1..23: mol_type = other RNA
  modified_base 1: mod_base = OTHER; note = 5'-(E)-vinylphosphonate 2'-O-methylated guanosine with phosphorothioate linkage
  modified_base 2: mod_base = OTHER; note = 2'-fluoroadenosine with phosphorothioate linkage
  modified_base 3: mod_base = OTHER; note = 2'-O-methyladenosine
  modified_base 4: mod_base = OTHER; note = 2'-fluorouridine
  modified_base 5: mod_base = OTHER; note = 2'-O-methyluridine
  modified_base 6: mod_base = OTHER; note = 2'-fluoroguanosine
  modified_base 7: mod_base = OTHER; note = 2'-O-methyluridine
  modified_base 8: mod_base = OTHER; note = 2'-fluoroguanosine
  modified_base 9: mod_base = OTHER; note = 2'-O-methylguanosine
  modified_base 10: mod_base = OTHER; note = 2'-fluoroguanosine
  modified_base 11: mod_base = OTHER; note = 2'-O-methyladenosine
  modified_base 12: mod_base = OTHER; note = 2'-fluoroguanosine
  modified_base 13: mod_base = OTHER; note = 2'-O-methyladenosine
  modified_base 14: mod_base = OTHER; note = 2'-fluoroguanosine
  modified_base 15: mod_base = OTHER; note = 2'-O-methylcytidine
  modified_base 16: mod_base = OTHER; note = 2'-fluorocytidine
  modified_base 17: mod_base = OTHER; note = 2'-O-methylguanosine
  modified_base 18: mod_base = OTHER; note = 2'-fluorouridine
  modified_base 19: mod_base = OTHER; note = 2'-O-methylcytidine
  modified_base 20: mod_base = OTHER; note = 2'-fluoroadenosine
  modified_base 21: mod_base = OTHER; note = 2'-O-methyluridine with phosphorothioate linkage
  modified_base 22: mod_base = OTHER; note = 2'-O-methylguanosine with phosphorothioate linkage
  modified_base 23: mod_base = OTHER; note = 2'-O-methylguanosine
gaattgtgggagagccgtcatgg

SEQ ID NO: 843 - RNA, 23 nt, synthetic construct
  source 1..23: mol_type = other RNA
  modified_base 1: mod_base = OTHER; note = 5'-(E)-vinylphosphonate 2'-O-methylated uridine with phosphorothioate linkage
  modified_base 2: mod_base = OTHER; note = 2'-fluoroguanosine with phosphorothioate linkage
  modified_base 3: mod_base = OTHER; note = 2'-O-methylcytidine
  modified_base 4: mod_base = OTHER; note = 2'-fluoroadenosine
  modified_base 5: mod_base = OTHER; note = 2'-O-methyluridine
  modified_base 6: mod_base = OTHER; note = 2'-fluorouridine
  modified_base 7: mod_base = OTHER; note = 2'-O-methylguanosine
  modified_base 8: mod_base = OTHER; note = 2'-fluorouridine
  modified_base 9: mod_base = OTHER; note = 2'-O-methyluridine
  modified_base 10: mod_base = OTHER; note = 2'-fluorouridine
  modified_base 11: mod_base = OTHER; note = 2'-O-methylcytidine
  modified_base 12: mod_base = OTHER; note = 2'-fluorocytidine
  modified_base 13: mod_base = OTHER; note = 2'-O-methylguanosine
  modified_base 14: mod_base = OTHER; note = 2'-fluorouridine
  modified_base 15: mod_base = OTHER; note = 2'-O-methyluridine
  modified_base 16: mod_base = OTHER; note = 2'-fluorouridine
  modified_base 17: mod_base = OTHER; note = 2'-O-methylguanosine
  modified_base 18: mod_base = OTHER; note = 2'-fluorouridine
  modified_base 19: mod_base = OTHER; note = 2'-O-methylguanosine
  modified_base 20: mod_base = OTHER; note = 2'-fluorocytidine
  modified_base 21: mod_base = OTHER; note = 2'-O-methyluridine with phosphorothioate linkage
  modified_base 22: mod_base = OTHER; note = 2'-O-methylcytidine with phosphorothioate linkage
  modified_base 23: mod_base = OTHER; note = 2'-O-methylguanosine
tgcattgtttccgtttgtgctcg

SEQ ID NO: 844 - RNA, 23 nt, synthetic construct
  source 1..23: mol_type = other RNA
  modified_base 1: mod_base = OTHER; note = 5'-(E)-vinylphosphonate 2'-O-methylated uridine with phosphorothioate linkage
  modified_base 2: mod_base = OTHER; note = 2'-fluoroguanosine with phosphorothioate linkage
  modified_base 3: mod_base = OTHER; note = 2'-O-methyluridine
  modified_base 4: mod_base = OTHER; note = 2'-fluoroguanosine
  modified_base 5: mod_base = OTHER; note = 2'-O-methylcytidine
  modified_base 6: mod_base = OTHER; note = 2'-fluoroguanosine
  modified_base 7: mod_base = OTHER; note = 2'-O-methyluridine
  modified_base 8: mod_base = OTHER; note = 2'-fluoroguanosine
  modified_base 9: mod_base = OTHER; note = 2'-O-methyluridine
  modified_base 10: mod_base = OTHER; note = 2'-fluorouridine
  modified_base 11: mod_base = OTHER; note = 2'-O-methylguanosine
  modified_base 12: mod_base = OTHER; note = 2'-fluorocytidine
  modified_base 13: mod_base = OTHER; note = 2'-O-methyladenosine
  modified_base 14: mod_base = OTHER; note = 2'-fluoroadenosine
  modified_base 15: mod_base = OTHER; note = 2'-O-methylguanosine
  modified_base 16: mod_base = OTHER; note = 2'-fluoroadenosine
  modified_base 17: mod_base = OTHER; note = 2'-O-methylguanosine
  modified_base 18: mod_base = OTHER; note = 2'-fluoroadenosine
  modified_base 19: mod_base = OTHER; note = 2'-O-methyladenosine
  modified_base 20: mod_base = OTHER; note = 2'-fluoroadenosine
  modified_base 21: mod_base = OTHER; note = 2'-O-methylcytidine with phosphorothioate linkage
  modified_base 22: mod_base = OTHER; note = 2'-O-methylcytidine with phosphorothioate linkage
  modified_base 23: mod_base = OTHER; note = 2'-O-methyladenosine
tgtgcgtgttgcaagagaaacca

SEQ ID NO: 845 - RNA, 23 nt, synthetic construct
  source 1..23: mol_type = other RNA
  modified_base 1: mod_base = OTHER; note = 5'-(E)-vinylphosphonate 2'-O-methylated guanosine with phosphorothioate linkage
  modified_base 2: mod_base = OTHER; note = 2'-fluoroguanosine with phosphorothioate linkage
  modified_base 3: mod_base = OTHER; note = 2'-O-methylcytidine
  modified_base 4: mod_base = OTHER; note = 2'-fluoroadenosine
  modified_base 5: mod_base = OTHER; note = 2'-O-methylcytidine
  modified_base 6: mod_base = OTHER; note = 2'-fluoroadenosine
  modified_base 7: mod_base = OTHER; note = 2'-O-methylguanosine
  modified_base 8: mod_base = OTHER; note = 2'-fluoroguanosine
  modified_base 9: mod_base = OTHER; note = 2'-O-methylcytidine
  modified_base 10: mod_base = OTHER; note = 2'-fluoroadenosine
  modified_base 11: mod_base = OTHER; note = 2'-O-methyluridine
  modified_base 12: mod_base = OTHER; note = 2'-fluoroadenosine
  modified_base 13: mod_base = OTHER; note = 2'-O-methylguanosine
  modified_base 14: mod_base = OTHER; note = 2'-fluorouridine
  modified_base 15: mod_base = OTHER; note = 2'-O-methyluridine
  modified_base 16: mod_base = OTHER; note = 2'-fluoroguanosine
  modified_base 17: mod_base = OTHER; note = 2'-O-methylcytidine
  modified_base 18: mod_base = OTHER; note = 2'-fluoroadenosine
  modified_base 19: mod_base = OTHER; note = 2'-O-methylcytidine
  modified_base 20: mod_base = OTHER; note = 2'-fluoroadenosine
  modified_base 21: mod_base = OTHER; note = 2'-O-methylguanosine with phosphorothioate linkage
  modified_base 22: mod_base = OTHER; note = 2'-O-methylcytidine with phosphorothioate linkage
  modified_base 23: mod_base = OTHER; note = 2'-O-methyluridine
ggcacaggcatagttgcacagct

SEQ ID NO: 846 - RNA, 23 nt, synthetic construct
  source 1..23: mol_type = other RNA
  modified_base 1: mod_base = OTHER; note = 5'-(E)-vinylphosphonate 2'-O-methylated adenosine with phosphorothioate linkage
  modified_base 2: mod_base = OTHER; note = 2'-fluorouridine with phosphorothioate linkage
  modified_base 3: mod_base = OTHER; note = 2'-O-methylguanosine
  modified_base 4: mod_base = OTHER; note = 2'-fluoroguanosine
  modified_base 5: mod_base = OTHER; note = 2'-O-methyluridine
  modified_base 6: mod_base = OTHER; note = 2'-fluorouridine
  modified_base 7: mod_base = OTHER; note = 2'-O-methylguanosine
  modified_base 8: mod_base = OTHER; note = 2'-fluorocytidine
  modified_base 9: mod_base = OTHER; note = 2'-O-methyladenosine
  modified_base 10: mod_base = OTHER; note = 2'-fluoroguanosine
  modified_base 11: mod_base = OTHER; note = 2'-O-methyluridine
  modified_base 12: mod_base = OTHER; note = 2'-fluoroadenosine
  modified_base 13: mod_base = OTHER; note = 2'-O-methyladenosine
  modified_base 14: mod_base = OTHER; note = 2'-fluorocytidine
  modified_base 15: mod_base = OTHER; note = 2'-O-methylcytidine
  modified_base 16: mod_base = OTHER; note = 2'-fluorouridine
  modified_base 17: mod_base = OTHER; note = 2'-O-methyluridine
  modified_base 18: mod_base = OTHER; note = 2'-fluorouridine
  modified_base 19: mod_base = OTHER; note = 2'-O-methylguanosine
  modified_base 20: mod_base = OTHER; note = 2'-fluorocytidine
  modified_base 21: mod_base = OTHER; note = 2'-O-methyladenosine with phosphorothioate linkage
  modified_base 22: mod_base = OTHER; note = 2'-O-methyluridine with phosphorothioate linkage
  modified_base 23: mod_base = OTHER; note = 2'-O-methyladenosine
atggttgcagtaacctttgcata

SEQ ID NO: 847 - RNA, 23 nt, synthetic construct
  source 1..23: mol_type = other RNA
  modified_base 1: mod_base = OTHER; note = 5'-(E)-vinylphosphonate 2'-O-methylated guanosine with phosphorothioate linkage
  modified_base 2: mod_base = OTHER; note = 2'-fluoroguanosine with phosphorothioate linkage
  modified_base 3: mod_base = OTHER; note = 2'-O-methyluridine
  modified_base 4: mod_base = OTHER; note = 2'-fluorouridine
  modified_base 5: mod_base = OTHER; note = 2'-O-methyluridine
  modified_base 6: mod_base = OTHER; note = 2'-fluoroguanosine
  modified_base 7: mod_base = OTHER; note = 2'-O-methylcytidine
  modified_base 8: mod_base = OTHER; note = 2'-fluorocytidine
  modified_base 9: mod_base = OTHER; note = 2'-O-methyluridine
  modified_base 10: mod_base = OTHER; note = 2'-fluorouridine
  modified_base 11: mod_base = OTHER; note = 2'-O-methylguanosine
  modified_base 12: mod_base = OTHER; note = 2'-fluorocytidine
  modified_base 13: mod_base = OTHER; note = 2'-O-methyluridine
  modified_base 14: mod_base = OTHER; note = 2'-fluorouridine
  modified_base 15: mod_base = OTHER; note = 2'-O-methylguanosine
  modified_base 16: mod_base = OTHER; note = 2'-fluorocytidine
  modified_base 17: mod_base = OTHER; note = 2'-O-methylguanosine
  modified_base 18: mod_base = OTHER; note = 2'-fluoroguanosine
  modified_base 19: mod_base = OTHER; note = 2'-O-methylcytidine
  modified_base 20: mod_base = OTHER; note = 2'-fluoroguanosine
  modified_base 21: mod_base = OTHER; note = 2'-O-methyladenosine with phosphorothioate linkage
  modified_base 22: mod_base = OTHER; note = 2'-O-methylguanosine with phosphorothioate linkage
  modified_base 23: mod_base = OTHER; note = 2'-O-methyladenosine
ggtttgccttgcttgcggcgaga

SEQ ID NO: 848 - RNA, 23 nt, synthetic construct
  source 1..23: mol_type = other RNA
  modified_base 1: mod_base = OTHER; note = 5'-(E)-vinylphosphonate 2'-O-methylated uridine with phosphorothioate linkage
  modified_base 2: mod_base = OTHER; note = 2'-fluorouridine with phosphorothioate linkage
  modified_base 3: mod_base = OTHER; note = 2'-O-methylcytidine
  modified_base 4: mod_base = OTHER; note = 2'-fluorouridine
  modified_base 5: mod_base = OTHER; note = 2'-O-methylguanosine
  modified_base 6: mod_base = OTHER; note = 2'-fluorocytidine
  modified_base 7: mod_base = OTHER; note = 2'-O-methyladenosine
  modified_base 8: mod_base = OTHER; note = 2'-fluorocytidine
  modified_base 9: mod_base = OTHER; note = 2'-O-methylcytidine
  modified_base 10: mod_base = OTHER; note = 2'-fluorouridine
  modified_base 11: mod_base = OTHER; note = 2'-O-methyladenosine
  modified_base 12: mod_base = OTHER; note = 2'-fluoroguanosine
  modified_base 13: mod_base = OTHER; note = 2'-O-methyluridine
  modified_base 14: mod_base = OTHER; note = 2'-fluorocytidine
  modified_base 15: mod_base = OTHER; note = 2'-O-methylcytidine
  modified_base 16: mod_base = OTHER; note = 2'-fluorouridine
  modified_base 17: mod_base = OTHER; note = 2'-O-methylguanosine
  modified_base 18: mod_base = OTHER; note = 2'-fluoroadenosine
  modified_base 19: mod_base = OTHER; note = 2'-O-methyladenosine
  modified_base 20: mod_base = OTHER; note = 2'-fluoroguanosine
  modified_base 21: mod_base = OTHER; note = 2'-O-methylguanosine with phosphorothioate linkage
  modified_base 22: mod_base = OTHER; note = 2'-O-methylguanosine with phosphorothioate linkage
  modified_base 23: mod_base = OTHER; note = 2'-O-methyladenosine
ttctgcacctagtcctgaaggga

SEQ ID NO: 849 - RNA, 23 nt, synthetic construct
  source 1..23: mol_type = other RNA
  modified_base 1: mod_base = OTHER; note = 5'-(E)-vinylphosphonate 2'-O-methylated uridine with phosphorothioate linkage
  modified_base 2: mod_base = OTHER; note = 2'-fluoroguanosine with phosphorothioate linkage
  modified_base 3: mod_base = OTHER; note = 2'-O-methyluridine
  modified_base 4: mod_base = OTHER; note = 2'-fluorouridine
  modified_base 5: mod_base = OTHER; note = 2'-O-methylcytidine
  modified_base 6: mod_base = OTHER; note = 2'-fluorouridine
  modified_base 7: mod_base = OTHER; note = 2'-O-methylguanosine
  modified_base 8: mod_base = OTHER; note = 2'-fluorouridine
  modified_base 9: mod_base = OTHER; note = 2'-O-methylguanosine
  modified_base 10: mod_base = OTHER; note = 2'-fluorocytidine
  modified_base 11: mod_base = OTHER; note = 2'-O-methylguanosine
  modified_base 12: mod_base = OTHER; note = 2'-fluorouridine
  modified_base 13: mod_base = OTHER; note = 2'-O-methylguanosine
  modified_base 14: mod_base = OTHER; note = 2'-fluorouridine
  modified_base 15: mod_base = OTHER; note = 2'-O-methyluridine
  modified_base 16: mod_base = OTHER; note = 2'-fluoroguanosine
  modified_base 17: mod_base = OTHER; note = 2'-O-methylcytidine
  modified_base 18: mod_base = OTHER; note = 2'-fluoroadenosine
  modified_base 19: mod_base = OTHER; note = 2'-O-methyladenosine
  modified_base 20: mod_base = OTHER; note = 2'-fluoroguanosine
  modified_base 21: mod_base = OTHER; note = 2'-O-methyladenosine with phosphorothioate linkage
  modified_base 22: mod_base = OTHER; note = 2'-O-methylguanosine with phosphorothioate linkage
  modified_base 23: mod_base = OTHER; note = 2'-O-methyladenosine
tgttctgtgcgtgttgcaagaga

SEQ ID NO: 850 - RNA, 23 nt, synthetic construct
  source 1..23: mol_type = other RNA
  modified_base 1: mod_base = OTHER; note = 5'-(E)-vinylphosphonate 2'-O-methylated guanosine with phosphorothioate linkage
  modified_base 2: mod_base = OTHER; note = 2'-fluorocytidine with phosphorothioate linkage
  modified_base 3: mod_base = OTHER; note = 2'-O-methyladenosine
  modified_base 4: mod_base = OTHER; note = 2'-fluoroadenosine
  modified_base 5: mod_base = OTHER; note = 2'-O-methyladenosine
  modified_base 6: mod_base = OTHER; note = 2'-fluorouridine
  modified_base 7: mod_base = OTHER; note = 2'-O-methyluridine
  modified_base 8: mod_base = OTHER; note = 2'-fluorocytidine
  modified_base 9: mod_base = OTHER; note = 2'-O-methylcytidine
  modified_base 10: mod_base = OTHER; note = 2'-fluorouridine
  modified_base 11: mod_base = OTHER; note = 2'-O-methylcytidine
  modified_base 12: mod_base = OTHER; note = 2'-fluorouridine
  modified_base 13: mod_base = OTHER; note = 2'-O-methyladenosine
  modified_base 14: mod_base = OTHER; note = 2'-fluoroguanosine
  modified_base 15: mod_base = OTHER; note = 2'-O-methyladenosine
  modified_base 16: mod_base = OTHER; note = 2'-fluorouridine
  modified_base 17: mod_base = OTHER; note = 2'-O-methylguanosine
  modified_base 18: mod_base = OTHER; note = 2'-fluoroadenosine
  modified_base 19: mod_base = OTHER; note = 2'-O-methylcytidine
  modified_base 20: mod_base = OTHER; note = 2'-fluoroguanosine
  modified_base 21: mod_base = OTHER; note = 2'-O-methyluridine with phosphorothioate linkage
  modified_base 22: mod_base = OTHER; note = 2'-O-methyluridine with phosphorothioate linkage
  modified_base 23: mod_base = OTHER; note = 2'-O-methylguanosine
gcaaattcctctagatgacgttg

SEQ ID NO: 851 - RNA, 23 nt, synthetic construct
  source 1..23: mol_type = other RNA
  modified_base 1: mod_base = OTHER; note = 5'-(E)-vinylphosphonate 2'-O-methylated uridine with phosphorothioate linkage
  modified_base 2: mod_base = OTHER; note = 2'-fluorouridine with phosphorothioate linkage
  modified_base 3: mod_base = OTHER; note = 2'-O-methyladenosine
  modified_base 4: mod_base = OTHER; note = 2'-fluoroadenosine
  modified_base 5: mod_base = OTHER; note = 2'-O-methyluridine
  modified_base 6: mod_base = OTHER; note = 2'-fluorocytidine
  modified_base 7: mod_base = OTHER; note = 2'-O-methylcytidine
  modified_base 8: mod_base = OTHER; note = 2'-fluoroadenosine
  modified_base 9: mod_base = OTHER; note = 2'-O-methyluridine
  modified_base 10: mod_base = OTHER; note = 2'-fluoroguanosine
  modified_base 11: mod_base = OTHER; note = 2'-O-methyladenosine
  modified_base 12: mod_base = OTHER; note = 2'-fluoroguanosine
  modified_base 13: mod_base = OTHER; note = 2'-O-methyluridine
  modified_base 14: mod_base = OTHER; note = 2'-fluoroguanosine
  modified_base 15: mod_base = OTHER; note = 2'-O-methyluridine
  modified_base 16: mod_base = OTHER; note = 2'-fluorouridine
  modified_base 17: mod_base = OTHER; note = 2'-O-methylcytidine
  modified_base 18: mod_base = OTHER; note = 2'-fluorouridine
  modified_base 19: mod_base = OTHER; note = 2'-O-methylguanosine
  modified_base 20: mod_base = OTHER; note = 2'-fluorouridine
  modified_base 21: mod_base = OTHER; note = 2'-O-methylguanosine with phosphorothioate linkage
  modified_base 22: mod_base = OTHER; note = 2'-O-methylcytidine with phosphorothioate linkage
  modified_base 23: mod_base = OTHER; note = 2'-O-methylguanosine
ttaatccatgagtgttctgtgcg

SEQ ID NO: 852 - RNA, 23 nt, synthetic construct
  source 1..23: mol_type = other RNA
  modified_base 1: mod_base = OTHER; note = 5'-(E)-vinylphosphonate 2'-O-methylated uridine with phosphorothioate linkage
  modified_base 2: mod_base = OTHER; note = 2'-fluoroadenosine with phosphorothioate linkage
  modified_base 3: mod_base = OTHER; note = 2'-O-methylguanosine
  modified_base 4: mod_base = OTHER; note = 2'-fluoroadenosine
  modified_base 5: mod_base = OTHER; note = 2'-O-methyladenosine
  modified_base 6: mod_base = OTHER; note = 2'-fluoroadenosine
  modified_base 7: mod_base = OTHER; note = 2'-O-methylguanosine
  modified_base 8: mod_base = OTHER; note = 2'-fluoroadenosine
  modified_base 9: mod_base = OTHER; note = 2'-O-methyladenosine
  modified_base 10: mod_base = OTHER; note = 2'-fluoroguanosine
  modified_base 11: mod_base = OTHER; note = 2'-O-methylguanosine
  modified_base 12: mod_base = OTHER; note = 2'-fluoroadenosine
  modified_base 13: mod_base = OTHER; note = 2'-O-methylguanosine
  modified_base 14: mod_base = OTHER; note = 2'-fluoroadenosine
  modified_base 15: mod_base = OTHER; note = 2'-O-methylcytidine
  modified_base 16: mod_base = OTHER; note = 2'-fluorouridine
  modified_base 17: mod_base = OTHER; note = 2'-O-methylcytidine
  modified_base 18: mod_base = OTHER; note = 2'-fluorocytidine
  modified_base 19: mod_base = OTHER; note = 2'-O-methyladenosine
  modified_base 20: mod_base = OTHER; note = 2'-fluoroguanosine
  modified_base 21: mod_base = OTHER; note = 2'-O-methyladenosine with phosphorothioate linkage
  modified_base 22: mod_base = OTHER; note = 2'-O-methylguanosine with phosphorothioate linkage
  modified_base 23: mod_base = OTHER; note = 2'-O-methyladenosine
tagaaagaaggagactccagaga

SEQ ID NO: 853 - RNA, 23 nt, synthetic construct
  source 1..23: mol_type = other RNA
  modified_base 1: mod_base = OTHER; note = 5'-(E)-vinylphosphonate 2'-O-methylated uridine with phosphorothioate linkage
  modified_base 2: mod_base = OTHER; note = 2'-fluoroadenosine with phosphorothioate linkage
  modified_base 3: mod_base = OTHER; note = 2'-O-methylcytidine
  modified_base 4: mod_base = OTHER; note = 2'-fluoroadenosine
  modified_base 5: mod_base = OTHER; note = 2'-O-methyluridine
  modified_base 6: mod_base = OTHER; note = 2'-fluorocytidine
  modified_base 7: mod_base = OTHER; note = 2'-O-methylguanosine
  modified_base 8: mod_base = OTHER; note = 2'-fluoroguanosine
  modified_base 9: mod_base = OTHER; note = 2'-O-methylguanosine
  modified_base 10: mod_base = OTHER; note = 2'-fluoroadenosine
  modified_base 11: mod_base = OTHER; note = 2'-O-methylguanosine
  modified_base 12: mod_base = OTHER; note = 2'-fluoroadenosine
  modified_base 13: mod_base = OTHER; note = 2'-O-methylguanosine
  modified_base 14: mod_base = OTHER; note = 2'-fluorocytidine
  modified_base 15: mod_base = OTHER; note = 2'-O-methylcytidine
  modified_base 16: mod_base = OTHER; note = 2'-fluoroguanosine
  modified_base 17: mod_base = OTHER; note = 2'-O-methylguanosine
  modified_base 18: mod_base = OTHER; note = 2'-fluoroguanosine
  modified_base 19: mod_base = OTHER; note = 2'-O-methyluridine
  modified_base 20: mod_base = OTHER; note = 2'-fluorouridine
  modified_base 21: mod_base = OTHER; note = 2'-O-methyladenosine with phosphorothioate linkage
  modified_base 22: mod_base = OTHER; note = 2'-O-methylguanosine with phosphorothioate linkage
  modified_base 23: mod_base = OTHER; note = 2'-O-methyladenosine
tacatcgggagagccgggttaga

SEQ ID NO: 854 - RNA, 23 nt, synthetic construct
  source 1..23: mol_type = other RNA
  modified_base 1: mod_base = OTHER; note = 5'-(E)-vinylphosphonate 2'-O-methylated adenosine with phosphorothioate linkage
  modified_base 2: mod_base = OTHER; note = 2'-fluorouridine with phosphorothioate linkage
  modified_base 3: mod_base = OTHER; note = 2'-O-methyluridine
  modified_base 4: mod_base = OTHER; note = 2'-fluorocytidine
  modified_base 5: mod_base = OTHER; note = 2'-O-methylcytidine
  modified_base 6: mod_base = OTHER; note = 2'-fluorocytidine
  modified_base 7: mod_base = OTHER; note = 2'-O-methylguanosine
  modified_base 8: mod_base = OTHER; note = 2'-fluorouridine
  modified_base 9: mod_base = OTHER; note = 2'-O-methyluridine
  modified_base 10: mod_base = OTHER; note = 2'-fluorouridine
  modified_base 11: mod_base = OTHER; note = 2'-O-methylguanosine
  modified_base 12: mod_base = OTHER; note = 2'-fluorocytidine
  modified_base 13: mod_base = OTHER; note = 2'-O-methyluridine
  modified_base 14: mod_base = OTHER; note = 2'-fluorouridine
  modified_base 15: mod_base = OTHER; note = 2'-O-methyladenosine
  modified_base 16: mod_base = OTHER; note = 2'-fluoroadenosine
  modified_base 17: mod_base = OTHER; note = 2'-O-methylguanosine
  modified_base 18: mod_base = OTHER; note = 2'-fluorouridine
  modified_base 19: mod_base = OTHER; note = 2'-O-methylguanosine
  modified_base 20: mod_base = OTHER; note = 2'-fluorocytidine
  modified_base 21: mod_base = OTHER; note = 2'-O-methyluridine with phosphorothioate linkage
  modified_base 22: mod_base = OTHER; note = 2'-O-methylguanosine with phosphorothioate linkage
  modified_base 23: mod_base = OTHER; note = 2'-O-methylguanosine
attcccgtttgcttaagtgctgg

SEQ ID NO: 855 - RNA, 23 nt, synthetic construct
  source 1..23: mol_type = other RNA
  modified_base 1: mod_base = OTHER; note = 5'-(E)-vinylphosphonate 2'-O-methylated guanosine with phosphorothioate linkage
  modified_base 2: mod_base = OTHER; note = 2'-fluorocytidine with phosphorothioate linkage
  modified_base 3: mod_base = OTHER; note = 2'-O-methylcytidine
  modified_base 4: mod_base = OTHER; note = 2'-fluoroadenosine
  modified_base 5: mod_base = OTHER; note = 2'-O-methyluridine
  modified_base 6: mod_base = OTHER; note = 2'-fluorouridine
  modified_base 7: mod_base = OTHER; note = 2'-O-methylguanosine
  modified_base 8: mod_base = OTHER; note = 2'-fluorocytidine
  modified_base 9: mod_base = OTHER; note = 2'-O-methyladenosine
  modified_base 10: mod_base = OTHER; note = 2'-fluorouridine
  modified_base 11: mod_base = OTHER; note = 2'-O-methyluridine
  modified_base 12: mod_base = OTHER; note = 2'-fluoroguanosine
  modified_base 13: mod_base = OTHER; note = 2'-O-methyluridine
  modified_base 14: mod_base = OTHER; note = 2'-fluorouridine
  modified_base 15: mod_base = OTHER; note = 2'-O-methyluridine
  modified_base 16: mod_base = OTHER; note = 2'-fluorocytidine
  modified_base 17: mod_base = OTHER; note = 2'-O-methylcytidine
  modified_base 18: mod_base = OTHER; note = 2'-fluoroguanosine
  modified_base 19: mod_base = OTHER; note = 2'-O-methyluridine
  modified_base 20: mod_base = OTHER; note = 2'-fluorouridine
  modified_base 21: mod_base = OTHER; note = 2'-O-methyluridine with phosphorothioate linkage
  modified_base 22: mod_base = OTHER; note = 2'-O-methylguanosine with phosphorothioate linkage
  modified_base 23: mod_base = OTHER; note = 2'-O-methyluridine
gccattgcattgtttccgtttgt

SEQ ID NO: 856 - RNA, 23 nt, synthetic construct
  source 1..23: mol_type = other RNA
  modified_base 1: mod_base = OTHER; note = 5'-(E)-vinylphosphonate 2'-O-methylated uridine with phosphorothioate linkage
  modified_base 2: mod_base = OTHER; note = 2'-fluorouridine with phosphorothioate linkage
  modified_base 3: mod_base = OTHER; note = 2'-O-methyladenosine
  modified_base 4: mod_base = OTHER; note = 2'-fluoroadenosine
  modified_base 5: mod_base = OTHER; note = 2'-O-methylguanosine
  modified_base 6: mod_base = OTHER; note = 2'-fluorouridine
  modified_base 7: mod_base = OTHER; note = 2'-O-methyladenosine
  modified_base 8: mod_base = OTHER; note = 2'-fluoroguanosine
  modified_base 9: mod_base = OTHER; note = 2'-O-methyladenosine
  modified_base 10: mod_base = OTHER; note = 2'-fluorouridine
  modified_base 11: mod_base = OTHER; note = 2'-O-methyluridine
  modified_base 12: mod_base = OTHER; note = 2'-fluorocytidine
  modified_base 13: mod_base = OTHER; note = 2'-O-methyluridine
  modified_base 14: mod_base = OTHER; note = 2'-fluorouridine
  modified_base 15: mod_base = OTHER; note = 2'-O-methyladenosine
  modified_base 16: mod_base = OTHER; note = 2'-fluoroadenosine
  modified_base 17: mod_base = OTHER; note = 2'-O-methyluridine
  modified_base 18: mod_base = OTHER; note = 2'-fluorocytidine
  modified_base 19: mod_base = OTHER; note = 2'-O-methylcytidine
  modified_base 20: mod_base = OTHER; note = 2'-fluoroadenosine
  modified_base 21: mod_base = OTHER; note = 2'-O-methyluridine with phosphorothioate linkage
  modified_base 22: mod_base = OTHER; note = 2'-O-methylguanosine with phosphorothioate linkage
  modified_base 23: mod_base = OTHER; note = 2'-O-methyladenosine
ttaagtagattcttaatccatga

SEQ ID NO: 857 - RNA, 23 nt, synthetic construct
  source 1..23: mol_type = other RNA
  modified_base 1: mod_base = OTHER; note = 5'-(E)-vinylphosphonate 2'-O-methylated guanosine with phosphorothioate linkage
  modified_base 2: mod_base = OTHER; note = 2'-fluoroadenosine with phosphorothioate linkage
  modified_base 3: mod_base = OTHER; note = 2'-O-methyluridine
  modified_base 4: mod_base = OTHER; note = 2'-fluorocytidine
  modified_base 5: mod_base = OTHER; note = 2'-O-methylcytidine
  modified_base 6: mod_base = OTHER; note = 2'-fluorouridine
  modified_base 7: mod_base = OTHER; note = 2'-O-methylguanosine
  modified_base 8: mod_base = OTHER; note = 2'-fluoroguanosine
  modified_base 9: mod_base = OTHER; note = 2'-O-methyluridine
  modified_base 10: mod_base = OTHER; note = 2'-fluoroadenosine
  modified_base 11: mod_base = OTHER; note = 2'-O-methyluridine
  modified_base 12: mod_base = OTHER; note = 2'-fluorouridine
  modified_base 13: mod_base = OTHER; note = 2'-O-methylcytidine
  modified_base 14: mod_base = OTHER; note = 2'-fluorouridine
  modified_base 15: mod_base = OTHER; note = 2'-O-methyluridine
  modified_base 16: mod_base = OTHER; note = 2'-fluoroadenosine
  modified_base 17: mod_base = OTHER; note = 2'-O-methylguanosine
  modified_base 18: mod_base = OTHER; note = 2'-fluorocytidine
  modified_base 19: mod_base = OTHER; note = 2'-O-methyladenosine
  modified_base 20: mod_base = OTHER; note = 2'-fluoroguanosine
  modified_base 21: mod_base = OTHER; note = 2'-O-methylguanosine with phosphorothioate linkage
  modified_base 22: mod_base = OTHER; note = 2'-O-methyluridine with phosphorothioate linkage
  modified_base 23: mod_base = OTHER; note = 2'-O-methyluridine
gatcctggtattcttagcaggtt

SEQ ID NO: 858 - RNA, 23 nt, synthetic construct
  source 1..23: mol_type = other RNA
  modified_base 1: mod_base = OTHER; note = 5'-(E)-vinylphosphonate 2'-O-methylated uridine with phosphorothioate linkage
  modified_base 2: mod_base = OTHER; note = 2'-fluoroguanosine with phosphorothioate linkage
  modified_base 3: mod_base = OTHER; note = 2'-O-methylcytidine
  modified_base 4: mod_base = OTHER; note = 2'-fluoroadenosine
  modified_base 5: mod_base = OTHER; note = 2'-O-methyladenosine
  modified_base 6: mod_base = OTHER; note = 2'-fluoroguanosine
  modified_base 7: mod_base = OTHER; note = 2'-O-methyluridine
  modified_base 8: mod_base = OTHER; note = 2'-fluorouridine
  modified_base 9: mod_base = OTHER; note = 2'-O-methylcytidine
  modified_base 10: mod_base = OTHER; note = 2'-fluoroadenosine
  modified_base 11: mod_base = OTHER; note = 2'-O-methyladenosine
  modified_base 12: mod_base = OTHER; note = 2'-fluoroguanosine
  modified_base 13: mod_base = OTHER; note = 2'-O-methyluridine
  modified_base 14: mod_base = OTHER; note = 2'-fluoroguanosine
  modified_base 15: mod_base = OTHER; note = 2'-O-methylcytidine
  modified_base 16: mod_base = OTHER; note = 2'-fluoroguanosine
  modified_base 17: mod_base = OTHER; note = 2'-O-methylguanosine
  modified_base 18: mod_base = OTHER; note = 2'-fluoroadenosine
  modified_base 19: mod_base = OTHER; note = 2'-O-methylcytidine
  modified_base 20: mod_base = OTHER; note = 2'-fluoroguanosine
  modified_base 21: mod_base = OTHER; note = 2'-O-methyluridine with phosphorothioate linkage
  modified_base 22: mod_base = OTHER; note = 2'-O-methylguanosine with phosphorothioate linkage
  modified_base 23: mod_base = OTHER; note = 2'-O-methyladenosine
tgcaagttcaagtgcggacgtga

SEQ ID NO: 859 - RNA, 23 nt, synthetic construct
  source 1..23: mol_type = other RNA
  modified_base 1: mod_base = OTHER; note = 5'-(E)-vinylphosphonate 2'-O-methylated uridine with phosphorothioate linkage
  modified_base 2: mod_base = OTHER; note = 2'-fluoroadenosine with phosphorothioate linkage
  modified_base 3: mod_base = OTHER; note = 2'-O-methylguanosine
  modified_base 4: mod_base = OTHER; note = 2'-fluoroadenosine
  modified_base 5: mod_base = OTHER; note = 2'-O-methyladenosine
  modified_base 6: mod_base = OTHER; note = 2'-fluoroguanosine
  modified_base 7: mod_base = OTHER; note = 2'-O-methyluridine
  modified_base 8: mod_base = OTHER; note = 2'-fluorouridine
  modified_base 9: mod_base = OTHER; note = 2'-O-methyluridine
  modified_base 10: mod_base = OTHER; note = 2'-fluoroadenosine
  modified_base 11: mod_base = OTHER; note = 2'-O-methyluridine
  modified_base 12: mod_base = OTHER; note = 2'-fluorocytidine
  modified_base 13: mod_base = OTHER; note = 2'-O-methyluridine
  modified_base 14: mod_base = OTHER; note = 2'-fluoroguanosine
  modified_base 15: mod_base = OTHER; note = 2'-O-methylcytidine
  modified_base 16: mod_base = OTHER; note = 2'-fluorouridine
  modified_base 17: mod_base = OTHER; note = 2'-O-methyladenosine
  modified_base 18: mod_base = OTHER; note = 2'-fluorouridine
  modified_base 19: mod_base = OTHER; note = 2'-O-methylguanosine
  modified_base 20: mod_base = OTHER; note = 2'-fluorouridine
  modified_base 21: mod_base = OTHER; note = 2'-O-methylguanosine with phosphorothioate linkage
  modified_base 22: mod_base = OTHER; note = 2'-O-methyluridine with phosphorothioate linkage
  modified_base 23: mod_base = OTHER; note = 2'-O-methyluridine
tagaagtttatctgctatgtgtt

SEQ ID NO: 860 - RNA, 23 nt, synthetic construct
  source 1..23: mol_type = other RNA
  modified_base 1: mod_base = OTHER; note = 5'-(E)-vinylphosphonate 2'-O-methylated adenosine with phosphorothioate linkage
  modified_base 2: mod_base = OTHER; note = 2'-fluoroguanosine with phosphorothioate linkage
  modified_base 3: mod_base = OTHER; note = 2'-O-methyluridine
  modified_base 4: mod_base = OTHER; note = 2'-fluoroguanosine
  modified_base 5: mod_base = OTHER; note = 2'-O-methylcytidine
  modified_base 6: mod_base = OTHER; note = 2'-fluorouridine
  modified_base 7: mod_base = OTHER; note = 2'-O-methylguanosine
  modified_base 8: mod_base = OTHER; note = 2'-fluorocytidine
  modified_base 9: mod_base = OTHER; note = 2'-O-methyladenosine
  modified_base 10: mod_base = OTHER; note = 2'-fluorouridine
  modified_base 11: mod_base = OTHER; note = 2'-O-methylguanosine
  modified_base 12: mod_base = OTHER; note = 2'-fluoroguanosine
  modified_base 13: mod_base = OTHER; note = 2'-O-methyladenosine
  modified_base 14: mod_base = OTHER; note = 2'-fluoroguanosine
  modified_base 15: mod_base = OTHER; note = 2'-O-methylcytidine
  modified_base 16: mod_base = OTHER; note = 2'-fluorouridine
  modified_base 17: mod_base = OTHER; note = 2'-O-methylguanosine
  modified_base 18: mod_base = OTHER; note = 2'-fluoroadenosine
  modified_base 19: mod_base = OTHER; note = 2'-O-methylguanosine
  modified_base 20: mod_base = OTHER; note = 2'-fluorocytidine
  modified_base 21: mod_base = OTHER; note = 2'-O-methyladenosine with phosphorothioate linkage
  modified_base 22: mod_base = OTHER; note = 2'-O-methylcytidine with phosphorothioate linkage
  modified_base 23: mod_base = OTHER; note = 2'-O-methylcytidine
agtgctgcatggagctgagcacc

SEQ ID NO: 861 - RNA, 23 nt, synthetic construct
  source 1..23: mol_type = other RNA
  modified_base 1: mod_base = OTHER; note = 5'-(E)-vinylphosphonate 2'-O-methylated guanosine with phosphorothioate linkage
  modified_base 2: mod_base = OTHER; note = 2'-fluorocytidine with phosphorothioate linkage
  modified_base 3: mod_base = OTHER; note = 2'-O-methyladenosine
  modified_base 4: mod_base = OTHER; note = 2'-fluoroguanosine
  modified_base 5: mod_base = OTHER; note = 2'-O-methyladenosine
  modified_base 6: mod_base = OTHER; note = 2'-fluoroadenosine
  modified_base 7: mod_base = OTHER; note = 2'-O-methylguanosine
  modified_base 8: mod_base = OTHER; note = 2'-fluorouridine
  modified_base 9: mod_base = OTHER; note = 2'-O-methyluridine
  modified_base 10: mod_base = OTHER; note = 2'-fluorouridine
  modified_base 11: mod_base = OTHER; note = 2'-O-methyladenosine
  modified_base 12: mod_base = OTHER; note = 2'-fluorouridine
  modified_base 13: mod_base = OTHER; note = 2'-O-methylcytidine
  modified_base 14: mod_base = OTHER; note = 2'-fluorouridine
  modified_base 15: mod_base = OTHER; note = 2'-O-methylguanosine
  modified_base 16: mod_base = OTHER; note = 2'-fluorocytidine
  modified_base 17: mod_base = OTHER; note = 2'-O-methyluridine
  modified_base 18: mod_base = OTHER; note = 2'-fluoroadenosine
  modified_base 19: mod_base = OTHER; note = 2'-O-methyluridine
  modified_base 20: mod_base = OTHER; note = 2'-fluoroguanosine
  modified_base 21: mod_base = OTHER; note = 2'-O-methyluridine with phosphorothioate linkage
  modified_base 22: mod_base = OTHER; note = 2'-O-methylguanosine with phosphorothioate linkage
  modified_base 23: mod_base = OTHER; note = 2'-O-methyluridine
gcagaagtttatctgctatgtgt

SEQ ID NO: 862 - RNA, 23 nt, synthetic construct
  source 1..23: mol_type = other RNA
  modified_base 1: mod_base = OTHER; note = 5'-(E)-vinylphosphonate 2'-O-methylated uridine with phosphorothioate linkage
  modified_base 2: mod_base = OTHER; note = 2'-fluoroadenosine with phosphorothioate linkage
  modified_base 3: mod_base = OTHER; note = 2'-O-methyluridine
  modified_base 4: mod_base = OTHER; note = 2'-fluoroguanosine
  modified_base 5: mod_base = OTHER; note = 2'-O-methyladenosine
  modified_base 6: mod_base = OTHER; note = 2'-fluoroguanosine
  modified_base 7: mod_base = OTHER; note = 2'-O-methyluridine
  modified_base 8: mod_base = OTHER; note = 2'-fluoroguanosine
  modified_base 9: mod_base = OTHER; note = 2'-O-methyluridine
  modified_base 10: mod_base = OTHER; note = 2'-fluorouridine
  modified_base 11: mod_base = OTHER; note = 2'-O-methylcytidine
  modified_base 12: mod_base = OTHER; note = 2'-fluorouridine
  modified_base 13: mod_base = OTHER; note = 2'-O-methylguanosine
  modified_base 14: mod_base = OTHER; note = 2'-fluorouridine
  modified_base 15: mod_base = OTHER; note = 2'-O-methylguanosine
  modified_base 16: mod_base = OTHER; note = 2'-fluorocytidine
  modified_base 17: mod_base = OTHER; note = 2'-O-methylguanosine
  modified_base 18: mod_base = OTHER; note = 2'-fluorouridine
  modified_base 19: mod_base = OTHER; note = 2'-O-methylguanosine
  modified_base 20: mod_base = OTHER; note = 2'-fluorouridine
  modified_base 21: mod_base = OTHER; note = 2'-O-methyluridine with phosphorothioate linkage
  modified_base 22: mod_base = OTHER; note = 2'-O-methylguanosine with phosphorothioate linkage
  modified_base 23: mod_base = OTHER; note = 2'-O-methylcytidine
tatgagtgttctgtgcgtgttgc

SEQ ID NO: 863 - RNA, 23 nt, synthetic construct
  source 1..23: mol_type = other RNA
  modified_base 1: mod_base = OTHER; note = 5'-(E)-vinylphosphonate 2'-O-methylated guanosine with phosphorothioate linkage
  modified_base 2: mod_base = OTHER; note = 2'-fluorocytidine with phosphorothioate linkage
  modified_base 3: mod_base = OTHER; note = 2'-O-methylcytidine
  modified_base 4: mod_base = OTHER; note = 2'-fluoroadenosine
  modified_base 5: mod_base = OTHER; note = 2'-O-methyluridine
  modified_base 6: mod_base = OTHER; note = 2'-fluorouridine
  modified_base 7: mod_base = OTHER; note = 2'-O-methylguanosine
  modified_base 8: mod_base = OTHER; note = 2'-fluoroguanosine
  modified_base 9: mod_base = OTHER; note = 2'-O-methyladenosine
  modified_base 10: mod_base = OTHER; note = 2'-fluorouridine
  modified_base 11: mod_base = OTHER; note = 2'-O-methyluridine
  modified_base 12: mod_base = OTHER; note = 2'-fluorocytidine
  modified_base 13: mod_base = OTHER; note = 2'-O-methyladenosine
  modified_base 14: mod_base = OTHER; note = 2'-fluoroadenosine
  modified_base 15: mod_base = OTHER; note = 2'-O-methylcytidine
  modified_base 16: mod_base = OTHER; note = 2'-fluorocytidine
  modified_base 17: mod_base = OTHER; note = 2'-O-methylguanosine
  modified_base 18: mod_base = OTHER; note = 2'-fluorocytidine
  modified_base 19: mod_base = OTHER; note = 2'-O-methyladenosine
  modified_base 20: mod_base = OTHER; note = 2'-fluoroguanosine
  modified_base 21: mod_base = OTHER; note = 2'-O-methylcytidine with phosphorothioate linkage
  modified_base 22: mod_base = OTHER; note = 2'-O-methyladenosine with phosphorothioate linkage
  modified_base 23: mod_base = OTHER; note = 2'-O-methylcytidine
gccattggattcaaccgcagcac

SEQ ID NO: 864 - RNA, 23 nt, synthetic construct
  source 1..23: mol_type = other RNA
  modified_base 1: mod_base = OTHER; note = 5'-(E)-vinylphosphonate 2'-O-methylated adenosine with phosphorothioate linkage
  modified_base 2: mod_base = OTHER; note = 2'-fluoroguanosine with phosphorothioate linkage
  modified_base 3: mod_base = OTHER; note = 2'-O-methylcytidine
  modified_base 4: mod_base = OTHER; note = 2'-fluorouridine
  modified_base 5: mod_base = OTHER; note = 2'-O-methylguanosine
  modified_base 6: mod_base = OTHER; note = 2'-fluorocytidine
  modified_base 7: mod_base = OTHER; note = 2'-O-methyladenosine
  modified_base 8: mod_base = OTHER; note = 2'-fluoroadenosine
  modified_base 9: mod_base = OTHER; note = 2'-O-methylguanosine
  modified_base 10: mod_base = OTHER; note = 2'-fluorouridine
  modified_base 11: mod_base = OTHER; note = 2'-O-methyluridine
  modified_base 12: mod_base = OTHER; note = 2'-fluorocytidine
  modified_base 13: mod_base = OTHER; note = 2'-O-methyladenosine
  modified_base 14: mod_base = OTHER; note = 2'-fluoroadenosine
  modified_base 15: mod_base = OTHER; note = 2'-O-methylguanosine
  modified_base 16: mod_base = OTHER; note = 2'-fluorouridine
  modified_base 17: mod_base = OTHER; note = 2'-O-methylguanosine
  modified_base 18: mod_base = OTHER; note = 2'-fluorocytidine
  modified_base 19: mod_base = OTHER; note = 2'-O-methylguanosine
  modified_base 20: mod_base = OTHER; note = 2'-fluoroguanosine
  modified_base 21: mod_base = OTHER; note = 2'-O-methyladenosine with phosphorothioate linkage
  modified_base 22: mod_base = OTHER; note = 2'-O-methylcytidine with phosphorothioate linkage
  modified_base 23: mod_base = OTHER; note = 2'-O-methylguanosine
agctgcaagttcaagtgcggacg

SEQ ID NO: 865 - RNA, 23 nt, synthetic construct
  source 1..23: mol_type = other RNA
  modified_base 1: mod_base = OTHER; note = 5'-(E)-vinylphosphonate 2'-O-methylated uridine with phosphorothioate linkage
  modified_base 2: mod_base = OTHER; note = 2'-fluorocytidine with phosphorothioate linkage
  modified_base 3: mod_base = OTHER; note = 2'-O-methylcytidine
  modified_base 4: mod_base = OTHER; note = 2'-fluoroadenosine
  modified_base 5: mod_base = OTHER; note = 2'-O-methyluridine
  modified_base 6: mod_base = OTHER; note = 2'-fluoroadenosine
  modified_base 7: mod_base = OTHER; note = 2'-O-methylguanosine
  modified_base 8: mod_base = OTHER; note = 2'-fluorocytidine
  modified_base 9: mod_base = OTHER; note = 2'-O-methylcytidine
  modified_base 10: mod_base = OTHER; note = 2'-fluoroadenosine
  modified_base 11: mod_base = OTHER; note = 2'-O-methyluridine
  modified_base 12: mod_base = OTHER; note = 2'-fluorouridine
  modified_base 13: mod_base = OTHER; note = 2'-O-methylguanosine
  modified_base 14: mod_base = OTHER; note = 2'-fluoroguanosine
  modified_base 15: mod_base = OTHER; note = 2'-O-methyladenosine
  modified_base 16: mod_base = OTHER; note = 2'-fluorouridine
  modified_base 17: mod_base = OTHER; note = 2'-O-methyluridine
  modified_base 18: mod_base = OTHER; note = 2'-fluorocytidine
  modified_base 19: mod_base = OTHER; note = 2'-O-methyladenosine
  modified_base 20: mod_base = OTHER; note = 2'-fluoroadenosine
  modified_base 21: mod_base = OTHER; note = 2'-O-methylcytidine with phosphorothioate linkage
  modified_base 22: mod_base = OTHER; note = 2'-O-methylcytidine with phosphorothioate linkage
  modified_base 23: mod_base = OTHER; note = 2'-O-methylguanosine
tccatagccattggattcaaccg

SEQ ID NO: 866 - RNA, 23 nt, synthetic construct
  source 1..23: mol_type = other RNA
  modified_base 1: mod_base = OTHER; note = 5'-(E)-vinylphosphonate 2'-O-methylated guanosine with phosphorothioate linkage
  modified_base 2: mod_base = OTHER; note = 2'-fluoroadenosine with phosphorothioate linkage
  modified_base 3: mod_base = OTHER; note = 2'-O-methylcytidine
  modified_base 4: mod_base = OTHER; note = 2'-fluoroadenosine
  modified_base 5: mod_base = OTHER; note = 2'-O-methylguanosine
  modified_base 6: mod_base = OTHER; note = 2'-fluorouridine
  modified_base 7: mod_base = OTHER; note = 2'-O-methylguanosine
  modified_base 8: mod_base = OTHER; note = 2'-fluoroadenosine
  modified_base 9: mod_base = OTHER; note = 2'-O-methylguanosine
  modified_base 10: mod_base = OTHER; note = 2'-fluoroadenosine
  modified_base 11: mod_base = OTHER; note = 2'-O-methyluridine
  modified_base 12: mod_base = OTHER; note = 2'-fluorouridine
  modified_base 13: mod_base = OTHER; note = 2'-O-methylguanosine
  modified_base 14: mod_base = OTHER; note = 2'-fluorocytidine
  modified_base 15: mod_base = OTHER; note = 2'-O-methyluridine
  modified_base 16: mod_base = OTHER; note = 2'-fluoroadenosine
  modified_base 17: mod_base = OTHER; note = 2'-O-methylcytidine
  modified_base 18: mod_base = OTHER; note = 2'-fluoroadenosine
  modified_base 19: mod_base = OTHER; note = 2'-O-methylguanosine
  modified_base 20: mod_base = OTHER; note = 2'-fluorouridine
  modified_base 21: mod_base = OTHER; note = 2'-O-methyluridine with phosphorothioate linkage
  modified_base 22: mod_base = OTHER; note = 2'-O-methylcytidine with phosphorothioate linkage
  modified_base 23: mod_base = OTHER; note = 2'-O-methyluridine
gacagtgagattgctacagttct

SEQ ID NO: 867 - RNA, 23 nt, synthetic construct
  source 1..23: mol_type = other RNA
  modified_base 1: mod_base = OTHER; note = 5'-(E)-vinylphosphonate 2'-O-methylated guanosine with phosphorothioate linkage
  modified_base 2: mod_base = OTHER; note = 2'-fluoroguanosine with phosphorothioate linkage
  modified_base 3: mod_base = OTHER; note = 2'-O-methyluridine
  modified_base 4: mod_base = OTHER; note = 2'-fluorouridine
  modified_base 5: mod_base = OTHER; note = 2'-O-methylcytidine
  modified_base 6: mod_base = OTHER; note = 2'-fluoroadenosine
  modified_base 7: mod_base = OTHER; note = 2'-O-methylcytidine
  modified_base 8: mod_base = OTHER; note = 2'-fluoroadenosine
  modified_base 9: mod_base = OTHER; note = 2'-O-methyluridine
  modified_base 10: mod_base = OTHER; note = 2'-fluorocytidine
  modified_base 11: mod_base = OTHER; note = 2'-O-methylguanosine
  modified_base 12: mod_base = OTHER; note = 2'-fluoroguanosine
  modified_base 13: mod_base = OTHER; note = 2'-O-methylguanosine
  modified_base 14: mod_base = OTHER; note = 2'-fluoroadenosine
  modified_base 15: mod_base = OTHER; note = 2'-O-methylguanosine
  modified_base 16: mod_base = OTHER; note = 2'-fluoroadenosine
  modified_base 17: mod_base = OTHER; note = 2'-O-methylguanosine
  modified_base 18: mod_base = OTHER; note = 2'-fluorocytidine
  modified_base 19: mod_base = OTHER; note = 2'-O-methylcytidine
  modified_base 20: mod_base = OTHER; note = 2'-fluoroguanosine
  modified_base 21: mod_base = OTHER; note = 2'-O-methylguanosine with phosphorothioate linkage
  modified_base 22: mod_base = OTHER; note = 2'-O-methylguanosine with phosphorothioate linkage
  modified_base 23: mod_base = OTHER; note = 2'-O-methyluridine
ggttcacatcgggagagccgggt

SEQ ID NO: 868 - RNA, 23 nt, synthetic construct
  source 1..23: mol_type = other RNA
  modified_base 1: mod_base = OTHER; note = 5'-(E)-vinylphosphonate 2'-O-methylated uridine with phosphorothioate linkage
  modified_base 2: mod_base = OTHER; note = 2'-fluoroadenosine with phosphorothioate linkage
  modified_base 3: mod_base = OTHER; note = 2'-O-methylcytidine
  modified_base 4: mod_base = OTHER; note = 2'-fluoroadenosine
  modified_base 5: mod_base = OTHER; note = 2'-O-methyladenosine
  modified_base 6: mod_base = OTHER; note = 2'-fluoroadenosine
  modified_base 7: mod_base = OTHER; note = 2'-O-methylguanosine
  modified_base 8: mod_base = OTHER; note = 2'-fluoroadenosine
  modified_base 9: mod_base = OTHER; note = 2'-O-methyluridine
  modified_base 10: mod_base = OTHER; note = 2'-fluoroguanosine
  modified_base 11: mod_base = OTHER; note = 2'-O-methylguanosine
  modified_base 12: mod_base = OTHER; note = 2'-fluorocytidine
  modified_base 13: mod_base = OTHER; note = 2'-O-methylguanosine
  modified_base 14: mod_base = OTHER; note = 2'-fluorocytidine
  modified_base 15: mod_base = OTHER; note = 2'-O-methyladenosine
  modified_base 16: mod_base = OTHER; note = 2'-fluoroguanosine
  modified_base 17: mod_base = OTHER; note = 2'-O-methylguanosine
  modified_base 18: mod_base = OTHER; note = 2'-fluoroguanosine
  modified_base 19: mod_base = OTHER; note = 2'-O-methyladenosine
  modified_base 20: mod_base = OTHER; note = 2'-fluoroadenosine
  modified_base 21: mod_base = OTHER; note = 2'-O-methylguanosine with phosphorothioate linkage
  modified_base 22: mod_base = OTHER; note = 2'-O-methyladenosine with phosphorothioate linkage
  modified_base 23: mod_base = OTHER; note = 2'-O-methyluridine
tacaaagatggcgcagggaagat

SEQ ID NO: 869 - RNA, 23 nt, synthetic construct
  source 1..23: mol_type = other RNA
  modified_base 1: mod_base = OTHER; note = 5'-(E)-vinylphosphonate 2'-O-methylated uridine with phosphorothioate linkage
  modified_base 2: mod_base = OTHER; note = 2'-fluoroadenosine with phosphorothioate linkage
  modified_base 3: mod_base = OTHER; note = 2'-O-methylcytidine
  modified_base 4: mod_base = OTHER; note = 2'-fluorouridine
  modified_base 5: mod_base = OTHER; note = 2'-O-methylguanosine
  modified_base 6: mod_base = OTHER; note = 2'-fluoroguanosine
  modified_base 7: mod_base = OTHER; note = 2'-O-methyluridine
  modified_base 8: mod_base = OTHER; note = 2'-fluoroguanosine
  modified_base 9: mod_base = OTHER; note = 2'-O-methyladenosine
  modified_base 10: mod_base = OTHER; note = 2'-fluoroadenosine
  modified_base 11: mod_base = OTHER; note = 2'-O-methyluridine
  modified_base 12: mod_base = OTHER; note = 2'-fluoroguanosine
  modified_base 13: mod_base = OTHER; note = 2'-O-methylguanosine
  modified_base 14: mod_base = OTHER; note = 2'-fluorocytidine
  modified_base 15: mod_base = OTHER; note = 2'-O-methyluridine
  modified_base 16: mod_base = OTHER; note = 2'-fluoroguanosine
  modified_base 17: mod_base = OTHER; note = 2'-O-methyluridine
  modified_base 18: mod_base = OTHER; note = 2'-fluorouridine
  modified_base 19: mod_base = OTHER; note = 2'-O-methyluridine
  modified_base 20: mod_base = OTHER; note = 2'-fluoroguanosine
  modified_base 21: mod_base = OTHER; note = 2'-O-methylcytidine with phosphorothioate linkage
  modified_base 22: mod_base = OTHER; note = 2'-O-methyladenosine with phosphorothioate linkage
  modified_base 23: mod_base = OTHER; note = 2'-O-methyladenosine
tactggtgaatggctgtttgcaa

SEQ ID NO: 870 - RNA, 23 nt, synthetic construct
  source 1..23: mol_type = other RNA
  modified_base 1: mod_base = OTHER; note = 5'-(E)-vinylphosphonate 2'-O-methylated uridine with phosphorothioate linkage
  modified_base 2: mod_base = OTHER; note = 2'-fluorouridine with phosphorothioate linkage
  modified_base 3: mod_base = OTHER; note = 2'-O-methylcytidine
  modified_base 4: mod_base = OTHER; note = 2'-fluorouridine
  modified_base 5: mod_base = OTHER; note = 2'-O-methyladenosine
  modified_base 6: mod_base = OTHER; note = 2'-fluoroadenosine
  modified_base 7: mod_base = OTHER; note = 2'-O-methylguanosine
  modified_base 8: mod_base = OTHER; note = 2'-fluorocytidine
  modified_base 9: mod_base = OTHER; note = 2'-O-methyladenosine
  modified_base 10: mod_base = OTHER; note = 2'-fluoroguanosine
  modified_base 11: mod_base = OTHER; note = 2'-O-methyladenosine
  modified_base 12: mod_base = OTHER; note = 2'-fluoroguanosine
  modified_base 13: mod_base = OTHER; note = 2'-O-methylguanosine
  modified_base 14: mod_base = OTHER; note = 2'-fluorocytidine
  modified_base 15: mod_base = OTHER; note = 2'-O-methyluridine
  modified_base 16: mod_base = OTHER; note = 2'-fluoroguanosine
  modified_base 17: mod_base = OTHER; note = 2'-O-methylcytidine
  modified_base 18: mod_base = OTHER; note = 2'-fluorocytidine
  modified_base 19: mod_base = OTHER; note = 2'-O-methyladenosine
  modified_base 20: mod_base = OTHER; note = 2'-fluorouridine
  modified_base 21: mod_base = OTHER; note = 2'-O-methyluridine with phosphorothioate linkage
  modified_base 22: mod_base = OTHER; note = 2'-O-methylguanosine with phosphorothioate linkage
  modified_base 23: mod_base = OTHER; note = 2'-O-methylcytidine
ttctaagcagaggctgccattgc

SEQ ID NO: 871 - RNA, 23 nt, synthetic construct
  source 1..23: mol_type = other RNA
  modified_base 1: mod_base = OTHER; note = 5'-(E)-vinylphosphonate 2'-O-methylated uridine with phosphorothioate linkage
  modified_base 2: mod_base = OTHER; note = 2'-fluorouridine with phosphorothioate linkage
  modified_base 3: mod_base = OTHER; note = 2'-O-methylcytidine
  modified_base 4: mod_base = OTHER; note = 2'-fluorouridine
  modified_base 5: mod_base = OTHER; note = 2'-O-methylguanosine
  modified_base 6: mod_base = OTHER; note = 2'-fluoroadenosine
  modified_base 7: mod_base = OTHER; note = 2'-O-methyladenosine
  modified_base 8: mod_base = OTHER; note = 2'-fluoroadenosine
  modified_base 9: mod_base = OTHER; note = 2'-O-methyluridine
  modified_base 10: mod_base = OTHER; note = 2'-fluorouridine
  modified_base 11: mod_base = OTHER; note = 2'-O-methyluridine
  modified_base 12: mod_base = OTHER; note = 2'-fluoroguanosine
  modified_base 13: mod_base = OTHER; note = 2'-O-methyladenosine
  modified_base 14: mod_base = OTHER; note = 2'-fluoroadenosine
  modified_base 15: mod_base = OTHER; note = 2'-O-methylcytidine
  modified_base 16: mod_base = OTHER; note = 2'-fluoroguanosine
  modified_base 17: mod_base = OTHER; note = 2'-O-methyluridine
  modified_base 18: mod_base = OTHER; note = 2'-fluorocytidine
  modified_base 19: mod_base = OTHER; note = 2'-O-methyluridine
  modified_base 20: mod_base = OTHER; note = 2'-fluorouridine
  modified_base 21: mod_base = OTHER; note = 2'-O-methylguanosine with phosphorothioate linkage
  modified_base 22: mod_base = OTHER; note = 2'-O-methylcytidine with phosphorothioate linkage
  modified_base 23: mod_base = OTHER; note = 2'-O-methylcytidine
ttctgaaatttgaacgtcttgcc

SEQ ID NO: 872 - RNA, 23 nt, synthetic construct
  source 1..23: mol_type = other RNA
  modified_base 1: mod_base = OTHER; note = 5'-(E)-vinylphosphonate 2'-O-methylated guanosine with phosphorothioate linkage
  modified_base 2: mod_base = OTHER; note = 2'-fluorocytidine with phosphorothioate linkage
  modified_base 3: mod_base = OTHER; note = 2'-O-methylguanosine
  modified_base 4: mod_base = OTHER; note = 2'-fluoroadenosine
  modified_base 5: mod_base = OTHER; note = 2'-O-methyluridine
  modified_base 6: mod_base = OTHER; note = 2'-fluorouridine
  modified_base 7: mod_base = OTHER; note = 2'-O-methylguanosine
  modified_base 8: mod_base = OTHER; note = 2'-fluorouridine
  modified_base 9: mod_base = OTHER; note = 2'-O-methylcytidine
  modified_base 10: mod_base = OTHER; note = 2'-fluorouridine
  modified_base 11: mod_base = OTHER; note = 2'-O-methylguanosine
  modified_base 12: mod_base = OTHER; note = 2'-fluoroguanosine
  modified_base 13: mod_base = OTHER; note = 2'-O-methyladenosine
  modified_base 14: mod_base = OTHER; note = 2'-fluoroguanosine
  modified_base 15: mod_base = OTHER; note = 2'-O-methyluridine
  modified_base 16: mod_base = OTHER; note = 2'-fluorocytidine
  modified_base 17: mod_base = OTHER; note = 2'-O-methyluridine
  modified_base 18: mod_base = OTHER; note = 2'-fluorocytidine
  modified_base 19: mod_base = OTHER; note = 2'-O-methylcytidine
  modified_base 20: mod_base = OTHER; note = 2'-fluoroguanosine
  modified_base 21: mod_base = OTHER; note = 2'-O-methyladenosine with phosphorothioate linkage
  modified_base 22: mod_base = OTHER; note = 2'-O-methyladenosine with phosphorothioate linkage
  modified_base 23: mod_base = OTHER; note = 2'-O-methylguanosine
gcgattgtctggagtctccgaag

SEQ ID NO: 873 - RNA, 23 nt, synthetic construct
  source 1..23: mol_type = other RNA
  modified_base 1: mod_base = OTHER; note = 5'-(E)-vinylphosphonate 2'-O-methylated uridine with phosphorothioate linkage
  modified_base 2: mod_base = OTHER; note = 2'-fluorouridine with phosphorothioate linkage
  modified_base 3: mod_base = OTHER; note = 2'-O-methyluridine
  modified_base 4: mod_base = OTHER; note = 2'-fluoroguanosine
  modified_base 5: mod_base = OTHER; note = 2'-O-methyladenosine
  modified_base 6: mod_base = OTHER; note = 2'-fluoroguanosine
  modified_base 7: mod_base = OTHER; note = 2'-O-methylcytidine
  modified_base 8: mod_base = OTHER; note = 2'-fluorouridine
  modified_base 9: mod_base = OTHER; note = 2'-O-methylguanosine
  modified_base 10: mod_base = OTHER; note = 2'-fluoroguanosine
  modified_base 11: mod_base = OTHER; note = 2'-O-methylguanosine
  modified_base 12: mod_base = OTHER; note = 2'-fluorocytidine
  modified_base 13: mod_base = OTHER; note = 2'-O-methylcytidine
  modified_base 14: mod_base = OTHER; note = 2'-fluorouridine
  modified_base 15: mod_base = OTHER; note = 2'-O-methylguanosine
  modified_base 16: mod_base = OTHER; note = 2'-fluorocytidine
  modified_base 17: mod_base = OTHER; note = 2'-O-methylcytidine
  modified_base 18: mod_base = OTHER; note = 2'-fluorocytidine
  modified_base 19: mod_base = OTHER; note = 2'-O-methylguanosine
  modified_base 20: mod_base = OTHER; note = 2'-fluoroguanosine
  modified_base 21: mod_base = OTHER; note = 2'-O-methylguanosine with phosphorothioate linkage
  modified_base 22: mod_base = OTHER; note = 2'-O-methylcytidine with phosphorothioate linkage
  modified_base 23: mod_base = OTHER; note = 2'-O-methylcytidine
tttgagctgggcctgcccgggcc

SEQ ID NO: 874 - RNA, 23 nt, synthetic construct
  source 1..23: mol_type = other RNA
  modified_base 1: mod_base = OTHER; note = 5'-(E)-vinylphosphonate 2'-O-methylated guanosine with phosphorothioate linkage
  modified_base 2: mod_base = OTHER; note = 2'-fluoroguanosine with phosphorothioate linkage
  modified_base 3: mod_base = OTHER; note = 2'-O-methylcytidine
  modified_base 4: mod_base = OTHER; note = 2'-fluoroguanosine
  modified_base 5: mod_base = OTHER; note = 2'-O-methyladenosine
  modified_base 6: mod_base = OTHER; note = 2'-fluorouridine
  modified_base 7: mod_base = OTHER; note = 2'-O-methyluridine
  modified_base 8: mod_base = OTHER; note = 2'-fluoroguanosine
  modified_base 9: mod_base = OTHER; note = 2'-O-methyluridine
  modified_base 10: mod_base = OTHER; note = 2'-fluorocytidine
  modified_base 11: mod_base = OTHER; note = 2'-O-methyluridine
  modified_base 12: mod_base = OTHER; note = 2'-fluoroguanosine
  modified_base 13: mod_base = OTHER; note = 2'-O-methylguanosine
  modified_base 14: mod_base = OTHER; note = 2'-fluoroadenosine
  modified_base 15: mod_base = OTHER; note = 2'-O-methylguanosine
  modified_base 16: mod_base = OTHER; note = 2'-fluorouridine
  modified_base 17: mod_base = OTHER; note = 2'-O-methylcytidine
  modified_base 18: mod_base = OTHER; note = 2'-fluorouridine
  modified_base 19: mod_base = OTHER; note = 2'-O-methylcytidine
  modified_base 20: mod_base = OTHER; note = 2'-fluorocytidine
  modified_base 21: mod_base = OTHER; note = 2'-O-methylguanosine with phosphorothioate linkage
  modified_base 22: mod_base = OTHER; note = 2'-O-methyladenosine with phosphorothioate linkage
  modified_base 23: mod_base = OTHER; note = 2'-O-methyladenosine
ggcgattgtctggagtctccgaa

SEQ ID NO: 875 - RNA, 23 nt, synthetic construct
  source 1..23: mol_type = other RNA
  modified_base 1: mod_base = OTHER; note = 5'-(E)-vinylphosphonate 2'-O-methylated uridine with phosphorothioate linkage
  modified_base 2: mod_base = OTHER; note = 2'-fluoroadenosine with phosphorothioate linkage
  modified_base 3: mod_base = OTHER; note = 2'-O-methylguanosine
  modified_base 4: mod_base = OTHER; note = 2'-fluoroguanosine
  modified_base 5: mod_base = OTHER; note = 2'-O-methylcytidine
  modified_base 6: mod_base = OTHER; note = 2'-fluoroadenosine
  modified_base 7: mod_base = OTHER; note = 2'-O-methyluridine
  modified_base 8: mod_base = OTHER; note = 2'-fluoroadenosine
  modified_base 9: mod_base = OTHER; note = 2'-O-methylguanosine
  modified_base 10: mod_base = OTHER; note = 2'-fluorouridine
  modified_base 11: mod_base = OTHER; note = 2'-O-methyluridine
  modified_base 12: mod_base = OTHER; note = 2'-fluoroguanosine
  modified_base 13: mod_base = OTHER; note = 2'-O-methylcytidine
  modified_base 14: mod_base = OTHER; note = 2'-fluoroadenosine
  modified_base 15: mod_base = OTHER; note = 2'-O-methylcytidine
  modified_base 16: mod_base = OTHER; note = 2'-fluoroadenosine
  modified_base 17: mod_base = OTHER; note = 2'-O-methylguanosine
  modified_base 18: mod_base = OTHER; note = 2'-fluorocytidine
  modified_base 19: mod_base = OTHER; note = 2'-O-methyluridine
  modified_base 20: mod_base = OTHER; note = 2'-fluorocytidine
  modified_base 21: mod_base = OTHER; note = 2'-O-methylguanosine with phosphorothioate linkage
  modified_base 22: mod_base = OTHER; note = 2'-O-methylcytidine with phosphorothioate linkage
  modified_base 23: mod_base = OTHER; note = 2'-O-methyladenosine
taggcatagttgcacagctcgca

SEQ ID NO: 876 - RNA, 23 nt, synthetic construct
  source 1..23: mol_type = other RNA
  modified_base 1: mod_base = OTHER; note = 5'-(E)-vinylphosphonate 2'-O-methylated adenosine with phosphorothioate linkage
  modified_base 2: mod_base = OTHER; note = 2'-fluorouridine with phosphorothioate linkage
  modified_base 3: mod_base = OTHER; note = 2'-O-methyluridine
  modified_base 4: mod_base = OTHER; note = 2'-fluorocytidine
  modified_base 5: mod_base = OTHER; note = 2'-O-methyladenosine
  modified_base 6: mod_base = OTHER; note = 2'-fluoroadenosine
  modified_base 7: mod_base = OTHER; note = 2'-O-methylcytidine
  modified_base 8: mod_base = OTHER; note = 2'-fluorocytidine
  modified_base 9: mod_base = OTHER; note = 2'-O-methylguanosine
  modified_base 10: mod_base = OTHER; note = 2'-fluorocytidine
  modified_base 11: mod_base = OTHER; note = 2'-O-methyladenosine
  modified_base 12: mod_base = OTHER; note = 2'-fluoroguanosine
  modified_base 13: mod_base = OTHER; note = 2'-O-methylcytidine
  modified_base 14: mod_base = OTHER; note = 2'-fluoroadenosine
  modified_base 15: mod_base = OTHER; note = 2'-O-methylcytidine
  modified_base 16: mod_base = OTHER; note = 2'-fluorocytidine
  modified_base 17: mod_base = OTHER; note = 2'-O-methylcytidine
  modified_base 18: mod_base = OTHER; note = 2'-fluorouridine
  modified_base 19: mod_base = OTHER; note = 2'-O-methylguanosine
  modified_base 20: mod_base = OTHER; note = 2'-fluorouridine
  modified_base 21: mod_base = OTHER; note = 2'-O-methylcytidine with phosphorothioate linkage
  modified_base 22: mod_base = OTHER; note = 2'-O-methyladenosine with phosphorothioate linkage
  modified_base 23: mod_base = OTHER; note = 2'-O-methyladenosine
attcaaccgcagcaccctgtcaa

SEQ ID NO: 877 - RNA, 23 nt, synthetic construct
  source 1..23: mol_type = other RNA
  modified_base 1: mod_base = OTHER; note = 5'-(E)-vinylphosphonate 2'-O-methylated uridine with phosphorothioate linkage
  modified_base 2: mod_base = OTHER; note = 2'-fluorocytidine with phosphorothioate linkage
  modified_base 3: mod_base = OTHER; note = 2'-O-methylguanosine
  modified_base 4: mod_base = OTHER; note = 2'-fluorocytidine
  modified_base 5: mod_base = OTHER; note = 2'-O-methyladenosine
  modified_base 6: mod_base = OTHER; note = 2'-fluorouridine
  modified_base 7: mod_base = OTHER; note = 2'-O-methylguanosine
  modified_base 8: mod_base = OTHER; note = 2'-fluoroadenosine
  modified_base 9: mod_base = OTHER; note = 2'-O-methylcytidine
  modified_base 10: mod_base = OTHER; note = 2'-fluorouridine
  modified_base 11: mod_base = OTHER; note = 2'-O-methyluridine
  modified_base 12: mod_base = OTHER; note = 2'-fluoroguanosine
  modified_base 13: mod_base = OTHER; note = 2'-O-methylguanosine
  modified_base 14: mod_base = OTHER; note = 2'-fluoroadenosine
  modified_base 15: mod_base = OTHER; note = 2'-O-methylcytidine
  modified_base 16: mod_base = OTHER; note = 2'-fluorouridine
  modified_base 17: mod_base = OTHER; note = 2'-O-methyluridine
  modified_base 18: mod_base = OTHER; note = 2'-fluoroguanosine
  modified_base 19: mod_base = OTHER; note = 2'-O-methyladenosine
  modified_base 20: mod_base = OTHER; note = 2'-fluorocytidine
  modified_base 21: mod_base = OTHER; note = 2'-O-methylcytidine with phosphorothioate linkage
  modified_base 22: mod_base = OTHER; note = 2'-O-methylguanosine with phosphorothioate linkage
  modified_base 23: mod_base = OTHER; note = 2'-O-methylguanosine
tcgcatgacttggacttgaccgg

SEQ ID NO: 878 - RNA, 23 nt, synthetic construct
  source 1..23: mol_type = other RNA
  modified_base 1: mod_base = OTHER; note = 5'-(E)-vinylphosphonate 2'-O-methylated guanosine with phosphorothioate linkage
  modified_base 2: mod_base = OTHER; note = 2'-fluoroguanosine with phosphorothioate linkage
  modified_base 3: mod_base = OTHER; note = 2'-O-methylcytidine
  modified_base 4: mod_base = OTHER; note = 2'-fluorouridine
  modified_base 5: mod_base = OTHER; note = 2'-O-methylcytidine
  modified_base 6: mod_base = OTHER; note = 2'-fluorocytidine
  modified_base 7: mod_base = OTHER; note = 2'-O-methyladenosine
  modified_base 8: mod_base = OTHER; note = 2'-fluorouridine
  modified_base 9: mod_base = OTHER; note = 2'-O-methyladenosine
  modified_base 10: mod_base = OTHER; note = 2'-fluoroguanosine
  modified_base 11: mod_base = OTHER; note = 2'-O-methylcytidine
  modified_base 12: mod_base = OTHER; note = 2'-fluorocytidine
  modified_base 13: mod_base = OTHER; note = 2'-O-methyladenosine
  modified_base 14: mod_base = OTHER; note = 2'-fluorouridine
  modified_base 15: mod_base = OTHER; note = 2'-O-methyluridine
  modified_base 16: mod_base = OTHER; note = 2'-fluoroguanosine
  modified_base 17: mod_base = OTHER; note = 2'-O-methylguanosine
  modified_base 18: mod_base = OTHER; note = 2'-fluoroadenosine
  modified_base 19: mod_base = OTHER; note = 2'-O-methyluridine
  modified_base 20: mod_base = OTHER; note = 2'-fluorouridine
  modified_base 21: mod_base = OTHER; note = 2'-O-methylcytidine with phosphorothioate linkage
  modified_base 22: mod_base = OTHER; note = 2'-O-methyladenosine with phosphorothioate linkage
  modified_base 23: mod_base = OTHER; note = 2'-O-methyladenosine
ggctccatagccattggattcaa

SEQ ID NO: 879 - RNA, 23 nt, synthetic construct
  source 1..23: mol_type = other RNA
  modified_base 1: mod_base = OTHER; note = 5'-(E)-vinylphosphonate 2'-O-methylated uridine with phosphorothioate linkage
  modified_base 2: mod_base = OTHER; note = 2'-fluorouridine with phosphorothioate linkage
  modified_base 3: mod_base = OTHER; note = 2'-O-methylguanosine
  modified_base 4: mod_base = OTHER; note = 2'-fluoroguanosine
  modified_base 5: mod_base = OTHER; note = 2'-O-methylguanosine
  modified_base 6: mod_base = OTHER; note = 2'-fluorocytidine
  modified_base 7: mod_base = OTHER; note = 2'-O-methyladenosine
  modified_base 8: mod_base = OTHER; note = 2'-fluorocytidine
  modified_base 9: mod_base = OTHER; note = 2'-O-methyladenosine
  modified_base 10: mod_base = OTHER; note = 2'-fluoroguanosine
  modified_base 11: mod_base = OTHER; note = 2'-O-methylguanosine
  modified_base 12: mod_base = OTHER; note = 2'-fluorocytidine
  modified_base 13: mod_base = OTHER; note = 2'-O-methyladenosine
  modified_base 14: mod_base = OTHER; note = 2'-fluorouridine
  modified_base 15: mod_base = OTHER; note = 2'-O-methyladenosine
  modified_base 16: mod_base = OTHER; note = 2'-fluoroguanosine
  modified_base 17: mod_base = OTHER; note = 2'-O-methyluridine
  modified_base 18: mod_base = OTHER; note = 2'-fluorouridine
  modified_base 19: mod_base = OTHER; note = 2'-O-methylguanosine
  modified_base 20: mod_base = OTHER; note = 2'-fluorocytidine
  modified_base 21: mod_base = OTHER; note = 2'-O-methyladenosine with phosphorothioate linkage
  modified_base 22: mod_base = OTHER; note = 2'-O-methylcytidine with phosphorothioate linkage
  modified_base 23: mod_base = OTHER; note = 2'-O-methyladenosine
ttgggcacaggcatagttgcaca

SEQ ID NO: 880 - RNA, 23 nt, synthetic construct
  source 1..23: mol_type = other RNA
  modified_base 1: mod_base = OTHER; note = 5'-(E)-vinylphosphonate 2'-O-methylated uridine with phosphorothioate linkage
  modified_base 2: mod_base = OTHER; note = 2'-fluoroadenosine with phosphorothioate linkage
  modified_base 3: mod_base = OTHER; note = 2'-O-methylguanosine
  modified_base 4: mod_base = OTHER; note = 2'-fluorocytidine
  modified_base 5: mod_base = OTHER; note = 2'-O-methyluridine
  modified_base 6: mod_base = OTHER; note = 2'-fluorocytidine
  modified_base 7: mod_base = OTHER; note = 2'-O-methylguanosine
  modified_base 8: mod_base = OTHER; note = 2'-fluorocytidine
  modified_base 9: mod_base = OTHER; note = 2'-O-methyladenosine
  modified_base 10: mod_base = OTHER; note = 2'-fluorouridine
  modified_base 11: mod_base = OTHER; note = 2'-O-methyluridine
  modified_base 12: mod_base = OTHER; note = 2'-fluorouridine
  modified_base 13: mod_base = OTHER; note = 2'-O-methyladenosine
  modified_base 14: mod_base = OTHER; note = 2'-fluorouridine
  modified_base 15: mod_base = OTHER; note = 2'-O-methyladenosine
  modified_base 16: mod_base = OTHER; note = 2'-fluoroadenosine
  modified_base 17: mod_base = OTHER; note = 2'-O-methylguanosine
  modified_base 18: mod_base = OTHER; note = 2'-fluoroguanosine
  modified_base 19: mod_base = OTHER; note = 2'-O-methylcytidine
  modified_base 20: mod_base = OTHER; note = 2'-fluorocytidine
  modified_base 21: mod_base = OTHER; note = 2'-O-methyluridine with phosphorothioate linkage
  modified_base 22: mod_base = OTHER; note = 2'-O-methyluridine with phosphorothioate linkage
  modified_base 23: mod_base = OTHER; note = 2'-O-methyluridine
tagctcgcatttataaggccttt

SEQ ID NO: 881 - RNA, 23 nt, synthetic construct
  source 1..23: mol_type = other RNA
  modified_base 1: mod_base = OTHER; note = 5'-(E)-vinylphosphonate 2'-O-methylated uridine with phosphorothioate linkage
  modified_base 2: mod_base = OTHER; note = 2'-fluoroguanosine with phosphorothioate linkage
  modified_base 3: mod_base = OTHER; note = 2'-O-methyluridine
  modified_base 4: mod_base = OTHER; note = 2'-fluorocytidine
  modified_base 5: mod_base = OTHER; note = 2'-O-methyladenosine
  modified_base 6: mod_base = OTHER; note = 2'-fluoroadenosine
  modified_base 7: mod_base = OTHER; note = 2'-O-methyladenosine
  modified_base 8: mod_base = OTHER; note = 2'-fluoroguanosine
  modified_base 9: mod_base = OTHER; note = 2'-O-methylguanosine
  modified_base 10: mod_base = OTHER; note = 2'-fluorocytidine
  modified_base 11: mod_base = OTHER; note = 2'-O-methyladenosine
  modified_base 12: mod_base = OTHER; note = 2'-fluorocytidine
  modified_base 13: mod_base = OTHER; note = 2'-O-methyluridine
  modified_base 14: mod_base = OTHER; note = 2'-fluorocytidine
  modified_base 15: mod_base = OTHER; note = 2'-O-methylguanosine
  modified_base 16: mod_base = OTHER; note = 2'-fluoroguanosine
  modified_base 17: mod_base = OTHER; note = 2'-O-methylguanosine
  modified_base 18: mod_base = OTHER; note = 2'-fluorouridine
  modified_base 19: mod_base = OTHER; note = 2'-O-methylguanosine
  modified_base 20: mod_base = OTHER; note = 2'-fluoroadenosine
  modified_base 21: mod_base = OTHER; note = 2'-O-methyluridine with phosphorothioate linkage
  modified_base 22: mod_base = OTHER; note = 2'-O-methylguanosine with phosphorothioate linkage
  modified_base 23: mod_base = OTHER; note = 2'-O-methylguanosine
tgtcaaaggcactcgggtgatgg

SEQ ID NO: 882 - RNA, 23 nt, synthetic construct
  source 1..23: mol_type = other RNA
  modified_base 1: mod_base = OTHER; note = 5'-(E)-vinylphosphonate 2'-O-methylated uridine with phosphorothioate linkage
  modified_base 2: mod_base = OTHER; note = 2'-fluorouridine with phosphorothioate linkage
  modified_base 3: mod_base = OTHER; note = 2'-O-methylcytidine
  modified_base 4: mod_base = OTHER; note = 2'-fluoroguanosine
  modified_base 5: mod_base = OTHER; note = 2'-O-methylguanosine
  modified_base 6: mod_base = OTHER; note = 2'-fluoroguanosine
  modified_base 7: mod_base = OTHER; note = 2'-O-methyluridine
  modified_base 8: mod_base = OTHER; note = 2'-fluoroguanosine
  modified_base 9: mod_base = OTHER; note = 2'-O-methyladenosine
  modified_base 10: mod_base = OTHER; note = 2'-fluorouridine
  modified_base 11: mod_base = OTHER; note = 2'-O-methylguanosine
  modified_base 12: mod_base = OTHER; note = 2'-fluoroguanosine
  modified_base 13: mod_base = OTHER; note = 2'-O-methylguanosine
  modified_base 14: mod_base = OTHER; note = 2'-fluorouridine
  modified_base 15: mod_base = OTHER; note = 2'-O-methylguanosine
  modified_base 16: mod_base = OTHER; note = 2'-fluoroguanosine
  modified_base 17: mod_base = OTHER; note = 2'-O-methylcytidine
  modified_base 18: mod_base = OTHER; note = 2'-fluorocytidine
  modified_base 19: mod_base = OTHER; note = 2'-O-methyladenosine
  modified_base 20: mod_base = OTHER; note = 2'-fluoroguanosine
  modified_base 21: mod_base = OTHER; note = 2'-O-methylguanosine with phosphorothioate linkage
  modified_base 22: mod_base = OTHER; note = 2'-O-methylguanosine with phosphorothioate linkage
  modified_base 23: mod_base = OTHER; note = 2'-O-methylcytidine
ttcgggtgatgggtggccagggc

SEQ ID NO: 883 - RNA, 23 nt, synthetic construct
  source 1..23: mol_type = other RNA
  modified_base 1: mod_base = OTHER; note = 5'-(E)-vinylphosphonate 2'-O-methylated adenosine with phosphorothioate linkage
  modified_base 2: mod_base = OTHER; note = 2'-fluorouridine with phosphorothioate linkage
  modified_base 3: mod_base = OTHER; note = 2'-O-methylguanosine
  modified_base 4: mod_base = OTHER; note = 2'-fluoroguanosine
  modified_base 5: mod_base = OTHER; note = 2'-O-methylcytidine
  modified_base 6: mod_base = OTHER; note = 2'-fluoroguanosine
  modified_base 7: mod_base = OTHER; note = 2'-O-methylcytidine
  modified_base 8: mod_base = OTHER; note = 2'-fluoroadenosine
  modified_base 9: mod_base = OTHER; note = 2'-O-methylguanosine
  modified_base 10: mod_base = OTHER; note = 2'-fluoroguanosine
  modified_base 11: mod_base = OTHER; note = 2'-O-methylguanosine
  modified_base 12: mod_base = OTHER; note = 2'-fluoroadenosine
  modified_base 13: mod_base = OTHER; note = 2'-O-methyladenosine
  modified_base 14: mod_base = OTHER; note = 2'-fluoroguanosine
  modified_base 15: mod_base = OTHER; note = 2'-O-methyladenosine
  modified_base 16: mod_base = OTHER; note = 2'-fluorouridine
  modified_base 17: mod_base = OTHER; note = 2'-O-methylguanosine
  modified_base 18: mod_base = OTHER; note = 2'-fluoroadenosine
  modified_base 19: mod_base = OTHER; note = 2'-O-methyladenosine
  modified_base 20: mod_base = OTHER; note = 2'-fluorouridine
  modified_base 21: mod_base = OTHER; note = 2'-O-methyluridine with phosphorothioate linkage
  modified_base 22: mod_base = OTHER; note = 2'-O-methylguanosine with phosphorothioate linkage
  modified_base 23: mod_base = OTHER; note = 2'-O-methyluridine
atggcgcagggaagatgaattgt

SEQ ID NO: 884 - RNA, 23 nt, synthetic construct
  source 1..23: mol_type = other RNA
  modified_base 1: mod_base = OTHER; note = 5'-(E)-vinylphosphonate 2'-O-methylated uridine with phosphorothioate linkage
  modified_base 2: mod_base = OTHER; note = 2'-fluoroadenosine with phosphorothioate linkage
  modified_base 3: mod_base = OTHER; note = 2'-O-methyladenosine
  modified_base 4: mod_base = OTHER; note = 2'-fluorouridine
  modified_base 5: mod_base = OTHER; note = 2'-O-methyladenosine
  modified_base 6: mod_base = OTHER; note = 2'-fluorocytidine
  modified_base 7: mod_base = OTHER; note = 2'-O-methyladenosine
  modified_base 8: mod_base = OTHER; note = 2'-fluoroadenosine
  modified_base 9: mod_base = OTHER; note = 2'-O-methyladenosine
  modified_base 10: mod_base = OTHER; note = 2'-fluoroguanosine
  modified_base 11: mod_base = OTHER; note = 2'-O-methyladenosine
  modified_base 12: mod_base = OTHER; note = 2'-fluorouridine
  modified_base 13: mod_base = OTHER; note = 2'-O-methylguanosine
  modified_base 14: mod_base = OTHER; note = 2'-fluoroguanosine
  modified_base 15: mod_base = OTHER; note = 2'-O-methylcytidine
  modified_base 16: mod_base = OTHER; note = 2'-fluoroguanosine
  modified_base 17: mod_base = OTHER; note = 2'-O-methylcytidine
  modified_base 18: mod_base = OTHER; note = 2'-fluoroadenosine
  modified_base 19: mod_base = OTHER; note = 2'-O-methylguanosine
  modified_base 20: mod_base = OTHER; note = 2'-fluoroguanosine
  modified_base 21: mod_base = OTHER; note = 2'-O-methylguanosine with phosphorothioate linkage
  modified_base 22: mod_base = OTHER; note = 2'-O-methyladenosine with phosphorothioate linkage
  modified_base 23: mod_base = OTHER; note = 2'-O-methyladenosine
taatacaaagatggcgcagggaa

SEQ ID NO: 885 - RNA, 23 nt, synthetic construct
  source 1..23: mol_type = other RNA
  modified_base 1: mod_base = OTHER; note = 5'-(E)-vinylphosphonate 2'-O-methylated adenosine with phosphorothioate linkage
  modified_base 2: mod_base = OTHER; note = 2'-fluoroguanosine with phosphorothioate linkage
  modified_base 3: mod_base = OTHER; note = 2'-O-methylguanosine
  modified_base 4: mod_base = OTHER; note = 2'-fluorocytidine
  modified_base 5: mod_base = OTHER; note = 2'-O-methyladenosine
  modified_base 6: mod_base = OTHER; note = 2'-fluorocytidine
  modified_base 7: mod_base = OTHER; note = 2'-O-methyluridine
  modified_base 8: mod_base = OTHER; note = 2'-fluorocytidine
  modified_base 9: mod_base = OTHER; note = 2'-O-methylguanosine
  modified_base 10: mod_base = OTHER; note = 2'-fluoroguanosine
  modified_base 11: mod_base = OTHER; note = 2'-O-methylguanosine
  modified_base 12: mod_base = OTHER; note = 2'-fluorouridine
  modified_base 13: mod_base = OTHER; note = 2'-O-methylguanosine
  modified_base 14: mod_base = OTHER; note = 2'-fluoroadenosine
  modified_base 15: mod_base = OTHER; note = 2'-O-methyluridine
  modified_base 16: mod_base = OTHER; note = 2'-fluoroguanosine
  modified_base 17: mod_base = OTHER; note = 2'-O-methylguanosine
  modified_base 18: mod_base = OTHER; note = 2'-fluoroguanosine
  modified_base 19: mod_base = OTHER; note = 2'-O-methyluridine
  modified_base 20: mod_base = OTHER; note = 2'-fluoroguanosine
  modified_base 21: mod_base = OTHER; note = 2'-O-methylguanosine with phosphorothioate linkage
  modified_base 22: mod_base = OTHER; note = 2'-O-methylcytidine with phosphorothioate linkage
  modified_base 23: mod_base = OTHER; note = 2'-O-methylcytidine
aggcactcgggtgatgggtggcc

SEQ ID NO: 886 - RNA, 23 nt, synthetic construct
  source 1..23: mol_type = other RNA
  modified_base 1: mod_base = OTHER; note = 5'-(E)-vinylphosphonate 2'-O-methylated uridine with phosphorothioate linkage
  modified_base 2: mod_base = OTHER; note = 2'-fluoroguanosine with phosphorothioate linkage
  modified_base 3: mod_base = OTHER; note = 2'-O-methylcytidine
  modified_base 4: mod_base = OTHER; note = 2'-fluoroguanosine
  modified_base 5: mod_base = OTHER; note = 2'-O-methyluridine
  modified_base 6: mod_base = OTHER; note = 2'-fluoroguanosine
  modified_base 7: mod_base = OTHER; note = 2'-O-methyluridine
  modified_base 8: mod_base = OTHER; note = 2'-fluorouridine
  modified_base 9: mod_base = OTHER; note = 2'-O-methylguanosine
  modified_base 10: mod_base = OTHER; note = 2'-fluorocytidine
  modified_base 11: mod_base = OTHER; note = 2'-O-methyladenosine
  modified_base 12: mod_base = OTHER; note = 2'-fluoroadenosine
  modified_base 13: mod_base = OTHER; note = 2'-O-methylguanosine
  modified_base 14: mod_base = OTHER; note = 2'-fluoroadenosine
  modified_base 15: mod_base = OTHER; note = 2'-O-methylguanosine
  modified_base 16: mod_base = OTHER; note = 2'-fluoroadenosine
  modified_base 17: mod_base = OTHER; note = 2'-O-methyladenosine
  modified_base 18: mod_base = OTHER; note = 2'-fluoroadenosine
  modified_base 19: mod_base = OTHER; note = 2'-O-methylcytidine
  modified_base 20: mod_base = OTHER; note = 2'-fluorocytidine
  modified_base 21: mod_base = OTHER; note = 2'-O-methyladenosine with phosphorothioate linkage
  modified_base 22: mod_base = OTHER; note = 2'-O-methyluridine with phosphorothioate linkage
  modified_base 23: mod_base = OTHER; note = 2'-O-methylguanosine
tgcgtgttgcaagagaaaccatg

SEQ ID NO: 887 - RNA, 23 nt, synthetic construct
  source 1..23: mol_type = other RNA
  modified_base 1: mod_base = OTHER; note = 5'-(E)-vinylphosphonate 2'-O-methylated uridine with phosphorothioate linkage
  modified_base 2: mod_base = OTHER; note = 2'-fluorocytidine with phosphorothioate linkage
  modified_base 3: mod_base = OTHER; note = 2'-O-methyluridine
  modified_base 4: mod_base = OTHER; note = 2'-fluorouridine
  modified_base 5: mod_base = OTHER; note = 2'-O-methyluridine
  modified_base 6: mod_base = OTHER; note = 2'-fluoroguanosine
  modified_base 7: mod_base = OTHER; note = 2'-O-methyladenosine
  modified_base 8: mod_base = OTHER; note = 2'-fluoroguanosine
  modified_base 9: mod_base = OTHER; note = 2'-O-methylcytidine
  modified_base 10: mod_base = OTHER; note = 2'-fluorouridine
  modified_base 11: mod_base = OTHER; note = 2'-O-methylguanosine
  modified_base 12: mod_base = OTHER; note = 2'-fluorocytidine
  modified_base 13: mod_base = OTHER; note = 2'-O-methylcytidine
  modified_base 14: mod_base = OTHER; note = 2'-fluorouridine
  modified_base 15: mod_base = OTHER; note = 2'-O-methylguanosine
  modified_base 16: mod_base = OTHER; note = 2'-fluoroguanosine
  modified_base 17: mod_base = OTHER; note = 2'-O-methyladenosine
  modified_base 18: mod_base = OTHER; note = 2'-fluoroguanosine
  modified_base 19: mod_base = OTHER; note = 2'-O-methylguanosine
  modified_base 20: mod_base = OTHER; note = 2'-fluorocytidine
  modified_base 21: mod_base = OTHER; note = 2'-O-methylcytidine with phosphorothioate linkage
  modified_base 22: mod_base = OTHER; note = 2'-O-methylguanosine with phosphorothioate linkage
  modified_base 23: mod_base = OTHER; note = 2'-O-methylcytidine
tctttgagctgcctggaggccgc

SEQ ID NO: 888 - RNA, 23 nt, synthetic construct
  source 1..23: mol_type = other RNA
  modified_base 1: mod_base = OTHER; note = 5'-(E)-vinylphosphonate 2'-O-methylated uridine with phosphorothioate linkage
  modified_base 2: mod_base = OTHER; note = 2'-fluorocytidine with phosphorothioate linkage
  modified_base 3: mod_base = OTHER; note = 2'-O-methyladenosine
  modified_base 4: mod_base = OTHER; note = 2'-fluorouridine
  modified_base 5: mod_base = OTHER; note = 2'-O-methylguanosine
  modified_base 6: mod_base = OTHER; note = 2'-fluorocytidine
  modified_base 7: mod_base = OTHER; note = 2'-O-methyladenosine
  modified_base 8: mod_base = OTHER; note = 2'-fluorocytidine
  modified_base 9: mod_base = OTHER; note = 2'-O-methyluridine
  modified_base 10: mod_base = OTHER; note = 2'-fluoroguanosine
  modified_base 11: mod_base = OTHER; note = 2'-O-methylguanosine
  modified_base 12: mod_base = OTHER; note = 2'-fluorouridine
  modified_base 13: mod_base = OTHER; note = 2'-O-methylguanosine
  modified_base 14: mod_base = OTHER; note = 2'-fluoroadenosine
  modified_base 15: mod_base = OTHER; note = 2'-O-methyladenosine
  modified_base 16: mod_base = OTHER; note = 2'-fluorouridine
  modified_base 17: mod_base = OTHER; note = 2'-O-methylguanosine
  modified_base 18: mod_base = OTHER; note = 2'-fluoroguanosine
  modified_base 19: mod_base = OTHER; note = 2'-O-methylcytidine
  modified_base 20: mod_base = OTHER; note = 2'-fluorouridine
  modified_base 21: mod_base = OTHER; note = 2'-O-methylguanosine with phosphorothioate linkage
  modified_base 22: mod_base = OTHER; note = 2'-O-methyluridine with phosphorothioate linkage
  modified_base 23: mod_base = OTHER; note = 2'-O-methyluridine
tcatgcactggtgaatggctgtt

SEQ ID NO: 889 - RNA, 23 nt, synthetic construct
  source 1..23: mol_type = other RNA
  modified_base 1: mod_base = OTHER; note = 5'-(E)-vinylphosphonate 2'-O-methylated uridine with phosphorothioate linkage
  modified_base 2: mod_base = OTHER; note = 2'-fluorouridine with phosphorothioate linkage
  modified_base 3: mod_base = OTHER; note = 2'-O-methylguanosine
  modified_base 4: mod_base = OTHER; note = 2'-fluorocytidine
  modified_base 5: mod_base = OTHER; note = 2'-O-methylcytidine
  modified_base 6: mod_base = OTHER; note = 2'-fluorouridine
  modified_base 7: mod_base = OTHER; note = 2'-O-methyluridine
  modified_base 8: mod_base = OTHER; note = 2'-fluoroguanosine
  modified_base 9: mod_base = OTHER; note = 2'-O-methylcytidine
  modified_base 10: mod_base = OTHER; note = 2'-fluorouridine
  modified_base 11: mod_base = OTHER; note = 2'-O-methyluridine
  modified_base 12: mod_base = OTHER; note = 2'-fluoroguanosine
  modified_base 13: mod_base = OTHER; note = 2'-O-methylcytidine
  modified_base 14: mod_base = OTHER; note = 2'-fluoroguanosine
  modified_base 15: mod_base = OTHER; note = 2'-O-methylguanosine
  modified_base 16: mod_base = OTHER; note = 2'-fluorocytidine
  modified_base 17: mod_base = OTHER; note = 2'-O-methylguanosine
  modified_base 18: mod_base = OTHER; note = 2'-fluoroadenosine
  modified_base 19: mod_base = OTHER; note = 2'-O-methylguanosine
  modified_base 20: mod_base = OTHER; note = 2'-fluoroadenosine
  modified_base 21: mod_base = OTHER; note = 2'-O-methylcytidine with phosphorothioate linkage
  modified_base 22: mod_base = OTHER; note = 2'-O-methyladenosine with phosphorothioate linkage
  modified_base 23: mod_base = OTHER; note = 2'-O-methyluridine
ttgccttgcttgcggcgagacat

SEQ ID NO: 890 - RNA, 23 nt, synthetic construct
  source 1..23: mol_type = other RNA
  modified_base 1: mod_base = OTHER; note = 5'-(E)-vinylphosphonate 2'-O-methylated guanosine with phosphorothioate linkage
  modified_base 2: mod_base = OTHER; note = 2'-fluoroadenosine with phosphorothioate linkage
  modified_base 3: mod_base = OTHER; note = 2'-O-methyladenosine
  modified_base 4: mod_base = OTHER; note = 2'-fluorouridine
  modified_base 5: mod_base = OTHER; note = 2'-O-methylguanosine
  modified_base 6: mod_base = OTHER; note = 2'-fluoroguanosine
  modified_base 7: mod_base = OTHER; note = 2'-O-methyluridine
  modified_base 8: mod_base = OTHER; note = 2'-fluorouridine
  modified_base 9: mod_base = OTHER; note = 2'-O-methylguanosine
  modified_base 10: mod_base = OTHER; note = 2'-fluorocytidine
  modified_base 11: mod_base = OTHER; note = 2'-O-methyladenosine
  modified_base 12: mod_base = OTHER; note = 2'-fluoroguanosine
  modified_base 13: mod_base = OTHER; note = 2'-O-methyluridine
  modified_base 14: mod_base = OTHER; note = 2'-fluoroadenosine
  modified_base 15: mod_base = OTHER; note = 2'-O-methyladenosine
  modified_base 16: mod_base = OTHER; note = 2'-fluorocytidine
  modified_base 17: mod_base = OTHER; note = 2'-O-methylcytidine
  modified_base 18: mod_base = OTHER; note = 2'-fluorouridine
  modified_base 19: mod_base = OTHER; note = 2'-O-methyluridine
  modified_base 20: mod_base = OTHER; note = 2'-fluorouridine
  modified_base 21: mod_base = OTHER; note = 2'-O-methylguanosine with phosphorothioate linkage
  modified_base 22: mod_base = OTHER; note = 2'-O-methylcytidine with phosphorothioate linkage
  modified_base 23: mod_base = OTHER; note = 2'-O-methyladenosine
gaatggttgcagtaacctttgca

SEQ ID NO: 891 - RNA, 23 nt, synthetic construct
  source 1..23: mol_type = other RNA
  modified_base 1: mod_base = OTHER; note = 5'-(E)-vinylphosphonate 2'-O-methylated adenosine with phosphorothioate linkage
  modified_base 2: mod_base = OTHER; note = 2'-fluoroadenosine with phosphorothioate linkage
  modified_base 3: mod_base = OTHER; note = 2'-O-methylcytidine
  modified_base 4: mod_base = OTHER; note = 2'-fluorocytidine
  modified_base 5: mod_base = OTHER; note = 2'-O-methylguanosine
  modified_base 6: mod_base = OTHER; note = 2'-fluorocytidine
  modified_base 7: mod_base = OTHER; note = 2'-O-methyladenosine
  modified_base 8: mod_base = OTHER; note = 2'-fluoroguanosine
  modified_base 9: mod_base = OTHER; note = 2'-O-methylcytidine
  modified_base 10: mod_base = OTHER; note = 2'-fluoroadenosine
  modified_base 11: mod_base = OTHER; note = 2'-O-methylcytidine
  modified_base 12: mod_base = OTHER; note = 2'-fluorocytidine
  modified_base 13: mod_base = OTHER; note = 2'-O-methylcytidine
  modified_base 14: mod_base = OTHER; note = 2'-fluorouridine
  modified_base 15: mod_base = OTHER; note = 2'-O-methylguanosine
  modified_base 16: mod_base = OTHER; note = 2'-fluorouridine
  modified_base 17: mod_base = OTHER; note = 2'-O-methylcytidine
  modified_base 18: mod_base = OTHER; note = 2'-fluoroadenosine
  modified_base 19: mod_base = OTHER; note = 2'-O-methyladenosine
  modified_base 20: mod_base = OTHER; note = 2'-fluoroadenosine
  modified_base 21: mod_base = OTHER; note = 2'-O-methylguanosine with phosphorothioate linkage
  modified_base 22: mod_base = OTHER; note = 2'-O-methylguanosine with phosphorothioate linkage
  modified_base 23: mod_base = OTHER; note = 2'-O-methylcytidine
aaccgcagcaccctgtcaaaggc

SEQ ID NO: 892 - RNA, 23 nt, synthetic construct
  source 1..23: mol_type = other RNA
  modified_base 1: mod_base = OTHER; note = 5'-(E)-vinylphosphonate 2'-O-methylated adenosine with phosphorothioate linkage
  modified_base 2: mod_base = OTHER; note = 2'-fluoroguanosine with phosphorothioate linkage
  modified_base 3: mod_base = OTHER; note = 2'-O-methyladenosine
  modified_base 4: mod_base = OTHER; note = 2'-fluorouridine
  modified_base 5: mod_base = OTHER; note = 2'-O-methylguanosine
  modified_base 6: mod_base = OTHER; note = 2'-fluoroguanosine
  modified_base 7: mod_base = OTHER; note = 2'-O-methylcytidine
  modified_base 8: mod_base = OTHER; note = 2'-fluoroguanosine
  modified_base 9: mod_base = OTHER; note = 2'-O-methylcytidine
  modified_base 10: mod_base = OTHER; note = 2'-fluoroadenosine
  modified_base 11: mod_base = OTHER; note = 2'-O-methylguanosine
  modified_base 12: mod_base = OTHER; note = 2'-fluoroguanosine
  modified_base 13: mod_base = OTHER; note = 2'-O-methylguanosine
  modified_base 14: mod_base = OTHER; note = 2'-fluoroadenosine
  modified_base 15: mod_base = OTHER; note = 2'-O-methyladenosine
  modified_base 16: mod_base = OTHER; note = 2'-fluoroguanosine
  modified_base 17: mod_base = OTHER; note = 2'-O-methyladenosine
  modified_base 18: mod_base = OTHER; note = 2'-fluorouridine
  modified_base 19: mod_base = OTHER; note = 2'-O-methylguanosine
  modified_base 20: mod_base = OTHER; note = 2'-fluoroadenosine
  modified_base 21: mod_base = OTHER; note = 2'-O-methyladenosine with phosphorothioate linkage
  modified_base 22: mod_base = OTHER; note = 2'-O-methyluridine with phosphorothioate linkage
  modified_base 23: mod_base = OTHER; note = 2'-O-methyluridine
agatggcgcagggaagatgaatt

SEQ ID NO: 893 - RNA, 23 nt, synthetic construct
  source 1..23: mol_type = other RNA
  modified_base 1: mod_base = OTHER; note = 5'-(E)-vinylphosphonate 2'-O-methylated adenosine with phosphorothioate linkage
  modified_base 2: mod_base = OTHER; note = 2'-fluorocytidine with phosphorothioate linkage
  modified_base 3: mod_base = OTHER; note = 2'-O-methylcytidine
  modified_base 4: mod_base = OTHER; note = 2'-fluorouridine
  modified_base 5: mod_base = OTHER; note = 2'-O-methyladenosine
  modified_base 6: mod_base = OTHER; note = 2'-fluoroguanosine
  modified_base 7: mod_base = OTHER; note = 2'-O-methyluridine
  modified_base 8: mod_base = OTHER; note = 2'-fluorocytidine
  modified_base 9: mod_base = OTHER; note = 2'-O-methylcytidine
  modified_base 10: mod_base = OTHER; note = 2'-fluorouridine
  modified_base 11: mod_base = OTHER; note = 2'-O-methylguanosine
  modified_base 12: mod_base = OTHER; note = 2'-fluoroadenosine
  modified_base 13: mod_base = OTHER; note = 2'-O-methyladenosine
  modified_base 14: mod_base = OTHER; note = 2'-fluoroguanosine
  modified_base 15: mod_base = OTHER; note = 2'-O-methylguanosine
  modified_base 16: mod_base = OTHER; note = 2'-fluoroguanosine
  modified_base 17: mod_base = OTHER; note = 2'-O-methyladenosine
  modified_base 18: mod_base = OTHER; note = 2'-fluorouridine
  modified_base 19: mod_base = OTHER; note = 2'-O-methyladenosine
  modified_base 20: mod_base = OTHER; note = 2'-fluorocytidine
  modified_base 21: mod_base = OTHER; note = 2'-O-methylcytidine with phosphorothioate linkage
  modified_base 22: mod_base = OTHER; note = 2'-O-methyladenosine with phosphorothioate linkage
  modified_base 23: mod_base = OTHER; note = 2'-O-methyladenosine
acctagtcctgaagggataccaa

SEQ ID NO: 894 - RNA, 23 nt, synthetic construct
  source 1..23: mol_type = other RNA
  modified_base 1: mod_base = OTHER; note = 5'-(E)-vinylphosphonate 2'-O-methylated guanosine with phosphorothioate linkage
  modified_base 2: mod_base = OTHER; note = 2'-fluorocytidine with phosphorothioate linkage
  modified_base 3: mod_base = OTHER; note = 2'-O-methyladenosine
  modified_base 4: mod_base = OTHER; note = 2'-fluorocytidine
  modified_base 5: mod_base = OTHER; note = 2'-O-methyladenosine
  modified_base 6: mod_base = OTHER; note = 2'-fluoroguanosine
  modified_base 7: mod_base = OTHER; note = 2'-O-methylguanosine
  modified_base 8: mod_base = OTHER; note = 2'-fluorocytidine
  modified_base 9: mod_base = OTHER; note = 2'-O-methyladenosine
  modified_base 10: mod_base = OTHER; note = 2'-fluorouridine
  modified_base 11: mod_base = OTHER; note = 2'-O-methyladenosine
  modified_base 12: mod_base = OTHER; note = 2'-fluoroguanosine
  modified_base 13: mod_base = OTHER; note = 2'-O-methyluridine
  modified_base 14: mod_base = OTHER; note = 2'-fluorouridine
  modified_base 15: mod_base = OTHER; note = 2'-O-methylguanosine
  modified_base 16: mod_base = OTHER; note = 2'-fluorocytidine
  modified_base 17: mod_base = OTHER; note = 2'-O-methyladenosine
  modified_base 18: mod_base = OTHER; note = 2'-fluorocytidine
  modified_base 19: mod_base = OTHER; note = 2'-O-methyladenosine
  modified_base 20: mod_base = OTHER; note = 2'-fluoroguanosine
  modified_base 21: mod_base = OTHER; note = 2'-O-methylcytidine with phosphorothioate linkage
  modified_base 22: mod_base = OTHER; note = 2'-O-methyluridine with phosphorothioate linkage
  modified_base 23: mod_base = OTHER; note = 2'-O-methylcytidine
gcacaggcatagttgcacagctc

SEQ ID NO: 895 - RNA, 23 nt, synthetic construct
  source 1..23: mol_type = other RNA
  modified_base 1: mod_base = OTHER; note = 5'-(E)-vinylphosphonate 2'-O-methylated guanosine with phosphorothioate linkage
  modified_base 2: mod_base = OTHER; note = 2'-fluorouridine with phosphorothioate linkage
  modified_base 3: mod_base = OTHER; note = 2'-O-methyladenosine
  modified_base 4: mod_base = OTHER; note = 2'-fluoroguanosine
  modified_base 5: mod_base = OTHER; note = 2'-O-methylcytidine
  modified_base 6: mod_base = OTHER; note = 2'-fluorouridine
  modified_base 7: mod_base = OTHER; note = 2'-O-methylguanosine
  modified_base 8: mod_base = OTHER; note = 2'-fluorocytidine
  modified_base 9: mod_base = OTHER; note = 2'-O-methyluridine
  modified_base 10: mod_base = OTHER; note = 2'-fluoroguanosine
  modified_base 11: mod_base = OTHER; note = 2'-O-methylguanosine
  modified_base 12: mod_base = OTHER; note = 2'-fluoroguanosine
  modified_base 13: mod_base = OTHER; note = 2'-O-methylcytidine
  modified_base 14: mod_base = OTHER; note = 2'-fluorouridine
  modified_base 15: mod_base = OTHER; note = 2'-O-methylcytidine
  modified_base 16: mod_base = OTHER; note = 2'-fluoroadenosine
  modified_base 17: mod_base = OTHER; note = 2'-O-methyluridine
  modified_base 18: mod_base = OTHER; note = 2'-fluorocytidine
  modified_base 19: mod_base = OTHER; note = 2'-O-methyluridine
  modified_base 20: mod_base = OTHER; note = 2'-fluorouridine
  modified_base 21: mod_base = OTHER; note = 2'-O-methyluridine with phosphorothioate linkage
  modified_base 22: mod_base = OTHER; note = 2'-O-methyladenosine with phosphorothioate linkage
  modified_base 23: mod_base = OTHER; note = 2'-O-methylcytidine
gtagctgctgggctcatctttac

SEQ ID NO: 896 - RNA, 23 nt, synthetic construct
  source 1..23: mol_type = other RNA
  modified_base 1: mod_base = OTHER; note = 5'-(E)-vinylphosphonate 2'-O-methylated adenosine with phosphorothioate linkage
  modified_base 2: mod_base = OTHER; note = 2'-fluoroguanosine with phosphorothioate linkage
  modified_base 3: mod_base = OTHER; note = 2'-O-methylcytidine
  modified_base 4: mod_base = OTHER; note = 2'-fluoroadenosine
  modified_base 5: mod_base = OTHER; note = 2'-O-methylcytidine
  modified_base 6: mod_base = OTHER; note = 2'-fluorocytidine
  modified_base 7: mod_base = OTHER; note = 2'-O-methylcytidine
  modified_base 8: mod_base = OTHER; note = 2'-fluorouridine
  modified_base 9: mod_base = OTHER; note = 2'-O-methylguanosine
  modified_base 10: mod_base = OTHER; note = 2'-fluorouridine
  modified_base 11: mod_base = OTHER; note = 2'-O-methylcytidine
  modified_base 12: mod_base = OTHER; note = 2'-fluoroadenosine
  modified_base 13: mod_base = OTHER; note = 2'-O-methyladenosine
  modified_base 14: mod_base = OTHER; note = 2'-fluoroadenosine
  modified_base 15: mod_base = OTHER; note = 2'-O-methylguanosine
  modified_base 16: mod_base = OTHER; note = 2'-fluoroguanosine
  modified_base 17: mod_base = OTHER; note = 2'-O-methylcytidine
  modified_base 18: mod_base = OTHER; note = 2'-fluoroadenosine
  modified_base 19: mod_base = OTHER; note = 2'-O-methylcytidine
  modified_base 20: mod_base = OTHER; note = 2'-fluorouridine
  modified_base 21: mod_base = OTHER; note = 2'-O-methylcytidine with phosphorothioate linkage
  modified_base 22: mod_base = OTHER; note = 2'-O-methylguanosine with phosphorothioate linkage
  modified_base 23: mod_base = OTHER; note = 2'-O-methylguanosine
agcaccctgtcaaaggcactcgg

SEQ ID NO: 897 - RNA, 23 nt, synthetic construct
  source 1..23: mol_type = other RNA
  modified_base 1: mod_base = OTHER; note = 5'-(E)-vinylphosphonate 2'-O-methylated guanosine with phosphorothioate linkage
  modified_base 2: mod_base = OTHER; note = 2'-fluorouridine with phosphorothioate linkage
  modified_base 3: mod_base = OTHER; note = 2'-O-methylguanosine
  modified_base 4: mod_base = OTHER; note = 2'-fluorouridine
  modified_base 5: mod_base = OTHER; note = 2'-O-methylcytidine
  modified_base 6: mod_base = OTHER; note = 2'-fluoroguanosine
  modified_base 7: mod_base = OTHER; note = 2'-O-methylcytidine
  modified_base 8: mod_base = OTHER; note = 2'-fluorouridine
  modified_base 9: mod_base = OTHER; note = 2'-O-methylguanosine
  modified_base 10: mod_base = OTHER; note = 2'-fluorocytidine
  modified_base 11: mod_base = OTHER; note = 2'-O-methylguanosine
  modified_base 12: mod_base = OTHER; note = 2'-fluorouridine
  modified_base 13: mod_base = OTHER; note = 2'-O-methylcytidine
  modified_base 14: mod_base = OTHER; note = 2'-fluorouridine
  modified_base 15: mod_base = OTHER; note = 2'-O-methylguanosine
  modified_base 16: mod_base = OTHER; note = 2'-fluorocytidine
  modified_base 17: mod_base = OTHER; note = 2'-O-methylcytidine
  modified_base 18: mod_base = OTHER; note = 2'-fluorocytidine
  modified_base 19: mod_base = OTHER; note = 2'-O-methyluridine
  modified_base 20: mod_base = OTHER; note = 2'-fluorocytidine
  modified_base 21: mod_base = OTHER; note = 2'-O-methyluridine with phosphorothioate linkage
  modified_base 22: mod_base = OTHER; note = 2'-O-methyluridine with phosphorothioate linkage
  modified_base 23: mod_base = OTHER; note = 2'-O-methyluridine
gtgtcgctgcgtctgccctcttt

SEQ ID NO: 898 - RNA, 23 nt, synthetic construct
  source 1..23: mol_type = other RNA
  modified_base 1: mod_base = OTHER; note = 5'-(E)-vinylphosphonate 2'-O-methylated uridine with phosphorothioate linkage
  modified_base 2: mod_base = OTHER; note = 2'-fluoroadenosine with phosphorothioate linkage
  modified_base 3: mod_base = OTHER; note = 2'-O-methyladenosine
  modified_base 4: mod_base = OTHER; note = 2'-fluoroadenosine
  modified_base 5: mod_base = OTHER; note = 2'-O-methylguanosine
  modified_base 6: mod_base = OTHER; note = 2'-fluoroadenosine
  modified_base 7: mod_base = OTHER; note = 2'-O-methyluridine
  modified_base 8: mod_base = OTHER; note = 2'-fluoroguanosine
  modified_base 9: mod_base = OTHER; note = 2'-O-methylguanosine
  modified_base 10: mod_base = OTHER; note = 2'-fluorocytidine
  modified_base 11: mod_base = OTHER; note = 2'-O-methylguanosine
  modified_base 12: mod_base = OTHER; note = 2'-fluorocytidine
  modified_base 13: mod_base = OTHER; note = 2'-O-methyladenosine
  modified_base 14: mod_base = OTHER; note = 2'-fluoroguanosine
  modified_base 15: mod_base = OTHER; note = 2'-O-methylguanosine
  modified_base 16: mod_base = OTHER; note = 2'-fluoroguanosine
  modified_base 17: mod_base = OTHER; note = 2'-O-methyladenosine
  modified_base 18: mod_base = OTHER; note = 2'-fluoroadenosine
  modified_base 19: mod_base = OTHER; note = 2'-O-methylguanosine
  modified_base 20: mod_base = OTHER; note = 2'-fluoroadenosine
  modified_base 21: mod_base = OTHER; note = 2'-O-methyluridine with phosphorothioate linkage
  modified_base 22: mod_base = OTHER; note = 2'-O-methylguanosine with phosphorothioate linkage
  modified_base 23: mod_base = OTHER; note = 2'-O-methyladenosine
taaagatggcgcagggaagatga

SEQ ID NO: 899 - RNA, 23 nt, synthetic construct
  source 1..23: mol_type = other RNA
  modified_base 1: mod_base = OTHER; note = 5'-(E)-vinylphosphonate 2'-O-methylated uridine with phosphorothioate linkage
  modified_base 2: mod_base = OTHER; note = 2'-fluoroguanosine with phosphorothioate linkage
  modified_base 3: mod_base = OTHER; note = 2'-O-methylguanosine
  modified_base 4: mod_base = OTHER; note = 2'-fluorouridine
  modified_base 5: mod_base = OTHER; note = 2'-O-methyluridine
  modified_base 6: mod_base = OTHER; note = 2'-fluorocytidine
  modified_base 7: mod_base = OTHER; note = 2'-O-methyladenosine
  modified_base 8: mod_base = OTHER; note = 2'-fluorouridine
  modified_base 9: mod_base = OTHER; note = 2'-O-methylcytidine
  modified_base 10: mod_base = OTHER; note = 2'-fluoroadenosine
  modified_base 11: mod_base = OTHER; note = 2'-O-methyluridine
  modified_base 12: mod_base = OTHER; note = 2'-fluorocytidine
  modified_base 13: mod_base = OTHER; note = 2'-O-methyluridine
  modified_base 14: mod_base = OTHER; note = 2'-fluoroguanosine
  modified_base 15: mod_base = OTHER; note = 2'-O-methyluridine
  modified_base 16: mod_base = OTHER; note = 2'-fluoroadenosine
  modified_base 17: mod_base = OTHER; note = 2'-O-methyladenosine
  modified_base 18: mod_base = OTHER; note = 2'-fluoroguanosine
  modified_base 19: mod_base = OTHER; note = 2'-O-methyladenosine
  modified_base 20: mod_base = OTHER; note = 2'-fluoroadenosine
  modified_base 21: mod_base = OTHER; note = 2'-O-methyluridine with phosphorothioate linkage
  modified_base 22: mod_base = OTHER; note = 2'-O-methylguanosine with phosphorothioate linkage
  modified_base 23: mod_base = OTHER; note = 2'-O-methylguanosine
tggttcatcatctgtaagaatgg

SEQ ID NO: 900 - RNA, 23 nt, synthetic construct
  source 1..23: mol_type = other RNA
  modified_base 1: mod_base = OTHER; note = 5'-(E)-vinylphosphonate 2'-O-methylated uridine with phosphorothioate linkage
  modified_base 2: mod_base = OTHER; note = 2'-fluorouridine with phosphorothioate linkage
  modified_base 3: mod_base = OTHER; note = 2'-O-methylguanosine
  modified_base 4: mod_base = OTHER; note = 2'-fluorocytidine
  modified_base 5: mod_base = OTHER; note = 2'-O-methyladenosine
  modified_base 6: mod_base = OTHER; note = 2'-fluoroguanosine
  modified_base 7: mod_base = OTHER; note = 2'-O-methyluridine
  modified_base 8: mod_base = OTHER; note = 2'-fluoroadenosine
  modified_base 9: mod_base = OTHER; note = 2'-O-methyladenosine
  modified_base 10: mod_base = OTHER; note = 2'-fluorocytidine
  modified_base 11: mod_base = OTHER; note = 2'-O-methylcytidine
  modified_base 12: mod_base = OTHER; note = 2'-fluorouridine
  modified_base 13: mod_base = OTHER; note = 2'-O-methyluridine
  modified_base 14: mod_base = OTHER; note = 2'-fluorouridine
  modified_base 15: mod_base = OTHER; note = 2'-O-methylguanosine
  modified_base 16: mod_base = OTHER; note = 2'-fluorocytidine
  modified_base 17: mod_base = OTHER; note = 2'-O-methyladenosine
  modified_base 18: mod_base = OTHER; note = 2'-fluorouridine
  modified_base 19: mod_base = OTHER; note = 2'-O-methyladenosine
  modified_base 20: mod_base = OTHER; note = 2'-fluoroguanosine
  modified_base 21: mod_base = OTHER; note = 2'-O-methylguanosine with phosphorothioate linkage
  modified_base 22: mod_base = OTHER; note = 2'-O-methylguanosine with phosphorothioate linkage
  modified_base 23: mod_base = OTHER; note = 2'-O-methylcytidine
ttgcagtaacctttgcatagggc

SEQ ID NO: 901 - RNA, 23 nt, synthetic construct
  source 1..23: mol_type = other RNA
  modified_base 1: mod_base = OTHER; note = 5'-(E)-vinylphosphonate 2'-O-methylated uridine with phosphorothioate linkage
  modified_base 2: mod_base = OTHER; note = 2'-fluorouridine with phosphorothioate linkage
  modified_base 3: mod_base = OTHER; note = 2'-O-methylcytidine
  modified_base 4: mod_base = OTHER; note = 2'-fluoroguanosine
  modified_base 5: mod_base = OTHER; note = 2'-O-methylcytidine
  modified_base 6: mod_base = OTHER; note = 2'-fluoroadenosine
  modified_base 7: mod_base = OTHER; note = 2'-O-methyluridine
  modified_base 8: mod_base = OTHER; note = 2'-fluoroguanosine
  modified_base 9: mod_base = OTHER; note = 2'-O-methyladenosine
  modified_base 10: mod_base = OTHER; note = 2'-fluorocytidine
  modified_base 11: mod_base = OTHER; note = 2'-O-methyluridine
  modified_base 12: mod_base = OTHER; note = 2'-fluorouridine
  modified_base 13: mod_base = OTHER; note = 2'-O-methylguanosine
  modified_base 14: mod_base = OTHER; note = 2'-fluoroguanosine
  modified_base 15: mod_base = OTHER; note = 2'-O-methyladenosine
  modified_base 16: mod_base = OTHER; note = 2'-fluorocytidine
  modified_base 17: mod_base = OTHER; note = 2'-O-methyluridine
  modified_base 18: mod_base = OTHER; note = 2'-fluorouridine
  modified_base 19: mod_base = OTHER; note = 2'-O-methylguanosine
  modified_base 20: mod_base = OTHER; note = 2'-fluoroadenosine
  modified_base 21: mod_base = OTHER; note = 2'-O-methylcytidine with phosphorothioate linkage
  modified_base 22: mod_base = OTHER; note = 2'-O-methylcytidine with phosphorothioate linkage
  modified_base 23: mod_base = OTHER; note = 2'-O-methylguanosine
ttcgcatgacttggacttgaccg

SEQ ID NO: 902 - RNA, 23 nt, synthetic construct
  source 1..23: mol_type = other RNA
  modified_base 1: mod_base = OTHER; note = 5'-(E)-vinylphosphonate 2'-O-methylated uridine with phosphorothioate linkage
  modified_base 2: mod_base = OTHER; note = 2'-fluorouridine with phosphorothioate linkage
  modified_base 3: mod_base = OTHER; note = 2'-O-methylguanosine
  modified_base 4: mod_base = OTHER; note = 2'-fluorouridine
  modified_base 5: mod_base = OTHER; note = 2'-O-methylcytidine
  modified_base 6: mod_base = OTHER; note = 2'-fluoroadenosine
  modified_base 7: mod_base = OTHER; note = 2'-O-methyladenosine
  modified_base 8: mod_base = OTHER; note = 2'-fluoroadenosine
  modified_base 9: mod_base = OTHER; note = 2'-O-methylguanosine
  modified_base 10: mod_base = OTHER; note = 2'-fluoroguanosine
  modified_base 11: mod_base = OTHER; note = 2'-O-methylcytidine
  modified_base 12: mod_base = OTHER; note = 2'-fluoroadenosine
  modified_base 13: mod_base = OTHER; note = 2'-O-methylcytidine
  modified_base 14: mod_base = OTHER; note = 2'-fluorouridine
  modified_base 15: mod_base = OTHER; note = 2'-O-methylcytidine
  modified_base 16: mod_base = OTHER; note = 2'-fluoroguanosine
  modified_base 17: mod_base = OTHER; note = 2'-O-methylguanosine
  modified_base 18: mod_base = OTHER; note = 2'-fluoroguanosine
  modified_base 19: mod_base = OTHER; note = 2'-O-methyluridine
  modified_base 20: mod_base = OTHER; note = 2'-fluoroguanosine
  modified_base 21: mod_base = OTHER; note = 2'-O-methyladenosine with phosphorothioate linkage
  modified_base 22: mod_base = OTHER; note = 2'-O-methyluridine with phosphorothioate linkage
  modified_base 23: mod_base = OTHER; note = 2'-O-methylguanosine
ttgtcaaaggcactcgggtgatg

SEQ ID NO: 903 - RNA, 23 nt, synthetic construct
  source 1..23: mol_type = other RNA
  modified_base 1: mod_base = OTHER; note = 5'-(E)-vinylphosphonate 2'-O-methylated adenosine with phosphorothioate linkage
  modified_base 2: mod_base = OTHER; note = 2'-fluoroguanosine with phosphorothioate linkage
  modified_base 3: mod_base = OTHER; note = 2'-O-methyluridine
  modified_base 4: mod_base = OTHER; note = 2'-fluoroguanosine
  modified_base 5: mod_base = OTHER; note = 2'-O-methyladenosine
  modified_base 6: mod_base = OTHER; note = 2'-fluorouridine
  modified_base 7: mod_base = OTHER; note = 2'-O-methylguanosine
  modified_base 8: mod_base = OTHER; note = 2'-fluorouridine
  modified_base 9: mod_base = OTHER; note = 2'-O-methylcytidine
  modified_base 10: mod_base = OTHER; note = 2'-fluorouridine
  modified_base 11: mod_base = OTHER; note = 2'-O-methylcytidine
  modified_base 12: mod_base = OTHER; note = 2'-fluoroguanosine
  modified_base 13: mod_base = OTHER; note = 2'-O-methylguanosine
  modified_base 14: mod_base = OTHER; note = 2'-fluorouridine
  modified_base 15: mod_base = OTHER; note = 2'-O-methylguanosine
  modified_base 16: mod_base = OTHER; note = 2'-fluoroguanosine
  modified_base 17: mod_base = OTHER; note = 2'-O-methyluridine
  modified_base 18: mod_base = OTHER; note = 2'-fluoroguanosine
  modified_base 19: mod_base = OTHER; note = 2'-O-methylguanosine
  modified_base 20: mod_base = OTHER; note = 2'-fluoroadenosine
  modified_base 21: mod_base = OTHER; note = 2'-O-methylcytidine with phosphorothioate linkage
  modified_base 22: mod_base = OTHER; note = 2'-O-methyluridine with phosphorothioate linkage
  modified_base 23: mod_base = OTHER; note = 2'-O-methyladenosine
agtgatgtctcggtggtggacta

SEQ ID NO: 904 - RNA, 23 nt, synthetic construct
  source 1..23: mol_type = other RNA
  modified_base 1: mod_base = OTHER; note = 5'-(E)-vinylphosphonate 2'-O-methylated guanosine with phosphorothioate linkage
  modified_base 2: mod_base = OTHER; note = 2'-fluoroguanosine with phosphorothioate linkage
  modified_base 3: mod_base = OTHER; note = 2'-O-methylcytidine
  modified_base 4: mod_base = OTHER; note = 2'-fluoroadenosine
  modified_base 5: mod_base = OTHER; note = 2'-O-methyladenosine
  modified_base 6: mod_base = OTHER; note = 2'-fluoroadenosine
  modified_base 7: mod_base = OTHER; note = 2'-O-methyluridine
  modified_base 8: mod_base = OTHER; note = 2'-fluorouridine
  modified_base 9: mod_base = OTHER; note = 2'-O-methylcytidine
  modified_base 10: mod_base = OTHER; note = 2'-fluorocytidine
  modified_base 11: mod_base = OTHER; note = 2'-O-methyluridine
  modified_base 12: mod_base = OTHER; note = 2'-fluorocytidine
  modified_base 13: mod_base = OTHER; note = 2'-O-methyluridine
  modified_base 14: mod_base = OTHER; note = 2'-fluoroadenosine
  modified_base 15: mod_base = OTHER; note = 2'-O-methylguanosine
  modified_base 16: mod_base = OTHER; note = 2'-fluoroadenosine
  modified_base 17: mod_base = OTHER; note = 2'-O-methyluridine
  modified_base 18: mod_base = OTHER; note = 2'-fluoroguanosine
  modified_base 19: mod_base = OTHER; note = 2'-O-methyladenosine
  modified_base 20: mod_base = OTHER; note = 2'-fluorocytidine
  modified_base 21: mod_base = OTHER; note = 2'-O-methylguanosine with phosphorothioate linkage
  modified_base 22: mod_base = OTHER; note = 2'-O-methyluridine with phosphorothioate linkage
  modified_base 23: mod_base = OTHER; note = 2'-O-methyluridine
ggcaaattcctctagatgacgtt

SEQ ID NO: 905 - RNA, 23 nt, synthetic construct
  source 1..23: mol_type = other RNA
  modified_base 1: mod_base = OTHER; note = 5'-(E)-vinylphosphonate 2'-O-methylated uridine with phosphorothioate linkage
  modified_base 2: mod_base = OTHER; note = 2'-fluoroguanosine with phosphorothioate linkage
  modified_base 3: mod_base = OTHER; note = 2'-O-methylguanosine
  modified_base 4: mod_base = OTHER; note = 2'-fluoroguanosine
  modified_base 5: mod_base = OTHER; note = 2'-O-methylcytidine
  modified_base 6: mod_base = OTHER; note = 2'-fluoroadenosine
  modified_base 7: mod_base = OTHER; note = 2'-O-methylcytidine
  modified_base 8: mod_base = OTHER; note = 2'-fluoroadenosine
  modified_base 9: mod_base = OTHER; note = 2'-O-methylguanosine
  modified_base 10: mod_base = OTHER; note = 2'-fluoroguanosine
  modified_base 11: mod_base = OTHER; note = 2'-O-methylcytidine
  modified_base 12: mod_base = OTHER; note = 2'-fluoroadenosine
  modified_base 13: mod_base = OTHER; note = 2'-O-methyluridine
  modified_base 14: mod_base = OTHER; note = 2'-fluoroadenosine
  modified_base 15: mod_base = OTHER; note = 2'-O-methylguanosine
  modified_base 16: mod_base = OTHER; note = 2'-fluorouridine
  modified_base 17: mod_base = OTHER; note = 2'-O-methyluridine
  modified_base 18: mod_base = OTHER; note = 2'-fluoroguanosine
  modified_base 19: mod_base = OTHER; note = 2'-O-methylcytidine
  modified_base 20: mod_base = OTHER; note = 2'-fluoroadenosine
  modified_base 21: mod_base = OTHER; note = 2'-O-methylcytidine with phosphorothioate linkage
  modified_base 22: mod_base = OTHER; note = 2'-O-methyladenosine with phosphorothioate linkage
  modified_base 23: mod_base = OTHER; note = 2'-O-methylguanosine
tgggcacaggcatagttgcacag

SEQ ID NO: 906 - RNA, 23 nt, synthetic construct
  source 1..23: mol_type = other RNA
  modified_base 1: mod_base = OTHER; note = 5'-(E)-vinylphosphonate 2'-O-methylated adenosine with phosphorothioate linkage
  modified_base 2: mod_base = OTHER; note = 2'-fluoroadenosine with phosphorothioate linkage
  modified_base 3: mod_base = OTHER; note = 2'-O-methylguanosine
  modified_base 4: mod_base = OTHER; note = 2'-fluoroadenosine
  modified_base 5: mod_base = OTHER; note = 2'-O-methyluridine
  modified_base 6: mod_base = OTHER; note = 2'-fluoroguanosine
  modified_base 7: mod_base = OTHER; note = 2'-O-methyladenosine
  modified_base 8: mod_base = OTHER; note = 2'-fluoroadenosine
  modified_base 9: mod_base = OTHER; note = 2'-O-methyluridine
  modified_base 10: mod_base = OTHER; note = 2'-fluorouridine
  modified_base 11: mod_base = OTHER; note = 2'-O-methylguanosine
  modified_base 12: mod_base = OTHER; note = 2'-fluorouridine
  modified_base 13: mod_base = OTHER; note = 2'-O-methylguanosine
  modified_base 14: mod_base = OTHER; note = 2'-fluoroguanosine
  modified_base 15: mod_base = OTHER; note = 2'-O-methylguanosine
  modified_base 16: mod_base = OTHER; note = 2'-fluoroadenosine
  modified_base 17: mod_base = OTHER; note = 2'-O-methylguanosine
  modified_base 18: mod_base = OTHER; note = 2'-fluoroadenosine
  modified_base 19: mod_base = OTHER; note = 2'-O-methylguanosine
  modified_base 20: mod_base = OTHER; note = 2'-fluorocytidine
  modified_base 21: mod_base = OTHER; note = 2'-O-methylcytidine with phosphorothioate linkage
  modified_base 22: mod_base = OTHER; note = 2'-O-methylguanosine with phosphorothioate linkage
  modified_base 23: mod_base = OTHER; note = 2'-O-methyluridine
aagatgaattgtgggagagccgt

SEQ ID NO: 907 - RNA, 23 nt, synthetic construct
  source 1..23: mol_type = other RNA
  modified_base 1: mod_base = OTHER; note = 5'-(E)-vinylphosphonate 2'-O-methylated guanosine with phosphorothioate linkage
  modified_base 2: mod_base = OTHER; note = 2'-fluorocytidine with phosphorothioate linkage
  modified_base 3: mod_base = OTHER; note = 2'-O-methylguanosine
  modified_base 4: mod_base = OTHER; note = 2'-fluoroadenosine
  modified_base 5: mod_base = OTHER; note = 2'-O-methylguanosine
  modified_base 6: mod_base = OTHER; note = 2'-fluoroadenosine
  modified_base 7: mod_base = OTHER; note = 2'-O-methyladenosine
  modified_base 8: mod_base = OTHER; note = 2'-fluorouridine
  modified_base 9: mod_base = OTHER; note = 2'-O-methyluridine
  modified_base 10: mod_base = OTHER; note = 2'-fluorocytidine
  modified_base 11: mod_base = OTHER; note = 2'-O-methylcytidine
  modified_base 12: mod_base = OTHER; note = 2'-fluorocytidine
  modified_base 13: mod_base = OTHER; note = 2'-O-methylguanosine
  modified_base 14: mod_base = OTHER; note = 2'-fluorouridine
  modified_base 15: mod_base = OTHER; note = 2'-O-methyluridine
  modified_base 16: mod_base = OTHER; note = 2'-fluorouridine
  modified_base 17: mod_base = OTHER; note = 2'-O-methylguanosine
  modified_base 18: mod_base = OTHER; note = 2'-fluorocytidine
  modified_base 19: mod_base = OTHER; note = 2'-O-methyluridine
  modified_base 20: mod_base = OTHER; note = 2'-fluorouridine
  modified_base 21: mod_base = OTHER; note = 2'-O-methyladenosine with phosphorothioate linkage
  modified_base 22: mod_base = OTHER; note = 2'-O-methyladenosine with phosphorothioate linkage
  modified_base 23: mod_base = OTHER; note = 2'-O-methylguanosine
gcgagaattcccgtttgcttaag

SEQ ID NO: 908 - RNA, 23 nt, synthetic construct
  source 1..23: mol_type = other RNA
  modified_base 1: mod_base = OTHER; note = 5'-(E)-vinylphosphonate 2'-O-methylated guanosine with phosphorothioate linkage
  modified_base 2: mod_base = OTHER; note = 2'-fluoroguanosine with phosphorothioate linkage
  modified_base 3: mod_base = OTHER; note = 2'-O-methylguanosine
  modified_base 4: mod_base = OTHER; note = 2'-fluorouridine
  modified_base 5: mod_base = OTHER; note = 2'-O-methylguanosine
  modified_base 6: mod_base = OTHER; note = 2'-fluoroadenosine
  modified_base 7: mod_base = OTHER; note = 2'-O-methyluridine
  modified_base 8: mod_base = OTHER; note = 2'-fluoroguanosine
  modified_base 9: mod_base = OTHER; note = 2'-O-methylguanosine
  modified_base 10: mod_base = OTHER; note = 2'-fluoroguanosine
  modified_base 11: mod_base = OTHER; note = 2'-O-methyluridine
  modified_base 12: mod_base = OTHER; note = 2'-fluoroguanosine
  modified_base 13: mod_base = OTHER; note = 2'-O-methylguanosine
  modified_base 14: mod_base = OTHER; note = 2'-fluorocytidine
  modified_base 15: mod_base = OTHER; note = 2'-O-methylcytidine
  modified_base 16: mod_base = OTHER; note = 2'-fluoroadenosine
  modified_base 17: mod_base = OTHER; note = 2'-O-methylguanosine
  modified_base 18: mod_base = OTHER; note = 2'-fluoroguanosine
  modified_base 19: mod_base = OTHER; note = 2'-O-methylguanosine
  modified_base 20: mod_base = OTHER; note = 2'-fluorocytidine
  modified_base 21: mod_base = OTHER; note = 2'-O-methylcytidine with phosphorothioate linkage
  modified_base 22: mod_base = OTHER; note = 2'-O-methyladenosine with phosphorothioate linkage
  modified_base 23: mod_base = OTHER; note = 2'-O-methyluridine
gggtgatgggtggccagggccat

SEQ ID NO: 909 - RNA, 23 nt, synthetic construct
  source 1..23: mol_type = other RNA
  modified_base 1: mod_base = OTHER; note = 5'-(E)-vinylphosphonate 2'-O-methylated uridine with phosphorothioate linkage
  modified_base 2: mod_base = OTHER; note = 2'-fluorocytidine with phosphorothioate linkage
  modified_base 3: mod_base = OTHER; note = 2'-O-methyluridine
  modified_base 4: mod_base = OTHER; note = 2'-fluorouridine
  modified_base 5: mod_base = OTHER; note = 2'-O-methyluridine
  modified_base 6: mod_base = OTHER; note = 2'-fluorocytidine
  modified_base 7: mod_base = OTHER; note = 2'-O-methylguanosine
  modified_base 8: mod_base = OTHER; note = 2'-fluorocytidine
  modified_base 9: mod_base = OTHER; note = 2'-O-methylcytidine
  modified_base 10: mod_base = OTHER; note = 2'-fluorocytidine
  modified_base 11: mod_base = OTHER; note = 2'-O-methylguanosine
  modified_base 12: mod_base = OTHER; note = 2'-fluorouridine
  modified_base 13: mod_base = OTHER; note = 2'-O-methylguanosine
  modified_base 14: mod_base = OTHER; note = 2'-fluorouridine
  modified_base 15: mod_base = OTHER; note = 2'-O-methylguanosine
  modified_base 16: mod_base = OTHER; note = 2'-fluoroguanosine
  modified_base 17: mod_base = OTHER; note = 2'-O-methylcytidine
  modified_base 18: mod_base = OTHER; note = 2'-fluorouridine
  modified_base 19: mod_base = OTHER; note = 2'-O-methyluridine
  modified_base 20: mod_base = OTHER; note = 2'-fluorocytidine
  modified_base 21: mod_base = OTHER; note = 2'-O-methyluridine with phosphorothioate linkage
  modified_base 22: mod_base = OTHER; note = 2'-O-methylcytidine with phosphorothioate linkage
  modified_base 23: mod_base = OTHER; note = 2'-O-methylcytidine
tctttcgcccgtgtggcttctcc

SEQ ID NO: 910 - RNA, 23 nt, synthetic construct
  source 1..23: mol_type = other RNA
  modified_base 1: mod_base = OTHER; note = 5'-(E)-vinylphosphonate 2'-O-methylated guanosine with phosphorothioate linkage
  modified_base 2: mod_base = OTHER; note = 2'-fluorouridine with phosphorothioate linkage
  modified_base 3: mod_base = OTHER; note = 2'-O-methyluridine
  modified_base 4: mod_base = OTHER; note = 2'-fluorocytidine
  modified_base 5: mod_base = OTHER; note = 2'-O-methyladenosine
  modified_base 6: mod_base = OTHER; note = 2'-fluorocytidine
  modified_base 7: mod_base = OTHER; note = 2'-O-methyladenosine
  modified_base 8: mod_base = OTHER; note = 2'-fluorouridine
  modified_base 9: mod_base = OTHER; note = 2'-O-methylcytidine
  modified_base 10: mod_base = OTHER; note = 2'-fluoroguanosine
  modified_base 11: mod_base = OTHER; note = 2'-O-methylguanosine
  modified_base 12: mod_base = OTHER; note = 2'-fluoroguanosine
  modified_base 13: mod_base = OTHER; note = 2'-O-methyladenosine
  modified_base 14: mod_base = OTHER; note = 2'-fluoroguanosine
  modified_base 15: mod_base = OTHER; note = 2'-O-methyladenosine
  modified_base 16: mod_base = OTHER; note = 2'-fluoroguanosine
  modified_base 17: mod_base = OTHER; note = 2'-O-methylcytidine
  modified_base 18: mod_base = OTHER; note = 2'-fluorocytidine
  modified_base 19: mod_base = OTHER; note = 2'-O-methylguanosine
  modified_base 20: mod_base = OTHER; note = 2'-fluoroguanosine
  modified_base 21: mod_base = OTHER; note = 2'-O-methylguanosine with phosphorothioate linkage
  modified_base 22: mod_base = OTHER; note = 2'-O-methyluridine with phosphorothioate linkage
  modified_base 23: mod_base = OTHER; note = 2'-O-methyluridine
gttcacatcgggagagccgggtt

SEQ ID NO: 911 - RNA, 23 nt, synthetic construct
  source 1..23: mol_type = other RNA
  modified_base 1: mod_base = OTHER; note = 5'-(E)-vinylphosphonate 2'-O-methylated uridine with phosphorothioate linkage
  modified_base 2: mod_base = OTHER; note = 2'-fluorouridine with phosphorothioate linkage
  modified_base 3: mod_base = OTHER; note = 2'-O-methyluridine
  modified_base 4: mod_base = OTHER; note = 2'-fluorocytidine
  modified_base 5: mod_base = OTHER; note = 2'-O-methylguanosine
  modified_base 6: mod_base = OTHER; note = 2'-fluorocytidine
  modified_base 7: mod_base = OTHER; note = 2'-O-methylcytidine
  modified_base 8: mod_base = OTHER; note = 2'-fluorocytidine
  modified_base 9: mod_base = OTHER; note = 2'-O-methylguanosine
  modified_base 10: mod_base = OTHER; note = 2'-fluorouridine
  modified_base 11: mod_base = OTHER; note = 2'-O-methylguanosine
  modified_base 12: mod_base = OTHER; note = 2'-fluorouridine
  modified_base 13: mod_base = OTHER; note = 2'-O-methylguanosine
  modified_base 14: mod_base = OTHER; note = 2'-fluoroguanosine
  modified_base 15: mod_base = OTHER; note = 2'-O-methylcytidine
  modified_base 16: mod_base = OTHER; note = 2'-fluorouridine
  modified_base 17: mod_base = OTHER; note = 2'-O-methyluridine
  modified_base 18: mod_base = OTHER; note = 2'-fluorocytidine
  modified_base 19: mod_base = OTHER; note = 2'-O-methyluridine
  modified_base 20: mod_base = OTHER; note = 2'-fluorocytidine
  modified_base 21: mod_base = OTHER; note = 2'-O-methylcytidine with phosphorothioate linkage
  modified_base 22: mod_base = OTHER; note = 2'-O-methyluridine with phosphorothioate linkage
  modified_base 23: mod_base = OTHER; note = 2'-O-methylguanosine
tttcgcccgtgtggcttctcctg

SEQ ID NO: 912 - RNA, 23 nt, synthetic construct
  source 1..23: mol_type = other RNA
  modified_base 1: mod_base = OTHER; note = 5'-(E)-vinylphosphonate 2'-O-methylated uridine with phosphorothioate linkage
  modified_base 2: mod_base = OTHER; note = 2'-fluoroadenosine with phosphorothioate linkage
  modified_base 3: mod_base = OTHER; note = 2'-O-methyladenosine
  modified_base 4: mod_base = OTHER; note = 2'-fluoroguanosine
  modified_base 5: mod_base = OTHER; note = 2'-O-methylcytidine
  modified_base 6: mod_base = OTHER; note = 2'-fluoroadenosine
  modified_base 7: mod_base = OTHER; note = 2'-O-methylguanosine
  modified_base 8: mod_base = OTHER; note = 2'-fluoroadenosine
  modified_base 9: mod_base = OTHER; note = 2'-O-methylguanosine
  modified_base 10: mod_base = OTHER; note = 2'-fluoroguanosine
  modified_base 11: mod_base = OTHER; note = 2'-O-methylcytidine
  modified_base 12: mod_base = OTHER; note = 2'-fluorouridine
  modified_base 13: mod_base = OTHER; note = 2'-O-methylguanosine
  modified_base 14: mod_base = OTHER; note = 2'-fluorocytidine
  modified_base 15: mod_base = OTHER; note = 2'-O-methylcytidine
  modified_base 16: mod_base = OTHER; note = 2'-fluoroadenosine
  modified_base 17: mod_base = OTHER; note = 2'-O-methyluridine
  modified_base 18: mod_base = OTHER; note = 2'-fluorouridine
  modified_base 19: mod_base = OTHER; note = 2'-O-methylguanosine
  modified_base 20: mod_base = OTHER; note = 2'-fluorocytidine
  modified_base 21: mod_base = OTHER; note = 2'-O-methyladenosine with phosphorothioate linkage
  modified_base 22: mod_base = OTHER; note = 2'-O-methyluridine with phosphorothioate linkage
  modified_base 23: mod_base = OTHER; note = 2'-O-methyluridine
taagcagaggctgccattgcatt

SEQ ID NO: 913 - RNA, 23 nt, synthetic construct
  source 1..23: mol_type = other RNA
  modified_base 1: mod_base = OTHER; note = 5'-(E)-vinylphosphonate 2'-O-methylated uridine with phosphorothioate linkage
  modified_base 2: mod_base = OTHER; note = 2'-fluorouridine with phosphorothioate linkage
  modified_base 3: mod_base = OTHER; note = 2'-O-methylcytidine
  modified_base 4: mod_base = OTHER; note = 2'-fluorocytidine
  modified_base 5: mod_base = OTHER; note = 2'-O-methylcytidine
  modified_base 6: mod_base = OTHER; note = 2'-fluoroguanosine
  modified_base 7: mod_base = OTHER; note = 2'-O-methyluridine
  modified_base 8: mod_base = OTHER; note = 2'-fluorouridine
  modified_base 9: mod_base = OTHER; note = 2'-O-methylcytidine
  modified_base 10: mod_base = OTHER; note = 2'-fluorouridine
  modified_base 11: mod_base = OTHER; note = 2'-O-methylcytidine
  modified_base 12: mod_base = OTHER; note = 2'-fluorocytidine
  modified_base 13: mod_base = OTHER; note = 2'-O-methylguanosine
  modified_base 14: mod_base = OTHER; note = 2'-fluoroadenosine
  modified_base 15: mod_base = OTHER; note = 2'-O-methylguanosine
  modified_base 16: mod_base = OTHER; note = 2'-fluoroguanosine
  modified_base 17: mod_base = OTHER; note = 2'-O-methyladenosine
  modified_base 18: mod_base = OTHER; note = 2'-fluoroguanosine
  modified_base 19: mod_base = OTHER; note = 2'-O-methyluridine
  modified_base 20: mod_base = OTHER; note = 2'-fluoroguanosine
  modified_base 21: mod_base = OTHER; note = 2'-O-methylcytidine with phosphorothioate linkage
  modified_base 22: mod_base = OTHER; note = 2'-O-methyluridine with phosphorothioate linkage
  modified_base 23: mod_base = OTHER; note = 2'-O-methylcytidine
ttcccgttctccgaggagtgctc

SEQ ID NO: 914 - RNA, 23 nt, synthetic construct
  source 1..23: mol_type = other RNA
  modified_base 1: mod_base = OTHER; note = 5'-(E)-vinylphosphonate 2'-O-methylated uridine with phosphorothioate linkage
  modified_base 2: mod_base = OTHER; note = 2'-fluorouridine with phosphorothioate linkage
  modified_base 3: mod_base = OTHER; note = 2'-O-methyladenosine
  modified_base 4: mod_base = OTHER; note = 2'-fluoroguanosine
  modified_base 5: mod_base = OTHER; note = 2'-O-methyladenosine
  modified_base 6: mod_base = OTHER; note = 2'-fluorouridine
  modified_base 7: mod_base = OTHER; note = 2'-O-methylguanosine
  modified_base 8: mod_base = OTHER; note = 2'-fluoroadenosine
  modified_base 9: mod_base = OTHER; note = 2'-O-methylcytidine
  modified_base 10: mod_base = OTHER; note = 2'-fluoroguanosine
  modified_base 11: mod_base = OTHER; note = 2'-O-methyluridine
  modified_base 12: mod_base = OTHER; note = 2'-fluorouridine
  modified_base 13: mod_base = OTHER; note = 2'-O-methylguanosine
  modified_base 14: mod_base = OTHER; note = 2'-fluoroadenosine
  modified_base 15: mod_base = OTHER; note = 2'-O-methyluridine
  modified_base 16: mod_base = OTHER; note = 2'-fluoroadenosine
  modified_base 17: mod_base = OTHER; note = 2'-O-methyladenosine
  modified_base 18: mod_base = OTHER; note = 2'-fluoroadenosine
  modified_base 19: mod_base = OTHER; note = 2'-O-methylcytidine
  modified_base 20: mod_base = OTHER; note = 2'-fluoroadenosine
  modified_base 21: mod_base = OTHER; note = 2'-O-methyladenosine with phosphorothioate linkage
  modified_base 22: mod_base = OTHER; note = 2'-O-methyluridine with phosphorothioate linkage
  modified_base 23: mod_base = OTHER; note = 2'-O-methylcytidine
ttagatgacgttgataaacaatc

SEQ ID NO: 915 - RNA, 23 nt, synthetic construct
  source 1..23: mol_type = other RNA
  modified_base 1: mod_base = OTHER; note = 5'-(E)-vinylphosphonate 2'-O-methylated guanosine with phosphorothioate linkage
  modified_base 2: mod_base = OTHER; note = 2'-fluoroguanosine with phosphorothioate linkage
  modified_base 3: mod_base = OTHER; note = 2'-O-methyladenosine
  modified_base 4: mod_base = OTHER; note = 2'-fluorouridine
  modified_base 5: mod_base = OTHER; note = 2'-O-methyluridine
  modified_base 6: mod_base = OTHER; note = 2'-fluorocytidine
  modified_base 7: mod_base = OTHER; note = 2'-O-methyladenosine
  modified_base 8: mod_base = OTHER; note = 2'-fluoroadenosine
  modified_base 9: mod_base = OTHER; note = 2'-O-methylcytidine
  modified_base 10: mod_base = OTHER; note = 2'-fluorocytidine
  modified_base 11: mod_base = OTHER; note = 2'-O-methylguanosine
  modified_base 12: mod_base = OTHER; note = 2'-fluorocytidine
  modified_base 13: mod_base = OTHER; note = 2'-O-methyladenosine
  modified_base 14: mod_base = OTHER; note = 2'-fluoroguanosine
  modified_base 15: mod_base = OTHER; note = 2'-O-methylcytidine
  modified_base 16: mod_base = OTHER; note = 2'-fluoroadenosine
  modified_base 17: mod_base = OTHER; note = 2'-O-methylcytidine
  modified_base 18: mod_base = OTHER; note = 2'-fluorocytidine
  modified_base 19: mod_base = OTHER; note = 2'-O-methylcytidine
  modified_base 20: mod_base = OTHER; note = 2'-fluorouridine
  modified_base 21: mod_base = OTHER; note = 2'-O-methylguanosine with phosphorothioate linkage
  modified_base 22: mod_base = OTHER; note = 2'-O-methyluridine with phosphorothioate linkage
  modified_base 23: mod_base = OTHER; note = 2'-O-methylcytidine
ggattcaaccgcagcaccctgtc

SEQ ID NO: 916 - RNA, 23 nt, synthetic construct
  source 1..23: mol_type = other RNA
  modified_base 1: mod_base = OTHER; note = 5'-(E)-vinylphosphonate 2'-O-methylated uridine with phosphorothioate linkage
  modified_base 2: mod_base = OTHER; note = 2'-fluoroguanosine with phosphorothioate linkage
  modified_base 3: mod_base = OTHER; note = 2'-O-methyluridine
  modified_base 4: mod_base = OTHER; note = 2'-fluorouridine
  modified_base 5: mod_base = OTHER; note = 2'-O-methyluridine
  modified_base 6: mod_base = OTHER; note = 2'-fluorocytidine
  modified_base 7: mod_base = OTHER; note = 2'-O-methylcytidine
  modified_base 8: mod_base = OTHER; note = 2'-fluoroguanosine
  modified_base 9: mod_base = OTHER; note = 2'-O-methyluridine
  modified_base 10: mod_base = OTHER; note = 2'-fluorouridine
  modified_base 11: mod_base = OTHER; note = 2'-O-methyluridine
  modified_base 12: mod_base = OTHER; note = 2'-fluoroguanosine
  modified_base 13: mod_base = OTHER; note = 2'-O-methyluridine
  modified_base 14: mod_base = OTHER; note = 2'-fluoroguanosine
  modified_base 15: mod_base = OTHER; note = 2'-O-methylcytidine
  modified_base 16: mod_base = OTHER; note = 2'-fluorouridine
  modified_base 17: mod_base = OTHER; note = 2'-O-methylcytidine
  modified_base 18: mod_base = OTHER; note = 2'-fluoroguanosine
  modified_base 19: mod_base = OTHER; note = 2'-O-methyladenosine
  modified_base 20: mod_base = OTHER; note = 2'-fluorouridine
  modified_base 21: mod_base = OTHER; note = 2'-O-methyladenosine with phosphorothioate linkage
  modified_base 22: mod_base = OTHER; note = 2'-O-methyladenosine with phosphorothioate linkage
  modified_base 23: mod_base = OTHER; note = 2'-O-methyladenosine
tgtttccgtttgtgctcgataaa

SEQ ID NO: 917 - RNA, 23 nt, synthetic construct
  source 1..23: mol_type = other RNA
  modified_base 1: mod_base = OTHER; note = 5'-(E)-vinylphosphonate 2'-O-methylated guanosine with phosphorothioate linkage
  modified_base 2: mod_base = OTHER; note = 2'-fluoroguanosine with phosphorothioate linkage
  modified_base 3: mod_base = OTHER; note = 2'-O-methylcytidine
  modified_base 4: mod_base = OTHER; note = 2'-fluoroguanosine
  modified_base 5: mod_base = OTHER; note = 2'-O-methylguanosine
  modified_base 6: mod_base = OTHER; note = 2'-fluoroadenosine
  modified_base 7: mod_base = OTHER; note = 2'-O-methyluridine
  modified_base 8: mod_base = OTHER; note = 2'-fluorouridine
  modified_base 9: mod_base = OTHER; note = 2'-O-methylguanosine
  modified_base 10: mod_base = OTHER; note = 2'-fluorocytidine
  modified_base 11: mod_base = OTHER; note = 2'-O-methyladenosine
  modified_base 12: mod_base = OTHER; note = 2'-fluoroguanosine
  modified_base 13: mod_base = OTHER; note = 2'-O-methyladenosine
  modified_base 14: mod_base = OTHER; note = 2'-fluoroguanosine
  modified_base 15: mod_base = OTHER; note = 2'-O-methylguanosine
  modified_base 16: mod_base = OTHER; note = 2'-fluoroadenosine
  modified_base 17: mod_base = OTHER; note = 2'-O-methylguanosine
  modified_base 18: mod_base = OTHER; note = 2'-fluoroguanosine
  modified_base 19: mod_base = OTHER; note = 2'-O-methylguanosine
  modified_base 20: mod_base = OTHER; note = 2'-fluoroadenosine
  modified_base 21: mod_base = OTHER; note = 2'-O-methylguanosine with phosphorothioate linkage
  modified_base 22: mod_base = OTHER; note = 2'-O-methylguanosine with phosphorothioate linkage
  modified_base 23: mod_base = OTHER; note = 2'-O-methylguanosine
ggcggattgcagaggagggaggg

SEQ ID NO: 918 - RNA, 23 nt, synthetic construct
  source 1..23: mol_type = other RNA
  modified_base 1: mod_base = OTHER; note = 5'-(E)-vinylphosphonate 2'-O-methylated guanosine with phosphorothioate linkage
  modified_base 2: mod_base = OTHER; note = 2'-fluorouridine with phosphorothioate linkage
  modified_base 3: mod_base = OTHER; note = 2'-O-methylguanosine
  modified_base 4: mod_base = OTHER; note = 2'-fluoroadenosine
  modified_base 5: mod_base = OTHER; note = 2'-O-methylguanosine
  modified_base 6: mod_base = OTHER; note = 2'-fluoroadenosine
  modified_base 7: mod_base = OTHER; note = 2'-O-methyluridine
  modified_base 8: mod_base = OTHER; note = 2'-fluorouridine
  modified_base 9: mod_base = OTHER; note = 2'-O-methylguanosine
  modified_base 10: mod_base = OTHER; note = 2'-fluorocytidine
  modified_base 11: mod_base = OTHER; note = 2'-O-methyluridine
  modified_base 12: mod_base = OTHER; note = 2'-fluoroadenosine
  modified_base 13: mod_base = OTHER; note = 2'-O-methylcytidine
  modified_base 14: mod_base = OTHER; note = 2'-fluoroadenosine
  modified_base 15: mod_base = OTHER; note = 2'-O-methylguanosine
  modified_base 16: mod_base = OTHER; note = 2'-fluorouridine
  modified_base 17: mod_base = OTHER; note = 2'-O-methyluridine
  modified_base 18: mod_base = OTHER; note = 2'-fluorocytidine
  modified_base 19: mod_base = OTHER; note = 2'-O-methyluridine
  modified_base 20: mod_base = OTHER; note = 2'-fluorouridine
  modified_base 21: mod_base = OTHER; note = 2'-O-methylguanosine with phosphorothioate linkage
  modified_base 22: mod_base = OTHER; note = 2'-O-methyladenosine with phosphorothioate linkage
  modified_base 23: mod_base = OTHER; note = 2'-O-methyladenosine
gtgagattgctacagttcttgaa

SEQ ID NO: 919 - RNA, 23 nt, synthetic construct
  source 1..23: mol_type = other RNA
  modified_base 1: mod_base = OTHER; note = 5'-(E)-vinylphosphonate 2'-O-methylated guanosine with phosphorothioate linkage
  modified_base 2: mod_base = OTHER; note = 2'-fluoroadenosine with phosphorothioate linkage
  modified_base 3: mod_base = OTHER; note = 2'-O-methyladenosine
  modified_base 4: mod_base = OTHER; note = 2'-fluorocytidine
  modified_base 5: mod_base = OTHER; note = 2'-O-methyluridine
  modified_base 6: mod_base = OTHER; note = 2'-fluorocytidine
  modified_base 7: mod_base = OTHER; note = 2'-O-methylguanosine
  modified_base 8: mod_base = OTHER; note = 2'-fluorocytidine
  modified_base 9: mod_base = OTHER; note = 2'-O-methyladenosine
  modified_base 10: mod_base = OTHER; note = 2'-fluorouridine
  modified_base 11: mod_base = OTHER; note = 2'-O-methylguanosine
  modified_base 12: mod_base = OTHER; note = 2'-fluoroadenosine
  modified_base 13: mod_base = OTHER; note = 2'-O-methylcytidine
  modified_base 14: mod_base = OTHER; note = 2'-fluorouridine
  modified_base 15: mod_base = OTHER; note = 2'-O-methyluridine
  modified_base 16: mod_base = OTHER; note = 2'-fluoroguanosine
  modified_base 17: mod_base = OTHER; note = 2'-O-methylguanosine
  modified_base 18: mod_base = OTHER; note = 2'-fluoroadenosine
  modified_base 19: mod_base = OTHER; note = 2'-O-methylcytidine
  modified_base 20: mod_base = OTHER; note = 2'-fluorouridine
  modified_base 21: mod_base = OTHER; note = 2'-O-methyluridine with phosphorothioate linkage
  modified_base 22: mod_base = OTHER; note = 2'-O-methylguanosine with phosphorothioate linkage
  modified_base 23: mod_base = OTHER; note = 2'-O-methyladenosine
gaactcgcatgacttggacttga

SEQ ID NO: 920 - RNA, 23 nt, synthetic construct
  source 1..23: mol_type = other RNA
  modified_base 1: mod_base = OTHER; note = 5'-(E)-vinylphosphonate 2'-O-methylated uridine with phosphorothioate linkage
  modified_base 2: mod_base = OTHER; note = 2'-fluoroadenosine with phosphorothioate linkage
  modified_base 3: mod_base = OTHER; note = 2'-O-methylcytidine
  modified_base 4: mod_base = OTHER; note = 2'-fluorocytidine
  modified_base 5: mod_base = OTHER; note = 2'-O-methyluridine
  modified_base 6: mod_base = OTHER; note = 2'-fluoroadenosine
  modified_base 7: mod_base = OTHER; note = 2'-O-methylguanosine
  modified_base 8: mod_base = OTHER; note = 2'-fluorouridine
  modified_base 9: mod_base = OTHER; note = 2'-O-methylcytidine
  modified_base 10: mod_base = OTHER; note = 2'-fluorocytidine
  modified_base 11: mod_base = OTHER; note = 2'-O-methyluridine
  modified_base 12: mod_base = OTHER; note = 2'-fluoroguanosine
  modified_base 13: mod_base = OTHER; note = 2'-O-methyladenosine
  modified_base 14: mod_base = OTHER; note = 2'-fluoroadenosine
  modified_base 15: mod_base = OTHER; note = 2'-O-methylguanosine
  modified_base 16: mod_base = OTHER; note = 2'-fluoroguanosine
  modified_base 17: mod_base = OTHER; note = 2'-O-methylguanosine
  modified_base 18: mod_base = OTHER; note = 2'-fluoroadenosine
  modified_base 19: mod_base = OTHER; note = 2'-O-methyluridine
  modified_base 20: mod_base = OTHER; note = 2'-fluoroadenosine
  modified_base 21: mod_base = OTHER; note = 2'-O-methylcytidine with phosphorothioate linkage
  modified_base 22: mod_base = OTHER; note = 2'-O-methylcytidine with phosphorothioate linkage
  modified_base 23: mod_base = OTHER; note = 2'-O-methyladenosine
tacctagtcctgaagggatacca

SEQ ID NO: 921 - RNA, 23 nt, synthetic construct
  source 1..23: mol_type = other RNA
  modified_base 1: mod_base = OTHER; note = 5'-(E)-vinylphosphonate 2'-O-methylated guanosine with phosphorothioate linkage
  modified_base 2: mod_base = OTHER; note = 2'-fluoroadenosine with phosphorothioate linkage
  modified_base 3: mod_base = OTHER; note = 2'-O-methylguanosine
  modified_base 4: mod_base = OTHER; note = 2'-fluorocytidine
  modified_base 5: mod_base = OTHER; note = 2'-O-methylcytidine
  modified_base 6: mod_base = OTHER; note = 2'-fluoroguanosine
  modified_base 7: mod_base = OTHER; note = 2'-O-methylguanosine
  modified_base 8: mod_base = OTHER; note = 2'-fluoroguanosine
  modified_base 9: mod_base = OTHER; note = 2'-O-methyluridine
  modified_base 10: mod_base = OTHER; note = 2'-fluorouridine
  modified_base 11: mod_base = OTHER; note = 2'-O-methyladenosine
  modified_base 12: mod_base = OTHER; note = 2'-fluoroguanosine
  modified_base 13: mod_base = OTHER; note = 2'-O-methyladenosine
  modified_base 14: mod_base = OTHER; note = 2'-fluoroadenosine
  modified_base 15: mod_base = OTHER; note = 2'-O-methyladenosine
  modified_base 16: mod_base = OTHER; note = 2'-fluoroguanosine
  modified_base 17: mod_base = OTHER; note = 2'-O-methyladenosine
  modified_base 18: mod_base = OTHER; note = 2'-fluoroadenosine
  modified_base 19: mod_base = OTHER; note = 2'-O-methylguanosine
  modified_base 20: mod_base = OTHER; note = 2'-fluoroguanosine
  modified_base 21: mod_base = OTHER; note = 2'-O-methyladenosine with phosphorothioate linkage
  modified_base 22: mod_base = OTHER; note = 2'-O-methylguanosine with phosphorothioate linkage
  modified_base 23: mod_base = OTHER; note = 2'-O-methyladenosine
gagccgggttagaaagaaggaga

SEQ ID NO: 922 - RNA, 23 nt, synthetic construct
  source 1..23: mol_type = other RNA
  modified_base 1: mod_base = OTHER; note = 5'-(E)-vinylphosphonate 2'-O-methylated adenosine with phosphorothioate linkage
  modified_base 2: mod_base = OTHER; note = 2'-fluorouridine with phosphorothioate linkage
  modified_base 3: mod_base = OTHER; note = 2'-O-methyluridine
  modified_base 4: mod_base = OTHER; note = 2'-fluoroguanosine
  modified_base 5: mod_base = OTHER; note = 2'-O-methyluridine
  modified_base 6: mod_base = OTHER; note = 2'-fluoroguanosine
  modified_base 7: mod_base = OTHER; note = 2'-O-methylguanosine
  modified_base 8: mod_base = OTHER; note = 2'-fluoroguanosine
  modified_base 9: mod_base = OTHER; note = 2'-O-methyladenosine
  modified_base 10: mod_base = OTHER; note = 2'-fluoroguanosine
  modified_base 11: mod_base = OTHER; note = 2'-O-methyladenosine
  modified_base 12: mod_base = OTHER; note = 2'-fluoroguanosine
  modified_base 13: mod_base = OTHER; note = 2'-O-methylcytidine
  modified_base 14: mod_base = OTHER; note = 2'-fluorocytidine
  modified_base 15: mod_base = OTHER; note = 2'-O-methylguanosine
  modified_base 16: mod_base = OTHER; note = 2'-fluorouridine
  modified_base 17: mod_base = OTHER; note = 2'-O-methylcytidine
  modified_base 18: mod_base = OTHER; note = 2'-fluoroadenosine
  modified_base 19: mod_base = OTHER; note = 2'-O-methyluridine
  modified_base 20: mod_base = OTHER; note = 2'-fluoroguanosine
  modified_base 21: mod_base = OTHER; note = 2'-O-methylguanosine with phosphorothioate linkage
  modified_base 22: mod_base = OTHER; note = 2'-O-methylcytidine with phosphorothioate linkage
  modified_base 23: mod_base = OTHER; note = 2'-O-methyluridine
attgtgggagagccgtcatggct

SEQ ID NO: 923 - RNA, 23 nt, synthetic construct
  source 1..23: mol_type = other RNA
  modified_base 1: mod_base = OTHER; note = 5'-(E)-vinylphosphonate 2'-O-methylated uridine with phosphorothioate linkage
  modified_base 2: mod_base = OTHER; note = 2'-fluoroadenosine with phosphorothioate linkage
  modified_base 3: mod_base = OTHER; note = 2'-O-methyladenosine
  modified_base 4: mod_base = OTHER; note = 2'-fluorocytidine
  modified_base 5: mod_base = OTHER; note = 2'-O-methylcytidine
  modified_base 6: mod_base = OTHER; note = 2'-fluoroguanosine
  modified_base 7: mod_base = OTHER; note = 2'-O-methylcytidine
  modified_base 8: mod_base = OTHER; note = 2'-fluoroadenosine
  modified_base 9: mod_base = OTHER; note = 2'-O-methylguanosine
  modified_base 10: mod_base = OTHER; note = 2'-fluorocytidine
  modified_base 11: mod_base = OTHER; note = 2'-O-methyladenosine
  modified_base 12: mod_base = OTHER; note = 2'-fluorocytidine
  modified_base 13: mod_base = OTHER; note = 2'-O-methylcytidine
  modified_base 14: mod_base = OTHER; note = 2'-fluorocytidine
  modified_base 15: mod_base = OTHER; note = 2'-O-methyluridine
  modified_base 16: mod_base = OTHER; note = 2'-fluoroguanosine
  modified_base 17: mod_base = OTHER; note = 2'-O-methyluridine
  modified_base 18: mod_base = OTHER; note = 2'-fluorocytidine
  modified_base 19: mod_base = OTHER; note = 2'-O-methyladenosine
  modified_base 20: mod_base = OTHER; note = 2'-fluoroadenosine
  modified_base 21: mod_base = OTHER; note = 2'-O-methyladenosine with phosphorothioate linkage
  modified_base 22: mod_base = OTHER; note = 2'-O-methylguanosine with phosphorothioate linkage
  modified_base 23: mod_base = OTHER; note = 2'-O-methylguanosine
taaccgcagcaccctgtcaaagg

SEQ ID NO: 924 - RNA, 23 nt, synthetic construct
  source 1..23: mol_type = other RNA
  modified_base 1: mod_base = OTHER; note = 5'-(E)-vinylphosphonate 2'-O-methylated uridine with phosphorothioate linkage
  modified_base 2: mod_base = OTHER; note = 2'-fluorocytidine with phosphorothioate linkage
  modified_base 3: mod_base = OTHER; note = 2'-O-methyluridine
  modified_base 4: mod_base = OTHER; note = 2'-fluoroguanosine
  modified_base 5: mod_base = OTHER; note = 2'-O-methyladenosine
  modified_base 6: mod_base = OTHER; note = 2'-fluoroadenosine
  modified_base 7: mod_base = OTHER; note = 2'-O-methylguanosine
  modified_base 8: mod_base = OTHER; note = 2'-fluoroguanosine
  modified_base 9: mod_base = OTHER; note = 2'-O-methylguanosine
  modified_base 10: mod_base = OTHER; note = 2'-fluoroadenosine
  modified_base 11: mod_base = OTHER; note = 2'-O-methyluridine
  modified_base 12: mod_base = OTHER; note = 2'-fluoroadenosine
  modified_base 13: mod_base = OTHER; note = 2'-O-methylcytidine
  modified_base 14: mod_base = OTHER; note = 2'-fluorocytidine
  modified_base 15: mod_base = OTHER; note = 2'-O-methyladenosine
  modified_base 16: mod_base = OTHER; note = 2'-fluoroadenosine
  modified_base 17: mod_base = OTHER; note = 2'-O-methylcytidine
  modified_base 18: mod_base = OTHER; note = 2'-fluorocytidine
  modified_base 19: mod_base = OTHER; note = 2'-O-methylcytidine
  modified_base 20: mod_base = OTHER; note = 2'-fluoroguanosine
  modified_base 21: mod_base = OTHER; note = 2'-O-methylcytidine with phosphorothioate linkage
  modified_base 22: mod_base = OTHER; note = 2'-O-methylguanosine with phosphorothioate linkage
  modified_base 23: mod_base = OTHER; note = 2'-O-methylguanosine
tctgaagggataccaacccgcgg

SEQ ID NO: 925 - RNA, 23 nt, synthetic construct
  source 1..23: mol_type = other RNA
  modified_base 1: mod_base = OTHER; note = 5'-(E)-vinylphosphonate 2'-O-methylated guanosine with phosphorothioate linkage
  modified_base 2: mod_base = OTHER; note = 2'-fluoroguanosine with phosphorothioate linkage
  modified_base 3: mod_base = OTHER; note = 2'-O-methylguanosine
  modified_base 4: mod_base = OTHER; note = 2'-fluorocytidine
  modified_base 5: mod_base = OTHER; note = 2'-O-methyladenosine
  modified_base 6: mod_base = OTHER; note = 2'-fluorocytidine
  modified_base 7: mod_base = OTHER; note = 2'-O-methyladenosine
  modified_base 8: mod_base = OTHER; note = 2'-fluoroguanosine
  modified_base 9: mod_base = OTHER; note = 2'-O-methylguanosine
  modified_base 10: mod_base = OTHER; note = 2'-fluorocytidine
  modified_base 11: mod_base = OTHER; note = 2'-O-methyladenosine
  modified_base 12: mod_base = OTHER; note = 2'-fluorouridine
  modified_base 13: mod_base = OTHER; note = 2'-O-methyladenosine
  modified_base 14: mod_base = OTHER; note = 2'-fluoroguanosine
  modified_base 15: mod_base = OTHER; note = 2'-O-methyluridine
  modified_base 16: mod_base = OTHER; note = 2'-fluorouridine
  modified_base 17: mod_base = OTHER; note = 2'-O-methylguanosine
  modified_base 18: mod_base = OTHER; note = 2'-fluorocytidine
  modified_base 19: mod_base = OTHER; note = 2'-O-methyladenosine
  modified_base 20: mod_base = OTHER; note = 2'-fluorocytidine
  modified_base 21: mod_base = OTHER; note = 2'-O-methyladenosine with phosphorothioate linkage
  modified_base 22: mod_base = OTHER; note = 2'-O-methylguanosine with phosphorothioate linkage
  modified_base 23: mod_base = OTHER; note = 2'-O-methylcytidine
gggcacaggcatagttgcacagc

SEQ ID NO: 926 - RNA, 23 nt, synthetic construct
  source 1..23: mol_type = other RNA
  modified_base 1: mod_base = OTHER; note = 5'-(E)-vinylphosphonate 2'-O-methylated uridine with phosphorothioate linkage
  modified_base 2: mod_base = OTHER; note = 2'-fluoroadenosine with phosphorothioate linkage
  modified_base 3: mod_base = OTHER; note = 2'-O-methyluridine
  modified_base 4: mod_base = OTHER; note = 2'-fluorouridine
  modified_base 5: mod_base = OTHER; note = 2'-O-methylguanosine
  modified_base 6: mod_base = OTHER; note = 2'-fluoroguanosine
  modified_base 7: mod_base = OTHER; note = 2'-O-methyladenosine
  modified_base 8: mod_base = OTHER; note = 2'-fluorouridine
  modified_base 9: mod_base = OTHER; note = 2'-O-methyluridine
  modified_base 10: mod_base = OTHER; note = 2'-fluorocytidine
  modified_base 11: mod_base = OTHER; note = 2'-O-methyladenosine
  modified_base 12: mod_base = OTHER; note = 2'-fluoroadenosine
  modified_base 13: mod_base = OTHER; note = 2'-O-methylcytidine
  modified_base 14: mod_base = OTHER; note = 2'-fluorocytidine
  modified_base 15: mod_base = OTHER; note = 2'-O-methylguanosine
  modified_base 16: mod_base = OTHER; note = 2'-fluorocytidine
  modified_base 17: mod_base = OTHER; note = 2'-O-methyladenosine
  modified_base 18: mod_base = OTHER; note = 2'-fluoroguanosine
  modified_base 19: mod_base = OTHER; note = 2'-O-methylcytidine
  modified_base 20: mod_base = OTHER; note = 2'-fluoroadenosine
  modified_base 21: mod_base = OTHER; note = 2'-O-methylcytidine with phosphorothioate linkage
  modified_base 22: mod_base = OTHER; note = 2'-O-methylcytidine with phosphorothioate linkage
  modified_base 23: mod_base = OTHER; note = 2'-O-methylcytidine
tattggattcaaccgcagcaccc

SEQ ID NO: 927 - RNA, 23 nt, synthetic construct
  source 1..23: mol_type = other RNA
  modified_base 1: mod_base = OTHER; note = 5'-(E)-vinylphosphonate 2'-O-methylated uridine with phosphorothioate linkage
  modified_base 2: mod_base = OTHER; note = 2'-fluorouridine with phosphorothioate linkage
  modified_base 3: mod_base = OTHER; note = 2'-O-methylcytidine
  modified_base 4: mod_base = OTHER; note = 2'-fluorocytidine
  modified_base 5: mod_base = OTHER; note = 2'-O-methylcytidine
  modified_base 6: mod_base = OTHER; note = 2'-fluoroguanosine
  modified_base 7: mod_base = OTHER; note = 2'-O-methyluridine
  modified_base 8: mod_base = OTHER; note = 2'-fluorouridine
  modified_base 9: mod_base = OTHER; note = 2'-O-methyluridine
  modified_base 10: mod_base = OTHER; note = 2'-fluoroguanosine
  modified_base 11: mod_base = OTHER; note = 2'-O-methylcytidine
  modified_base 12: mod_base = OTHER; note = 2'-fluorouridine
  modified_base 13: mod_base = OTHER; note = 2'-O-methyluridine
  modified_base 14: mod_base = OTHER; note = 2'-fluoroadenosine
  modified_base 15: mod_base = OTHER; note = 2'-O-methyladenosine
  modified_base 16: mod_base = OTHER; note = 2'-fluoroguanosine
  modified_base 17: mod_base = OTHER; note = 2'-O-methyluridine
  modified_base 18: mod_base = OTHER; note = 2'-fluoroguanosine
  modified_base 19: mod_base = OTHER; note = 2'-O-methylcytidine
  modified_base 20: mod_base = OTHER; note = 2'-fluorouridine
  modified_base 21: mod_base = OTHER; note = 2'-O-methylguanosine with phosphorothioate linkage
  modified_base 22: mod_base = OTHER; note = 2'-O-methylguanosine with phosphorothioate linkage
  modified_base 23: mod_base = OTHER; note = 2'-O-methylguanosine
ttcccgtttgcttaagtgctggg

SEQ ID NO: 928 - RNA, 23 nt, synthetic construct
  source 1..23: mol_type = other RNA
  modified_base 1: mod_base = OTHER; note = 5'-(E)-vinylphosphonate 2'-O-methylated uridine with phosphorothioate linkage
  modified_base 2: mod_base = OTHER; note = 2'-fluorouridine with phosphorothioate linkage
  modified_base 3: mod_base = OTHER; note = 2'-O-methylcytidine
  modified_base 4: mod_base = OTHER; note = 2'-fluorocytidine
  modified_base 5: mod_base = OTHER; note = 2'-O-methyladenosine
  modified_base 6: mod_base = OTHER; note = 2'-fluorouridine
  modified_base 7: mod_base = OTHER; note = 2'-O-methyladenosine
  modified_base 8: mod_base = OTHER; note = 2'-fluoroguanosine
  modified_base 9: mod_base = OTHER; note = 2'-O-methylcytidine
  modified_base 10: mod_base = OTHER; note = 2'-fluorocytidine
  modified_base 11: mod_base = OTHER; note = 2'-O-methyladenosine
  modified_base 12: mod_base = OTHER; note = 2'-fluorouridine
  modified_base 13: mod_base = OTHER; note = 2'-O-methyluridine
  modified_base 14: mod_base = OTHER; note = 2'-fluoroguanosine
  modified_base 15: mod_base = OTHER; note = 2'-O-methylguanosine
  modified_base 16: mod_base = OTHER; note = 2'-fluoroadenosine
  modified_base 17: mod_base = OTHER; note = 2'-O-methyluridine
  modified_base 18: mod_base = OTHER; note = 2'-fluorouridine
  modified_base 19: mod_base = OTHER; note = 2'-O-methylcytidine
  modified_base 20: mod_base = OTHER; note = 2'-fluoroadenosine
  modified_base 21: mod_base = OTHER; note = 2'-O-methyladenosine with phosphorothioate linkage
  modified_base 22: mod_base = OTHER; note = 2'-O-methylcytidine with phosphorothioate linkage
  modified_base 23: mod_base = OTHER; note = 2'-O-methylcytidine
ttccatagccattggattcaacc

SEQ ID NO: 929 - RNA, 23 nt, synthetic construct
  source 1..23: mol_type = other RNA
  modified_base 1: mod_base = OTHER; note = 5'-(E)-vinylphosphonate 2'-O-methylated adenosine with phosphorothioate linkage
  modified_base 2: mod_base = OTHER; note = 2'-fluoroguanosine with phosphorothioate linkage
  modified_base 3: mod_base = OTHER; note = 2'-O-methyluridine
  modified_base 4: mod_base = OTHER; note = 2'-fluoroguanosine
  modified_base 5: mod_base = OTHER; note = 2'-O-methyladenosine
  modified_base 6: mod_base = OTHER; note = 2'-fluoroguanosine
  modified_base 7: mod_base = OTHER; note = 2'-O-methyladenosine
  modified_base 8: mod_base = OTHER; note = 2'-fluorouridine
  modified_base 9: mod_base = OTHER; note = 2'-O-methyluridine
  modified_base 10: mod_base = OTHER; note = 2'-fluoroguanosine
  modified_base 11: mod_base = OTHER; note = 2'-O-methylcytidine
  modified_base 12: mod_base = OTHER; note = 2'-fluorouridine
  modified_base 13: mod_base = OTHER; note = 2'-O-methyladenosine
  modified_base 14: mod_base = OTHER; note = 2'-fluorocytidine
  modified_base 15: mod_base = OTHER; note = 2'-O-methyladenosine
  modified_base 16: mod_base = OTHER; note = 2'-fluoroguanosine
  modified_base 17: mod_base = OTHER; note = 2'-O-methyluridine
  modified_base 18: mod_base = OTHER; note = 2'-fluorouridine
  modified_base 19: mod_base = OTHER; note = 2'-O-methylcytidine
  modified_base 20: mod_base = OTHER; note = 2'-fluorouridine
  modified_base 21: mod_base = OTHER; note = 2'-O-methyluridine with phosphorothioate linkage
  modified_base 22: mod_base = OTHER; note = 2'-O-methylguanosine with phosphorothioate linkage
  modified_base 23: mod_base = OTHER; note = 2'-O-methyladenosine
agtgagattgctacagttcttga

SEQ ID NO: 930 - RNA, 23 nt, synthetic construct
  source 1..23: mol_type = other RNA
  modified_base 1: mod_base = OTHER; note = 5'-(E)-vinylphosphonate 2'-O-methylated adenosine with phosphorothioate linkage
  modified_base 2: mod_base = OTHER; note = 2'-fluoroguanosine with phosphorothioate linkage
  modified_base 3: mod_base = OTHER; note = 2'-O-methyladenosine
  modified_base 4: mod_base = OTHER; note = 2'-fluoroadenosine
  modified_base 5: mod_base = OTHER; note = 2'-O-methyladenosine
  modified_base 6: mod_base = OTHER; note = 2'-fluorocytidine
  modified_base 7: mod_base = OTHER; note = 2'-O-methylcytidine
  modified_base 8: mod_base = OTHER; note = 2'-fluoroadenosine
  modified_base 9: mod_base = OTHER; note = 2'-O-methyluridine
  modified_base 10: mod_base = OTHER; note = 2'-fluoroguanosine
  modified_base 11: mod_base = OTHER; note = 2'-O-methylcytidine
  modified_base 12: mod_base = OTHER; note = 2'-fluoroadenosine
  modified_base 13: mod_base = OTHER; note = 2'-O-methylcytidine
  modified_base 14: mod_base = OTHER; note = 2'-fluorouridine
  modified_base 15: mod_base = OTHER; note = 2'-O-methylguanosine
  modified_base 16: mod_base = OTHER; note = 2'-fluoroguanosine
  modified_base 17: mod_base = OTHER; note = 2'-O-methyluridine
  modified_base 18: mod_base = OTHER; note = 2'-fluoroguanosine
  modified_base 19: mod_base = OTHER; note = 2'-O-methyladenosine
  modified_base 20: mod_base = OTHER; note = 2'-fluoroadenosine
  modified_base 21: mod_base = OTHER; note = 2'-O-methyluridine with phosphorothioate linkage
  modified_base 22: mod_base = OTHER; note = 2'-O-methylguanosine with phosphorothioate linkage
  modified_base 23: mod_base = OTHER; note = 2'-O-methylguanosine
agaaaccatgcactggtgaatgg

SEQ ID NO: 931 - RNA, 23 nt, synthetic construct
  source 1..23: mol_type = other RNA
  modified_base 1: mod_base = OTHER; note = 5'-(E)-vinylphosphonate 2'-O-methylated uridine with phosphorothioate linkage
  modified_base 2: mod_base = OTHER; note = 2'-fluoroguanosine with phosphorothioate linkage
  modified_base 3: mod_base = OTHER; note = 2'-O-methylguanosine
  modified_base 4: mod_base = OTHER; note = 2'-fluoroadenosine
  modified_base 5: mod_base = OTHER; note = 2'-O-methyladenosine
  modified_base 6: mod_base = OTHER; note = 2'-fluoroadenosine
  modified_base 7: mod_base = OTHER; note = 2'-O-methylguanosine
  modified_base 8: mod_base = OTHER; note = 2'-fluorocytidine
  modified_base 9: mod_base = OTHER; note = 2'-O-methylguanosine
  modified_base 10: mod_base = OTHER; note = 2'-fluorocytidine
  modified_base 11: mod_base = OTHER; note = 2'-O-methylcytidine
  modified_base 12: mod_base = OTHER; note = 2'-fluorocytidine
  modified_base 13: mod_base = OTHER; note = 2'-O-methyluridine
  modified_base 14: mod_base = OTHER; note = 2'-fluorouridine
  modified_base 15: mod_base = OTHER; note = 2'-O-methylcytidine
  modified_base 16: mod_base = OTHER; note = 2'-fluorouridine
  modified_base 17: mod_base = OTHER; note = 2'-O-methylguanosine
  modified_base 18: mod_base = OTHER; note = 2'-fluorocytidine
  modified_base 19: mod_base = OTHER; note = 2'-O-methylcytidine
  modified_base 20: mod_base = OTHER; note = 2'-fluoroadenosine
  modified_base 21: mod_base = OTHER; note = 2'-O-methylguanosine with phosphorothioate linkage
  modified_base 22: mod_base = OTHER; note = 2'-O-methylguanosine with phosphorothioate linkage
  modified_base 23: mod_base = OTHER; note = 2'-O-methylcytidine
tggaaagcgcccttctgccaggc

SEQ ID NO: 932 - RNA, 23 nt, synthetic construct
  source 1..23: mol_type = other RNA
  modified_base 1: mod_base = OTHER; note = 5'-(E)-vinylphosphonate 2'-O-methylated guanosine with phosphorothioate linkage
  modified_base 2: mod_base = OTHER; note = 2'-fluoroguanosine with phosphorothioate linkage
  modified_base 3: mod_base = OTHER; note = 2'-O-methylguanosine
  modified_base 4: mod_base = OTHER; note = 2'-fluorocytidine
  modified_base 5: mod_base = OTHER; note = 2'-O-methyladenosine
  modified_base 6: mod_base = OTHER; note = 2'-fluorouridine
  modified_base 7: mod_base = OTHER; note = 2'-O-methyladenosine
  modified_base 8: mod_base = OTHER; note = 2'-fluorouridine
  modified_base 9: mod_base = OTHER; note = 2'-O-methyluridine
  modified_base 10: mod_base = OTHER; note = 2'-fluorocytidine
  modified_base 11: mod_base = OTHER; note = 2'-O-methyluridine
  modified_base 12: mod_base = OTHER; note = 2'-fluoroguanosine
  modified_base 13: mod_base = OTHER; note = 2'-O-methylcytidine
  modified_base 14: mod_base = OTHER; note = 2'-fluoroadenosine
  modified_base 15: mod_base = OTHER; note = 2'-O-methylcytidine
  modified_base 16: mod_base = OTHER; note = 2'-fluorouridine
  modified_base 17: mod_base = OTHER; note = 2'-O-methylcytidine
  modified_base 18: mod_base = OTHER; note = 2'-fluoroadenosine
  modified_base 19: mod_base = OTHER; note = 2'-O-methyluridine
  modified_base 20: mod_base = OTHER; note = 2'-fluorocytidine
  modified_base 21: mod_base = OTHER; note = 2'-O-methylcytidine with phosphorothioate linkage
  modified_base 22: mod_base = OTHER; note = 2'-O-methylcytidine with phosphorothioate linkage
  modified_base 23: mod_base = OTHER; note = 2'-O-methyladenosine
gggcatattctgcactcatccca

SEQ ID NO: 933 - RNA, 23 nt, synthetic construct
  source 1..23: mol_type = other RNA
  modified_base 1: mod_base = OTHER; note = 5'-(E)-vinylphosphonate 2'-O-methylated guanosine with phosphorothioate linkage
  modified_base 2: mod_base = OTHER; note = 2'-fluorocytidine with phosphorothioate linkage
  modified_base 3: mod_base = OTHER; note = 2'-O-methylcytidine
  modified_base 4: mod_base = OTHER; note = 2'-fluoroguanosine
  modified_base 5: mod_base = OTHER; note = 2'-O-methylguanosine
  modified_base 6: mod_base = OTHER; note = 2'-fluoroguanosine
  modified_base 7: mod_base = OTHER; note = 2'-O-methyluridine
  modified_base 8: mod_base = OTHER; note = 2'-fluorouridine
  modified_base 9: mod_base = OTHER; note = 2'-O-methyladenosine
  modified_base 10: mod_base = OTHER; note = 2'-fluoroguanosine
  modified_base 11: mod_base = OTHER; note = 2'-O-methyladenosine
  modified_base 12: mod_base = OTHER; note = 2'-fluoroadenosine
  modified_base 13: mod_base = OTHER; note = 2'-O-methyladenosine
  modified_base 14: mod_base = OTHER; note = 2'-fluoroguanosine
  modified_base 15: mod_base = OTHER; note = 2'-O-methyladenosine
  modified_base 16: mod_base = OTHER; note = 2'-fluoroadenosine
  modified_base 17: mod_base = OTHER; note = 2'-O-methylguanosine
  modified_base 18: mod_base = OTHER; note = 2'-fluoroguanosine
  modified_base 19: mod_base = OTHER; note = 2'-O-methyladenosine
  modified_base 20: mod_base = OTHER; note = 2'-fluoroguanosine
  modified_base 21: mod_base = OTHER; note = 2'-O-methyladenosine with phosphorothioate linkage
  modified_base 22: mod_base = OTHER; note = 2'-O-methylcytidine with phosphorothioate linkage
  modified_base 23: mod_base = OTHER; note = 2'-O-methyluridine
gccgggttagaaagaaggagact

SEQ ID NO: 934 - RNA, 23 nt, synthetic construct
  source 1..23: mol_type = other RNA
  modified_base 1: mod_base = OTHER; note = 5'-(E)-vinylphosphonate 2'-O-methylated uridine with phosphorothioate linkage
  modified_base 2: mod_base = OTHER; note = 2'-fluorocytidine with phosphorothioate linkage
  modified_base 3: mod_base = OTHER; note = 2'-O-methyladenosine
  modified_base 4: mod_base = OTHER; note = 2'-fluorouridine
  modified_base 5: mod_base = OTHER; note = 2'-O-methyluridine
  modified_base 6: mod_base = OTHER; note = 2'-fluoroguanosine
  modified_base 7: mod_base = OTHER; note = 2'-O-methylguanosine
  modified_base 8: mod_base = OTHER; note = 2'-fluoroadenosine
  modified_base 9: mod_base = OTHER; note = 2'-O-methyluridine
  modified_base 10: mod_base = OTHER; note = 2'-fluorouridine
  modified_base 11: mod_base = OTHER; note = 2'-O-methylcytidine
  modified_base 12: mod_base = OTHER; note = 2'-fluoroadenosine
  modified_base 13: mod_base = OTHER; note = 2'-O-methyladenosine
  modified_base 14: mod_base = OTHER; note = 2'-fluorocytidine
  modified_base 15: mod_base = OTHER; note = 2'-O-methylcytidine
  modified_base 16: mod_base = OTHER; note = 2'-fluoroguanosine
  modified_base 17: mod_base = OTHER; note = 2'-O-methylcytidine
  modified_base 18: mod_base = OTHER; note = 2'-fluoroadenosine
  modified_base 19: mod_base = OTHER; note = 2'-O-methylguanosine
  modified_base 20: mod_base = OTHER; note = 2'-fluorocytidine
  modified_base 21: mod_base = OTHER; note = 2'-O-methyladenosine with phosphorothioate linkage
  modified_base 22: mod_base = OTHER; note = 2'-O-methylcytidine with phosphorothioate linkage
  modified_base 23: mod_base = OTHER; note = 2'-O-methylcytidine
tcattggattcaaccgcagcacc

SEQ ID NO: 935 - RNA, 23 nt, synthetic construct
  source 1..23: mol_type = other RNA
  modified_base 1: mod_base = OTHER; note = 5'-(E)-vinylphosphonate 2'-O-methylated guanosine with phosphorothioate linkage
  modified_base 2: mod_base = OTHER; note = 2'-fluoroguanosine with phosphorothioate linkage
  modified_base 3: mod_base = OTHER; note = 2'-O-methyluridine
  modified_base 4: mod_base = OTHER; note = 2'-fluorouridine
  modified_base 5: mod_base = OTHER; note = 2'-O-methyladenosine
  modified_base 6: mod_base = OTHER; note = 2'-fluoroguanosine
  modified_base 7: mod_base = OTHER; note = 2'-O-methyladenosine
  modified_base 8: mod_base = OTHER; note = 2'-fluoroadenosine
  modified_base 9: mod_base = OTHER; note = 2'-O-methyladenosine
  modified_base 10: mod_base = OTHER; note = 2'-fluoroguanosine
  modified_base 11: mod_base = OTHER; note = 2'-O-methyladenosine
  modified_base 12: mod_base = OTHER; note = 2'-fluoroadenosine
  modified_base 13: mod_base = OTHER; note = 2'-O-methylguanosine
  modified_base 14: mod_base = OTHER; note = 2'-fluoroguanosine
  modified_base 15: mod_base = OTHER; note = 2'-O-methyladenosine
  modified_base 16: mod_base = OTHER; note = 2'-fluoroguanosine
  modified_base 17: mod_base = OTHER; note = 2'-O-methyladenosine
  modified_base 18: mod_base = OTHER; note = 2'-fluorocytidine
  modified_base 19: mod_base = OTHER; note = 2'-O-methyluridine
  modified_base 20: mod_base = OTHER; note = 2'-fluorocytidine
  modified_base 21: mod_base = OTHER; note = 2'-O-methylcytidine with phosphorothioate linkage
  modified_base 22: mod_base = OTHER; note = 2'-O-methyladenosine with phosphorothioate linkage
  modified_base 23: mod_base = OTHER; note = 2'-O-methylguanosine
ggttagaaagaaggagactccag

SEQ ID NO: 936 - RNA, 23 nt, synthetic construct
  source 1..23: mol_type = other RNA
  modified_base 1: mod_base = OTHER; note = 5'-(E)-vinylphosphonate 2'-O-methylated uridine with phosphorothioate linkage
  modified_base 2: mod_base = OTHER; note = 2'-fluoroguanosine with phosphorothioate linkage
  modified_base 3: mod_base = OTHER; note = 2'-O-methylguanosine
  modified_base 4: mod_base = OTHER; note = 2'-fluoroguanosine
  modified_base 5: mod_base = OTHER; note = 2'-O-methyluridine
  modified_base 6: mod_base = OTHER; note = 2'-fluoroguanosine
  modified_base 7: mod_base = OTHER; note = 2'-O-methyladenosine
  modified_base 8: mod_base = OTHER; note = 2'-fluorouridine
  modified_base 9: mod_base = OTHER; note = 2'-O-methylguanosine
  modified_base 10: mod_base = OTHER; note = 2'-fluoroguanosine
  modified_base 11: mod_base = OTHER; note = 2'-O-methylguanosine
  modified_base 12: mod_base = OTHER; note = 2'-fluorouridine
  modified_base 13: mod_base = OTHER; note = 2'-O-methylguanosine
  modified_base 14: mod_base = OTHER; note = 2'-fluoroguanosine
  modified_base 15: mod_base = OTHER; note = 2'-O-methylcytidine
  modified_base 16: mod_base = OTHER; note = 2'-fluorocytidine
  modified_base 17: mod_base = OTHER; note = 2'-O-methyladenosine
  modified_base 18: mod_base = OTHER; note = 2'-fluoroguanosine
  modified_base 19: mod_base = OTHER; note = 2'-O-methylguanosine
  modified_base 20: mod_base = OTHER; note = 2'-fluoroguanosine
  modified_base 21: mod_base = OTHER; note = 2'-O-methylcytidine with phosphorothioate linkage
  modified_base 22: mod_base = OTHER; note = 2'-O-methylcytidine with phosphorothioate linkage
  modified_base 23: mod_base = OTHER; note = 2'-O-methyladenosine
tgggtgatgggtggccagggcca

SEQ ID NO: 937 - RNA, 23 nt, synthetic construct
  source 1..23: mol_type = other RNA
  modified_base 1: mod_base = OTHER; note = 5'-(E)-vinylphosphonate 2'-O-methylated adenosine with phosphorothioate linkage
  modified_base 2: mod_base = OTHER; note = 2'-fluoroguanosine with phosphorothioate linkage
  modified_base 3: mod_base = OTHER; note = 2'-O-methyladenosine
  modified_base 4: mod_base = OTHER; note = 2'-fluorouridine
  modified_base 5: mod_base = OTHER; note = 2'-O-methylguanosine
  modified_base 6: mod_base = OTHER; note = 2'-fluoroadenosine
  modified_base 7: mod_base = OTHER; note = 2'-O-methyladenosine
  modified_base 8: mod_base = OTHER; note = 2'-fluorouridine
  modified_base 9: mod_base = OTHER; note = 2'-O-methyluridine
  modified_base 10: mod_base = OTHER; note = 2'-fluoroguanosine
  modified_base 11: mod_base = OTHER; note = 2'-O-methyluridine
  modified_base 12: mod_base = OTHER; note = 2'-fluoroguanosine
  modified_base 13: mod_base = OTHER; note = 2'-O-methylguanosine
  modified_base 14: mod_base = OTHER; note = 2'-fluoroguanosine
  modified_base 15: mod_base = OTHER; note = 2'-O-methyladenosine
  modified_base 16: mod_base = OTHER; note = 2'-fluoroguanosine
  modified_base 17: mod_base = OTHER; note = 2'-O-methyladenosine
  modified_base 18: mod_base = OTHER; note = 2'-fluoroguanosine
  modified_base 19: mod_base = OTHER; note = 2'-O-methylcytidine
  modified_base 20: mod_base = OTHER; note = 2'-fluorocytidine
  modified_base 21: mod_base = OTHER; note = 2'-O-methylguanosine with phosphorothioate linkage
  modified_base 22: mod_base = OTHER; note = 2'-O-methyluridine with phosphorothioate linkage
  modified_base 23: mod_base = OTHER; note = 2'-O-methylcytidine
agatgaattgtgggagagccgtc

SEQ ID NO: 938 - RNA, 23 nt, synthetic construct
  source 1..23: mol_type = other RNA
  modified_base 1: mod_base = OTHER; note = 5'-(E)-vinylphosphonate 2'-O-methylated uridine with phosphorothioate linkage
  modified_base 2: mod_base = OTHER; note = 2'-fluorouridine with phosphorothioate linkage
  modified_base 3: mod_base = OTHER; note = 2'-O-methyluridine
  modified_base 4: mod_base = OTHER; note = 2'-fluorouridine
  modified_base 5: mod_base = OTHER; note = 2'-O-methylcytidine
  modified_base 6: mod_base = OTHER; note = 2'-fluoroguanosine
  modified_base 7: mod_base = OTHER; note = 2'-O-methylcytidine
  modified_base 8: mod_base = OTHER; note = 2'-fluorocytidine
  modified_base 9: mod_base = OTHER; note = 2'-O-methylcytidine
  modified_base 10: mod_base = OTHER; note = 2'-fluoroguanosine
  modified_base 11: mod_base = OTHER; note = 2'-O-methyluridine
  modified_base 12: mod_base = OTHER; note = 2'-fluoroguanosine
  modified_base 13: mod_base = OTHER; note = 2'-O-methyluridine
  modified_base 14: mod_base = OTHER; note = 2'-fluoroguanosine
  modified_base 15: mod_base = OTHER; note = 2'-O-methylguanosine
  modified_base 16: mod_base = OTHER; note = 2'-fluorocytidine
  modified_base 17: mod_base = OTHER; note = 2'-O-methyluridine
  modified_base 18: mod_base = OTHER; note = 2'-fluorouridine
  modified_base 19: mod_base = OTHER; note = 2'-O-methylcytidine
  modified_base 20: mod_base = OTHER; note = 2'-fluorouridine
  modified_base 21: mod_base = OTHER; note = 2'-O-methylcytidine with phosphorothioate linkage
  modified_base 22: mod_base = OTHER; note = 2'-O-methylcytidine with phosphorothioate linkage
  modified_base 23: mod_base = OTHER; note = 2'-O-methyluridine
ttttcgcccgtgtggcttctcct

SEQ ID NO: 939 - RNA, 23 nt, synthetic construct
  source 1..23: mol_type = other RNA
  modified_base 1: mod_base = OTHER; note = 5'-(E)-vinylphosphonate 2'-O-methylated uridine with phosphorothioate linkage
  modified_base 2: mod_base = OTHER; note = 2'-fluoroguanosine with phosphorothioate linkage
  modified_base 3: mod_base = OTHER; note = 2'-O-methyluridine
  modified_base 4: mod_base = OTHER; note = 2'-fluorocytidine
  modified_base 5: mod_base = OTHER; note = 2'-O-methyluridine
  modified_base 6: mod_base = OTHER; note = 2'-fluorocytidine
  modified_base 7: mod_base = OTHER; note = 2'-O-methylguanosine
  modified_base 8: mod_base = OTHER; note = 2'-fluoroguanosine
  modified_base 9: mod_base = OTHER; note = 2'-O-methyluridine
  modified_base 10: mod_base = OTHER; note = 2'-fluoroguanosine
  modified_base 11: mod_base = OTHER; note = 2'-O-methylguanosine
  modified_base 12: mod_base = OTHER; note = 2'-fluorouridine
  modified_base 13: mod_base = OTHER; note = 2'-O-methylguanosine
  modified_base 14: mod_base = OTHER; note = 2'-fluoroguanosine
  modified_base 15: mod_base = OTHER; note = 2'-O-methyladenosine
  modified_base 16: mod_base = OTHER; note = 2'-fluorocytidine
  modified_base 17: mod_base = OTHER; note = 2'-O-methyluridine
  modified_base 18: mod_base = OTHER; note = 2'-fluoroadenosine
  modified_base 19: mod_base = OTHER; note = 2'-O-methyladenosine
  modified_base 20: mod_base = OTHER; note = 2'-fluoroadenosine
  modified_base 21: mod_base = OTHER; note = 2'-O-methylcytidine with phosphorothioate linkage
  modified_base 22: mod_base = OTHER; note = 2'-O-methyladenosine with phosphorothioate linkage
  modified_base 23: mod_base = OTHER; note = 2'-O-methylguanosine
tgtctcggtggtggactaaacag

SEQ ID NO: 940 - RNA, 23 nt, synthetic construct
  source 1..23: mol_type = other RNA
  modified_base 1: mod_base = OTHER; note = 5'-(E)-vinylphosphonate 2'-O-methylated guanosine with phosphorothioate linkage
  modified_base 2: mod_base = OTHER; note = 2'-fluoroguanosine with phosphorothioate linkage
  modified_base 3: mod_base = OTHER; note = 2'-O-methyluridine
  modified_base 4: mod_base = OTHER; note = 2'-fluoroguanosine
  modified_base 5: mod_base = OTHER; note = 2'-O-methyladenosine
  modified_base 6: mod_base = OTHER; note = 2'-fluorouridine
  modified_base 7: mod_base = OTHER; note = 2'-O-methylguanosine
  modified_base 8: mod_base = OTHER; note = 2'-fluoroguanosine
  modified_base 9: mod_base = OTHER; note = 2'-O-methylguanosine
  modified_base 10: mod_base = OTHER; note = 2'-fluorouridine
  modified_base 11: mod_base = OTHER; note = 2'-O-methylguanosine
  modified_base 12: mod_base = OTHER; note = 2'-fluoroguanosine
  modified_base 13: mod_base = OTHER; note = 2'-O-methylcytidine
  modified_base 14: mod_base = OTHER; note = 2'-fluorocytidine
  modified_base 15: mod_base = OTHER; note = 2'-O-methyladenosine
  modified_base 16: mod_base = OTHER; note = 2'-fluoroguanosine
  modified_base 17: mod_base = OTHER; note = 2'-O-methylguanosine
  modified_base 18: mod_base = OTHER; note = 2'-fluoroguanosine
  modified_base 19: mod_base = OTHER; note = 2'-O-methylcytidine
  modified_base 20: mod_base = OTHER; note = 2'-fluorocytidine
  modified_base 21: mod_base = OTHER; note = 2'-O-methyladenosine with phosphorothioate linkage
  modified_base 22: mod_base = OTHER; note = 2'-O-methyluridine with phosphorothioate linkage
  modified_base 23: mod_base = OTHER; note = 2'-O-methylcytidine
ggtgatgggtggccagggccatc

SEQ ID NO: 941 - RNA, 23 nt, synthetic construct
  source 1..23: mol_type = other RNA
  modified_base 1: mod_base = OTHER; note = 5'-(E)-vinylphosphonate 2'-O-methylated uridine with phosphorothioate linkage
  modified_base 2: mod_base = OTHER; note = 2'-fluorocytidine with phosphorothioate linkage
  modified_base 3: mod_base = OTHER; note = 2'-O-methylcytidine
  modified_base 4: mod_base = OTHER; note = 2'-fluorouridine
  modified_base 5: mod_base = OTHER; note = 2'-O-methylcytidine
  modified_base 6: mod_base = OTHER; note = 2'-fluorocytidine
  modified_base 7: mod_base = OTHER; note = 2'-O-methyladenosine
  modified_base 8: mod_base = OTHER; note = 2'-fluoroguanosine
  modified_base 9: mod_base = OTHER; note = 2'-O-methyluridine
  modified_base 10: mod_base = OTHER; note = 2'-fluoroguanosine
  modified_base 11: mod_base = OTHER; note = 2'-O-methylcytidine
  modified_base 12: mod_base = OTHER; note = 2'-fluoroadenosine
  modified_base 13: mod_base = OTHER; note = 2'-O-methylguanosine
  modified_base 14: mod_base = OTHER; note = 2'-fluoroadenosine
  modified_base 15: mod_base = OTHER; note = 2'-O-methyladenosine
  modified_base 16: mod_base = OTHER; note = 2'-fluoroguanosine
  modified_base 17: mod_base = OTHER; note = 2'-O-methyluridine
  modified_base 18: mod_base = OTHER; note = 2'-fluorouridine
  modified_base 19: mod_base = OTHER; note = 2'-O-methyluridine
  modified_base 20: mod_base = OTHER; note = 2'-fluoroadenosine
  modified_base 21: mod_base = OTHER; note = 2'-O-methyluridine with phosphorothioate linkage
  modified_base 22: mod_base = OTHER; note = 2'-O-methylcytidine with phosphorothioate linkage
  modified_base 23: mod_base = OTHER; note = 2'-O-methyluridine
tcctccagtgcagaagtttatct

SEQ ID NO: 942 - RNA, 23 nt, synthetic construct
  source 1..23: mol_type = other RNA
  modified_base 1: mod_base = OTHER; note = 5'-(E)-vinylphosphonate 2'-O-methylated adenosine with phosphorothioate linkage
  modified_base 2: mod_base = OTHER; note = 2'-fluorocytidine with phosphorothioate linkage
  modified_base 3: mod_base = OTHER; note = 2'-O-methyladenosine
  modified_base 4: mod_base = OTHER; note = 2'-fluorouridine
  modified_base 5: mod_base = OTHER; note = 2'-O-methylcytidine
  modified_base 6: mod_base = OTHER; note = 2'-fluoroguanosine
  modified_base 7: mod_base = OTHER; note = 2'-O-methylguanosine
  modified_base 8: mod_base = OTHER; note = 2'-fluoroguanosine
  modified_base 9: mod_base = OTHER; note = 2'-O-methyladenosine
  modified_base 10: mod_base = OTHER; note = 2'-fluoroguanosine
  modified_base 11: mod_base = OTHER; note = 2'-O-methyladenosine
  modified_base 12: mod_base = OTHER; note = 2'-fluoroguanosine
  modified_base 13: mod_base = OTHER; note = 2'-O-methylcytidine
  modified_base 14: mod_base = OTHER; note = 2'-fluorocytidine
  modified_base 15: mod_base = OTHER; note = 2'-O-methylguanosine
  modified_base 16: mod_base = OTHER; note = 2'-fluoroguanosine
  modified_base 17: mod_base = OTHER; note = 2'-O-methylguanosine
  modified_base 18: mod_base = OTHER; note = 2'-fluorouridine
  modified_base 19: mod_base = OTHER; note = 2'-O-methyluridine
  modified_base 20: mod_base = OTHER; note = 2'-fluoroadenosine
  modified_base 21: mod_base = OTHER; note = 2'-O-methylguanosine with phosphorothioate linkage
  modified_base 22: mod_base = OTHER; note = 2'-O-methyladenosine with phosphorothioate linkage
  modified_base 23: mod_base = OTHER; note = 2'-O-methyladenosine
acatcgggagagccgggttagaa

SEQ ID NO: 943 - RNA, 23 nt, synthetic construct
  source 1..23: mol_type = other RNA
  modified_base 1: mod_base = OTHER; note = 5'-(E)-vinylphosphonate 2'-O-methylated adenosine with phosphorothioate linkage
  modified_base 2: mod_base = OTHER; note = 2'-fluorouridine with phosphorothioate linkage
  modified_base 3: mod_base = OTHER; note = 2'-O-methyluridine
  modified_base 4: mod_base = OTHER; note = 2'-fluorocytidine
  modified_base 5: mod_base = OTHER; note = 2'-O-methyluridine
  modified_base 6: mod_base = OTHER; note = 2'-fluorouridine
  modified_base 7: mod_base = OTHER; note = 2'-O-methyladenosine
  modified_base 8: mod_base = OTHER; note = 2'-fluoroadenosine
  modified_base 9: mod_base = OTHER; note = 2'-O-methyluridine
  modified_base 10: mod_base = OTHER; note = 2'-fluorocytidine
  modified_base 11: mod_base = OTHER; note = 2'-O-methylcytidine
  modified_base 12: mod_base = OTHER; note = 2'-fluoroadenosine
  modified_base 13: mod_base = OTHER; note = 2'-O-methyluridine
  modified_base 14: mod_base = OTHER; note = 2'-fluoroguanosine
  modified_base 15: mod_base = OTHER; note = 2'-O-methyladenosine
  modified_base 16: mod_base = OTHER; note = 2'-fluoroguanosine
  modified_base 17: mod_base = OTHER; note = 2'-O-methyluridine
  modified_base 18: mod_base = OTHER; note = 2'-fluoroguanosine
  modified_base 19: mod_base = OTHER; note = 2'-O-methyluridine
  modified_base 20: mod_base = OTHER; note = 2'-fluorouridine
  modified_base 21: mod_base = OTHER; note = 2'-O-methylcytidine with phosphorothioate linkage
  modified_base 22: mod_base = OTHER; note = 2'-O-methyluridine with phosphorothioate linkage
  modified_base 23: mod_base = OTHER; note = 2'-O-methylguanosine
attcttaatccatgagtgttctg

SEQ ID NO: 944 - RNA, 23 nt, synthetic construct
  source 1..23: mol_type = other RNA
  modified_base 1: mod_base = OTHER; note = 5'-(E)-vinylphosphonate 2'-O-methylated uridine with phosphorothioate linkage
  modified_base 2: mod_base = OTHER; note = 2'-fluorouridine with phosphorothioate linkage
  modified_base 3: mod_base = OTHER; note = 2'-O-methylguanosine
  modified_base 4: mod_base = OTHER; note = 2'-fluorocytidine
  modified_base 5: mod_base = OTHER; note = 2'-O-methyladenosine
  modified_base 6: mod_base = OTHER; note = 2'-fluorocytidine
  modified_base 7: mod_base = OTHER; note = 2'-O-methyladenosine
  modified_base 8: mod_base = OTHER; note = 2'-fluoroguanosine
  modified_base 9: mod_base = OTHER; note = 2'-O-methylcytidine
  modified_base 10: mod_base = OTHER; note = 2'-fluorouridine
  modified_base 11: mod_base = OTHER; note = 2'-O-methylcytidine
  modified_base 12: mod_base = OTHER; note = 2'-fluoroguanosine
  modified_base 13: mod_base = OTHER; note = 2'-O-methylcytidine
  modified_base 14: mod_base = OTHER; note = 2'-fluoroadenosine
  modified_base 15: mod_base = OTHER; note = 2'-O-methyluridine
  modified_base 16: mod_base = OTHER; note = 2'-fluorouridine
  modified_base 17: mod_base = OTHER; note = 2'-O-methyluridine
  modified_base 18: mod_base = OTHER; note = 2'-fluoroadenosine
  modified_base 19: mod_base = OTHER; note = 2'-O-methyluridine
  modified_base 20: mod_base = OTHER; note = 2'-fluoroadenosine
  modified_base 21: mod_base = OTHER; note = 2'-O-methyladenosine with phosphorothioate linkage
  modified_base 22: mod_base = OTHER; note = 2'-O-methylguanosine with phosphorothioate linkage
  modified_base 23: mod_base = OTHER; note = 2'-O-methylguanosine
ttgcacagctcgcatttataagg

SEQ ID NO: 945 - RNA, 23 nt, synthetic construct
  source 1..23: mol_type = other RNA
  modified_base 1: mod_base = OTHER; note = 5'-(E)-vinylphosphonate 2'-O-methylated uridine with phosphorothioate linkage
  modified_base 2: mod_base = OTHER; note = 2'-fluorouridine with phosphorothioate linkage
  modified_base 3: mod_base = OTHER; note = 2'-O-methylcytidine
  modified_base 4: mod_base = OTHER; note = 2'-fluorouridine
  modified_base 5: mod_base = OTHER; note = 2'-O-methyladenosine
  modified_base 6: mod_base = OTHER; note = 2'-fluoroadenosine
  modified_base 7: mod_base = OTHER; note = 2'-O-methylguanosine
  modified_base 8: mod_base = OTHER; note = 2'-fluorouridine
  modified_base 9: mod_base = OTHER; note = 2'-O-methylcytidine
  modified_base 10: mod_base = OTHER; note = 2'-fluorouridine
  modified_base 11: mod_base = OTHER; note = 2'-O-methylcytidine
  modified_base 12: mod_base = OTHER; note = 2'-fluorocytidine
  modified_base 13: mod_base = OTHER; note = 2'-O-methyluridine
  modified_base 14: mod_base = OTHER; note = 2'-fluoroadenosine
  modified_base 15: mod_base = OTHER; note = 2'-O-methylguanosine
  modified_base 16: mod_base = OTHER; note = 2'-fluoroadenosine
  modified_base 17: mod_base = OTHER; note = 2'-O-methylguanosine
  modified_base 18: mod_base = OTHER; note = 2'-fluoroadenosine
  modified_base 19: mod_base = OTHER; note = 2'-O-methyladenosine
  modified_base 20: mod_base = OTHER; note = 2'-fluoroadenosine
  modified_base 21: mod_base = OTHER; note = 2'-O-methyluridine with phosphorothioate linkage
  modified_base 22: mod_base = OTHER; note = 2'-O-methylcytidine with phosphorothioate linkage
  modified_base 23: mod_base = OTHER; note = 2'-O-methylcytidine
ttctaagtctcctagagaaatcc

SEQ ID NO: 946 - RNA, 23 nt, synthetic construct
  source 1..23: mol_type = other RNA
  modified_base 1: mod_base = OTHER; note = 5'-(E)-vinylphosphonate 2'-O-methylated guanosine with phosphorothioate linkage
  modified_base 2: mod_base = OTHER; note = 2'-fluoroguanosine with phosphorothioate linkage
  modified_base 3: mod_base = OTHER; note = 2'-O-methyladenosine
  modified_base 4: mod_base = OTHER; note = 2'-fluoroguanosine
  modified_base 5: mod_base = OTHER; note = 2'-O-methyladenosine
  modified_base 6: mod_base = OTHER; note = 2'-fluoroguanosine
  modified_base 7: mod_base = OTHER; note = 2'-O-methylcytidine
  modified_base 8: mod_base = OTHER; note = 2'-fluorocytidine
  modified_base 9: mod_base = OTHER; note = 2'-O-methylguanosine
  modified_base 10: mod_base = OTHER; note = 2'-fluoroguanosine
  modified_base 11: mod_base = OTHER; note = 2'-O-methylguanosine
  modified_base 12: mod_base = OTHER; note = 2'-fluorouridine
  modified_base 13: mod_base = OTHER; note = 2'-O-methyluridine
  modified_base 14: mod_base = OTHER; note = 2'-fluoroadenosine
  modified_base 15: mod_base = OTHER; note = 2'-O-methylguanosine
  modified_base 16: mod_base = OTHER; note = 2'-fluoroadenosine
  modified_base 17: mod_base = OTHER; note = 2'-O-methyladenosine
  modified_base 18: mod_base = OTHER; note = 2'-fluoroadenosine
  modified_base 19: mod_base = OTHER; note = 2'-O-methylguanosine
  modified_base 20: mod_base = OTHER; note = 2'-fluoroadenosine
  modified_base 21: mod_base = OTHER; note = 2'-O-methyladenosine with phosphorothioate linkage
  modified_base 22: mod_base = OTHER; note = 2'-O-methylguanosine with phosphorothioate linkage
  modified_base 23: mod_base = OTHER; note = 2'-O-methylguanosine
ggagagccgggttagaaagaagg

SEQ ID NO: 947 - RNA, 23 nt, synthetic construct
  source 1..23: mol_type = other RNA
  modified_base 1: mod_base = OTHER; note = 5'-(E)-vinylphosphonate 2'-O-methylated uridine with phosphorothioate linkage
  modified_base 2: mod_base = OTHER; note = 2'-fluorocytidine with phosphorothioate linkage
  modified_base 3: mod_base = OTHER; note = 2'-O-methyladenosine
  modified_base 4: mod_base = OTHER; note = 2'-fluoroadenosine
  modified_base 5: mod_base = OTHER; note = 2'-O-methylcytidine
  modified_base 6: mod_base = OTHER; note = 2'-fluorocytidine
  modified_base 7: mod_base = OTHER; note = 2'-O-methylguanosine
  modified_base 8: mod_base = OTHER; note = 2'-fluorocytidine
  modified_base 9: mod_base = OTHER; note = 2'-O-methyladenosine
  modified_base 10: mod_base = OTHER; note = 2'-fluoroguanosine
  modified_base 11: mod_base = OTHER; note = 2'-O-methylcytidine
  modified_base 12: mod_base = OTHER; note = 2'-fluoroadenosine
  modified_base 13: mod_base = OTHER; note = 2'-O-methylcytidine
  modified_base 14: mod_base = OTHER; note = 2'-fluorocytidine
  modified_base 15: mod_base = OTHER; note = 2'-O-methylcytidine
  modified_base 16: mod_base = OTHER; note = 2'-fluorouridine
  modified_base 17: mod_base = OTHER; note = 2'-O-methylguanosine
  modified_base 18: mod_base = OTHER; note = 2'-fluorouridine
  modified_base 19: mod_base = OTHER; note = 2'-O-methylcytidine
  modified_base 20: mod_base = OTHER; note = 2'-fluoroadenosine
  modified_base 21: mod_base = OTHER; note = 2'-O-methyladenosine with phosphorothioate linkage
  modified_base 22: mod_base = OTHER; note = 2'-O-methyladenosine with phosphorothioate linkage
  modified_base 23: mod_base = OTHER; note = 2'-O-methylguanosine
tcaaccgcagcaccctgtcaaag

SEQ ID NO: 948 - RNA, 23 nt, synthetic construct
  source 1..23: mol_type = other RNA
  modified_base 1: mod_base = OTHER; note = 5'-(E)-vinylphosphonate 2'-O-methylated uridine with phosphorothioate linkage
  modified_base 2: mod_base = OTHER; note = 2'-fluorocytidine with phosphorothioate linkage
  modified_base 3: mod_base = OTHER; note = 2'-O-methylcytidine
  modified_base 4: mod_base = OTHER; note = 2'-fluorocytidine
  modified_base 5: mod_base = OTHER; note = 2'-O-methylguanosine
  modified_base 6: mod_base = OTHER; note = 2'-fluorouridine
  modified_base 7: mod_base = OTHER; note = 2'-O-methyluridine
  modified_base 8: mod_base = OTHER; note = 2'-fluorocytidine
  modified_base 9: mod_base = OTHER; note = 2'-O-methyluridine
  modified_base 10: mod_base = OTHER; note = 2'-fluorocytidine
  modified_base 11: mod_base = OTHER; note = 2'-O-methylcytidine
  modified_base 12: mod_base = OTHER; note = 2'-fluoroguanosine
  modified_base 13: mod_base = OTHER; note = 2'-O-methyladenosine
  modified_base 14: mod_base = OTHER; note = 2'-fluoroguanosine
  modified_base 15: mod_base = OTHER; note = 2'-O-methylguanosine
  modified_base 16: mod_base = OTHER; note = 2'-fluoroadenosine
  modified_base 17: mod_base = OTHER; note = 2'-O-methylguanosine
  modified_base 18: mod_base = OTHER; note = 2'-fluorouridine
  modified_base 19: mod_base = OTHER; note = 2'-O-methylguanosine
  modified_base 20: mod_base = OTHER; note = 2'-fluorocytidine
  modified_base 21: mod_base = OTHER; note = 2'-O-methyluridine with phosphorothioate linkage
  modified_base 22: mod_base = OTHER; note = 2'-O-methylcytidine with phosphorothioate linkage
  modified_base 23: mod_base = OTHER; note = 2'-O-methylcytidine
tcccgttctccgaggagtgctcc

SEQ ID NO: 949 - RNA, 23 nt, synthetic construct
  source 1..23: mol_type = other RNA
  modified_base 1: mod_base = OTHER; note = 5'-(E)-vinylphosphonate 2'-O-methylated uridine with phosphorothioate linkage
  modified_base 2: mod_base = OTHER; note = 2'-fluorouridine with phosphorothioate linkage
  modified_base 3: mod_base = OTHER; note = 2'-O-methylcytidine
  modified_base 4: mod_base = OTHER; note = 2'-fluorouridine
  modified_base 5: mod_base = OTHER; note = 2'-O-methylguanosine
  modified_base 6: mod_base = OTHER; note = 2'-fluorouridine
  modified_base 7: mod_base = OTHER; note = 2'-O-methylguanosine
  modified_base 8: mod_base = OTHER; note = 2'-fluorocytidine
  modified_base 9: mod_base = OTHER; note = 2'-O-methylguanosine
  modified_base 10: mod_base = OTHER; note = 2'-fluorouridine
  modified_base 11: mod_base = OTHER; note = 2'-O-methylguanosine
  modified_base 12: mod_base = OTHER; note = 2'-fluorouridine
  modified_base 13: mod_base = OTHER; note = 2'-O-methyluridine
  modified_base 14: mod_base = OTHER; note = 2'-fluoroguanosine
  modified_base 15: mod_base = OTHER; note = 2'-O-methylcytidine
  modified_base 16: mod_base = OTHER; note = 2'-fluoroadenosine
  modified_base 17: mod_base = OTHER; note = 2'-O-methyladenosine
  modified_base 18: mod_base = OTHER; note = 2'-fluoroguanosine
  modified_base 19: mod_base = OTHER; note = 2'-O-methyladenosine
  modified_base 20: mod_base = OTHER; note = 2'-fluoroguanosine
  modified_base 21: mod_base = OTHER; note = 2'-O-methyladenosine with phosphorothioate linkage
  modified_base 22: mod_base = OTHER; note = 2'-O-methyladenosine with phosphorothioate linkage
  modified_base 23: mod_base = OTHER; note = 2'-O-methyladenosine
ttctgtgcgtgttgcaagagaaa

SEQ ID NO: 950 - RNA, 23 nt, synthetic construct
  source 1..23: mol_type = other RNA
  modified_base 1: mod_base = OTHER; note = 5'-(E)-vinylphosphonate 2'-O-methylated uridine with phosphorothioate linkage
  modified_base 2: mod_base = OTHER; note = 2'-fluorocytidine with phosphorothioate linkage
  modified_base 3: mod_base = OTHER; note = 2'-O-methylguanosine
  modified_base 4: mod_base = OTHER; note = 2'-fluoroguanosine
  modified_base 5: mod_base = OTHER; note = 2'-O-methylguanosine
  modified_base 6: mod_base = OTHER; note = 2'-fluorouridine
  modified_base 7: mod_base = OTHER; note = 2'-O-methylguanosine
  modified_base 8: mod_base = OTHER; note = 2'-fluoroadenosine
  modified_base 9: mod_base = OTHER; note = 2'-O-methyluridine
  modified_base 10: mod_base = OTHER; note = 2'-fluoroguanosine
  modified_base 11: mod_base = OTHER; note = 2'-O-methylguanosine
  modified_base 12: mod_base = OTHER; note = 2'-fluoroguanosine
  modified_base 13: mod_base = OTHER; note = 2'-O-methyluridine
  modified_base 14: mod_base = OTHER; note = 2'-fluoroguanosine
  modified_base 15: mod_base = OTHER; note = 2'-O-methylguanosine
  modified_base 16: mod_base = OTHER; note = 2'-fluorocytidine
  modified_base 17: mod_base = OTHER; note = 2'-O-methylcytidine
  modified_base 18: mod_base = OTHER; note = 2'-fluoroadenosine
  modified_base 19: mod_base = OTHER; note = 2'-O-methylguanosine
  modified_base 20: mod_base = OTHER; note = 2'-fluoroguanosine
  modified_base 21: mod_base = OTHER; note = 2'-O-methylguanosine with phosphorothioate linkage
  modified_base 22: mod_base = OTHER; note = 2'-O-methylcytidine with phosphorothioate linkage
  modified_base 23: mod_base = OTHER; note = 2'-O-methylcytidine
tcgggtgatgggtggccagggcc

SEQ ID NO: 951 - RNA, 23 nt, synthetic construct
  source 1..23: mol_type = other RNA
  modified_base 1: mod_base = OTHER; note = 5'-(E)-vinylphosphonate 2'-O-methylated guanosine with phosphorothioate linkage
  modified_base 2: mod_base = OTHER; note = 2'-fluoroguanosine with phosphorothioate linkage
  modified_base 3: mod_base = OTHER; note = 2'-O-methylguanosine
  modified_base 4: mod_base = OTHER; note = 2'-fluorocytidine
  modified_base 5: mod_base = OTHER; note = 2'-O-methylguanosine
  modified_base 6: mod_base = OTHER; note = 2'-fluoroadenosine
  modified_base 7: mod_base = OTHER; note = 2'-O-methylguanosine
  modified_base 8: mod_base = OTHER; note = 2'-fluoroadenosine
  modified_base 9: mod_base = OTHER; note = 2'-O-methyladenosine
  modified_base 10: mod_base = OTHER; note = 2'-fluorouridine
  modified_base 11: mod_base = OTHER; note = 2'-O-methyluridine
  modified_base 12: mod_base = OTHER; note = 2'-fluorocytidine
  modified_base 13: mod_base = OTHER; note = 2'-O-methylcytidine
  modified_base 14: mod_base = OTHER; note = 2'-fluorocytidine
  modified_base 15: mod_base = OTHER; note = 2'-O-methylguanosine
  modified_base 16: mod_base = OTHER; note = 2'-fluorouridine
  modified_base 17: mod_base = OTHER; note = 2'-O-methyluridine
  modified_base 18: mod_base = OTHER; note = 2'-fluorouridine
  modified_base 19: mod_base = OTHER; note = 2'-O-methylguanosine
  modified_base 20: mod_base = OTHER; note = 2'-fluorocytidine
  modified_base 21: mod_base = OTHER; note = 2'-O-methyluridine with phosphorothioate linkage
  modified_base 22: mod_base = OTHER; note = 2'-O-methyluridine with phosphorothioate linkage
  modified_base 23: mod_base = OTHER; note = 2'-O-methyladenosine
gggcgagaattcccgtttgctta

SEQ ID NO: 952 - RNA, 23 nt, synthetic construct
  source 1..23: mol_type = other RNA
  modified_base 1: mod_base = OTHER; note = 5'-(E)-vinylphosphonate 2'-O-methylated uridine with phosphorothioate linkage
  modified_base 2: mod_base = OTHER; note = 2'-fluorouridine with phosphorothioate linkage
  modified_base 3: mod_base = OTHER; note = 2'-O-methyladenosine
  modified_base 4: mod_base = OTHER; note = 2'-fluoroguanosine
  modified_base 5: mod_base = OTHER; note = 2'-O-methyladenosine
  modified_base 6: mod_base = OTHER; note = 2'-fluorocytidine
  modified_base 7: mod_base = OTHER; note = 2'-O-methylguanosine
  modified_base 8: mod_base = OTHER; note = 2'-fluorouridine
  modified_base 9: mod_base = OTHER; note = 2'-O-methylguanosine
  modified_base 10: mod_base = OTHER; note = 2'-fluorouridine
  modified_base 11: mod_base = OTHER; note = 2'-O-methyluridine
  modified_base 12: mod_base = OTHER; note = 2'-fluorocytidine
  modified_base 13: mod_base = OTHER; note = 2'-O-methylcytidine
  modified_base 14: mod_base = OTHER; note = 2'-fluorocytidine
  modified_base 15: mod_base = OTHER; note = 2'-O-methyluridine
  modified_base 16: mod_base = OTHER; note = 2'-fluoroguanosine
  modified_base 17: mod_base = OTHER; note = 2'-O-methylcytidine
  modified_base 18: mod_base = OTHER; note = 2'-fluorocytidine
  modified_base 19: mod_base = OTHER; note = 2'-O-methyladenosine
  modified_base 20: mod_base = OTHER; note = 2'-fluoroguanosine
  modified_base 21: mod_base = OTHER; note = 2'-O-methylcytidine with phosphorothioate linkage
  modified_base 22: mod_base = OTHER; note = 2'-O-methyluridine with phosphorothioate linkage
  modified_base 23: mod_base = OTHER; note = 2'-O-methylcytidine
ttagacgtgttccctgccagctc

SEQ ID NO: 953 - RNA, 23 nt, synthetic construct
  source 1..23: mol_type = other RNA
  modified_base 1: mod_base = OTHER; note = 5'-(E)-vinylphosphonate 2'-O-methylated adenosine with phosphorothioate linkage
  modified_base 2: mod_base = OTHER; note = 2'-fluoroadenosine with phosphorothioate linkage
  modified_base 3: mod_base = OTHER; note = 2'-O-methylguanosine
  modified_base 4: mod_base = OTHER; note = 2'-fluoroguanosine
  modified_base 5: mod_base = OTHER; note = 2'-O-methylcytidine
  modified_base 6: mod_base = OTHER; note = 2'-fluoroguanosine
  modified_base 7: mod_base = OTHER; note = 2'-O-methyladenosine
  modified_base 8: mod_base = OTHER; note = 2'-fluorouridine
  modified_base 9: mod_base = OTHER; note = 2'-O-methyluridine
  modified_base 10: mod_base = OTHER; note = 2'-fluoroguanosine
  modified_base 11: mod_base = OTHER; note = 2'-O-methyluridine
  modified_base 12: mod_base = OTHER; note = 2'-fluorocytidine
  modified_base 13: mod_base = OTHER; note = 2'-O-methyluridine
  modified_base 14: mod_base = OTHER; note = 2'-fluoroguanosine
  modified_base 15: mod_base = OTHER; note = 2'-O-methylguanosine
  modified_base 16: mod_base = OTHER; note = 2'-fluoroadenosine
  modified_base 17: mod_base = OTHER; note = 2'-O-methylguanosine
  modified_base 18: mod_base = OTHER; note = 2'-fluorouridine
  modified_base 19: mod_base = OTHER; note = 2'-O-methylcytidine
  modified_base 20: mod_base = OTHER; note = 2'-fluorouridine
  modified_base 21: mod_base = OTHER; note = 2'-O-methylcytidine with phosphorothioate linkage
  modified_base 22: mod_base = OTHER; note = 2'-O-methylcytidine with phosphorothioate linkage
  modified_base 23: mod_base = OTHER; note = 2'-O-methylguanosine
aaggcgattgtctggagtctccg

SEQ ID NO: 954 - RNA, 23 nt, synthetic construct
  source 1..23: mol_type = other RNA
  modified_base 1: mod_base = OTHER; note = 5'-(E)-vinylphosphonate 2'-O-methylated uridine with phosphorothioate linkage
  modified_base 2: mod_base = OTHER; note = 2'-fluoroguanosine with phosphorothioate linkage
  modified_base 3: mod_base = OTHER; note = 2'-O-methylcytidine
  modified_base 4: mod_base = OTHER; note = 2'-fluoroadenosine
  modified_base 5: mod_base = OTHER; note = 2'-O-methylguanosine
  modified_base 6: mod_base = OTHER; note = 2'-fluorouridine
  modified_base 7: mod_base = OTHER; note = 2'-O-methyladenosine
  modified_base 8: mod_base = OTHER; note = 2'-fluoroadenosine
  modified_base 9: mod_base = OTHER; note = 2'-O-methylcytidine
  modified_base 10: mod_base = OTHER; note = 2'-fluorocytidine
  modified_base 11: mod_base = OTHER; note = 2'-O-methyluridine
  modified_base 12: mod_base = OTHER; note = 2'-fluorouridine
  modified_base 13: mod_base = OTHER; note = 2'-O-methyluridine
  modified_base 14: mod_base = OTHER; note = 2'-fluoroguanosine
  modified_base 15: mod_base = OTHER; note = 2'-O-methylcytidine
  modified_base 16: mod_base = OTHER; note = 2'-fluoroadenosine
  modified_base 17: mod_base = OTHER; note = 2'-O-methyluridine
  modified_base 18: mod_base = OTHER; note = 2'-fluoroadenosine
  modified_base 19: mod_base = OTHER; note = 2'-O-methylguanosine
  modified_base 20: mod_base = OTHER; note = 2'-fluoroguanosine
  modified_base 21: mod_base = OTHER; note = 2'-O-methylguanosine with phosphorothioate linkage
  modified_base 22: mod_base = OTHER; note = 2'-O-methylcytidine with phosphorothioate linkage
  modified_base 23: mod_base = OTHER; note = 2'-O-methyluridine
tgcagtaacctttgcatagggct

SEQ ID NO: 955 - RNA, 23 nt, synthetic construct
  source 1..23: mol_type = other RNA
  modified_base 1: mod_base = OTHER; note = 5'-(E)-vinylphosphonate 2'-O-methylated guanosine with phosphorothioate linkage
  modified_base 2: mod_base = OTHER; note = 2'-fluoroadenosine with phosphorothioate linkage
  modified_base 3: mod_base = OTHER; note = 2'-O-methyluridine
  modified_base 4: mod_base = OTHER; note = 2'-fluoroadenosine
  modified_base 5: mod_base = OTHER; note = 2'-O-methylcytidine
  modified_base 6: mod_base = OTHER; note = 2'-fluorouridine
  modified_base 7: mod_base = OTHER; note = 2'-O-methylguanosine
  modified_base 8: mod_base = OTHER; note = 2'-fluoroadenosine
  modified_base 9: mod_base = OTHER; note = 2'-O-methyluridine
  modified_base 10: mod_base = OTHER; note = 2'-fluorocytidine
  modified_base 11: mod_base = OTHER; note = 2'-O-methylcytidine
  modified_base 12: mod_base = OTHER; note = 2'-fluorouridine
  modified_base 13: mod_base = OTHER; note = 2'-O-methylguanosine
  modified_base 14: mod_base = OTHER; note = 2'-fluoroguanosine
  modified_base 15: mod_base = OTHER; note = 2'-O-methyluridine
  modified_base 16: mod_base = OTHER; note = 2'-fluoroadenosine
  modified_base 17: mod_base = OTHER; note = 2'-O-methyluridine
  modified_base 18: mod_base = OTHER; note = 2'-fluorouridine
  modified_base 19: mod_base = OTHER; note = 2'-O-methylcytidine
  modified_base 20: mod_base = OTHER; note = 2'-fluorouridine
  modified_base 21: mod_base = OTHER; note = 2'-O-methyluridine with phosphorothioate linkage
  modified_base 22: mod_base = OTHER; note = 2'-O-methyladenosine with phosphorothioate linkage
  modified_base 23: mod_base = OTHER; note = 2'-O-methylguanosine
gatactgatcctggtattcttag

SEQ ID NO: 956 - RNA, 23 nt, synthetic construct
  source 1..23: mol_type = other RNA
  modified_base 1: mod_base = OTHER; note = 5'-(E)-vinylphosphonate 2'-O-methylated adenosine with phosphorothioate linkage
  modified_base 2: mod_base = OTHER; note = 2'-fluoroadenosine with phosphorothioate linkage
  modified_base 3: mod_base = OTHER; note = 2'-O-methylguanosine
  modified_base 4: mod_base = OTHER; note = 2'-fluoroadenosine
  modified_base 5: mod_base = OTHER; note = 2'-O-methyluridine
  modified_base 6: mod_base = OTHER; note = 2'-fluoroguanosine
  modified_base 7: mod_base = OTHER; note = 2'-O-methylguanosine
  modified_base 8: mod_base = OTHER; note = 2'-fluorocytidine
  modified_base 9: mod_base = OTHER; note = 2'-O-methylguanosine
  modified_base 10: mod_base = OTHER; note = 2'-fluorocytidine
  modified_base 11: mod_base = OTHER; note = 2'-O-methyladenosine
  modified_base 12: mod_base = OTHER; note = 2'-fluoroguanosine
  modified_base 13: mod_base = OTHER; note = 2'-O-methylguanosine
  modified_base 14: mod_base = OTHER; note = 2'-fluoroguanosine
  modified_base 15: mod_base = OTHER; note = 2'-O-methyladenosine
  modified_base 16: mod_base = OTHER; note = 2'-fluoroadenosine
  modified_base 17: mod_base = OTHER; note = 2'-O-methylguanosine
  modified_base 18: mod_base = OTHER; note = 2'-fluoroadenosine
  modified_base 19: mod_base = OTHER; note = 2'-O-methyluridine
  modified_base 20: mod_base = OTHER; note = 2'-fluoroguanosine
  modified_base 21: mod_base = OTHER; note = 2'-O-methyladenosine with phosphorothioate linkage
  modified_base 22: mod_base = OTHER; note = 2'-O-methyladenosine with phosphorothioate linkage
  modified_base 23: mod_base = OTHER; note = 2'-O-methyluridine
aagatggcgcagggaagatgaat

SEQ ID NO: 957 - RNA, 23 nt, synthetic construct
  source 1..23: mol_type = other RNA
  modified_base 1: mod_base = OTHER; note = 5'-(E)-vinylphosphonate 2'-O-methylated guanosine with phosphorothioate linkage
  modified_base 2: mod_base = OTHER; note = 2'-fluoroadenosine with phosphorothioate linkage
  modified_base 3: mod_base = OTHER; note = 2'-O-methylguanosine
  modified_base 4: mod_base = OTHER; note = 2'-fluoroadenosine
  modified_base 5: mod_base = OTHER; note = 2'-O-methylguanosine
  modified_base 6: mod_base = OTHER; note = 2'-fluorocytidine
  modified_base 7: mod_base = OTHER; note = 2'-O-methylcytidine
  modified_base 8: mod_base = OTHER; note = 2'-fluoroguanosine
  modified_base 9: mod_base = OTHER; note = 2'-O-methylguanosine
  modified_base 10: mod_base = OTHER; note = 2'-fluoroguanosine
  modified_base 11: mod_base = OTHER; note = 2'-O-methyluridine
  modified_base 12: mod_base = OTHER; note = 2'-fluorouridine
  modified_base 13: mod_base = OTHER; note = 2'-O-methyladenosine
  modified_base 14: mod_base = OTHER; note = 2'-fluoroguanosine
  modified_base 15: mod_base = OTHER; note = 2'-O-methyladenosine
  modified_base 16: mod_base = OTHER; note = 2'-fluoroadenosine
  modified_base 17: mod_base = OTHER; note = 2'-O-methyladenosine
  modified_base 18: mod_base = OTHER; note = 2'-fluoroguanosine
  modified_base 19: mod_base = OTHER; note = 2'-O-methyladenosine
  modified_base 20: mod_base = OTHER; note = 2'-fluoroadenosine
  modified_base 21: mod_base = OTHER; note = 2'-O-methylguanosine with phosphorothioate linkage
  modified_base 22: mod_base = OTHER; note = 2'-O-methylguanosine with phosphorothioate linkage
  modified_base 23: mod_base = OTHER; note = 2'-O-methyladenosine
gagagccgggttagaaagaagga

SEQ ID NO: 958 - RNA, 23 nt, synthetic construct
  source 1..23: mol_type = other RNA
  modified_base 1: mod_base = OTHER; note = 5'-(E)-vinylphosphonate 2'-O-methylated uridine with phosphorothioate linkage
  modified_base 2: mod_base = OTHER; note = 2'-fluoroadenosine with phosphorothioate linkage
  modified_base 3: mod_base = OTHER; note = 2'-O-methyladenosine
  modified_base 4: mod_base = OTHER; note = 2'-fluoroguanosine
  modified_base 5: mod_base = OTHER; note = 2'-O-methyluridine
  modified_base 6: mod_base = OTHER; note = 2'-fluoroguanosine
  modified_base 7: mod_base = OTHER; note = 2'-O-methyladenosine
  modified_base 8: mod_base = OTHER; note = 2'-fluorouridine
  modified_base 9: mod_base = OTHER; note = 2'-O-methylguanosine
  modified_base 10: mod_base = OTHER; note = 2'-fluorouridine
  modified_base 11: mod_base = OTHER; note = 2'-O-methylcytidine
  modified_base 12: mod_base = OTHER; note = 2'-fluorouridine
  modified_base 13: mod_base = OTHER; note = 2'-O-methylcytidine
  modified_base 14: mod_base = OTHER; note = 2'-fluoroguanosine
  modified_base 15: mod_base = OTHER; note = 2'-O-methylguanosine
  modified_base 16: mod_base = OTHER; note = 2'-fluorouridine
  modified_base 17: mod_base = OTHER; note = 2'-O-methylguanosine
  modified_base 18: mod_base = OTHER; note = 2'-fluoroguanosine
  modified_base 19: mod_base = OTHER; note = 2'-O-methyluridine
  modified_base 20: mod_base = OTHER; note = 2'-fluoroguanosine
  modified_base 21: mod_base = OTHER; note = 2'-O-methylguanosine with phosphorothioate linkage
  modified_base 22: mod_base = OTHER; note = 2'-O-methyladenosine with phosphorothioate linkage
  modified_base 23: mod_base = OTHER; note = 2'-O-methylcytidine
taagtgatgtctcggtggtggac

SEQ ID NO: 959 - RNA, 23 nt, synthetic construct
  source 1..23: mol_type = other RNA
  modified_base 1: mod_base = OTHER; note = 5'-(E)-vinylphosphonate 2'-O-methylated uridine with phosphorothioate linkage
  modified_base 2: mod_base = OTHER; note = 2'-fluoroguanosine with phosphorothioate linkage
  modified_base 3: mod_base = OTHER; note = 2'-O-methylcytidine
  modified_base 4: mod_base = OTHER; note = 2'-fluorouridine
  modified_base 5: mod_base = OTHER; note = 2'-O-methyladenosine
  modified_base 6: mod_base = OTHER; note = 2'-fluorocytidine
  modified_base 7: mod_base = OTHER; note = 2'-O-methylcytidine
  modified_base 8: mod_base = OTHER; note = 2'-fluorouridine
  modified_base 9: mod_base = OTHER; note = 2'-O-methylguanosine
  modified_base 10: mod_base = OTHER; note = 2'-fluoroguanosine
  modified_base 11: mod_base = OTHER; note = 2'-O-methylcytidine
  modified_base 12: mod_base = OTHER; note = 2'-fluorouridine
  modified_base 13: mod_base = OTHER; note = 2'-O-methylguanosine
  modified_base 14: mod_base = OTHER; note = 2'-fluoroguanosine
  modified_base 15: mod_base = OTHER; note = 2'-O-methyladenosine
  modified_base 16: mod_base = OTHER; note = 2'-fluoroadenosine
  modified_base 17: mod_base = OTHER; note = 2'-O-methyluridine
  modified_base 18: mod_base = OTHER; note = 2'-fluoroguanosine
  modified_base 19: mod_base = OTHER; note = 2'-O-methylguanosine
  modified_base 20: mod_base = OTHER; note = 2'-fluorouridine
  modified_base 21: mod_base = OTHER; note = 2'-O-methyluridine with phosphorothioate linkage
  modified_base 22: mod_base = OTHER; note = 2'-O-methylguanosine with phosphorothioate linkage
  modified_base 23: mod_base = OTHER; note = 2'-O-methylcytidine
tgctacctggctggaatggttgc

SEQ ID NO: 960 - RNA, 23 nt, synthetic construct
  source 1..23: mol_type = other RNA
  modified_base 1: mod_base = OTHER; note = 5'-(E)-vinylphosphonate 2'-O-methylated adenosine with phosphorothioate linkage
  modified_base 2: mod_base = OTHER; note = 2'-fluorocytidine with phosphorothioate linkage
  modified_base 3: mod_base = OTHER; note = 2'-O-methyladenosine
  modified_base 4: mod_base = OTHER; note = 2'-fluoroadenosine
  modified_base 5: mod_base = OTHER; note = 2'-O-methyladenosine
  modified_base 6: mod_base = OTHER; note = 2'-fluoroguanosine
  modified_base 7: mod_base = OTHER; note = 2'-O-methyladenosine
  modified_base 8: mod_base = OTHER; note = 2'-fluorouridine
  modified_base 9: mod_base = OTHER; note = 2'-O-methylguanosine
  modified_base 10: mod_base = OTHER; note = 2'-fluoroguanosine
  modified_base 11: mod_base = OTHER; note = 2'-O-methylcytidine
  modified_base 12: mod_base = OTHER; note = 2'-fluoroguanosine
  modified_base 13: mod_base = OTHER; note = 2'-O-methylcytidine
  modified_base 14: mod_base = OTHER; note = 2'-fluoroadenosine
  modified_base 15: mod_base = OTHER; note = 2'-O-methylguanosine
  modified_base 16: mod_base = OTHER; note = 2'-fluoroguanosine
  modified_base 17: mod_base = OTHER; note = 2'-O-methylguanosine
  modified_base 18: mod_base = OTHER; note = 2'-fluoroadenosine
  modified_base 19: mod_base = OTHER; note = 2'-O-methyladenosine
  modified_base 20: mod_base = OTHER; note = 2'-fluoroguanosine
  modified_base 21: mod_base = OTHER; note = 2'-O-methyladenosine with phosphorothioate linkage
  modified_base 22: mod_base = OTHER; note = 2'-O-methyluridine with phosphorothioate linkage
  modified_base 23: mod_base = OTHER; note = 2'-O-methylguanosine
acaaagatggcgcagggaagatg

SEQ ID NO: 961 - RNA, 23 nt, synthetic construct
  source 1..23: mol_type = other RNA
  modified_base 1: mod_base = OTHER; note = 5'-(E)-vinylphosphonate 2'-O-methylated adenosine with phosphorothioate linkage
  modified_base 2: mod_base = OTHER; note = 2'-fluorocytidine with phosphorothioate linkage
  modified_base 3: mod_base = OTHER; note = 2'-O-methyluridine
  modified_base 4: mod_base = OTHER; note = 2'-fluorocytidine
  modified_base 5: mod_base = OTHER; note = 2'-O-methylguanosine
  modified_base 6: mod_base = OTHER; note = 2'-fluoroguanosine
  modified_base 7: mod_base = OTHER; note = 2'-O-methylguanosine
  modified_base 8: mod_base = OTHER; note = 2'-fluorouridine
  modified_base 9: mod_base = OTHER; note = 2'-O-methylguanosine
  modified_base 10: mod_base = OTHER; note = 2'-fluoroadenosine
  modified_base 11: mod_base = OTHER; note = 2'-O-methyluridine
  modified_base 12: mod_base = OTHER; note = 2'-fluoroguanosine
  modified_base 13: mod_base = OTHER; note = 2'-O-methylguanosine
  modified_base 14: mod_base = OTHER; note = 2'-fluoroguanosine
  modified_base 15: mod_base = OTHER; note = 2'-O-methyluridine
  modified_base 16: mod_base = OTHER; note = 2'-fluoroguanosine
  modified_base 17: mod_base = OTHER; note = 2'-O-methylguanosine
  modified_base 18: mod_base = OTHER; note = 2'-fluorocytidine
  modified_base 19: mod_base = OTHER; note = 2'-O-methylcytidine
  modified_base 20: mod_base = OTHER; note = 2'-fluoroadenosine
  modified_base 21: mod_base = OTHER; note = 2'-O-methylguanosine with phosphorothioate linkage
  modified_base 22: mod_base = OTHER; note = 2'-O-methylguanosine with phosphorothioate linkage
  modified_base 23: mod_base = OTHER; note = 2'-O-methylguanosine
actcgggtgatgggtggccaggg

SEQ ID NO: 962 - RNA, 23 nt, synthetic construct
  source 1..23: mol_type = other RNA
  modified_base 1: mod_base = OTHER; note = 5'-(E)-vinylphosphonate 2'-O-methylated adenosine with phosphorothioate linkage
  modified_base 2: mod_base = OTHER; note = 2'-fluoroguanosine with phosphorothioate linkage
  modified_base 3: mod_base = OTHER; note = 2'-O-methyluridine
  modified_base 4: mod_base = OTHER; note = 2'-fluoroguanosine
  modified_base 5: mod_base = OTHER; note = 2'-O-methyluridine
  modified_base 6: mod_base = OTHER; note = 2'-fluorocytidine
  modified_base 7: mod_base = OTHER; note = 2'-O-methylguanosine
  modified_base 8: mod_base = OTHER; note = 2'-fluorocytidine
  modified_base 9: mod_base = OTHER; note = 2'-O-methyluridine
  modified_base 10: mod_base = OTHER; note = 2'-fluoroguanosine
  modified_base 11: mod_base = OTHER; note = 2'-O-methylcytidine
  modified_base 12: mod_base = OTHER; note = 2'-fluoroguanosine
  modified_base 13: mod_base = OTHER; note = 2'-O-methyluridine
  modified_base 14: mod_base = OTHER; note = 2'-fluorocytidine
  modified_base 15: mod_base = OTHER; note = 2'-O-methyluridine
  modified_base 16: mod_base = OTHER; note = 2'-fluoroguanosine
  modified_base 17: mod_base = OTHER; note = 2'-O-methylcytidine
  modified_base 18: mod_base = OTHER; note = 2'-fluorocytidine
  modified_base 19: mod_base = OTHER; note = 2'-O-methylcytidine
  modified_base 20: mod_base = OTHER; note = 2'-fluorouridine
  modified_base 21: mod_base = OTHER; note = 2'-O-methylcytidine with phosphorothioate linkage
  modified_base 22: mod_base = OTHER; note = 2'-O-methyluridine with phosphorothioate linkage
  modified_base 23: mod_base = OTHER; note = 2'-O-methyluridine
agtgtcgctgcgtctgccctctt

SEQ ID NO: 963 - RNA, 23 nt, synthetic construct
  source 1..23: mol_type = other RNA
  modified_base 1: mod_base = OTHER; note = 5'-(E)-vinylphosphonate 2'-O-methylated guanosine with phosphorothioate linkage
  modified_base 2: mod_base = OTHER; note = 2'-fluorocytidine with phosphorothioate linkage
  modified_base 3: mod_base = OTHER; note = 2'-O-methylguanosine
  modified_base 4: mod_base = OTHER; note = 2'-fluorocytidine
  modified_base 5: mod_base = OTHER; note = 2'-O-methyladenosine
  modified_base 6: mod_base = OTHER; note = 2'-fluoroguanosine
  modified_base 7: mod_base = OTHER; note = 2'-O-methylguanosine
  modified_base 8: mod_base = OTHER; note = 2'-fluoroguanosine
  modified_base 9: mod_base = OTHER; note = 2'-O-methyladenosine
  modified_base 10: mod_base = OTHER; note = 2'-fluoroadenosine
  modified_base 11: mod_base = OTHER; note = 2'-O-methylguanosine
  modified_base 12: mod_base = OTHER; note = 2'-fluoroadenosine
  modified_base 13: mod_base = OTHER; note = 2'-O-methyluridine
  modified_base 14: mod_base = OTHER; note = 2'-fluoroguanosine
  modified_base 15: mod_base = OTHER; note = 2'-O-methyladenosine
  modified_base 16: mod_base = OTHER; note = 2'-fluoroadenosine
  modified_base 17: mod_base = OTHER; note = 2'-O-methyluridine
  modified_base 18: mod_base = OTHER; note = 2'-fluorouridine
  modified_base 19: mod_base = OTHER; note = 2'-O-methylguanosine
  modified_base 20: mod_base = OTHER; note = 2'-fluorouridine
  modified_base 21: mod_base = OTHER; note = 2'-O-methylguanosine with phosphorothioate linkage
  modified_base 22: mod_base = OTHER; note = 2'-O-methylguanosine with phosphorothioate linkage
  modified_base 23: mod_base = OTHER; note = 2'-O-methylguanosine
gcgcagggaagatgaattgtggg

SEQ ID NO: 964 - RNA, 23 nt, synthetic construct
  source 1..23: mol_type = other RNA
  modified_base 1: mod_base = OTHER; note = 5'-(E)-vinylphosphonate 2'-O-methylated uridine with phosphorothioate linkage
  modified_base 2: mod_base = OTHER; note = 2'-fluorocytidine with phosphorothioate linkage
  modified_base 3: mod_base = OTHER; note = 2'-O-methyladenosine
  modified_base 4: mod_base = OTHER; note = 2'-fluoroadenosine
  modified_base 5: mod_base = OTHER; note = 2'-O-methyladenosine
  modified_base 6: mod_base = OTHER; note = 2'-fluoroguanosine
  modified_base 7: mod_base = OTHER; note = 2'-O-methylguanosine
  modified_base 8: mod_base = OTHER; note = 2'-fluorocytidine
  modified_base 9: mod_base = OTHER; note = 2'-O-methyladenosine
  modified_base 10: mod_base = OTHER; note = 2'-fluorocytidine
  modified_base 11: mod_base = OTHER; note = 2'-O-methyluridine
  modified_base 12: mod_base = OTHER; note = 2'-fluorocytidine
  modified_base 13: mod_base = OTHER; note = 2'-O-methylguanosine
  modified_base 14: mod_base = OTHER; note = 2'-fluoroguanosine
  modified_base 15: mod_base = OTHER; note = 2'-O-methylguanosine
  modified_base 16: mod_base = OTHER; note = 2'-fluorouridine
  modified_base 17: mod_base = OTHER; note = 2'-O-methylguanosine
  modified_base 18: mod_base = OTHER; note = 2'-fluoroadenosine
  modified_base 19: mod_base = OTHER; note = 2'-O-methyluridine
  modified_base 20: mod_base = OTHER; note = 2'-fluoroguanosine
  modified_base 21: mod_base = OTHER; note = 2'-O-methylguanosine with phosphorothioate linkage
  modified_base 22: mod_base = OTHER; note = 2'-O-methylguanosine with phosphorothioate linkage
  modified_base 23: mod_base = OTHER; note = 2'-O-methyluridine
tcaaaggcactcgggtgatgggt

SEQ ID NO: 965 - RNA, 23 nt, synthetic construct
  source 1..23: mol_type = other RNA
  modified_base 1: mod_base = OTHER; note = 5'-(E)-vinylphosphonate 2'-O-methylated uridine with phosphorothioate linkage
  modified_base 2: mod_base = OTHER; note = 2'-fluorocytidine with phosphorothioate linkage
  modified_base 3: mod_base = OTHER; note = 2'-O-methyladenosine
  modified_base 4: mod_base = OTHER; note = 2'-fluorouridine
  modified_base 5: mod_base = OTHER; note = 2'-O-methylguanosine
  modified_base 6: mod_base = OTHER; note = 2'-fluoroadenosine
  modified_base 7: mod_base = OTHER; note = 2'-O-methylguanosine
  modified_base 8: mod_base = OTHER; note = 2'-fluorouridine
  modified_base 9: mod_base = OTHER; note = 2'-O-methylguanosine
  modified_base 10: mod_base = OTHER; note = 2'-fluorouridine
  modified_base 11: mod_base = OTHER; note = 2'-O-methyluridine
  modified_base 12: mod_base = OTHER; note = 2'-fluorocytidine
  modified_base 13: mod_base = OTHER; note = 2'-O-methyluridine
  modified_base 14: mod_base = OTHER; note = 2'-fluoroguanosine
  modified_base 15: mod_base = OTHER; note = 2'-O-methyluridine
  modified_base 16: mod_base = OTHER; note = 2'-fluoroguanosine
  modified_base 17: mod_base = OTHER; note = 2'-O-methylcytidine
  modified_base 18: mod_base = OTHER; note = 2'-fluoroguanosine
  modified_base 19: mod_base = OTHER; note = 2'-O-methyluridine
  modified_base 20: mod_base = OTHER; note = 2'-fluoroguanosine
  modified_base 21: mod_base = OTHER; note = 2'-O-methyluridine with phosphorothioate linkage
  modified_base 22: mod_base = OTHER; note = 2'-O-methyluridine with phosphorothioate linkage
  modified_base 23: mod_base = OTHER; note = 2'-O-methylguanosine
tcatgagtgttctgtgcgtgttg

SEQ ID NO: 966 - RNA, 23 nt, synthetic construct
  source 1..23: mol_type = other RNA
  modified_base 1: mod_base = OTHER; note = 5'-(E)-vinylphosphonate 2'-O-methylated guanosine with phosphorothioate linkage
  modified_base 2: mod_base = OTHER; note = 2'-fluorocytidine with phosphorothioate linkage
  modified_base 3: mod_base = OTHER; note = 2'-O-methylcytidine
  modified_base 4: mod_base = OTHER; note = 2'-fluorouridine
  modified_base 5: mod_base = OTHER; note = 2'-O-methyluridine
  modified_base 6: mod_base = OTHER; note = 2'-fluorouridine
  modified_base 7: mod_base = OTHER; note = 2'-O-methylcytidine
  modified_base 8: mod_base = OTHER; note = 2'-fluoroguanosine
  modified_base 9: mod_base = OTHER; note = 2'-O-methylcytidine
  modified_base 10: mod_base = OTHER; note = 2'-fluorocytidine
  modified_base 11: mod_base = OTHER; note = 2'-O-methylcytidine
  modified_base 12: mod_base = OTHER; note = 2'-fluoroguanosine
  modified_base 13: mod_base = OTHER; note = 2'-O-methyluridine
  modified_base 14: mod_base = OTHER; note = 2'-fluoroguanosine
  modified_base 15: mod_base = OTHER; note = 2'-O-methyluridine
  modified_base 16: mod_base = OTHER; note = 2'-fluoroguanosine
  modified_base 17: mod_base = OTHER; note = 2'-O-methylguanosine
  modified_base 18: mod_base = OTHER; note = 2'-fluorocytidine
  modified_base 19: mod_base = OTHER; note = 2'-O-methyluridine
  modified_base 20: mod_base = OTHER; note = 2'-fluorouridine
  modified_base 21: mod_base = OTHER; note = 2'-O-methylcytidine with phosphorothioate linkage
  modified_base 22: mod_base = OTHER; note = 2'-O-methyluridine with phosphorothioate linkage
  modified_base 23: mod_base = OTHER; note = 2'-O-methylcytidine
gcctttcgcccgtgtggcttctc

SEQ ID NO: 967 - RNA, 23 nt, synthetic construct
  source 1..23: mol_type = other RNA
  modified_base 1: mod_base = OTHER; note = 5'-(E)-vinylphosphonate 2'-O-methylated guanosine with phosphorothioate linkage
  modified_base 2: mod_base = OTHER; note = 2'-fluorouridine with phosphorothioate linkage
  modified_base 3: mod_base = OTHER; note = 2'-O-methylcytidine
  modified_base 4: mod_base = OTHER; note = 2'-fluoroadenosine
  modified_base 5: mod_base = OTHER; note = 2'-O-methyladenosine
  modified_base 6: mod_base = OTHER; note = 2'-fluoroadenosine
  modified_base 7: mod_base = OTHER; note = 2'-O-methylguanosine
  modified_base 8: mod_base = OTHER; note = 2'-fluoroguanosine
  modified_base 9: mod_base = OTHER; note = 2'-O-methylcytidine
  modified_base 10: mod_base = OTHER; note = 2'-fluoroadenosine
  modified_base 11: mod_base = OTHER; note = 2'-O-methylcytidine
  modified_base 12: mod_base = OTHER; note = 2'-fluorouridine
  modified_base 13: mod_base = OTHER; note = 2'-O-methylcytidine
  modified_base 14: mod_base = OTHER; note = 2'-fluoroguanosine
  modified_base 15: mod_base = OTHER; note = 2'-O-methylguanosine
  modified_base 16: mod_base = OTHER; note = 2'-fluoroguanosine
  modified_base 17: mod_base = OTHER; note = 2'-O-methyluridine
  modified_base 18: mod_base = OTHER; note = 2'-fluoroguanosine
  modified_base 19: mod_base = OTHER; note = 2'-O-methyladenosine
  modified_base 20: mod_base = OTHER; note = 2'-fluorouridine
  modified_base 21: mod_base = OTHER; note = 2'-O-methylguanosine with phosphorothioate linkage
  modified_base 22: mod_base = OTHER; note = 2'-O-methylguanosine with phosphorothioate linkage
  modified_base 23: mod_base = OTHER; note = 2'-O-methylguanosine
gtcaaaggcactcgggtgatggg

SEQ ID NO: 968 - RNA, 23 nt, synthetic construct
  source 1..23: mol_type = other RNA
  modified_base 1: mod_base = OTHER; note = 5'-(E)-vinylphosphonate 2'-O-methylated guanosine with phosphorothioate linkage
  modified_base 2: mod_base = OTHER; note = 2'-fluorouridine with phosphorothioate linkage
  modified_base 3: mod_base = OTHER; note = 2'-O-methylguanosine
  modified_base 4: mod_base = OTHER; note = 2'-fluoroadenosine
  modified_base 5: mod_base = OTHER; note = 2'-O-methylcytidine
  modified_base 6: mod_base = OTHER; note = 2'-fluoroguanosine
  modified_base 7: mod_base = OTHER; note = 2'-O-methyluridine
  modified_base 8: mod_base = OTHER; note = 2'-fluorocytidine
  modified_base 9: mod_base = OTHER; note = 2'-O-methylcytidine
  modified_base 10: mod_base = OTHER; note = 2'-fluorocytidine
  modified_base 11: mod_base = OTHER; note = 2'-O-methyluridine
  modified_base 12: mod_base = OTHER; note = 2'-fluoroguanosine
  modified_base 13: mod_base = OTHER; note = 2'-O-methylcytidine
  modified_base 14: mod_base = OTHER; note = 2'-fluoroguanosine
  modified_base 15: mod_base = OTHER; note = 2'-O-methyladenosine
  modified_base 16: mod_base = OTHER; note = 2'-fluoroadenosine
  modified_base 17: mod_base = OTHER; note = 2'-O-methylcytidine
  modified_base 18: mod_base = OTHER; note = 2'-fluorouridine
  modified_base 19: mod_base = OTHER; note = 2'-O-methyluridine
  modified_base 20: mod_base = OTHER; note = 2'-fluoroguanosine
  modified_base 21: mod_base = OTHER; note = 2'-O-methyladenosine with phosphorothioate linkage
  modified_base 22: mod_base = OTHER; note = 2'-O-methyladenosine with phosphorothioate linkage
  modified_base 23: mod_base = OTHER; note = 2'-O-methylcytidine
gtgacgtccctgcgaacttgaac

SEQ ID NO: 969 - RNA, 23 nt, synthetic construct
  source 1..23: mol_type = other RNA
  modified_base 1: mod_base = OTHER; note = 5'-(E)-vinylphosphonate 2'-O-methylated uridine with phosphorothioate linkage
  modified_base 2: mod_base = OTHER; note = 2'-fluoroadenosine with phosphorothioate linkage
  modified_base 3: mod_base = OTHER; note = 2'-O-methyluridine
  modified_base 4: mod_base = OTHER; note = 2'-fluorocytidine
  modified_base 5: mod_base = OTHER; note = 2'-O-methylguanosine
  modified_base 6: mod_base = OTHER; note = 2'-fluoroguanosine
  modified_base 7: mod_base = OTHER; note = 2'-O-methylguanosine
  modified_base 8: mod_base = OTHER; note = 2'-fluoroadenosine
  modified_base 9: mod_base = OTHER; note = 2'-O-methylguanosine
  modified_base 10: mod_base = OTHER; note = 2'-fluoroadenosine
  modified_base 11: mod_base = OTHER; note = 2'-O-methylguanosine
  modified_base 12: mod_base = OTHER; note = 2'-fluorocytidine
  modified_base 13: mod_base = OTHER; note = 2'-O-methylcytidine
  modified_base 14: mod_base = OTHER; note = 2'-fluoroguanosine
  modified_base 15: mod_base = OTHER; note = 2'-O-methylguanosine
  modified_base 16: mod_base = OTHER; note = 2'-fluoroguanosine
  modified_base 17: mod_base = OTHER; note = 2'-O-methyluridine
  modified_base 18: mod_base = OTHER; note = 2'-fluorouridine
  modified_base 19: mod_base = OTHER; note = 2'-O-methyladenosine
  modified_base 20: mod_base = OTHER; note = 2'-fluoroguanosine
  modified_base 21: mod_base = OTHER; note = 2'-O-methyladenosine with phosphorothioate linkage
  modified_base 22: mod_base = OTHER; note = 2'-O-methyladenosine with phosphorothioate linkage
  modified_base 23: mod_base = OTHER; note = 2'-O-methyladenosine
tatcgggagagccgggttagaaa

SEQ ID NO: 970 - RNA, 23 nt, synthetic construct
  source 1..23: mol_type = other RNA
  modified_base 1: mod_base = OTHER; note = 5'-(E)-vinylphosphonate 2'-O-methylated guanosine with phosphorothioate linkage
  modified_base 2: mod_base = OTHER; note = 2'-fluoroguanosine with phosphorothioate linkage
  modified_base 3: mod_base = OTHER; note = 2'-O-methylcytidine
  modified_base 4: mod_base = OTHER; note = 2'-fluoroguanosine
  modified_base 5: mod_base = OTHER; note = 2'-O-methyluridine
  modified_base 6: mod_base = OTHER; note = 2'-fluoroguanosine
  modified_base 7: mod_base = OTHER; note = 2'-O-methylcytidine
  modified_base 8: mod_base = OTHER; note = 2'-fluorouridine
  modified_base 9: mod_base = OTHER; note = 2'-O-methylcytidine
  modified_base 10: mod_base = OTHER; note = 2'-fluorocytidine
  modified_base 11: mod_base = OTHER; note = 2'-O-methylcytidine
  modified_base 12: mod_base = OTHER; note = 2'-fluorouridine
  modified_base 13: mod_base = OTHER; note = 2'-O-methylcytidine
  modified_base 14: mod_base = OTHER; note = 2'-fluorocytidine
  modified_base 15: mod_base = OTHER; note = 2'-O-methyladenosine
  modified_base 16: mod_base = OTHER; note = 2'-fluorocytidine
  modified_base 17: mod_base = OTHER; note = 2'-O-methyluridine
  modified_base 18: mod_base = OTHER; note = 2'-fluorouridine
  modified_base 19: mod_base = OTHER; note = 2'-O-methylcytidine
  modified_base 20: mod_base = OTHER; note = 2'-fluorocytidine
  modified_base 21: mod_base = OTHER; note = 2'-O-methylcytidine with phosphorothioate linkage
  modified_base 22: mod_base = OTHER; note = 2'-O-methylguanosine with phosphorothioate linkage
  modified_base 23: mod_base = OTHER; note = 2'-O-methyluridine
ggcgtgctccctccacttcccgt

SEQ ID NO: 971 - RNA, 23 nt, synthetic construct
  source 1..23: mol_type = other RNA
  modified_base 1: mod_base = OTHER; note = 5'-(E)-vinylphosphonate 2'-O-methylated guanosine with phosphorothioate linkage
  modified_base 2: mod_base = OTHER; note = 2'-fluoroguanosine with phosphorothioate linkage
  modified_base 3: mod_base = OTHER; note = 2'-O-methyladenosine
  modified_base 4: mod_base = OTHER; note = 2'-fluoroadenosine
  modified_base 5: mod_base = OTHER; note = 2'-O-methyladenosine
  modified_base 6: mod_base = OTHER; note = 2'-fluoroguanosine
  modified_base 7: mod_base = OTHER; note = 2'-O-methylcytidine
  modified_base 8: mod_base = OTHER; note = 2'-fluoroguanosine
  modified_base 9: mod_base = OTHER; note = 2'-O-methylcytidine
  modified_base 10: mod_base = OTHER; note = 2'-fluorocytidine
  modified_base 11: mod_base = OTHER; note = 2'-O-methylcytidine
  modified_base 12: mod_base = OTHER; note = 2'-fluorouridine
  modified_base 13: mod_base = OTHER; note = 2'-O-methyluridine
  modified_base 14: mod_base = OTHER; note = 2'-fluorocytidine
  modified_base 15: mod_base = OTHER; note = 2'-O-methyluridine
  modified_base 16: mod_base = OTHER; note = 2'-fluoroguanosine
  modified_base 17: mod_base = OTHER; note = 2'-O-methylcytidine
  modified_base 18: mod_base = OTHER; note = 2'-fluorocytidine
  modified_base 19: mod_base = OTHER; note = 2'-O-methyladenosine
  modified_base 20: mod_base = OTHER; note = 2'-fluoroguanosine
  modified_base 21: mod_base = OTHER; note = 2'-O-methylguanosine with phosphorothioate linkage
  modified_base 22: mod_base = OTHER; note = 2'-O-methylcytidine with phosphorothioate linkage
  modified_base 23: mod_base = OTHER; note = 2'-O-methylcytidine
ggaaagcgcccttctgccaggcc

SEQ ID NO: 972 - RNA, 23 nt, synthetic construct
  source 1..23: mol_type = other RNA
  modified_base 1: mod_base = OTHER; note = 5'-(E)-vinylphosphonate 2'-O-methylated guanosine with phosphorothioate linkage
  modified_base 2: mod_base = OTHER; note = 2'-fluorouridine with phosphorothioate linkage
  modified_base 3: mod_base = OTHER; note = 2'-O-methyluridine
  modified_base 4: mod_base = OTHER; note = 2'-fluorouridine
  modified_base 5: mod_base = OTHER; note = 2'-O-methylguanosine
  modified_base 6: mod_base = OTHER; note = 2'-fluorocytidine
  modified_base 7: mod_base = OTHER; note = 2'-O-methylcytidine
  modified_base 8: mod_base = OTHER; note = 2'-fluorouridine
  modified_base 9: mod_base = OTHER; note = 2'-O-methyluridine
  modified_base 10: mod_base = OTHER; note = 2'-fluoroguanosine
  modified_base 11: mod_base = OTHER; note = 2'-O-methylcytidine
  modified_base 12: mod_base = OTHER; note = 2'-fluorouridine
  modified_base 13: mod_base = OTHER; note = 2'-O-methyluridine
  modified_base 14: mod_base = OTHER; note = 2'-fluoroguanosine
  modified_base 15: mod_base = OTHER; note = 2'-O-methylcytidine
  modified_base 16: mod_base = OTHER; note = 2'-fluoroguanosine
  modified_base 17: mod_base = OTHER; note = 2'-O-methylguanosine
  modified_base 18: mod_base = OTHER; note = 2'-fluorocytidine
  modified_base 19: mod_base = OTHER; note = 2'-O-methylguanosine
  modified_base 20: mod_base = OTHER; note = 2'-fluoroadenosine
  modified_base 21: mod_base = OTHER; note = 2'-O-methylguanosine with phosphorothioate linkage
  modified_base 22: mod_base = OTHER; note = 2'-O-methyladenosine with phosphorothioate linkage
  modified_base 23: mod_base = OTHER; note = 2'-O-methylcytidine
gtttgccttgcttgcggcgagac

SEQ ID NO: 973 - RNA, 23 nt, synthetic construct
  source 1..23: mol_type = other RNA
  modified_base 1: mod_base = OTHER; note = 5'-(E)-vinylphosphonate 2'-O-methylated adenosine with phosphorothioate linkage
  modified_base 2: mod_base = OTHER; note = 2'-fluoroguanosine with phosphorothioate linkage
  modified_base 3: mod_base = OTHER; note = 2'-O-methyladenosine
  modified_base 4: mod_base = OTHER; note = 2'-fluorocytidine
  modified_base 5: mod_base = OTHER; note = 2'-O-methylguanosine
  modified_base 6: mod_base = OTHER; note = 2'-fluorouridine
  modified_base 7: mod_base = OTHER; note = 2'-O-methylguanosine
  modified_base 8: mod_base = OTHER; note = 2'-fluorouridine
  modified_base 9: mod_base = OTHER; note = 2'-O-methyluridine
  modified_base 10: mod_base = OTHER; note = 2'-fluorocytidine
  modified_base 11: mod_base = OTHER; note = 2'-O-methylcytidine
  modified_base 12: mod_base = OTHER; note = 2'-fluorocytidine
  modified_base 13: mod_base = OTHER; note = 2'-O-methyluridine
  modified_base 14: mod_base = OTHER; note = 2'-fluoroguanosine
  modified_base 15: mod_base = OTHER; note = 2'-O-methylcytidine
  modified_base 16: mod_base = OTHER; note = 2'-fluorocytidine
  modified_base 17: mod_base = OTHER; note = 2'-O-methyladenosine
  modified_base 18: mod_base = OTHER; note = 2'-fluoroguanosine
  modified_base 19: mod_base = OTHER; note = 2'-O-methylcytidine
  modified_base 20: mod_base = OTHER; note = 2'-fluorouridine
  modified_base 21: mod_base = OTHER; note = 2'-O-methylcytidine with phosphorothioate linkage
  modified_base 22: mod_base = OTHER; note = 2'-O-methyluridine with phosphorothioate linkage
  modified_base 23: mod_base = OTHER; note = 2'-O-methylcytidine
agacgtgttccctgccagctctc

SEQ ID NO: 974 - RNA, 23 nt, synthetic construct
  source 1..23: mol_type = other RNA
  modified_base 1: mod_base = OTHER; note = 5'-(E)-vinylphosphonate 2'-O-methylated uridine with phosphorothioate linkage
  modified_base 2: mod_base = OTHER; note = 2'-fluoroadenosine with phosphorothioate linkage
  modified_base 3: mod_base = OTHER; note = 2'-O-methyladenosine
  modified_base 4: mod_base = OTHER; note = 2'-fluoroguanosine
  modified_base 5: mod_base = OTHER; note = 2'-O-methyladenosine
  modified_base 6: mod_base = OTHER; note = 2'-fluoroguanosine
  modified_base 7: mod_base = OTHER; note = 2'-O-methyladenosine
  modified_base 8: mod_base = OTHER; note = 2'-fluoroadenosine
  modified_base 9: mod_base = OTHER; note = 2'-O-methyladenosine
  modified_base 10: mod_base = OTHER; note = 2'-fluorocytidine
  modified_base 11: mod_base = OTHER; note = 2'-O-methylcytidine
  modified_base 12: mod_base = OTHER; note = 2'-fluoroadenosine
  modified_base 13: mod_base = OTHER; note = 2'-O-methyluridine
  modified_base 14: mod_base = OTHER; note = 2'-fluoroguanosine
  modified_base 15: mod_base = OTHER; note = 2'-O-methylcytidine
  modified_base 16: mod_base = OTHER; note = 2'-fluoroadenosine
  modified_base 17: mod_base = OTHER; note = 2'-O-methylcytidine
  modified_base 18: mod_base = OTHER; note = 2'-fluorouridine
  modified_base 19: mod_base = OTHER; note = 2'-O-methylguanosine
  modified_base 20: mod_base = OTHER; note = 2'-fluoroguanosine
  modified_base 21: mod_base = OTHER; note = 2'-O-methyluridine with phosphorothioate linkage
  modified_base 22: mod_base = OTHER; note = 2'-O-methylguanosine with phosphorothioate linkage
  modified_base 23: mod_base = OTHER; note = 2'-O-methyladenosine
taagagaaaccatgcactggtga

SEQ ID NO: 975 - RNA, 23 nt, synthetic construct
  source 1..23: mol_type = other RNA
  modified_base 1: mod_base = OTHER; note = 5'-(E)-vinylphosphonate 2'-O-methylated adenosine with phosphorothioate linkage
  modified_base 2: mod_base = OTHER; note = 2'-fluorocytidine with phosphorothioate linkage
  modified_base 3: mod_base = OTHER; note = 2'-O-methyluridine
  modified_base 4: mod_base = OTHER; note = 2'-fluorocytidine
  modified_base 5: mod_base = OTHER; note = 2'-O-methylcytidine
  modified_base 6: mod_base = OTHER; note = 2'-fluorouridine
  modified_base 7: mod_base = OTHER; note = 2'-O-methyluridine
  modified_base 8: mod_base = OTHER; note = 2'-fluorocytidine
  modified_base 9: mod_base = OTHER; note = 2'-O-methyluridine
  modified_base 10: mod_base = OTHER; note = 2'-fluorocytidine
  modified_base 11: mod_base = OTHER; note = 2'-O-methylguanosine
  modified_base 12: mod_base = OTHER; note = 2'-fluoroadenosine
  modified_base 13: mod_base = OTHER; note = 2'-O-methylguanosine
  modified_base 14: mod_base = OTHER; note = 2'-fluorocytidine
  modified_base 15: mod_base = OTHER; note = 2'-O-methyluridine
  modified_base 16: mod_base = OTHER; note = 2'-fluorouridine
  modified_base 17: mod_base = OTHER; note = 2'-O-methylguanosine
  modified_base 18: mod_base = OTHER; note = 2'-fluoroadenosine
  modified_base 19: mod_base = OTHER; note = 2'-O-methyluridine
  modified_base 20: mod_base = OTHER; note = 2'-fluoroguanosine
  modified_base 21: mod_base = OTHER; note = 2'-O-methylcytidine with phosphorothioate linkage
  modified_base 22: mod_base = OTHER; note = 2'-O-methylguanosine with phosphorothioate linkage
  modified_base 23: mod_base = OTHER; note = 2'-O-methylcytidine
actccttctcgagcttgatgcgc

SEQ ID NO: 976 - RNA, 23 nt, synthetic construct
  source 1..23: mol_type = other RNA
  modified_base 1: mod_base = OTHER; note = 5'-(E)-vinylphosphonate 2'-O-methylated guanosine with phosphorothioate linkage
  modified_base 2: mod_base = OTHER; note = 2'-fluoroadenosine with phosphorothioate linkage
  modified_base 3: mod_base = OTHER; note = 2'-O-methylguanosine
  modified_base 4: mod_base = OTHER; note = 2'-fluorouridine
  modified_base 5: mod_base = OTHER; note = 2'-O-methylcytidine
  modified_base 6: mod_base = OTHER; note = 2'-fluorouridine
  modified_base 7: mod_base = OTHER; note = 2'-O-methylcytidine
  modified_base 8: mod_base = OTHER; note = 2'-fluorocytidine
  modified_base 9: mod_base = OTHER; note = 2'-O-methylguanosine
  modified_base 10: mod_base = OTHER; note = 2'-fluoroadenosine
  modified_base 11: mod_base = OTHER; note = 2'-O-methyladenosine
  modified_base 12: mod_base = OTHER; note = 2'-fluoroguanosine
  modified_base 13: mod_base = OTHER; note = 2'-O-methylcytidine
  modified_base 14: mod_base = OTHER; note = 2'-fluorouridine
  modified_base 15: mod_base = OTHER; note = 2'-O-methyladenosine
  modified_base 16: mod_base = OTHER; note = 2'-fluoroadenosine
  modified_base 17: mod_base = OTHER; note = 2'-O-methylguanosine
  modified_base 18: mod_base = OTHER; note = 2'-fluoroguanosine
  modified_base 19: mod_base = OTHER; note = 2'-O-methyladenosine
  modified_base 20: mod_base = OTHER; note = 2'-fluoroadenosine
  modified_base 21: mod_base = OTHER; note = 2'-O-methylguanosine with phosphorothioate linkage
  modified_base 22: mod_base = OTHER; note = 2'-O-methylguanosine with phosphorothioate linkage
  modified_base 23: mod_base = OTHER; note = 2'-O-methylguanosine
gagtctccgaagctaaggaaggg

SEQ ID NO: 977 - RNA, 23 nt, synthetic construct
  source 1..23: mol_type = other RNA
  modified_base 1: mod_base = OTHER; note = 5'-(E)-vinylphosphonate 2'-O-methylated uridine with phosphorothioate linkage
  modified_base 2: mod_base = OTHER; note = 2'-fluoroguanosine with phosphorothioate linkage
  modified_base 3: mod_base = OTHER; note = 2'-O-methyladenosine
  modified_base 4: mod_base = OTHER; note = 2'-fluorouridine
  modified_base 5: mod_base = OTHER; note = 2'-O-methyladenosine
  modified_base 6: mod_base = OTHER; note = 2'-fluoroadenosine
  modified_base 7: mod_base = OTHER; note = 2'-O-methyladenosine
  modified_base 8: mod_base = OTHER; note = 2'-fluorocytidine
  modified_base 9: mod_base = OTHER; note = 2'-O-methyladenosine
  modified_base 10: mod_base = OTHER; note = 2'-fluoroadenosine
  modified_base 11: mod_base = OTHER; note = 2'-O-methyluridine
  modified_base 12: mod_base = OTHER; note = 2'-fluorocytidine
  modified_base 13: mod_base = OTHER; note = 2'-O-methylguanosine
  modified_base 14: mod_base = OTHER; note = 2'-fluorouridine
  modified_base 15: mod_base = OTHER; note = 2'-O-methylcytidine
  modified_base 16: mod_base = OTHER; note = 2'-fluoroadenosine
  modified_base 17: mod_base = OTHER; note = 2'-O-methyluridine
  modified_base 18: mod_base = OTHER; note = 2'-fluorocytidine
  modified_base 19: mod_base = OTHER; note = 2'-O-methylcytidine
  modified_base 20: mod_base = OTHER; note = 2'-fluorouridine
  modified_base 21: mod_base = OTHER; note = 2'-O-methylcytidine with phosphorothioate linkage
  modified_base 22: mod_base = OTHER; note = 2'-O-methyluridine with phosphorothioate linkage
  modified_base 23: mod_base = OTHER; note = 2'-O-methylguanosine
tgataaacaatcgtcatcctctg

SEQ ID NO: 978 - RNA, 23 nt, synthetic construct
  source 1..23: mol_type = other RNA
  modified_base 1: mod_base = OTHER; note = 5'-(E)-vinylphosphonate 2'-O-methylated uridine with phosphorothioate linkage
  modified_base 2: mod_base = OTHER; note = 2'-fluoroguanosine with phosphorothioate linkage
  modified_base 3: mod_base = OTHER; note = 2'-O-methyladenosine
  modified_base 4: mod_base = OTHER; note = 2'-fluoroadenosine
  modified_base 5: mod_base = OTHER; note = 2'-O-methylcytidine
  modified_base 6: mod_base = OTHER; note = 2'-fluoroguanosine
  modified_base 7: mod_base = OTHER; note = 2'-O-methyluridine
  modified_base 8: mod_base = OTHER; note = 2'-fluorocytidine
  modified_base 9: mod_base = OTHER; note = 2'-O-methyladenosine
  modified_base 10: mod_base = OTHER; note = 2'-fluoroguanosine
  modified_base 11: mod_base = OTHER; note = 2'-O-methylguanosine
  modified_base 12: mod_base = OTHER; note = 2'-fluoroadenosine
  modified_base 13: mod_base = OTHER; note = 2'-O-methylguanosine
  modified_base 14: mod_base = OTHER; note = 2'-fluorouridine
  modified_base 15: mod_base = OTHER; note = 2'-O-methylcytidine
  modified_base 16: mod_base = OTHER; note = 2'-fluorouridine
  modified_base 17: mod_base = OTHER; note = 2'-O-methylguanosine
  modified_base 18: mod_base = OTHER; note = 2'-fluoroguanosine
  modified_base 19: mod_base = OTHER; note = 2'-O-methyladenosine
  modified_base 20: mod_base = OTHER; note = 2'-fluorouridine
  modified_base 21: mod_base = OTHER; note = 2'-O-methylguanosine with phosphorothioate linkage
  modified_base 22: mod_base = OTHER; note = 2'-O-methylguanosine with phosphorothioate linkage
  modified_base 23: mod_base = OTHER; note = 2'-O-methyladenosine
tgaacgtcaggagtctggatgga

SEQ ID NO: 979 - RNA, 23 nt, synthetic construct
  source 1..23: mol_type = other RNA
  modified_base 1: mod_base = OTHER; note = 5'-(E)-vinylphosphonate 2'-O-methylated uridine with phosphorothioate linkage
  modified_base 2: mod_base = OTHER; note = 2'-fluorocytidine with phosphorothioate linkage
  modified_base 3: mod_base = OTHER; note = 2'-O-methyluridine
  modified_base 4: mod_base = OTHER; note = 2'-fluorouridine
  modified_base 5: mod_base = OTHER; note = 2'-O-methylcytidine
  modified_base 6: mod_base = OTHER; note = 2'-fluoroguanosine
  modified_base 7: mod_base = OTHER; note = 2'-O-methyluridine
  modified_base 8: mod_base = OTHER; note = 2'-fluorocytidine
  modified_base 9: mod_base = OTHER; note = 2'-O-methylguanosine
  modified_base 10: mod_base = OTHER; note = 2'-fluorocytidine
  modified_base 11: mod_base = OTHER; note = 2'-O-methyladenosine
  modified_base 12: mod_base = OTHER; note = 2'-fluoroadenosine
  modified_base 13: mod_base = OTHER; note = 2'-O-methylguanosine
  modified_base 14: mod_base = OTHER; note = 2'-fluorouridine
  modified_base 15: mod_base = OTHER; note = 2'-O-methylguanosine
  modified_base 16: mod_base = OTHER; note = 2'-fluorouridine
  modified_base 17: mod_base = OTHER; note = 2'-O-methylcytidine
  modified_base 18: mod_base = OTHER; note = 2'-fluorocytidine
  modified_base 19: mod_base = OTHER; note = 2'-O-methylcytidine
  modified_base 20: mod_base = OTHER; note = 2'-fluorouridine
  modified_base 21: mod_base = OTHER; note = 2'-O-methylguanosine with phosphorothioate linkage
  modified_base 22: mod_base = OTHER; note = 2'-O-methyluridine with phosphorothioate linkage
  modified_base 23: mod_base = OTHER; note = 2'-O-methylguanosine
tcttcgtcgcaagtgtccctgtg

SEQ ID NO: 980 - RNA, 23 nt, synthetic construct
  source 1..23: mol_type = other RNA
  modified_base 1: mod_base = OTHER; note = 5'-(E)-vinylphosphonate 2'-O-methylated uridine with phosphorothioate linkage
  modified_base 2: mod_base = OTHER; note = 2'-fluoroadenosine with phosphorothioate linkage
  modified_base 3: mod_base = OTHER; note = 2'-O-methylguanosine
  modified_base 4: mod_base = OTHER; note = 2'-fluoroguanosine
  modified_base 5: mod_base = OTHER; note = 2'-O-methyluridine
  modified_base 6: mod_base = OTHER; note = 2'-fluorouridine
  modified_base 7: mod_base = OTHER; note = 2'-O-methylguanosine
  modified_base 8: mod_base = OTHER; note = 2'-fluorouridine
  modified_base 9: mod_base = OTHER; note = 2'-O-methyladenosine
  modified_base 10: mod_base = OTHER; note = 2'-fluoroadenosine
  modified_base 11: mod_base = OTHER; note = 2'-O-methyluridine
  modified_base 12: mod_base = OTHER; note = 2'-fluoroguanosine
  modified_base 13: mod_base = OTHER; note = 2'-O-methyladenosine
  modified_base 14: mod_base = OTHER; note = 2'-fluorocytidine
  modified_base 15: mod_base = OTHER; note = 2'-O-methylcytidine
  modified_base 16: mod_base = OTHER; note = 2'-fluorouridine
  modified_base 17: mod_base = OTHER; note = 2'-O-methyluridine
  modified_base 18: mod_base = OTHER; note = 2'-fluorouridine
  modified_base 19: mod_base = OTHER; note = 2'-O-methylguanosine
  modified_base 20: mod_base = OTHER; note = 2'-fluoroguanosine
  modified_base 21: mod_base = OTHER; note = 2'-O-methyluridine with phosphorothioate linkage
  modified_base 22: mod_base = OTHER; note = 2'-O-methylcytidine with phosphorothioate linkage
  modified_base 23: mod_base = OTHER; note = 2'-O-methyladenosine
taggttgtaatgacctttggtca

SEQ ID NO: 981 - RNA, 23 nt, synthetic construct
  source 1..23: mol_type = other RNA
  modified_base 1: mod_base = OTHER; note = 5'-(E)-vinylphosphonate 2'-O-methylated guanosine with phosphorothioate linkage
  modified_base 2: mod_base = OTHER; note = 2'-fluoroguanosine with phosphorothioate linkage
  modified_base 3: mod_base = OTHER; note = 2'-O-methyluridine
  modified_base 4: mod_base = OTHER; note = 2'-fluorouridine
  modified_base 5: mod_base = OTHER; note = 2'-O-methylguanosine
  modified_base 6: mod_base = OTHER; note = 2'-fluorocytidine
  modified_base 7: mod_base = OTHER; note = 2'-O-methyluridine
  modified_base 8: mod_base = OTHER; note = 2'-fluorocytidine
  modified_base 9: mod_base = OTHER; note = 2'-O-methyluridine
  modified_base 10: mod_base = OTHER; note = 2'-fluoroguanosine
  modified_base 11: mod_base = OTHER; note = 2'-O-methyladenosine
  modified_base 12: mod_base = OTHER; note = 2'-fluoroadenosine
  modified_base 13: mod_base = OTHER; note = 2'-O-methyladenosine
  modified_base 14: mod_base = OTHER; note = 2'-fluorouridine
  modified_base 15: mod_base = OTHER; note = 2'-O-methyluridine
  modified_base 16: mod_base = OTHER; note = 2'-fluorouridine
  modified_base 17: mod_base = OTHER; note = 2'-O-methylguanosine
  modified_base 18: mod_base = OTHER; note = 2'-fluoroadenosine
  modified_base 19: mod_base = OTHER; note = 2'-O-methyladenosine
  modified_base 20: mod_base = OTHER; note = 2'-fluorocytidine
  modified_base 21: mod_base = OTHER; note = 2'-O-methylguanosine with phosphorothioate linkage
  modified_base 22: mod_base = OTHER; note = 2'-O-methyluridine with phosphorothioate linkage
  modified_base 23: mod_base = OTHER; note = 2'-O-methylcytidine
ggttgctctgaaatttgaacgtc

SEQ ID NO: 982 - RNA, 23 nt, synthetic construct
  source 1..23: mol_type = other RNA
  modified_base 1: mod_base = OTHER; note = 5'-(E)-vinylphosphonate 2'-O-methylated uridine with phosphorothioate linkage
  modified_base 2: mod_base = OTHER; note = 2'-fluoroguanosine with phosphorothioate linkage
  modified_base 3: mod_base = OTHER; note = 2'-O-methylcytidine
  modified_base 4: mod_base = OTHER; note = 2'-fluoroadenosine
  modified_base 5: mod_base = OTHER; note = 2'-O-methyladenosine
  modified_base 6: mod_base = OTHER; note = 2'-fluorouridine
  modified_base 7: mod_base = OTHER; note = 2'-O-methyladenosine
  modified_base 8: mod_base = OTHER; note = 2'-fluorouridine
  modified_base 9: mod_base = OTHER; note = 2'-O-methylguanosine
  modified_base 10: mod_base = OTHER; note = 2'-fluoroadenosine
  modified_base 11: mod_base = OTHER; note = 2'-O-methyladenosine
  modified_base 12: mod_base = OTHER; note = 2'-fluorouridine
  modified_base 13: mod_base = OTHER; note = 2'-O-methylcytidine
  modified_base 14: mod_base = OTHER; note = 2'-fluorocytidine
  modified_base 15: mod_base = OTHER; note = 2'-O-methylcytidine
  modified_base 16: mod_base = OTHER; note = 2'-fluoroadenosine
  modified_base 17: mod_base = OTHER; note = 2'-O-methyluridine
  modified_base 18: mod_base = OTHER; note = 2'-fluoroguanosine
  modified_base 19: mod_base = OTHER; note = 2'-O-methylguanosine
  modified_base 20: mod_base = OTHER; note = 2'-fluoroadenosine
  modified_base 21: mod_base = OTHER; note = 2'-O-methylguanosine with phosphorothioate linkage
  modified_base 22: mod_base = OTHER; note = 2'-O-methyladenosine with phosphorothioate linkage
  modified_base 23: mod_base = OTHER; note = 2'-O-methylguanosine
tgcaatatgaatcccatggagag

SEQ ID NO: 983 - RNA, 23 nt, synthetic construct
  source 1..23: mol_type = other RNA
  modified_base 1: mod_base = OTHER; note = 5'-(E)-vinylphosphonate 2'-O-methylated adenosine with phosphorothioate linkage
  modified_base 2: mod_base = OTHER; note = 2'-fluoroguanosine with phosphorothioate linkage
  modified_base 3: mod_base = OTHER; note = 2'-O-methyluridine
  modified_base 4: mod_base = OTHER; note = 2'-fluoroadenosine
  modified_base 5: mod_base = OTHER; note = 2'-O-methyladenosine
  modified_base 6: mod_base = OTHER; note = 2'-fluorocytidine
  modified_base 7: mod_base = OTHER; note = 2'-O-methylcytidine
  modified_base 8: mod_base = OTHER; note = 2'-fluorouridine
  modified_base 9: mod_base = OTHER; note = 2'-O-methyluridine
  modified_base 10: mod_base = OTHER; note = 2'-fluorouridine
  modified_base 11: mod_base = OTHER; note = 2'-O-methylguanosine
  modified_base 12: mod_base = OTHER; note = 2'-fluorocytidine
  modified_base 13: mod_base = OTHER; note = 2'-O-methyladenosine
  modified_base 14: mod_base = OTHER; note = 2'-fluorouridine
  modified_base 15: mod_base = OTHER; note = 2'-O-methyladenosine
  modified_base 16: mod_base = OTHER; note = 2'-fluoroguanosine
  modified_base 17: mod_base = OTHER; note = 2'-O-methylguanosine
  modified_base 18: mod_base = OTHER; note = 2'-fluoroguanosine
  modified_base 19: mod_base = OTHER; note = 2'-O-methylcytidine
  modified_base 20: mod_base = OTHER; note = 2'-fluorouridine
  modified_base 21: mod_base = OTHER; note = 2'-O-methylguanosine with phosphorothioate linkage
  modified_base 22: mod_base = OTHER; note = 2'-O-methylguanosine with phosphorothioate linkage
  modified_base 23: mod_base = OTHER; note = 2'-O-methylguanosine
agtaacctttgcatagggctggg

SEQ ID NO: 984 - RNA, 23 nt, synthetic construct
  source 1..23: mol_type = other RNA
  modified_base 1: mod_base = OTHER; note = 5'-(E)-vinylphosphonate 2'-O-methylated uridine with phosphorothioate linkage
  modified_base 2: mod_base = OTHER; note = 2'-fluorouridine with phosphorothioate linkage
  modified_base 3: mod_base = OTHER; note = 2'-O-methylcytidine
  modified_base 4: mod_base = OTHER; note = 2'-fluoroguanosine
  modified_base 5: mod_base = OTHER; note = 2'-O-methyluridine
  modified_base 6: mod_base = OTHER; note = 2'-fluorocytidine
  modified_base 7: mod_base = OTHER; note = 2'-O-methylguanosine
  modified_base 8: mod_base = OTHER; note = 2'-fluorocytidine
  modified_base 9: mod_base = OTHER; note = 2'-O-methyladenosine
  modified_base 10: mod_base = OTHER; note = 2'-fluoroadenosine
  modified_base 11: mod_base = OTHER; note = 2'-O-methylguanosine
  modified_base 12: mod_base = OTHER; note = 2'-fluorouridine
  modified_base 13: mod_base = OTHER; note = 2'-O-methylguanosine
  modified_base 14: mod_base = OTHER; note = 2'-fluorouridine
  modified_base 15: mod_base = OTHER; note = 2'-O-methylcytidine
  modified_base 16: mod_base = OTHER; note = 2'-fluorocytidine
  modified_base 17: mod_base = OTHER; note = 2'-O-methylcytidine
  modified_base 18: mod_base = OTHER; note = 2'-fluorouridine
  modified_base 19: mod_base = OTHER; note = 2'-O-methylguanosine
  modified_base 20: mod_base = OTHER; note = 2'-fluorouridine
  modified_base 21: mod_base = OTHER; note = 2'-O-methylguanosine with phosphorothioate linkage
  modified_base 22: mod_base = OTHER; note = 2'-O-methylguanosine with phosphorothioate linkage
  modified_base 23: mod_base = OTHER; note = 2'-O-methylcytidine
ttcgtcgcaagtgtccctgtggc

SEQ ID NO: 985 - RNA, 23 nt, synthetic construct
  source 1..23: mol_type = other RNA
  modified_base 1: mod_base = OTHER; note = 5'-(E)-vinylphosphonate 2'-O-methylated uridine with phosphorothioate linkage
  modified_base 2: mod_base = OTHER; note = 2'-fluorocytidine with phosphorothioate linkage
  modified_base 3: mod_base = OTHER; note = 2'-O-methyluridine
  modified_base 4: mod_base = OTHER; note = 2'-fluorocytidine
  modified_base 5: mod_base = OTHER; note = 2'-O-methylguanosine
  modified_base 6: mod_base = OTHER; note = 2'-fluoroadenosine
  modified_base 7: mod_base = OTHER; note = 2'-O-methyluridine
  modified_base 8: mod_base = OTHER; note = 2'-fluoroadenosine
  modified_base 9: mod_base = OTHER; note = 2'-O-methylcytidine
  modified_base 10: mod_base = OTHER; note = 2'-fluorouridine
  modified_base 11: mod_base = OTHER; note = 2'-O-methylguanosine
  modified_base 12: mod_base = OTHER; note = 2'-fluoroadenosine
  modified_base 13: mod_base = OTHER; note = 2'-O-methyluridine
  modified_base 14: mod_base = OTHER; note = 2'-fluorocytidine
  modified_base 15: mod_base = OTHER; note = 2'-O-methylcytidine
  modified_base 16: mod_base = OTHER; note = 2'-fluorouridine
  modified_base 17: mod_base = OTHER; note = 2'-O-methylguanosine
  modified_base 18: mod_base = OTHER; note = 2'-fluoroguanosine
  modified_base 19: mod_base = OTHER; note = 2'-O-methyluridine
  modified_base 20: mod_base = OTHER; note = 2'-fluoroadenosine
  modified_base 21: mod_base = OTHER; note = 2'-O-methyluridine with phosphorothioate linkage
  modified_base 22: mod_base = OTHER; note = 2'-O-methyluridine with phosphorothioate linkage
  modified_base 23: mod_base = OTHER; note = 2'-O-methylcytidine
tctcgatactgatcctggtattc

SEQ ID NO: 986 - RNA, 23 nt, synthetic construct
  source 1..23: mol_type = other RNA
  modified_base 1: mod_base = OTHER; note = 5'-(E)-vinylphosphonate 2'-O-methylated adenosine with phosphorothioate linkage
  modified_base 2: mod_base = OTHER; note = 2'-fluoroadenosine with phosphorothioate linkage
  modified_base 3: mod_base = OTHER; note = 2'-O-methylcytidine
  modified_base 4: mod_base = OTHER; note = 2'-fluorocytidine
  modified_base 5: mod_base = OTHER; note = 2'-O-methyluridine
  modified_base 6: mod_base = OTHER; note = 2'-fluorocytidine
  modified_base 7: mod_base = OTHER; note = 2'-O-methylcytidine
  modified_base 8: mod_base = OTHER; note = 2'-fluoroadenosine
  modified_base 9: mod_base = OTHER; note = 2'-O-methylcytidine
  modified_base 10: mod_base = OTHER; note = 2'-fluoroguanosine
  modified_base 11: mod_base = OTHER; note = 2'-O-methylguanosine
  modified_base 12: mod_base = OTHER; note = 2'-fluoroguanosine
  modified_base 13: mod_base = OTHER; note = 2'-O-methyladenosine
  modified_base 14: mod_base = OTHER; note = 2'-fluorouridine
  modified_base 15: mod_base = OTHER; note = 2'-O-methyluridine
  modified_base 16: mod_base = OTHER; note = 2'-fluoroguanosine
  modified_base 17: mod_base = OTHER; note = 2'-O-methylguanosine
  modified_base 18: mod_base = OTHER; note = 2'-fluoroadenosine
  modified_base 19: mod_base = OTHER; note = 2'-O-methyluridine
  modified_base 20: mod_base = OTHER; note = 2'-fluoroguanosine
  modified_base 21: mod_base = OTHER; note = 2'-O-methylcytidine with phosphorothioate linkage
  modified_base 22: mod_base = OTHER; note = 2'-O-methyluridine with phosphorothioate linkage
  modified_base 23: mod_base = OTHER; note = 2'-O-methyluridine
aacctccacgggattggatgctt

SEQ ID NO: 987 - RNA, 23 nt, synthetic construct
  source 1..23: mol_type = other RNA
  modified_base 1: mod_base = OTHER; note = 5'-(E)-vinylphosphonate 2'-O-methylated uridine with phosphorothioate linkage
  modified_base 2: mod_base = OTHER; note = 2'-fluoroadenosine with phosphorothioate linkage
  modified_base 3: mod_base = OTHER; note = 2'-O-methylcytidine
  modified_base 4: mod_base = OTHER; note = 2'-fluoroadenosine
  modified_base 5: mod_base = OTHER; note = 2'-O-methylcytidine
  modified_base 6: mod_base = OTHER; note = 2'-fluoroguanosine
  modified_base 7: mod_base = OTHER; note = 2'-O-methyluridine
  modified_base 8: mod_base = OTHER; note = 2'-fluorouridine
  modified_base 9: mod_base = OTHER; note = 2'-O-methylcytidine
  modified_base 10: mod_base = OTHER; note = 2'-fluorouridine
  modified_base 11: mod_base = OTHER; note = 2'-O-methylcytidine
  modified_base 12: mod_base = OTHER; note = 2'-fluorocytidine
  modified_base 13: mod_base = OTHER; note = 2'-O-methylguanosine
  modified_base 14: mod_base = OTHER; note = 2'-fluorouridine
  modified_base 15: mod_base = OTHER; note = 2'-O-methylguanosine
  modified_base 16: mod_base = OTHER; note = 2'-fluorouridine
  modified_base 17: mod_base = OTHER; note = 2'-O-methyluridine
  modified_base 18: mod_base = OTHER; note = 2'-fluoroguanosine
  modified_base 19: mod_base = OTHER; note = 2'-O-methylguanosine
  modified_base 20: mod_base = OTHER; note = 2'-fluoroguanosine
  modified_base 21: mod_base = OTHER; note = 2'-O-methylcytidine with phosphorothioate linkage
  modified_base 22: mod_base = OTHER; note = 2'-O-methyladenosine with phosphorothioate linkage
  modified_base 23: mod_base = OTHER; note = 2'-O-methyluridine
tacacgttctccgtgttgggcat

SEQ ID NO: 988 - RNA, 23 nt, synthetic construct
  source 1..23: mol_type = other RNA
  modified_base 1: mod_base = OTHER; note = 5'-(E)-vinylphosphonate 2'-O-methylated adenosine with phosphorothioate linkage
  modified_base 2: mod_base = OTHER; note = 2'-fluorouridine with phosphorothioate linkage
  modified_base 3: mod_base = OTHER; note = 2'-O-methylcytidine
  modified_base 4: mod_base = OTHER; note = 2'-fluorocytidine
  modified_base 5: mod_base = OTHER; note = 2'-O-methylcytidine
  modified_base 6: mod_base = OTHER; note = 2'-fluoroadenosine
  modified_base 7: mod_base = OTHER; note = 2'-O-methyluridine
  modified_base 8: mod_base = OTHER; note = 2'-fluoroguanosine
  modified_base 9: mod_base = OTHER; note = 2'-O-methylguanosine
  modified_base 10: mod_base = OTHER; note = 2'-fluoroadenosine
  modified_base 11: mod_base = OTHER; note = 2'-O-methylguanosine
  modified_base 12: mod_base = OTHER; note = 2'-fluoroadenosine
  modified_base 13: mod_base = OTHER; note = 2'-O-methylguanosine
  modified_base 14: mod_base = OTHER; note = 2'-fluoroguanosine
  modified_base 15: mod_base = OTHER; note = 2'-O-methyluridine
  modified_base 16: mod_base = OTHER; note = 2'-fluoroguanosine
  modified_base 17: mod_base = OTHER; note = 2'-O-methylguanosine
  modified_base 18: mod_base = OTHER; note = 2'-fluorocytidine
  modified_base 19: mod_base = OTHER; note = 2'-O-methyluridine
  modified_base 20: mod_base = OTHER; note = 2'-fluoroguanosine
  modified_base 21: mod_base = OTHER; note = 2'-O-methylguanosine with phosphorothioate linkage
  modified_base 22: mod_base = OTHER; note = 2'-O-methylguanosine with phosphorothioate linkage
  modified_base 23: mod_base = OTHER; note = 2'-O-methyladenosine
atcccatggagaggtggctggga

SEQ ID NO: 989 - RNA, 23 nt, synthetic construct
  source 1..23: mol_type = other RNA
  modified_base 1: mod_base = OTHER; note = 5'-(E)-vinylphosphonate 2'-O-methylated adenosine with phosphorothioate linkage
  modified_base 2: mod_base = OTHER; note = 2'-fluorouridine with phosphorothioate linkage
  modified_base 3: mod_base = OTHER; note = 2'-O-methyluridine
  modified_base 4: mod_base = OTHER; note = 2'-fluoroadenosine
  modified_base 5: mod_base = OTHER; note = 2'-O-methyluridine
  modified_base 6: mod_base = OTHER; note = 2'-fluorouridine
  modified_base 7: mod_base = OTHER; note = 2'-O-methylcytidine
  modified_base 8: mod_base = OTHER; note = 2'-fluoroadenosine
  modified_base 9: mod_base = OTHER; note = 2'-O-methyladenosine
  modified_base 10: mod_base = OTHER; note = 2'-fluorocytidine
  modified_base 11: mod_base = OTHER; note = 2'-O-methyladenosine
  modified_base 12: mod_base = OTHER; note = 2'-fluorocytidine
  modified_base 13: mod_base = OTHER; note = 2'-O-methyluridine
  modified_base 14: mod_base = OTHER; note = 2'-fluorocytidine
  modified_base 15: mod_base = OTHER; note = 2'-O-methylguanosine
  modified_base 16: mod_base = OTHER; note = 2'-fluoroadenosine
  modified_base 17: mod_base = OTHER; note = 2'-O-methyluridine
  modified_base 18: mod_base = OTHER; note = 2'-fluorocytidine
  modified_base 19: mod_base = OTHER; note = 2'-O-methyladenosine
  modified_base 20: mod_base = OTHER; note = 2'-fluorocytidine
  modified_base 21: mod_base = OTHER; note = 2'-O-methyluridine with phosphorothioate linkage
  modified_base 22: mod_base = OTHER; note = 2'-O-methylguanosine with phosphorothioate linkage
  modified_base 23: mod_base = OTHER; note = 2'-O-methyluridine
attattcaacactcgatcactgt

SEQ ID NO: 990 - RNA, 23 nt, synthetic construct
  source 1..23: mol_type = other RNA
  modified_base 1: mod_base = OTHER; note = 5'-(E)-vinylphosphonate 2'-O-methylated adenosine with phosphorothioate linkage
  modified_base 2: mod_base = OTHER; note = 2'-fluorouridine with phosphorothioate linkage
  modified_base 3: mod_base = OTHER; note = 2'-O-methylguanosine
  modified_base 4: mod_base = OTHER; note = 2'-fluoroadenosine
  modified_base 5: mod_base = OTHER; note = 2'-O-methyladenosine
  modified_base 6: mod_base = OTHER; note = 2'-fluorouridine
  modified_base 7: mod_base = OTHER; note = 2'-O-methylcytidine
  modified_base 8: mod_base = OTHER; note = 2'-fluorocytidine
  modified_base 9: mod_base = OTHER; note = 2'-O-methylcytidine
  modified_base 10: mod_base = OTHER; note = 2'-fluoroadenosine
  modified_base 11: mod_base = OTHER; note = 2'-O-methyluridine
  modified_base 12: mod_base = OTHER; note = 2'-fluoroguanosine
  modified_base 13: mod_base = OTHER; note = 2'-O-methylguanosine
  modified_base 14: mod_base = OTHER; note = 2'-fluoroadenosine
  modified_base 15: mod_base = OTHER; note = 2'-O-methylguanosine
  modified_base 16: mod_base = OTHER; note = 2'-fluoroadenosine
  modified_base 17: mod_base = OTHER; note = 2'-O-methylguanosine
  modified_base 18: mod_base = OTHER; note = 2'-fluoroguanosine
  modified_base 19: mod_base = OTHER; note = 2'-O-methyluridine
  modified_base 20: mod_base = OTHER; note = 2'-fluoroguanosine
  modified_base 21: mod_base = OTHER; note = 2'-O-methylguanosine with phosphorothioate linkage
  modified_base 22: mod_base = OTHER; note = 2'-O-methylcytidine with phosphorothioate linkage
  modified_base 23: mod_base = OTHER; note = 2'-O-methyluridine
atgaatcccatggagaggtggct

SEQ ID NO: 991 - RNA, 23 nt, synthetic construct
  source 1..23: mol_type = other RNA
  modified_base 1: mod_base = OTHER; note = 5'-(E)-vinylphosphonate 2'-O-methylated uridine with phosphorothioate linkage
  modified_base 2: mod_base = OTHER; note = 2'-fluorocytidine with phosphorothioate linkage
  modified_base 3: mod_base = OTHER; note = 2'-O-methylguanosine
  modified_base 4: mod_base = OTHER; note = 2'-fluoroadenosine
  modified_base 5: mod_base = OTHER; note = 2'-O-methyluridine
  modified_base 6: mod_base = OTHER; note = 2'-fluoroadenosine
  modified_base 7: mod_base = OTHER; note = 2'-O-methylcytidine
  modified_base 8: mod_base = OTHER; note = 2'-fluorouridine
  modified_base 9: mod_base = OTHER; note = 2'-O-methylguanosine
  modified_base 10: mod_base = OTHER; note = 2'-fluoroadenosine
  modified_base 11: mod_base = OTHER; note = 2'-O-methyluridine
  modified_base 12: mod_base = OTHER; note = 2'-fluorocytidine
  modified_base 13: mod_base = OTHER; note = 2'-O-methylcytidine
  modified_base 14: mod_base = OTHER; note = 2'-fluorouridine
  modified_base 15: mod_base = OTHER; note = 2'-O-methylguanosine
  modified_base 16: mod_base = OTHER; note = 2'-fluoroguanosine
  modified_base 17: mod_base = OTHER; note = 2'-O-methyluridine
  modified_base 18: mod_base = OTHER; note = 2'-fluoroadenosine
  modified_base 19: mod_base = OTHER; note = 2'-O-methyluridine
  modified_base 20: mod_base = OTHER; note = 2'-fluorouridine
  modified_base 21: mod_base = OTHER; note = 2'-O-methylcytidine with phosphorothioate linkage
  modified_base 22: mod_base = OTHER; note = 2'-O-methyluridine with phosphorothioate linkage
  modified_base 23: mod_base = OTHER; note = 2'-O-methyluridine
tcgatactgatcctggtattctt

SEQ ID NO: 992 - RNA, 23 nt, synthetic construct
  source 1..23: mol_type = other RNA
  modified_base 1: mod_base = OTHER; note = 5'-(E)-vinylphosphonate 2'-O-methylated adenosine with phosphorothioate linkage
  modified_base 2: mod_base = OTHER; note = 2'-fluorouridine with phosphorothioate linkage
  modified_base 3: mod_base = OTHER; note = 2'-O-methyluridine
  modified_base 4: mod_base = OTHER; note = 2'-fluorocytidine
  modified_base 5: mod_base = OTHER; note = 2'-O-methyladenosine
  modified_base 6: mod_base = OTHER; note = 2'-fluoroadenosine
  modified_base 7: mod_base = OTHER; note = 2'-O-methylcytidine
  modified_base 8: mod_base = OTHER; note = 2'-fluoroadenosine
  modified_base 9: mod_base = OTHER; note = 2'-O-methylcytidine
  modified_base 10: mod_base = OTHER; note = 2'-fluorouridine
  modified_base 11: mod_base = OTHER; note = 2'-O-methylcytidine
  modified_base 12: mod_base = OTHER; note = 2'-fluoroguanosine
  modified_base 13: mod_base = OTHER; note = 2'-O-methyladenosine
  modified_base 14: mod_base = OTHER; note = 2'-fluorouridine
  modified_base 15: mod_base = OTHER; note = 2'-O-methylcytidine
  modified_base 16: mod_base = OTHER; note = 2'-fluoroadenosine
  modified_base 17: mod_base = OTHER; note = 2'-O-methylcytidine
  modified_base 18: mod_base = OTHER; note = 2'-fluorouridine
  modified_base 19: mod_base = OTHER; note = 2'-O-methylguanosine
  modified_base 20: mod_base = OTHER; note = 2'-fluorouridine
  modified_base 21: mod_base = OTHER; note = 2'-O-methylguanosine with phosphorothioate linkage
  modified_base 22: mod_base = OTHER; note = 2'-O-methylcytidine with phosphorothioate linkage
  modified_base 23: mod_base = OTHER; note = 2'-O-methylcytidine
attcaacactcgatcactgtgcc

SEQ ID NO: 993 - RNA, 23 nt, synthetic construct
  source 1..23: mol_type = other RNA
  modified_base 1: mod_base = OTHER; note = 5'-(E)-vinylphosphonate 2'-O-methylated uridine with phosphorothioate linkage
  modified_base 2: mod_base = OTHER; note = 2'-fluorocytidine with phosphorothioate linkage
  modified_base 3: mod_base = OTHER; note = 2'-O-methyluridine
  modified_base 4: mod_base = OTHER; note = 2'-fluorouridine
  modified_base 5: mod_base = OTHER; note = 2'-O-methyluridine
  modified_base 6: mod_base = OTHER; note = 2'-fluoroguanosine
  modified_base 7: mod_base = OTHER; note = 2'-O-methylcytidine
  modified_base 8: mod_base = OTHER; note = 2'-fluoroadenosine
  modified_base 9: mod_base = OTHER; note = 2'-O-methyluridine
  modified_base 10: mod_base = OTHER; note = 2'-fluoroadenosine
  modified_base 11: mod_base = OTHER; note = 2'-O-methylguanosine
  modified_base 12: mod_base = OTHER; note = 2'-fluoroguanosine
  modified_base 13: mod_base = OTHER; note = 2'-O-methylguanosine
  modified_base 14: mod_base = OTHER; note = 2'-fluorocytidine
  modified_base 15: mod_base = OTHER; note = 2'-O-methyluridine
  modified_base 16: mod_base = OTHER; note = 2'-fluoroguanosine
  modified_base 17: mod_base = OTHER; note = 2'-O-methylguanosine
  modified_base 18: mod_base = OTHER; note = 2'-fluoroguanosine
  modified_base 19: mod_base = OTHER; note = 2'-O-methylcytidine
  modified_base 20: mod_base = OTHER; note = 2'-fluorocytidine
  modified_base 21: mod_base = OTHER; note = 2'-O-methylguanosine with phosphorothioate linkage
  modified_base 22: mod_base = OTHER; note = 2'-O-methylguanosine with phosphorothioate linkage
  modified_base 23: mod_base = OTHER; note = 2'-O-methylcytidine
tctttgcatagggctgggccggc

SEQ ID NO: 994 - RNA, 23 nt, synthetic construct
  source 1..23: mol_type = other RNA
  modified_base 1: mod_base = OTHER; note = 5'-(E)-vinylphosphonate 2'-O-methylated uridine with phosphorothioate linkage
  modified_base 2: mod_base = OTHER; note = 2'-fluorocytidine with phosphorothioate linkage
  modified_base 3: mod_base = OTHER; note = 2'-O-methyladenosine
  modified_base 4: mod_base = OTHER; note = 2'-fluoroadenosine
  modified_base 5: mod_base = OTHER; note = 2'-O-methylcytidine
  modified_base 6: mod_base = OTHER; note = 2'-fluoroadenosine
  modified_base 7: mod_base = OTHER; note = 2'-O-methylcytidine
  modified_base 8: mod_base = OTHER; note = 2'-fluorouridine
  modified_base 9: mod_base = OTHER; note = 2'-O-methylcytidine
  modified_base 10: mod_base = OTHER; note = 2'-fluoroguanosine
  modified_base 11: mod_base = OTHER; note = 2'-O-methyladenosine
  modified_base 12: mod_base = OTHER; note = 2'-fluorouridine
  modified_base 13: mod_base = OTHER; note = 2'-O-methylcytidine
  modified_base 14: mod_base = OTHER; note = 2'-fluoroadenosine
  modified_base 15: mod_base = OTHER; note = 2'-O-methylcytidine
  modified_base 16: mod_base = OTHER; note = 2'-fluorouridine
  modified_base 17: mod_base = OTHER; note = 2'-O-methylguanosine
  modified_base 18: mod_base = OTHER; note = 2'-fluorouridine
  modified_base 19: mod_base = OTHER; note = 2'-O-methylguanosine
  modified_base 20: mod_base = OTHER; note = 2'-fluorocytidine
  modified_base 21: mod_base = OTHER; note = 2'-O-methylcytidine with phosphorothioate linkage
  modified_base 22: mod_base = OTHER; note = 2'-O-methyladenosine with phosphorothioate linkage
  modified_base 23: mod_base = OTHER; note = 2'-O-methyluridine
tcaacactcgatcactgtgccat

SEQ ID NO: 995 - RNA, 23 nt, synthetic construct
  source 1..23: mol_type = other RNA
  modified_base 1: mod_base = OTHER; note = 5'-(E)-vinylphosphonate 2'-O-methylated uridine with phosphorothioate linkage
  modified_base 2: mod_base = OTHER; note = 2'-fluoroguanosine with phosphorothioate linkage
  modified_base 3: mod_base = OTHER; note = 2'-O-methylcytidine
  modified_base 4: mod_base = OTHER; note = 2'-fluorouridine
  modified_base 5: mod_base = OTHER; note = 2'-O-methyluridine
  modified_base 6: mod_base = OTHER; note = 2'-fluoroadenosine
  modified_base 7: mod_base = OTHER; note = 2'-O-methyluridine
  modified_base 8: mod_base = OTHER; note = 2'-fluoroguanosine
  modified_base 9: mod_base = OTHER; note = 2'-O-methylcytidine
  modified_base 10: mod_base = OTHER; note = 2'-fluorouridine
  modified_base 11: mod_base = OTHER; note = 2'-O-methyluridine
  modified_base 12: mod_base = OTHER; note = 2'-fluorocytidine
  modified_base 13: mod_base = OTHER; note = 2'-O-methyluridine
  modified_base 14: mod_base = OTHER; note = 2'-fluorocytidine
  modified_base 15: mod_base = OTHER; note = 2'-O-methylguanosine
  modified_base 16: mod_base = OTHER; note = 2'-fluorocytidine
  modified_base 17: mod_base = OTHER; note = 2'-O-methylcytidine
  modified_base 18: mod_base = OTHER; note = 2'-fluorocytidine
  modified_base 19: mod_base = OTHER; note = 2'-O-methyladenosine
  modified_base 20: mod_base = OTHER; note = 2'-fluoroguanosine
  modified_base 21: mod_base = OTHER; note = 2'-O-methylguanosine with phosphorothioate linkage
  modified_base 22: mod_base = OTHER; note = 2'-O-methyladenosine with phosphorothioate linkage
  modified_base 23: mod_base = OTHER; note = 2'-O-methylcytidine
tgcttatgcttctcgcccaggac

SEQ ID NO: 996 - RNA, 23 nt, synthetic construct
  source 1..23: mol_type = other RNA
  modified_base 1: mod_base = OTHER; note = 5'-(E)-vinylphosphonate 2'-O-methylated uridine with phosphorothioate linkage
  modified_base 2: mod_base = OTHER; note = 2'-fluorouridine with phosphorothioate linkage
  modified_base 3: mod_base = OTHER; note = 2'-O-methylguanosine
  modified_base 4: mod_base = OTHER; note = 2'-fluorocytidine
  modified_base 5: mod_base = OTHER; note = 2'-O-methylguanosine
  modified_base 6: mod_base = OTHER; note = 2'-fluoroadenosine
  modified_base 7: mod_base = OTHER; note = 2'-O-methyladenosine
  modified_base 8: mod_base = OTHER; note = 2'-fluorocytidine
  modified_base 9: mod_base = OTHER; note = 2'-O-methyluridine
  modified_base 10: mod_base = OTHER; note = 2'-fluorouridine
  modified_base 11: mod_base = OTHER; note = 2'-O-methylguanosine
  modified_base 12: mod_base = OTHER; note = 2'-fluoroadenosine
  modified_base 13: mod_base = OTHER; note = 2'-O-methyladenosine
  modified_base 14: mod_base = OTHER; note = 2'-fluorocytidine
  modified_base 15: mod_base = OTHER; note = 2'-O-methylguanosine
  modified_base 16: mod_base = OTHER; note = 2'-fluorouridine
  modified_base 17: mod_base = OTHER; note = 2'-O-methylcytidine
  modified_base 18: mod_base = OTHER; note = 2'-fluoroadenosine
  modified_base 19: mod_base = OTHER; note = 2'-O-methylguanosine
  modified_base 20: mod_base = OTHER; note = 2'-fluoroguanosine
  modified_base 21: mod_base = OTHER; note = 2'-O-methyladenosine with phosphorothioate linkage
  modified_base 22: mod_base = OTHER; note = 2'-O-methylguanosine with phosphorothioate linkage
  modified_base 23: mod_base = OTHER; note = 2'-O-methyluridine
ttgcgaacttgaacgtcaggagt

SEQ ID NO: 997 - RNA, 23 nt, synthetic construct
  source 1..23: mol_type = other RNA
  modified_base 1: mod_base = OTHER; note = 5'-(E)-vinylphosphonate 2'-O-methylated adenosine with phosphorothioate linkage
  modified_base 2: mod_base = OTHER; note = 2'-fluorouridine with phosphorothioate linkage
  modified_base 3: mod_base = OTHER; note = 2'-O-methylcytidine
  modified_base 4: mod_base = OTHER; note = 2'-fluoroadenosine
  modified_base 5: mod_base = OTHER; note = 2'-O-methyluridine
  modified_base 6: mod_base = OTHER; note = 2'-fluorouridine
  modified_base 7: mod_base = OTHER; note = 2'-O-methyladenosine
  modified_base 8: mod_base = OTHER; note = 2'-fluorouridine
  modified_base 9: mod_base = OTHER; note = 2'-O-methyluridine
  modified_base 10: mod_base = OTHER; note = 2'-fluorocytidine
  modified_base 11: mod_base = OTHER; note = 2'-O-methyladenosine
  modified_base 12: mod_base = OTHER; note = 2'-fluoroadenosine
  modified_base 13: mod_base = OTHER; note = 2'-O-methylcytidine
  modified_base 14: mod_base = OTHER; note = 2'-fluoroadenosine
  modified_base 15: mod_base = OTHER; note = 2'-O-methylcytidine
  modified_base 16: mod_base = OTHER; note = 2'-fluorouridine
  modified_base 17: mod_base = OTHER; note = 2'-O-methylcytidine
  modified_base 18: mod_base = OTHER; note = 2'-fluoroguanosine
  modified_base 19: mod_base = OTHER; note = 2'-O-methyladenosine
  modified_base 20: mod_base = OTHER; note = 2'-fluorouridine
  modified_base 21: mod_base = OTHER; note = 2'-O-methylcytidine with phosphorothioate linkage
  modified_base 22: mod_base = OTHER; note = 2'-O-methyladenosine with phosphorothioate linkage
  modified_base 23: mod_base = OTHER; note = 2'-O-methylcytidine
atcattattcaacactcgatcac

SEQ ID NO: 998 - RNA, 23 nt, synthetic construct
  source 1..23: mol_type = other RNA
  modified_base 1: mod_base = OTHER; note = 5'-(E)-vinylphosphonate 2'-O-methylated adenosine with phosphorothioate linkage
  modified_base 2: mod_base = OTHER; note = 2'-fluorocytidine with phosphorothioate linkage
  modified_base 3: mod_base = OTHER; note = 2'-O-methyladenosine
  modified_base 4: mod_base = OTHER; note = 2'-fluoroadenosine
  modified_base 5: mod_base = OTHER; note = 2'-O-methyluridine
  modified_base 6: mod_base = OTHER; note = 2'-fluorocytidine
  modified_base 7: mod_base = OTHER; note = 2'-O-methylguanosine
  modified_base 8: mod_base = OTHER; note = 2'-fluorouridine
  modified_base 9: mod_base = OTHER; note = 2'-O-methylcytidine
  modified_base 10: mod_base = OTHER; note = 2'-fluoroadenosine
  modified_base 11: mod_base = OTHER; note = 2'-O-methyluridine
  modified_base 12: mod_base = OTHER; note = 2'-fluorocytidine
  modified_base 13: mod_base = OTHER; note = 2'-O-methylcytidine
  modified_base 14: mod_base = OTHER; note = 2'-fluorouridine
  modified_base 15: mod_base = OTHER; note = 2'-O-methylcytidine
  modified_base 16: mod_base = OTHER; note = 2'-fluorouridine
  modified_base 17: mod_base = OTHER; note = 2'-O-methylguanosine
  modified_base 18: mod_base = OTHER; note = 2'-fluoroguanosine
  modified_base 19: mod_base = OTHER; note = 2'-O-methylcytidine
  modified_base 20: mod_base = OTHER; note = 2'-fluoroguanosine
  modified_base 21: mod_base = OTHER; note = 2'-O-methyluridine with phosphorothioate linkage
  modified_base 22: mod_base = OTHER; note = 2'-O-methylguanosine with phosphorothioate linkage
  modified_base 23: mod_base = OTHER; note = 2'-O-methyladenosine
acaatcgtcatcctctggcgtga

SEQ ID NO: 999 - RNA, 23 nt, synthetic construct
  source 1..23: mol_type = other RNA
  modified_base 1: mod_base = OTHER; note = 5'-(E)-vinylphosphonate 2'-O-methylated guanosine with phosphorothioate linkage
  modified_base 2: mod_base = OTHER; note = 2'-fluorouridine with phosphorothioate linkage
  modified_base 3: mod_base = OTHER; note = 2'-O-methyluridine
  modified_base 4: mod_base = OTHER; note = 2'-fluoroadenosine
  modified_base 5: mod_base = OTHER; note = 2'-O-methyluridine
  modified_base 6: mod_base = OTHER; note = 2'-fluorouridine
  modified_base 7: mod_base = OTHER; note = 2'-O-methylguanosine
  modified_base 8: mod_base = OTHER; note = 2'-fluorouridine
  modified_base 9: mod_base = OTHER; note = 2'-O-methylcytidine
  modified_base 10: mod_base = OTHER; note = 2'-fluorouridine
  modified_base 11: mod_base = OTHER; note = 2'-O-methylguanosine
  modified_base 12: mod_base = OTHER; note = 2'-fluorocytidine
  modified_base 13: mod_base = OTHER; note = 2'-O-methyladenosine
  modified_base 14: mod_base = OTHER; note = 2'-fluoroadenosine
  modified_base 15: mod_base = OTHER; note = 2'-O-methyluridine
  modified_base 16: mod_base = OTHER; note = 2'-fluoroadenosine
  modified_base 17: mod_base = OTHER; note = 2'-O-methyluridine
  modified_base 18: mod_base = OTHER; note = 2'-fluoroguanosine
  modified_base 19: mod_base = OTHER; note = 2'-O-methyladenosine
  modified_base 20: mod_base = OTHER; note = 2'-fluoroadenosine
  modified_base 21: mod_base = OTHER; note = 2'-O-methyluridine with phosphorothioate linkage
  modified_base 22: mod_base = OTHER; note = 2'-O-methylcytidine with phosphorothioate linkage
  modified_base 23: mod_base = OTHER; note = 2'-O-methylcytidine
gttattgtctgcaatatgaatcc

SEQ ID NO: 1000 - RNA, 23 nt, synthetic construct
  source 1..23: mol_type = other RNA
  modified_base 1: mod_base = OTHER; note = 5'-(E)-vinylphosphonate 2'-O-methylated guanosine with phosphorothioate linkage
  modified_base 2: mod_base = OTHER; note = 2'-fluoroguanosine with phosphorothioate linkage
  modified_base 3: mod_base = OTHER; note = 2'-O-methylcytidine
  modified_base 4: mod_base = OTHER; note = 2'-fluoroguanosine
  modified_base 5: mod_base = OTHER; note = 2'-O-methyluridine
  modified_base 6: mod_base = OTHER; note = 2'-fluoroguanosine
  modified_base 7: mod_base = OTHER; note = 2'-O-methyladenosine
  modified_base 8: mod_base = OTHER; note = 2'-fluorocytidine
  modified_base 9: mod_base = OTHER; note = 2'-O-methylcytidine
  modified_base 10: mod_base = OTHER; note = 2'-fluorouridine
  modified_base 11: mod_base = OTHER; note = 2'-O-methylguanosine
  modified_base 12: mod_base = OTHER; note = 2'-fluoroguanosine
  modified_base 13: mod_base = OTHER; note = 2'-O-methyladenosine
  modified_base 14: mod_base = OTHER; note = 2'-fluorouridine
  modified_base 15: mod_base = OTHER; note = 2'-O-methylguanosine
  modified_base 16: mod_base = OTHER; note = 2'-fluorocytidine
  modified_base 17: mod_base = OTHER; note = 2'-O-methylcytidine
  modified_base 18: mod_base = OTHER; note = 2'-fluoroadenosine
  modified_base 19: mod_base = OTHER; note = 2'-O-methyladenosine
  modified_base 20: mod_base = OTHER; note = 2'-fluorocytidine
  modified_base 21: mod_base = OTHER; note = 2'-O-methylcytidine with phosphorothioate linkage
  modified_base 22: mod_base = OTHER; note = 2'-O-methyluridine with phosphorothioate linkage
  modified_base 23: mod_base = OTHER; note = 2'-O-methylcytidine
ggcgtgacctggatgccaacctc

SEQ ID NO: 1001 - RNA, 23 nt, synthetic construct
  source 1..23: mol_type = other RNA
  modified_base 1: mod_base = OTHER; note = 5'-(E)-vinylphosphonate 2'-O-methylated uridine with phosphorothioate linkage
  modified_base 2: mod_base = OTHER; note = 2'-fluorouridine with phosphorothioate linkage
  modified_base 3: mod_base = OTHER; note = 2'-O-methylcytidine
  modified_base 4: mod_base = OTHER; note = 2'-fluoroguanosine
  modified_base 5: mod_base = OTHER; note = 2'-O-methylcytidine
  modified_base 6: mod_base = OTHER; note = 2'-fluorouridine
  modified_base 7: mod_base = OTHER; note = 2'-O-methylcytidine
  modified_base 8: mod_base = OTHER; note = 2'-fluorouridine
  modified_base 9: mod_base = OTHER; note = 2'-O-methyluridine
  modified_base 10: mod_base = OTHER; note = 2'-fluoroguanosine
  modified_base 11: mod_base = OTHER; note = 2'-O-methyladenosine
  modified_base 12: mod_base = OTHER; note = 2'-fluoroadenosine
  modified_base 13: mod_base = OTHER; note = 2'-O-methylcytidine
  modified_base 14: mod_base = OTHER; note = 2'-fluorouridine
  modified_base 15: mod_base = OTHER; note = 2'-O-methyluridine
  modified_base 16: mod_base = OTHER; note = 2'-fluoroguanosine
  modified_base 17: mod_base = OTHER; note = 2'-O-methylguanosine
  modified_base 18: mod_base = OTHER; note = 2'-fluorocytidine
  modified_base 19: mod_base = OTHER; note = 2'-O-methylcytidine
  modified_base 20: mod_base = OTHER; note = 2'-fluoroadenosine
  modified_base 21: mod_base = OTHER; note = 2'-O-methylcytidine with phosphorothioate linkage
  modified_base 22: mod_base = OTHER; note = 2'-O-methylcytidine with phosphorothioate linkage
  modified_base 23: mod_base = OTHER; note = 2'-O-methyladenosine
ttcgctcttgaacttggccacca

SEQ ID NO: 1002 - RNA, 23 nt, synthetic construct
  source 1..23: mol_type = other RNA
  modified_base 1: mod_base = OTHER; note = 5'-(E)-vinylphosphonate 2'-O-methylated adenosine with phosphorothioate linkage
  modified_base 2: mod_base = OTHER; note = 2'-fluoroadenosine with phosphorothioate linkage
  modified_base 3: mod_base = OTHER; note = 2'-O-methylcytidine
  modified_base 4: mod_base = OTHER; note = 2'-fluoroadenosine
  modified_base 5: mod_base = OTHER; note = 2'-O-methylcytidine
  modified_base 6: mod_base = OTHER; note = 2'-fluorouridine
  modified_base 7: mod_base = OTHER; note = 2'-O-methylcytidine
  modified_base 8: mod_base = OTHER; note = 2'-fluoroguanosine
  modified_base 9: mod_base = OTHER; note = 2'-O-methyladenosine
  modified_base 10: mod_base = OTHER; note = 2'-fluorouridine
  modified_base 11: mod_base = OTHER; note = 2'-O-methylcytidine
  modified_base 12: mod_base = OTHER; note = 2'-fluoroadenosine
  modified_base 13: mod_base = OTHER; note = 2'-O-methylcytidine
  modified_base 14: mod_base = OTHER; note = 2'-fluorouridine
  modified_base 15: mod_base = OTHER; note = 2'-O-methylguanosine
  modified_base 16: mod_base = OTHER; note = 2'-fluorouridine
  modified_base 17: mod_base = OTHER; note = 2'-O-methylguanosine
  modified_base 18: mod_base = OTHER; note = 2'-fluorocytidine
  modified_base 19: mod_base = OTHER; note = 2'-O-methylcytidine
  modified_base 20: mod_base = OTHER; note = 2'-fluoroadenosine
  modified_base 21: mod_base = OTHER; note = 2'-O-methyluridine with phosphorothioate linkage
  modified_base 22: mod_base = OTHER; note = 2'-O-methyluridine with phosphorothioate linkage
  modified_base 23: mod_base = OTHER; note = 2'-O-methyluridine
aacactcgatcactgtgccattt

SEQ ID NO: 1003 - RNA, 23 nt, synthetic construct
  source 1..23: mol_type = other RNA
  modified_base 1: mod_base = OTHER; note = 5'-(E)-vinylphosphonate 2'-O-methylated guanosine with phosphorothioate linkage
  modified_base 2: mod_base = OTHER; note = 2'-fluorouridine with phosphorothioate linkage
  modified_base 3: mod_base = OTHER; note = 2'-O-methylcytidine
  modified_base 4: mod_base = OTHER; note = 2'-fluoroguanosine
  modified_base 5: mod_base = OTHER; note = 2'-O-methylcytidine
  modified_base 6: mod_base = OTHER; note = 2'-fluoroadenosine
  modified_base 7: mod_base = OTHER; note = 2'-O-methylcytidine
  modified_base 8: mod_base = OTHER; note = 2'-fluoroadenosine
  modified_base 9: mod_base = OTHER; note = 2'-O-methylguanosine
  modified_base 10: mod_base = OTHER; note = 2'-fluoroguanosine
  modified_base 11: mod_base = OTHER; note = 2'-O-methyluridine
  modified_base 12: mod_base = OTHER; note = 2'-fluorouridine
  modified_base 13: mod_base = OTHER; note = 2'-O-methylguanosine
  modified_base 14: mod_base = OTHER; note = 2'-fluorocytidine
  modified_base 15: mod_base = OTHER; note = 2'-O-methyladenosine
  modified_base 16: mod_base = OTHER; note = 2'-fluorocytidine
  modified_base 17: mod_base = OTHER; note = 2'-O-methyluridine
  modified_base 18: mod_base = OTHER; note = 2'-fluorouridine
  modified_base 19: mod_base = OTHER; note = 2'-O-methylguanosine
  modified_base 20: mod_base = OTHER; note = 2'-fluorouridine
  modified_base 21: mod_base = OTHER; note = 2'-O-methyladenosine with phosphorothioate linkage
  modified_base 22: mod_base = OTHER; note = 2'-O-methylguanosine with phosphorothioate linkage
  modified_base 23: mod_base = OTHER; note = 2'-O-methylguanosine
gtcgcacaggttgcacttgtagg

SEQ ID NO: 1004 - RNA, 23 nt, synthetic construct
  source 1..23: mol_type = other RNA
  modified_base 1: mod_base = OTHER; note = 5'-(E)-vinylphosphonate 2'-O-methylated uridine with phosphorothioate linkage
  modified_base 2: mod_base = OTHER; note = 2'-fluorocytidine with phosphorothioate linkage
  modified_base 3: mod_base = OTHER; note = 2'-O-methylguanosine
  modified_base 4: mod_base = OTHER; note = 2'-fluoroadenosine
  modified_base 5: mod_base = OTHER; note = 2'-O-methyladenosine
  modified_base 6: mod_base = OTHER; note = 2'-fluoroguanosine
  modified_base 7: mod_base = OTHER; note = 2'-O-methylcytidine
  modified_base 8: mod_base = OTHER; note = 2'-fluorouridine
  modified_base 9: mod_base = OTHER; note = 2'-O-methyladenosine
  modified_base 10: mod_base = OTHER; note = 2'-fluoroadenosine
  modified_base 11: mod_base = OTHER; note = 2'-O-methylguanosine
  modified_base 12: mod_base = OTHER; note = 2'-fluoroguanosine
  modified_base 13: mod_base = OTHER; note = 2'-O-methyladenosine
  modified_base 14: mod_base = OTHER; note = 2'-fluoroadenosine
  modified_base 15: mod_base = OTHER; note = 2'-O-methylguanosine
  modified_base 16: mod_base = OTHER; note = 2'-fluoroguanosine
  modified_base 17: mod_base = OTHER; note = 2'-O-methylguanosine
  modified_base 18: mod_base = OTHER; note = 2'-fluoroadenosine
  modified_base 19: mod_base = OTHER; note = 2'-O-methyluridine
  modified_base 20: mod_base = OTHER; note = 2'-fluorocytidine
  modified_base 21: mod_base = OTHER; note = 2'-O-methyluridine with phosphorothioate linkage
  modified_base 22: mod_base = OTHER; note = 2'-O-methyluridine with phosphorothioate linkage
  modified_base 23: mod_base = OTHER; note = 2'-O-methyluridine
tcgaagctaaggaagggatcttt

SEQ ID NO: 1005 - RNA, 23 nt, synthetic construct
  source 1..23: mol_type = other RNA
  modified_base 1: mod_base = OTHER; note = 5'-(E)-vinylphosphonate 2'-O-methylated adenosine with phosphorothioate linkage
  modified_base 2: mod_base = OTHER; note = 2'-fluoroadenosine with phosphorothioate linkage
  modified_base 3: mod_base = OTHER; note = 2'-O-methylcytidine
  modified_base 4: mod_base = OTHER; note = 2'-fluorouridine
  modified_base 5: mod_base = OTHER; note = 2'-O-methylcytidine
  modified_base 6: mod_base = OTHER; note = 2'-fluorocytidine
  modified_base 7: mod_base = OTHER; note = 2'-O-methyluridine
  modified_base 8: mod_base = OTHER; note = 2'-fluorouridine
  modified_base 9: mod_base = OTHER; note = 2'-O-methylcytidine
  modified_base 10: mod_base = OTHER; note = 2'-fluorouridine
  modified_base 11: mod_base = OTHER; note = 2'-O-methylcytidine
  modified_base 12: mod_base = OTHER; note = 2'-fluoroguanosine
  modified_base 13: mod_base = OTHER; note = 2'-O-methyladenosine
  modified_base 14: mod_base = OTHER; note = 2'-fluoroguanosine
  modified_base 15: mod_base = OTHER; note = 2'-O-methylcytidine
  modified_base 16: mod_base = OTHER; note = 2'-fluorouridine
  modified_base 17: mod_base = OTHER; note = 2'-O-methyluridine
  modified_base 18: mod_base = OTHER; note = 2'-fluoroguanosine
  modified_base 19: mod_base = OTHER; note = 2'-O-methyladenosine
  modified_base 20: mod_base = OTHER; note = 2'-fluorouridine
  modified_base 21: mod_base = OTHER; note = 2'-O-methylguanosine with phosphorothioate linkage
  modified_base 22: mod_base = OTHER; note = 2'-O-methylcytidine with phosphorothioate linkage
  modified_base 23: mod_base = OTHER; note = 2'-O-methylguanosine
aactccttctcgagcttgatgcg

SEQ ID NO: 1006 - RNA, 23 nt, synthetic construct
  source 1..23: mol_type = other RNA
  modified_base 1: mod_base = OTHER; note = 5'-(E)-vinylphosphonate 2'-O-methylated uridine with phosphorothioate linkage
  modified_base 2: mod_base = OTHER; note = 2'-fluorouridine with phosphorothioate linkage
  modified_base 3: mod_base = OTHER; note = 2'-O-methyluridine
  modified_base 4: mod_base = OTHER; note = 2'-fluoroguanosine
  modified_base 5: mod_base = OTHER; note = 2'-O-methyladenosine
  modified_base 6: mod_base = OTHER; note = 2'-fluoroadenosine
  modified_base 7: mod_base = OTHER; note = 2'-O-methylcytidine
  modified_base 8: mod_base = OTHER; note = 2'-fluoroguanosine
  modified_base 9: mod_base = OTHER; note = 2'-O-methyluridine
  modified_base 10: mod_base = OTHER; note = 2'-fluorocytidine
  modified_base 11: mod_base = OTHER; note = 2'-O-methyladenosine
  modified_base 12: mod_base = OTHER; note = 2'-fluoroguanosine
  modified_base 13: mod_base = OTHER; note = 2'-O-methylguanosine
  modified_base 14: mod_base = OTHER; note = 2'-fluoroadenosine
  modified_base 15: mod_base = OTHER; note = 2'-O-methylguanosine
  modified_base 16: mod_base = OTHER; note = 2'-fluorouridine
  modified_base 17: mod_base = OTHER; note = 2'-O-methylcytidine
  modified_base 18: mod_base = OTHER; note = 2'-fluorouridine
  modified_base 19: mod_base = OTHER; note = 2'-O-methylguanosine
  modified_base 20: mod_base = OTHER; note = 2'-fluoroguanosine
  modified_base 21: mod_base = OTHER; note = 2'-O-methyladenosine with phosphorothioate linkage
  modified_base 22: mod_base = OTHER; note = 2'-O-methyluridine with phosphorothioate linkage
  modified_base 23: mod_base = OTHER; note = 2'-O-methylguanosine
tttgaacgtcaggagtctggatg

SEQ ID NO: 1007 - RNA, 23 nt, synthetic construct
  source 1..23: mol_type = other RNA
  modified_base 1: mod_base = OTHER; note = 5'-(E)-vinylphosphonate 2'-O-methylated uridine with phosphorothioate linkage
  modified_base 2: mod_base = OTHER; note = 2'-fluoroguanosine with phosphorothioate linkage
  modified_base 3: mod_base = OTHER; note = 2'-O-methyladenosine
  modified_base 4: mod_base = OTHER; note = 2'-fluoroguanosine
  modified_base 5: mod_base = OTHER; note = 2'-O-methyladenosine
  modified_base 6: mod_base = OTHER; note = 2'-fluorouridine
  modified_base 7: mod_base = OTHER; note = 2'-O-methylcytidine
  modified_base 8: mod_base = OTHER; note = 2'-fluorocytidine
  modified_base 9: mod_base = OTHER; note = 2'-O-methylcytidine
  modified_base 10: mod_base = OTHER; note = 2'-fluorouridine
  modified_base 11: mod_base = OTHER; note = 2'-O-methylcytidine
  modified_base 12: mod_base = OTHER; note = 2'-fluorocytidine
  modified_base 13: mod_base = OTHER; note = 2'-O-methylguanosine
  modified_base 14: mod_base = OTHER; note = 2'-fluorouridine
  modified_base 15: mod_base = OTHER; note = 2'-O-methylcytidine
  modified_base 16: mod_base = OTHER; note = 2'-fluorocytidine
  modified_base 17: mod_base = OTHER; note = 2'-O-methyladenosine
  modified_base 18: mod_base = OTHER; note = 2'-fluoroguanosine
  modified_base 19: mod_base = OTHER; note = 2'-O-methylcytidine
  modified_base 20: mod_base = OTHER; note = 2'-fluorouridine
  modified_base 21: mod_base = OTHER; note = 2'-O-methylcytidine with phosphorothioate linkage
  modified_base 22: mod_base = OTHER; note = 2'-O-methylcytidine with phosphorothioate linkage
  modified_base 23: mod_base = OTHER; note = 2'-O-methylcytidine
tgagatccctccgtccagctccc

SEQ ID NO: 1008 - RNA, 23 nt, synthetic construct
  source 1..23: mol_type = other RNA
  modified_base 1: mod_base = OTHER; note = 5'-(E)-vinylphosphonate 2'-O-methylated uridine with phosphorothioate linkage
  modified_base 2: mod_base = OTHER; note = 2'-fluorouridine with phosphorothioate linkage
  modified_base 3: mod_base = OTHER; note = 2'-O-methyluridine
  modified_base 4: mod_base = OTHER; note = 2'-fluorocytidine
  modified_base 5: mod_base = OTHER; note = 2'-O-methylguanosine
  modified_base 6: mod_base = OTHER; note = 2'-fluorouridine
  modified_base 7: mod_base = OTHER; note = 2'-O-methylcytidine
  modified_base 8: mod_base = OTHER; note = 2'-fluoroguanosine
  modified_base 9: mod_base = OTHER; note = 2'-O-methylcytidine
  modified_base 10: mod_base = OTHER; note = 2'-fluoroadenosine
  modified_base 11: mod_base = OTHER; note = 2'-O-methyladenosine
  modified_base 12: mod_base = OTHER; note = 2'-fluoroguanosine
  modified_base 13: mod_base = OTHER; note = 2'-O-methyluridine
  modified_base 14: mod_base = OTHER; note = 2'-fluoroguanosine
  modified_base 15: mod_base = OTHER; note = 2'-O-methyluridine
  modified_base 16: mod_base = OTHER; note = 2'-fluorocytidine
  modified_base 17: mod_base = OTHER; note = 2'-O-methylcytidine
  modified_base 18: mod_base = OTHER; note = 2'-fluorocytidine
  modified_base 19: mod_base = OTHER; note = 2'-O-methyluridine
  modified_base 20: mod_base = OTHER; note = 2'-fluoroguanosine
  modified_base 21: mod_base = OTHER; note = 2'-O-methyluridine with phosphorothioate linkage
  modified_base 22: mod_base = OTHER; note = 2'-O-methylguanosine with phosphorothioate linkage
  modified_base 23: mod_base = OTHER; note = 2'-O-methylguanosine
tttcgtcgcaagtgtccctgtgg

SEQ ID NO: 1009 - RNA, 23 nt, synthetic construct
  source 1..23: mol_type = other RNA
  modified_base 1: mod_base = OTHER; note = 5'-(E)-vinylphosphonate 2'-O-methylated adenosine with phosphorothioate linkage
  modified_base 2: mod_base = OTHER; note = 2'-fluoroguanosine with phosphorothioate linkage
  modified_base 3: mod_base = OTHER; note = 2'-O-methyluridine
  modified_base 4: mod_base = OTHER; note = 2'-fluorocytidine
  modified_base 5: mod_base = OTHER; note = 2'-O-methyluridine
  modified_base 6: mod_base = OTHER; note = 2'-fluorocytidine
  modified_base 7: mod_base = OTHER; note = 2'-O-methylcytidine
  modified_base 8: mod_base = OTHER; note = 2'-fluoroguanosine
  modified_base 9: mod_base = OTHER; note = 2'-O-methyladenosine
  modified_base 10: mod_base = OTHER; note = 2'-fluoroadenosine
  modified_base 11: mod_base = OTHER; note = 2'-O-methylguanosine
  modified_base 12: mod_base = OTHER; note = 2'-fluorocytidine
  modified_base 13: mod_base = OTHER; note = 2'-O-methyluridine
  modified_base 14: mod_base = OTHER; note = 2'-fluoroadenosine
  modified_base 15: mod_base = OTHER; note = 2'-O-methyladenosine
  modified_base 16: mod_base = OTHER; note = 2'-fluoroguanosine
  modified_base 17: mod_base = OTHER; note = 2'-O-methylguanosine
  modified_base 18: mod_base = OTHER; note = 2'-fluoroadenosine
  modified_base 19: mod_base = OTHER; note = 2'-O-methyladenosine
  modified_base 20: mod_base = OTHER; note = 2'-fluoroguanosine
  modified_base 21: mod_base = OTHER; note = 2'-O-methylguanosine with phosphorothioate linkage
  modified_base 22: mod_base = OTHER; note = 2'-O-methylguanosine with phosphorothioate linkage
  modified_base 23: mod_base = OTHER; note = 2'-O-methyladenosine
agtctccgaagctaaggaaggga

SEQ ID NO: 1010 - RNA, 23 nt, synthetic construct
  source 1..23: mol_type = other RNA
  modified_base 1: mod_base = OTHER; note = 5'-(E)-vinylphosphonate 2'-O-methylated uridine with phosphorothioate linkage
  modified_base 2: mod_base = OTHER; note = 2'-fluoroadenosine with phosphorothioate linkage
  modified_base 3: mod_base = OTHER; note = 2'-O-methyluridine
  modified_base 4: mod_base = OTHER; note = 2'-fluoroguanosine
  modified_base 5: mod_base = OTHER; note = 2'-O-methylcytidine
  modified_base 6: mod_base = OTHER; note = 2'-fluorouridine
  modified_base 7: mod_base = OTHER; note = 2'-O-methyluridine
  modified_base 8: mod_base = OTHER; note = 2'-fluorocytidine
  modified_base 9: mod_base = OTHER; note = 2'-O-methyluridine
  modified_base 10: mod_base = OTHER; note = 2'-fluorocytidine
  modified_base 11: mod_base = OTHER; note = 2'-O-methylguanosine
  modified_base 12: mod_base = OTHER; note = 2'-fluorocytidine
  modified_base 13: mod_base = OTHER; note = 2'-O-methylcytidine
  modified_base 14: mod_base = OTHER; note = 2'-fluorocytidine
  modified_base 15: mod_base = OTHER; note = 2'-O-methyladenosine
  modified_base 16: mod_base = OTHER; note = 2'-fluoroguanosine
  modified_base 17: mod_base = OTHER; note = 2'-O-methylguanosine
  modified_base 18: mod_base = OTHER; note = 2'-fluoroadenosine
  modified_base 19: mod_base = OTHER; note = 2'-O-methylcytidine
  modified_base 20: mod_base = OTHER; note = 2'-fluorocytidine
  modified_base 21: mod_base = OTHER; note = 2'-O-methyluridine with phosphorothioate linkage
  modified_base 22: mod_base = OTHER; note = 2'-O-methylguanosine with phosphorothioate linkage
  modified_base 23: mod_base = OTHER; note = 2'-O-methylguanosine
tatgcttctcgcccaggacctgg

SEQ ID NO: 1011 - RNA, 23 nt, synthetic construct
  source 1..23: mol_type = other RNA
  modified_base 1: mod_base = OTHER; note = 5'-(E)-vinylphosphonate 2'-O-methylated adenosine with phosphorothioate linkage
  modified_base 2: mod_base = OTHER; note = 2'-fluorocytidine with phosphorothioate linkage
  modified_base 3: mod_base = OTHER; note = 2'-O-methylcytidine
  modified_base 4: mod_base = OTHER; note = 2'-fluoroadenosine
  modified_base 5: mod_base = OTHER; note = 2'-O-methylcytidine
  modified_base 6: mod_base = OTHER; note = 2'-fluorocytidine
  modified_base 7: mod_base = OTHER; note = 2'-O-methyladenosine
  modified_base 8: mod_base = OTHER; note = 2'-fluoroguanosine
  modified_base 9: mod_base = OTHER; note = 2'-O-methylguanosine
  modified_base 10: mod_base = OTHER; note = 2'-fluorouridine
  modified_base 11: mod_base = OTHER; note = 2'-O-methyluridine
  modified_base 12: mod_base = OTHER; note = 2'-fluoroguanosine
  modified_base 13: mod_base = OTHER; note = 2'-O-methylcytidine
  modified_base 14: mod_base = OTHER; note = 2'-fluorouridine
  modified_base 15: mod_base = OTHER; note = 2'-O-methylcytidine
  modified_base 16: mod_base = OTHER; note = 2'-fluorouridine
  modified_base 17: mod_base = OTHER; note = 2'-O-methylguanosine
  modified_base 18: mod_base = OTHER; note = 2'-fluoroadenosine
  modified_base 19: mod_base = OTHER; note = 2'-O-methyladenosine
  modified_base 20: mod_base = OTHER; note = 2'-fluoroadenosine
  modified_base 21: mod_base = OTHER; note = 2'-O-methyluridine with phosphorothioate linkage
  modified_base 22: mod_base = OTHER; note = 2'-O-methyluridine with phosphorothioate linkage
  modified_base 23: mod_base = OTHER; note = 2'-O-methyluridine
accaccaggttgctctgaaattt

SEQ ID NO: 1012 - RNA, 23 nt, synthetic construct
  source 1..23: mol_type = other RNA
  modified_base 1: mod_base = OTHER; note = 5'-(E)-vinylphosphonate 2'-O-methylated guanosine with phosphorothioate linkage
  modified_base 2: mod_base = OTHER; note = 2'-fluoroadenosine with phosphorothioate linkage
  modified_base 3: mod_base = OTHER; note = 2'-O-methyluridine
  modified_base 4: mod_base = OTHER; note = 2'-fluoroadenosine
  modified_base 5: mod_base = OTHER; note = 2'-O-methyladenosine
  modified_base 6: mod_base = OTHER; note = 2'-fluoroadenosine
  modified_base 7: mod_base = OTHER; note = 2'-O-methylcytidine
  modified_base 8: mod_base = OTHER; note = 2'-fluoroadenosine
  modified_base 9: mod_base = OTHER; note = 2'-O-methyladenosine
  modified_base 10: mod_base = OTHER; note = 2'-fluorouridine
  modified_base 11: mod_base = OTHER; note = 2'-O-methylcytidine
  modified_base 12: mod_base = OTHER; note = 2'-fluoroguanosine
  modified_base 13: mod_base = OTHER; note = 2'-O-methyluridine
  modified_base 14: mod_base = OTHER; note = 2'-fluorocytidine
  modified_base 15: mod_base = OTHER; note = 2'-O-methyladenosine
  modified_base 16: mod_base = OTHER; note = 2'-fluorouridine
  modified_base 17: mod_base = OTHER; note = 2'-O-methylcytidine
  modified_base 18: mod_base = OTHER; note = 2'-fluorocytidine
  modified_base 19: mod_base = OTHER; note = 2'-O-methyluridine
  modified_base 20: mod_base = OTHER; note = 2'-fluorocytidine
  modified_base 21: mod_base = OTHER; note = 2'-O-methyluridine with phosphorothioate linkage
  modified_base 22: mod_base = OTHER; note = 2'-O-methylguanosine with phosphorothioate linkage
  modified_base 23: mod_base = OTHER; note = 2'-O-methylguanosine
gataaacaatcgtcatcctctgg

SEQ ID NO: 1013 - RNA, 23 nt, synthetic construct
  source 1..23: mol_type = other RNA
  modified_base 1: mod_base = OTHER; note = 5'-(E)-vinylphosphonate 2'-O-methylated uridine with phosphorothioate linkage
  modified_base 2: mod_base = OTHER; note = 2'-fluoroguanosine with phosphorothioate linkage
  modified_base 3: mod_base = OTHER; note = 2'-O-methylcytidine
  modified_base 4: mod_base = OTHER; note = 2'-fluorouridine
  modified_base 5: mod_base = OTHER; note = 2'-O-methylcytidine
  modified_base 6: mod_base = OTHER; note = 2'-fluorouridine
  modified_base 7: mod_base = OTHER; note = 2'-O-methyluridine
  modified_base 8: mod_base = OTHER; note = 2'-fluoroguanosine
  modified_base 9: mod_base = OTHER; note = 2'-O-methyladenosine
  modified_base 10: mod_base = OTHER; note = 2'-fluoroadenosine
  modified_base 11: mod_base = OTHER; note = 2'-O-methylcytidine
  modified_base 12: mod_base = OTHER; note = 2'-fluorouridine
  modified_base 13: mod_base = OTHER; note = 2'-O-methyluridine
  modified_base 14: mod_base = OTHER; note = 2'-fluoroguanosine
  modified_base 15: mod_base = OTHER; note = 2'-O-methylguanosine
  modified_base 16: mod_base = OTHER; note = 2'-fluorocytidine
  modified_base 17: mod_base = OTHER; note = 2'-O-methylcytidine
  modified_base 18: mod_base = OTHER; note = 2'-fluoroadenosine
  modified_base 19: mod_base = OTHER; note = 2'-O-methylcytidine
  modified_base 20: mod_base = OTHER; note = 2'-fluorocytidine
  modified_base 21: mod_base = OTHER; note = 2'-O-methyladenosine with phosphorothioate linkage
  modified_base 22: mod_base = OTHER; note = 2'-O-methylcytidine with phosphorothioate linkage
  modified_base 23: mod_base = OTHER; note = 2'-O-methylguanosine
tgctcttgaacttggccaccacg

SEQ ID NO: 1014 - RNA, 23 nt, synthetic construct
  source 1..23: mol_type = other RNA
  modified_base 1: mod_base = OTHER; note = 5'-(E)-vinylphosphonate 2'-O-methylated uridine with phosphorothioate linkage
  modified_base 2: mod_base = OTHER; note = 2'-fluorouridine with phosphorothioate linkage
  modified_base 3: mod_base = OTHER; note = 2'-O-methyluridine
  modified_base 4: mod_base = OTHER; note = 2'-fluoroguanosine
  modified_base 5: mod_base = OTHER; note = 2'-O-methylcytidine
  modified_base 6: mod_base = OTHER; note = 2'-fluoroadenosine
  modified_base 7: mod_base = OTHER; note = 2'-O-methyluridine
  modified_base 8: mod_base = OTHER; note = 2'-fluoroadenosine
  modified_base 9: mod_base = OTHER; note = 2'-O-methylguanosine
  modified_base 10: mod_base = OTHER; note = 2'-fluoroguanosine
  modified_base 11: mod_base = OTHER; note = 2'-O-methylguanosine
  modified_base 12: mod_base = OTHER; note = 2'-fluorocytidine
  modified_base 13: mod_base = OTHER; note = 2'-O-methyluridine
  modified_base 14: mod_base = OTHER; note = 2'-fluoroguanosine
  modified_base 15: mod_base = OTHER; note = 2'-O-methylguanosine
  modified_base 16: mod_base = OTHER; note = 2'-fluoroguanosine
  modified_base 17: mod_base = OTHER; note = 2'-O-methylcytidine
  modified_base 18: mod_base = OTHER; note = 2'-fluorocytidine
  modified_base 19: mod_base = OTHER; note = 2'-O-methylguanosine
  modified_base 20: mod_base = OTHER; note = 2'-fluoroguanosine
  modified_base 21: mod_base = OTHER; note = 2'-O-methylcytidine with phosphorothioate linkage
  modified_base 22: mod_base = OTHER; note = 2'-O-methylcytidine with phosphorothioate linkage
  modified_base 23: mod_base = OTHER; note = 2'-O-methyluridine
tttgcatagggctgggccggcct

SEQ ID NO: 1015 - RNA, 23 nt, synthetic construct
  source 1..23: mol_type = other RNA
  modified_base 1: mod_base = OTHER; note = 5'-(E)-vinylphosphonate 2'-O-methylated guanosine with phosphorothioate linkage
  modified_base 2: mod_base = OTHER; note = 2'-fluoroguanosine with phosphorothioate linkage
  modified_base 3: mod_base = OTHER; note = 2'-O-methylguanosine
  modified_base 4: mod_base = OTHER; note = 2'-fluorouridine
  modified_base 5: mod_base = OTHER; note = 2'-O-methyluridine
  modified_base 6: mod_base = OTHER; note = 2'-fluoroadenosine
  modified_base 7: mod_base = OTHER; note = 2'-O-methyluridine
  modified_base 8: mod_base = OTHER; note = 2'-fluorouridine
  modified_base 9: mod_base = OTHER; note = 2'-O-methylguanosine
  modified_base 10: mod_base = OTHER; note = 2'-fluorouridine
  modified_base 11: mod_base = OTHER; note = 2'-O-methylcytidine
  modified_base 12: mod_base = OTHER; note = 2'-fluorouridine
  modified_base 13: mod_base = OTHER; note = 2'-O-methylguanosine
  modified_base 14: mod_base = OTHER; note = 2'-fluorocytidine
  modified_base 15: mod_base = OTHER; note = 2'-O-methyladenosine
  modified_base 16: mod_base = OTHER; note = 2'-fluoroadenosine
  modified_base 17: mod_base = OTHER; note = 2'-O-methyluridine
  modified_base 18: mod_base = OTHER; note = 2'-fluoroadenosine
  modified_base 19: mod_base = OTHER; note = 2'-O-methyluridine
  modified_base 20: mod_base = OTHER; note = 2'-fluoroguanosine
  modified_base 21: mod_base = OTHER; note = 2'-O-methyladenosine with phosphorothioate linkage
  modified_base 22: mod_base = OTHER; note = 2'-O-methyladenosine with phosphorothioate linkage
  modified_base 23: mod_base = OTHER; note = 2'-O-methyluridine
gggttattgtctgcaatatgaat

SEQ ID NO: 1016 - RNA, 23 nt, synthetic construct
  source 1..23: mol_type = other RNA
  modified_base 1: mod_base = OTHER; note = 5'-(E)-vinylphosphonate 2'-O-methylated guanosine with phosphorothioate linkage
  modified_base 2: mod_base = OTHER; note = 2'-fluoroadenosine with phosphorothioate linkage
  modified_base 3: mod_base = OTHER; note = 2'-O-methyladenosine
  modified_base 4: mod_base = OTHER; note = 2'-fluorouridine
  modified_base 5: mod_base = OTHER; note = 2'-O-methylcytidine
  modified_base 6: mod_base = OTHER; note = 2'-fluorocytidine
  modified_base 7: mod_base = OTHER; note = 2'-O-methylcytidine
  modified_base 8: mod_base = OTHER; note = 2'-fluoroadenosine
  modified_base 9: mod_base = OTHER; note = 2'-O-methyluridine
  modified_base 10: mod_base = OTHER; note = 2'-fluoroguanosine
  modified_base 11: mod_base = OTHER; note = 2'-O-methylguanosine
  modified_base 12: mod_base = OTHER; note = 2'-fluoroadenosine
  modified_base 13: mod_base = OTHER; note = 2'-O-methylguanosine
  modified_base 14: mod_base = OTHER; note = 2'-fluoroadenosine
  modified_base 15: mod_base = OTHER; note = 2'-O-methylguanosine
  modified_base 16: mod_base = OTHER; note = 2'-fluoroguanosine
  modified_base 17: mod_base = OTHER; note = 2'-O-methyluridine
  modified_base 18: mod_base = OTHER; note = 2'-fluoroguanosine
  modified_base 19: mod_base = OTHER; note = 2'-O-methylguanosine
  modified_base 20: mod_base = OTHER; note = 2'-fluorocytidine
  modified_base 21: mod_base = OTHER; note = 2'-O-methyluridine with phosphorothioate linkage
  modified_base 22: mod_base = OTHER; note = 2'-O-methylguanosine with phosphorothioate linkage
  modified_base 23: mod_base = OTHER; note = 2'-O-methylguanosine
gaatcccatggagaggtggctgg

SEQ ID NO: 1017 - RNA, 23 nt, synthetic construct
  source 1..23: mol_type = other RNA
  modified_base 1: mod_base = OTHER; note = 5'-(E)-vinylphosphonate 2'-O-methylated uridine with phosphorothioate linkage
  modified_base 2: mod_base = OTHER; note = 2'-fluorouridine with phosphorothioate linkage
  modified_base 3: mod_base = OTHER; note = 2'-O-methylcytidine
  modified_base 4: mod_base = OTHER; note = 2'-fluoroguanosine
  modified_base 5: mod_base = OTHER; note = 2'-O-methyladenosine
  modified_base 6: mod_base = OTHER; note = 2'-fluoroguanosine
  modified_base 7: mod_base = OTHER; note = 2'-O-methylcytidine
  modified_base 8: mod_base = OTHER; note = 2'-fluorouridine
  modified_base 9: mod_base = OTHER; note = 2'-O-methyluridine
  modified_base 10: mod_base = OTHER; note = 2'-fluoroguanosine
  modified_base 11: mod_base = OTHER; note = 2'-O-methyladenosine
  modified_base 12: mod_base = OTHER; note = 2'-fluorouridine
  modified_base 13: mod_base = OTHER; note = 2'-O-methylguanosine
  modified_base 14: mod_base = OTHER; note = 2'-fluorocytidine
  modified_base 15: mod_base = OTHER; note = 2'-O-methylguanosine
  modified_base 16: mod_base = OTHER; note = 2'-fluorocytidine
  modified_base 17: mod_base = OTHER; note = 2'-O-methyluridine
  modified_base 18: mod_base = OTHER; note = 2'-fluorouridine
  modified_base 19: mod_base = OTHER; note = 2'-O-methyladenosine
  modified_base 20: mod_base = OTHER; note = 2'-fluoroguanosine
  modified_base 21: mod_base = OTHER; note = 2'-O-methyladenosine with phosphorothioate linkage
  modified_base 22: mod_base = OTHER; note = 2'-O-methylguanosine with phosphorothioate linkage
  modified_base 23: mod_base = OTHER; note = 2'-O-methyladenosine
ttcgagcttgatgcgcttagaga

SEQ ID NO: 1018 - RNA, 23 nt, synthetic construct
  source 1..23: mol_type = other RNA
  modified_base 1: mod_base = OTHER; note = 5'-(E)-vinylphosphonate 2'-O-methylated guanosine with phosphorothioate linkage
  modified_base 2: mod_base = OTHER; note = 2'-fluoroguanosine with phosphorothioate linkage
  modified_base 3: mod_base = OTHER; note = 2'-O-methyluridine
  modified_base 4: mod_base = OTHER; note = 2'-fluoroguanosine
  modified_base 5: mod_base = OTHER; note = 2'-O-methylguanosine
  modified_base 6: mod_base = OTHER; note = 2'-fluoroguanosine
  modified_base 7: mod_base = OTHER; note = 2'-O-methylcytidine
  modified_base 8: mod_base = OTHER; note = 2'-fluorouridine
  modified_base 9: mod_base = OTHER; note = 2'-O-methyladenosine
  modified_base 10: mod_base = OTHER; note = 2'-fluoroguanosine
  modified_base 11: mod_base = OTHER; note = 2'-O-methyladenosine
  modified_base 12: mod_base = OTHER; note = 2'-fluorocytidine
  modified_base 13: mod_base = OTHER; note = 2'-O-methylguanosine
  modified_base 14: mod_base = OTHER; note = 2'-fluorouridine
  modified_base 15: mod_base = OTHER; note = 2'-O-methylguanosine
  modified_base 16: mod_base = OTHER; note = 2'-fluorouridine
  modified_base 17: mod_base = OTHER; note = 2'-O-methyluridine
  modified_base 18: mod_base = OTHER; note = 2'-fluorocytidine
  modified_base 19: mod_base = OTHER; note = 2'-O-methylcytidine
  modified_base 20: mod_base = OTHER; note = 2'-fluorocytidine
  modified_base 21: mod_base = OTHER; note = 2'-O-methyluridine with phosphorothioate linkage
  modified_base 22: mod_base = OTHER; note = 2'-O-methylguanosine with phosphorothioate linkage
  modified_base 23: mod_base = OTHER; note = 2'-O-methylcytidine
ggtgggctagacgtgttccctgc

SEQ ID NO: 1019 - RNA, 23 nt, synthetic construct
  source 1..23: mol_type = other RNA
  modified_base 1: mod_base = OTHER; note = 5'-(E)-vinylphosphonate 2'-O-methylated adenosine with phosphorothioate linkage
  modified_base 2: mod_base = OTHER; note = 2'-fluoroadenosine with phosphorothioate linkage
  modified_base 3: mod_base = OTHER; note = 2'-O-methyluridine
  modified_base 4: mod_base = OTHER; note = 2'-fluoroadenosine
  modified_base 5: mod_base = OTHER; note = 2'-O-methyluridine
  modified_base 6: mod_base = OTHER; note = 2'-fluoroguanosine
  modified_base 7: mod_base = OTHER; note = 2'-O-methyladenosine
  modified_base 8: mod_base = OTHER; note = 2'-fluoroadenosine
  modified_base 9: mod_base = OTHER; note = 2'-O-methyluridine
  modified_base 10: mod_base = OTHER; note = 2'-fluorocytidine
  modified_base 11: mod_base = OTHER; note = 2'-O-methylcytidine
  modified_base 12: mod_base = OTHER; note = 2'-fluorocytidine
  modified_base 13: mod_base = OTHER; note = 2'-O-methyladenosine
  modified_base 14: mod_base = OTHER; note = 2'-fluorouridine
  modified_base 15: mod_base = OTHER; note = 2'-O-methylguanosine
  modified_base 16: mod_base = OTHER; note = 2'-fluoroguanosine
  modified_base 17: mod_base = OTHER; note = 2'-O-methyladenosine
  modified_base 18: mod_base = OTHER; note = 2'-fluoroguanosine
  modified_base 19: mod_base = OTHER; note = 2'-O-methyladenosine
  modified_base 20: mod_base = OTHER; note = 2'-fluoroguanosine
  modified_base 21: mod_base = OTHER; note = 2'-O-methylguanosine with phosphorothioate linkage
  modified_base 22: mod_base = OTHER; note = 2'-O-methyluridine with phosphorothioate linkage
  modified_base 23: mod_base = OTHER; note = 2'-O-methylguanosine
aatatgaatcccatggagaggtg

SEQ ID NO: 1020 - RNA, 23 nt, synthetic construct
  source 1..23: mol_type = other RNA
  modified_base 1: mod_base = OTHER; note = 5'-(E)-vinylphosphonate 2'-O-methylated uridine with phosphorothioate linkage
  modified_base 2: mod_base = OTHER; note = 2'-fluoroadenosine with phosphorothioate linkage
  modified_base 3: mod_base = OTHER; note = 2'-O-methyluridine
  modified_base 4: mod_base = OTHER; note = 2'-fluoroguanosine
  modified_base 5: mod_base = OTHER; note = 2'-O-methyladenosine
  modified_base 6: mod_base = OTHER; note = 2'-fluoroadenosine
  modified_base 7: mod_base = OTHER; note = 2'-O-methyluridine
  modified_base 8: mod_base = OTHER; note = 2'-fluorocytidine
  modified_base 9: mod_base = OTHER; note = 2'-O-methylcytidine
  modified_base 10: mod_base = OTHER; note = 2'-fluorocytidine
  modified_base 11: mod_base = OTHER; note = 2'-O-methyladenosine
  modified_base 12: mod_base = OTHER; note = 2'-fluorouridine
  modified_base 13: mod_base = OTHER; note = 2'-O-methylguanosine
  modified_base 14: mod_base = OTHER; note = 2'-fluoroguanosine
  modified_base 15: mod_base = OTHER; note = 2'-O-methyladenosine
  modified_base 16: mod_base = OTHER; note = 2'-fluoroguanosine
  modified_base 17: mod_base = OTHER; note = 2'-O-methyladenosine
  modified_base 18: mod_base = OTHER; note = 2'-fluoroguanosine
  modified_base 19: mod_base = OTHER; note = 2'-O-methylguanosine
  modified_base 20: mod_base = OTHER; note = 2'-fluorouridine
  modified_base 21: mod_base = OTHER; note = 2'-O-methylguanosine with phosphorothioate linkage
  modified_base 22: mod_base = OTHER; note = 2'-O-methylguanosine with phosphorothioate linkage
  modified_base 23: mod_base = OTHER; note = 2'-O-methylcytidine
tatgaatcccatggagaggtggc

SEQ ID NO: 1021 - RNA, 23 nt, synthetic construct
  source 1..23: mol_type = other RNA
  modified_base 1: mod_base = OTHER; note = 5'-(E)-vinylphosphonate 2'-O-methylated uridine with phosphorothioate linkage
  modified_base 2: mod_base = OTHER; note = 2'-fluoroadenosine with phosphorothioate linkage
  modified_base 3: mod_base = OTHER; note = 2'-O-methyluridine
  modified_base 4: mod_base = OTHER; note = 2'-fluorouridine
  modified_base 5: mod_base = OTHER; note = 2'-O-methylguanosine
  modified_base 6: mod_base = OTHER; note = 2'-fluorouridine
  modified_base 7: mod_base = OTHER; note = 2'-O-methylcytidine
  modified_base 8: mod_base = OTHER; note = 2'-fluorouridine
  modified_base 9: mod_base = OTHER; note = 2'-O-methylguanosine
  modified_base 10: mod_base = OTHER; note = 2'-fluorocytidine
  modified_base 11: mod_base = OTHER; note = 2'-O-methyladenosine
  modified_base 12: mod_base = OTHER; note = 2'-fluoroadenosine
  modified_base 13: mod_base = OTHER; note = 2'-O-methyluridine
  modified_base 14: mod_base = OTHER; note = 2'-fluoroadenosine
  modified_base 15: mod_base = OTHER; note = 2'-O-methyluridine
  modified_base 16: mod_base = OTHER; note = 2'-fluoroguanosine
  modified_base 17: mod_base = OTHER; note = 2'-O-methyladenosine
  modified_base 18: mod_base = OTHER; note = 2'-fluoroadenosine
  modified_base 19: mod_base = OTHER; note = 2'-O-methyluridine
  modified_base 20: mod_base = OTHER; note = 2'-fluorocytidine
  modified_base 21: mod_base = OTHER; note = 2'-O-methylcytidine with phosphorothioate linkage
  modified_base 22: mod_base = OTHER; note = 2'-O-methylcytidine with phosphorothioate linkage
  modified_base 23: mod_base = OTHER; note = 2'-O-methyladenosine
tattgtctgcaatatgaatccca

SEQ ID NO: 1022 - RNA, 23 nt, synthetic construct
  source 1..23: mol_type = other RNA
  modified_base 1: mod_base = OTHER; note = 5'-(E)-vinylphosphonate 2'-O-methylated guanosine with phosphorothioate linkage
  modified_base 2: mod_base = OTHER; note = 2'-fluorouridine with phosphorothioate linkage
  modified_base 3: mod_base = OTHER; note = 2'-O-methyluridine
  modified_base 4: mod_base = OTHER; note = 2'-fluorocytidine
  modified_base 5: mod_base = OTHER; note = 2'-O-methyladenosine
  modified_base 6: mod_base = OTHER; note = 2'-fluorouridine
  modified_base 7: mod_base = OTHER; note = 2'-O-methylcytidine
  modified_base 8: mod_base = OTHER; note = 2'-fluorouridine
  modified_base 9: mod_base = OTHER; note = 2'-O-methylguanosine
  modified_base 10: mod_base = OTHER; note = 2'-fluoroguanosine
  modified_base 11: mod_base = OTHER; note = 2'-O-methylcytidine
  modified_base 12: mod_base = OTHER; note = 2'-fluoroadenosine
  modified_base 13: mod_base = OTHER; note = 2'-O-methylcytidine
  modified_base 14: mod_base = OTHER; note = 2'-fluorouridine
  modified_base 15: mod_base = OTHER; note = 2'-O-methylguanosine
  modified_base 16: mod_base = OTHER; note = 2'-fluorocytidine
  modified_base 17: mod_base = OTHER; note = 2'-O-methylcytidine
  modified_base 18: mod_base = OTHER; note = 2'-fluorocytidine
  modified_base 19: mod_base = OTHER; note = 2'-O-methyladenosine
  modified_base 20: mod_base = OTHER; note = 2'-fluorocytidine
  modified_base 21: mod_base = OTHER; note = 2'-O-methyladenosine with phosphorothioate linkage
  modified_base 22: mod_base = OTHER; note = 2'-O-methylguanosine with phosphorothioate linkage
  modified_base 23: mod_base = OTHER; note = 2'-O-methylguanosine
gttcatctggcactgcccacagg

SEQ ID NO: 1023 - RNA, 23 nt, synthetic construct
  source 1..23: mol_type = other RNA
  modified_base 1: mod_base = OTHER; note = 5'-(E)-vinylphosphonate 2'-O-methylated uridine with phosphorothioate linkage
  modified_base 2: mod_base = OTHER; note = 2'-fluoroguanosine with phosphorothioate linkage
  modified_base 3: mod_base = OTHER; note = 2'-O-methyladenosine
  modified_base 4: mod_base = OTHER; note = 2'-fluoroadenosine
  modified_base 5: mod_base = OTHER; note = 2'-O-methyluridine
  modified_base 6: mod_base = OTHER; note = 2'-fluorocytidine
  modified_base 7: mod_base = OTHER; note = 2'-O-methylcytidine
  modified_base 8: mod_base = OTHER; note = 2'-fluorocytidine
  modified_base 9: mod_base = OTHER; note = 2'-O-methyladenosine
  modified_base 10: mod_base = OTHER; note = 2'-fluorouridine
  modified_base 11: mod_base = OTHER; note = 2'-O-methylguanosine
  modified_base 12: mod_base = OTHER; note = 2'-fluoroguanosine
  modified_base 13: mod_base = OTHER; note = 2'-O-methyladenosine
  modified_base 14: mod_base = OTHER; note = 2'-fluoroguanosine
  modified_base 15: mod_base = OTHER; note = 2'-O-methyladenosine
  modified_base 16: mod_base = OTHER; note = 2'-fluoroguanosine
  modified_base 17: mod_base = OTHER; note = 2'-O-methylguanosine
  modified_base 18: mod_base = OTHER; note = 2'-fluorouridine
  modified_base 19: mod_base = OTHER; note = 2'-O-methylguanosine
  modified_base 20: mod_base = OTHER; note = 2'-fluoroguanosine
  modified_base 21: mod_base = OTHER; note = 2'-O-methylcytidine with phosphorothioate linkage
  modified_base 22: mod_base = OTHER; note = 2'-O-methyluridine with phosphorothioate linkage
  modified_base 23: mod_base = OTHER; note = 2'-O-methylguanosine
tgaatcccatggagaggtggctg

SEQ ID NO: 1024 - RNA, 23 nt, synthetic construct
  source 1..23: mol_type = other RNA
  modified_base 1: mod_base = OTHER; note = 5'-(E)-vinylphosphonate 2'-O-methylated adenosine with phosphorothioate linkage
  modified_base 2: mod_base = OTHER; note = 2'-fluoroguanosine with phosphorothioate linkage
  modified_base 3: mod_base = OTHER; note = 2'-O-methyluridine
  modified_base 4: mod_base = OTHER; note = 2'-fluoroadenosine
  modified_base 5: mod_base = OTHER; note = 2'-O-methylcytidine
  modified_base 6: mod_base = OTHER; note = 2'-fluoroadenosine
  modified_base 7: mod_base = OTHER; note = 2'-O-methylcytidine
  modified_base 8: mod_base = OTHER; note = 2'-fluoroguanosine
  modified_base 9: mod_base = OTHER; note = 2'-O-methyluridine
  modified_base 10: mod_base = OTHER; note = 2'-fluorouridine
  modified_base 11: mod_base = OTHER; note = 2'-O-methylcytidine
  modified_base 12: mod_base = OTHER; note = 2'-fluorouridine
  modified_base 13: mod_base = OTHER; note = 2'-O-methylcytidine
  modified_base 14: mod_base = OTHER; note = 2'-fluorocytidine
  modified_base 15: mod_base = OTHER; note = 2'-O-methylguanosine
  modified_base 16: mod_base = OTHER; note = 2'-fluorouridine
  modified_base 17: mod_base = OTHER; note = 2'-O-methylguanosine
  modified_base 18: mod_base = OTHER; note = 2'-fluorouridine
  modified_base 19: mod_base = OTHER; note = 2'-O-methyluridine
  modified_base 20: mod_base = OTHER; note = 2'-fluoroguanosine
  modified_base 21: mod_base = OTHER; note = 2'-O-methylguanosine with phosphorothioate linkage
  modified_base 22: mod_base = OTHER; note = 2'-O-methylguanosine with phosphorothioate linkage
  modified_base 23: mod_base = OTHER; note = 2'-O-methylcytidine
agtacacgttctccgtgttgggc

SEQ ID NO: 1025 - RNA, 23 nt, synthetic construct
  source 1..23: mol_type = other RNA
  modified_base 1: mod_base = OTHER; note = 5'-(E)-vinylphosphonate 2'-O-methylated uridine with phosphorothioate linkage
  modified_base 2: mod_base = OTHER; note = 2'-fluorouridine with phosphorothioate linkage
  modified_base 3: mod_base = OTHER; note = 2'-O-methylcytidine
  modified_base 4: mod_base = OTHER; note = 2'-fluoroguanosine
  modified_base 5: mod_base = OTHER; note = 2'-O-methyladenosine
  modified_base 6: mod_base = OTHER; note = 2'-fluorouridine
  modified_base 7: mod_base = OTHER; note = 2'-O-methyladenosine
  modified_base 8: mod_base = OTHER; note = 2'-fluorocytidine
  modified_base 9: mod_base = OTHER; note = 2'-O-methyluridine
  modified_base 10: mod_base = OTHER; note = 2'-fluoroguanosine
  modified_base 11: mod_base = OTHER; note = 2'-O-methyladenosine
  modified_base 12: mod_base = OTHER; note = 2'-fluorouridine
  modified_base 13: mod_base = OTHER; note = 2'-O-methylcytidine
  modified_base 14: mod_base = OTHER; note = 2'-fluorocytidine
  modified_base 15: mod_base = OTHER; note = 2'-O-methyluridine
  modified_base 16: mod_base = OTHER; note = 2'-fluoroguanosine
  modified_base 17: mod_base = OTHER; note = 2'-O-methylguanosine
  modified_base 18: mod_base = OTHER; note = 2'-fluorouridine
  modified_base 19: mod_base = OTHER; note = 2'-O-methyladenosine
  modified_base 20: mod_base = OTHER; note = 2'-fluorouridine
  modified_base 21: mod_base = OTHER; note = 2'-O-methyluridine with phosphorothioate linkage
  modified_base 22: mod_base = OTHER; note = 2'-O-methylcytidine with phosphorothioate linkage
  modified_base 23: mod_base = OTHER; note = 2'-O-methyluridine
ttcgatactgatcctggtattct

SEQ ID NO: 1026 - RNA, 23 nt, synthetic construct
  source 1..23: mol_type = other RNA
  modified_base 1: mod_base = OTHER; note = 5'-(E)-vinylphosphonate 2'-O-methylated uridine with phosphorothioate linkage
  modified_base 2: mod_base = OTHER; note = 2'-fluoroadenosine with phosphorothioate linkage
  modified_base 3: mod_base = OTHER; note = 2'-O-methylcytidine
  modified_base 4: mod_base = OTHER; note = 2'-fluorouridine
  modified_base 5: mod_base = OTHER; note = 2'-O-methylguanosine
  modified_base 6: mod_base = OTHER; note = 2'-fluorocytidine
  modified_base 7: mod_base = OTHER; note = 2'-O-methylcytidine
  modified_base 8: mod_base = OTHER; note = 2'-fluorocytidine
  modified_base 9: mod_base = OTHER; note = 2'-O-methyladenosine
  modified_base 10: mod_base = OTHER; note = 2'-fluorocytidine
  modified_base 11: mod_base = OTHER; note = 2'-O-methyladenosine
  modified_base 12: mod_base = OTHER; note = 2'-fluoroguanosine
  modified_base 13: mod_base = OTHER; note = 2'-O-methylguanosine
  modified_base 14: mod_base = OTHER; note = 2'-fluorouridine
  modified_base 15: mod_base = OTHER; note = 2'-O-methylguanosine
  modified_base 16: mod_base = OTHER; note = 2'-fluoroadenosine
  modified_base 17: mod_base = OTHER; note = 2'-O-methylguanosine
  modified_base 18: mod_base = OTHER; note = 2'-fluoroguanosine
  modified_base 19: mod_base = OTHER; note = 2'-O-methyladenosine
  modified_base 20: mod_base = OTHER; note = 2'-fluoroguanosine
  modified_base 21: mod_base = OTHER; note = 2'-O-methylguanosine with phosphorothioate linkage
  modified_base 22: mod_base = OTHER; note = 2'-O-methyluridine with phosphorothioate linkage
  modified_base 23: mod_base = OTHER; note = 2'-O-methylcytidine
tactgcccacaggtgaggaggtc

SEQ ID NO: 1027 - RNA, 23 nt, synthetic construct
  source 1..23: mol_type = other RNA
  modified_base 1: mod_base = OTHER; note = 5'-(E)-vinylphosphonate 2'-O-methylated adenosine with phosphorothioate linkage
  modified_base 2: mod_base = OTHER; note = 2'-fluoroguanosine with phosphorothioate linkage
  modified_base 3: mod_base = OTHER; note = 2'-O-methylcytidine
  modified_base 4: mod_base = OTHER; note = 2'-fluorouridine
  modified_base 5: mod_base = OTHER; note = 2'-O-methyluridine
  modified_base 6: mod_base = OTHER; note = 2'-fluoroguanosine
  modified_base 7: mod_base = OTHER; note = 2'-O-methyladenosine
  modified_base 8: mod_base = OTHER; note = 2'-fluorouridine
  modified_base 9: mod_base = OTHER; note = 2'-O-methylguanosine
  modified_base 10: mod_base = OTHER; note = 2'-fluorocytidine
  modified_base 11: mod_base = OTHER; note = 2'-O-methylguanosine
  modified_base 12: mod_base = OTHER; note = 2'-fluorocytidine
  modified_base 13: mod_base = OTHER; note = 2'-O-methyluridine
  modified_base 14: mod_base = OTHER; note = 2'-fluorouridine
  modified_base 15: mod_base = OTHER; note = 2'-O-methyladenosine
  modified_base 16: mod_base = OTHER; note = 2'-fluoroguanosine
  modified_base 17: mod_base = OTHER; note = 2'-O-methyladenosine
  modified_base 18: mod_base = OTHER; note = 2'-fluoroguanosine
  modified_base 19: mod_base = OTHER; note = 2'-O-methyladenosine
  modified_base 20: mod_base = OTHER; note = 2'-fluoroadenosine
  modified_base 21: mod_base = OTHER; note = 2'-O-methylguanosine with phosphorothioate linkage
  modified_base 22: mod_base = OTHER; note = 2'-O-methylguanosine with phosphorothioate linkage
  modified_base 23: mod_base = OTHER; note = 2'-O-methylguanosine
agcttgatgcgcttagagaaggg

SEQ ID NO: 1028 - RNA, 23 nt, synthetic construct
  source 1..23: mol_type = other RNA
  modified_base 1: mod_base = OTHER; note = 5'-(E)-vinylphosphonate 2'-O-methylated guanosine with phosphorothioate linkage
  modified_base 2: mod_base = OTHER; note = 2'-fluoroguanosine with phosphorothioate linkage
  modified_base 3: mod_base = OTHER; note = 2'-O-methylguanosine
  modified_base 4: mod_base = OTHER; note = 2'-fluoroadenosine
  modified_base 5: mod_base = OTHER; note = 2'-O-methyladenosine
  modified_base 6: mod_base = OTHER; note = 2'-fluoroguanosine
  modified_base 7: mod_base = OTHER; note = 2'-O-methyluridine
  modified_base 8: mod_base = OTHER; note = 2'-fluorouridine
  modified_base 9: mod_base = OTHER; note = 2'-O-methylcytidine
  modified_base 10: mod_base = OTHER; note = 2'-fluoroadenosine
  modified_base 11: mod_base = OTHER; note = 2'-O-methyluridine
  modified_base 12: mod_base = OTHER; note = 2'-fluorocytidine
  modified_base 13: mod_base = OTHER; note = 2'-O-methyluridine
  modified_base 14: mod_base = OTHER; note = 2'-fluoroguanosine
  modified_base 15: mod_base = OTHER; note = 2'-O-methylguanosine
  modified_base 16: mod_base = OTHER; note = 2'-fluorocytidine
  modified_base 17: mod_base = OTHER; note = 2'-O-methyladenosine
  modified_base 18: mod_base = OTHER; note = 2'-fluorocytidine
  modified_base 19: mod_base = OTHER; note = 2'-O-methyluridine
  modified_base 20: mod_base = OTHER; note = 2'-fluoroguanosine
  modified_base 21: mod_base = OTHER; note = 2'-O-methylcytidine with phosphorothioate linkage
  modified_base 22: mod_base = OTHER; note = 2'-O-methylcytidine with phosphorothioate linkage
  modified_base 23: mod_base = OTHER; note = 2'-O-methylcytidine
gggaagttcatctggcactgccc

SEQ ID NO: 1029 - RNA, 23 nt, synthetic construct
  source 1..23: mol_type = other RNA
  modified_base 1: mod_base = OTHER; note = 5'-(E)-vinylphosphonate 2'-O-methylated guanosine with phosphorothioate linkage
  modified_base 2: mod_base = OTHER; note = 2'-fluoroguanosine with phosphorothioate linkage
  modified_base 3: mod_base = OTHER; note = 2'-O-methyluridine
  modified_base 4: mod_base = OTHER; note = 2'-fluorouridine
  modified_base 5: mod_base = OTHER; note = 2'-O-methyladenosine
  modified_base 6: mod_base = OTHER; note = 2'-fluorouridine
  modified_base 7: mod_base = OTHER; note = 2'-O-methyluridine
  modified_base 8: mod_base = OTHER; note = 2'-fluoroguanosine
  modified_base 9: mod_base = OTHER; note = 2'-O-methyluridine
  modified_base 10: mod_base = OTHER; note = 2'-fluorocytidine
  modified_base 11: mod_base = OTHER; note = 2'-O-methyluridine
  modified_base 12: mod_base = OTHER; note = 2'-fluoroguanosine
  modified_base 13: mod_base = OTHER; note = 2'-O-methylcytidine
  modified_base 14: mod_base = OTHER; note = 2'-fluoroadenosine
  modified_base 15: mod_base = OTHER; note = 2'-O-methyladenosine
  modified_base 16: mod_base = OTHER; note = 2'-fluorouridine
  modified_base 17: mod_base = OTHER; note = 2'-O-methyladenosine
  modified_base 18: mod_base = OTHER; note = 2'-fluorouridine
  modified_base 19: mod_base = OTHER; note = 2'-O-methylguanosine
  modified_base 20: mod_base = OTHER; note = 2'-fluoroadenosine
  modified_base 21: mod_base = OTHER; note = 2'-O-methyladenosine with phosphorothioate linkage
  modified_base 22: mod_base = OTHER; note = 2'-O-methyluridine with phosphorothioate linkage
  modified_base 23: mod_base = OTHER; note = 2'-O-methylcytidine
ggttattgtctgcaatatgaatc

SEQ ID NO: 1030 - RNA, 23 nt, synthetic construct
  source 1..23: mol_type = other RNA
  modified_base 1: mod_base = OTHER; note = 5'-(E)-vinylphosphonate 2'-O-methylated guanosine with phosphorothioate linkage
  modified_base 2: mod_base = OTHER; note = 2'-fluoroadenosine with phosphorothioate linkage
  modified_base 3: mod_base = OTHER; note = 2'-O-methyluridine
  modified_base 4: mod_base = OTHER; note = 2'-fluorouridine
  modified_base 5: mod_base = OTHER; note = 2'-O-methyluridine
  modified_base 6: mod_base = OTHER; note = 2'-fluoroguanosine
  modified_base 7: mod_base = OTHER; note = 2'-O-methyluridine
  modified_base 8: mod_base = OTHER; note = 2'-fluoroguanosine
  modified_base 9: mod_base = OTHER; note = 2'-O-methylcytidine
  modified_base 10: mod_base = OTHER; note = 2'-fluoroadenosine
  modified_base 11: mod_base = OTHER; note = 2'-O-methyluridine
  modified_base 12: mod_base = OTHER; note = 2'-fluoroguanosine
  modified_base 13: mod_base = OTHER; note = 2'-O-methyluridine
  modified_base 14: mod_base = OTHER; note = 2'-fluoroguanosine
  modified_base 15: mod_base = OTHER; note = 2'-O-methylcytidine
  modified_base 16: mod_base = OTHER; note = 2'-fluoroguanosine
  modified_base 17: mod_base = OTHER; note = 2'-O-methyluridine
  modified_base 18: mod_base = OTHER; note = 2'-fluorocytidine
  modified_base 19: mod_base = OTHER; note = 2'-O-methyluridine
  modified_base 20: mod_base = OTHER; note = 2'-fluorouridine
  modified_base 21: mod_base = OTHER; note = 2'-O-methylcytidine with phosphorothioate linkage
  modified_base 22: mod_base = OTHER; note = 2'-O-methyladenosine with phosphorothioate linkage
  modified_base 23: mod_base = OTHER; note = 2'-O-methyluridine
gatttgtgcatgtgcgtcttcat

SEQ ID NO: 1031 - RNA, 23 nt, synthetic construct
  source 1..23: mol_type = other RNA
  modified_base 1: mod_base = OTHER; note = 5'-(E)-vinylphosphonate 2'-O-methylated guanosine with phosphorothioate linkage
  modified_base 2: mod_base = OTHER; note = 2'-fluoroguanosine with phosphorothioate linkage
  modified_base 3: mod_base = OTHER; note = 2'-O-methylcytidine
  modified_base 4: mod_base = OTHER; note = 2'-fluorouridine
  modified_base 5: mod_base = OTHER; note = 2'-O-methyladenosine
  modified_base 6: mod_base = OTHER; note = 2'-fluoroguanosine
  modified_base 7: mod_base = OTHER; note = 2'-O-methyladenosine
  modified_base 8: mod_base = OTHER; note = 2'-fluorocytidine
  modified_base 9: mod_base = OTHER; note = 2'-O-methylguanosine
  modified_base 10: mod_base = OTHER; note = 2'-fluorouridine
  modified_base 11: mod_base = OTHER; note = 2'-O-methylguanosine
  modified_base 12: mod_base = OTHER; note = 2'-fluorouridine
  modified_base 13: mod_base = OTHER; note = 2'-O-methyluridine
  modified_base 14: mod_base = OTHER; note = 2'-fluorocytidine
  modified_base 15: mod_base = OTHER; note = 2'-O-methylcytidine
  modified_base 16: mod_base = OTHER; note = 2'-fluorocytidine
  modified_base 17: mod_base = OTHER; note = 2'-O-methyluridine
  modified_base 18: mod_base = OTHER; note = 2'-fluoroguanosine
  modified_base 19: mod_base = OTHER; note = 2'-O-methylcytidine
  modified_base 20: mod_base = OTHER; note = 2'-fluorocytidine
  modified_base 21: mod_base = OTHER; note = 2'-O-methyladenosine with phosphorothioate linkage
  modified_base 22: mod_base = OTHER; note = 2'-O-methylguanosine with phosphorothioate linkage
  modified_base 23: mod_base = OTHER; note = 2'-O-methylcytidine
ggctagacgtgttccctgccagc

SEQ ID NO: 1032 - RNA, 23 nt, synthetic construct
  source 1..23: mol_type = other RNA
  modified_base 1: mod_base = OTHER; note = 5'-(E)-vinylphosphonate 2'-O-methylated uridine with phosphorothioate linkage
  modified_base 2: mod_base = OTHER; note = 2'-fluorocytidine with phosphorothioate linkage
  modified_base 3: mod_base = OTHER; note = 2'-O-methyladenosine
  modified_base 4: mod_base = OTHER; note = 2'-fluorouridine
  modified_base 5: mod_base = OTHER; note = 2'-O-methylguanosine
  modified_base 6: mod_base = OTHER; note = 2'-fluoroguanosine
  modified_base 7: mod_base = OTHER; note = 2'-O-methylcytidine
  modified_base 8: mod_base = OTHER; note = 2'-fluoroguanosine
  modified_base 9: mod_base = OTHER; note = 2'-O-methylguanosine
  modified_base 10: mod_base = OTHER; note = 2'-fluoroguanosine
  modified_base 11: mod_base = OTHER; note = 2'-O-methyladenosine
  modified_base 12: mod_base = OTHER; note = 2'-fluoroguanosine
  modified_base 13: mod_base = OTHER; note = 2'-O-methylguanosine
  modified_base 14: mod_base = OTHER; note = 2'-fluorocytidine
  modified_base 15: mod_base = OTHER; note = 2'-O-methyluridine
  modified_base 16: mod_base = OTHER; note = 2'-fluorocytidine
  modified_base 17: mod_base = OTHER; note = 2'-O-methylcytidine
  modified_base 18: mod_base = OTHER; note = 2'-fluoroadenosine
  modified_base 19: mod_base = OTHER; note = 2'-O-methyluridine
  modified_base 20: mod_base = OTHER; note = 2'-fluoroadenosine
  modified_base 21: mod_base = OTHER; note = 2'-O-methylguanosine with phosphorothioate linkage
  modified_base 22: mod_base = OTHER; note = 2'-O-methylcytidine with phosphorothioate linkage
  modified_base 23: mod_base = OTHER; note = 2'-O-methylcytidine
tcatggcgggaggctccatagcc

SEQ ID NO: 1033 - RNA, 23 nt, synthetic construct
  source 1..23: mol_type = other RNA
  modified_base 1: mod_base = OTHER; note = 5'-(E)-vinylphosphonate 2'-O-methylated uridine with phosphorothioate linkage
  modified_base 2: mod_base = OTHER; note = 2'-fluoroadenosine with phosphorothioate linkage
  modified_base 3: mod_base = OTHER; note = 2'-O-methyladenosine
  modified_base 4: mod_base = OTHER; note = 2'-fluorouridine
  modified_base 5: mod_base = OTHER; note = 2'-O-methylcytidine
  modified_base 6: mod_base = OTHER; note = 2'-fluoroguanosine
  modified_base 7: mod_base = OTHER; note = 2'-O-methyluridine
  modified_base 8: mod_base = OTHER; note = 2'-fluorocytidine
  modified_base 9: mod_base = OTHER; note = 2'-O-methyladenosine
  modified_base 10: mod_base = OTHER; note = 2'-fluorouridine
  modified_base 11: mod_base = OTHER; note = 2'-O-methylcytidine
  modified_base 12: mod_base = OTHER; note = 2'-fluorocytidine
  modified_base 13: mod_base = OTHER; note = 2'-O-methyluridine
  modified_base 14: mod_base = OTHER; note = 2'-fluorocytidine
  modified_base 15: mod_base = OTHER; note = 2'-O-methyluridine
  modified_base 16: mod_base = OTHER; note = 2'-fluoroguanosine
  modified_base 17: mod_base = OTHER; note = 2'-O-methylguanosine
  modified_base 18: mod_base = OTHER; note = 2'-fluorocytidine
  modified_base 19: mod_base = OTHER; note = 2'-O-methylguanosine
  modified_base 20: mod_base = OTHER; note = 2'-fluorouridine
  modified_base 21: mod_base = OTHER; note = 2'-O-methylguanosine with phosphorothioate linkage
  modified_base 22: mod_base = OTHER; note = 2'-O-methyladenosine with phosphorothioate linkage
  modified_base 23: mod_base = OTHER; note = 2'-O-methylcytidine
taatcgtcatcctctggcgtgac

SEQ ID NO: 1034 - RNA, 23 nt, synthetic construct
  source 1..23: mol_type = other RNA
  modified_base 1: mod_base = OTHER; note = 5'-(E)-vinylphosphonate 2'-O-methylated guanosine with phosphorothioate linkage
  modified_base 2: mod_base = OTHER; note = 2'-fluorouridine with phosphorothioate linkage
  modified_base 3: mod_base = OTHER; note = 2'-O-methyladenosine
  modified_base 4: mod_base = OTHER; note = 2'-fluoroadenosine
  modified_base 5: mod_base = OTHER; note = 2'-O-methylcytidine
  modified_base 6: mod_base = OTHER; note = 2'-fluorocytidine
  modified_base 7: mod_base = OTHER; note = 2'-O-methyluridine
  modified_base 8: mod_base = OTHER; note = 2'-fluorouridine
  modified_base 9: mod_base = OTHER; note = 2'-O-methyluridine
  modified_base 10: mod_base = OTHER; note = 2'-fluoroguanosine
  modified_base 11: mod_base = OTHER; note = 2'-O-methylcytidine
  modified_base 12: mod_base = OTHER; note = 2'-fluoroadenosine
  modified_base 13: mod_base = OTHER; note = 2'-O-methyluridine
  modified_base 14: mod_base = OTHER; note = 2'-fluoroadenosine
  modified_base 15: mod_base = OTHER; note = 2'-O-methylguanosine
  modified_base 16: mod_base = OTHER; note = 2'-fluoroguanosine
  modified_base 17: mod_base = OTHER; note = 2'-O-methylguanosine
  modified_base 18: mod_base = OTHER; note = 2'-fluorocytidine
  modified_base 19: mod_base = OTHER; note = 2'-O-methyluridine
  modified_base 20: mod_base = OTHER; note = 2'-fluoroguanosine
  modified_base 21: mod_base = OTHER; note = 2'-O-methylguanosine with phosphorothioate linkage
  modified_base 22: mod_base = OTHER; note = 2'-O-methylguanosine with phosphorothioate linkage
  modified_base 23: mod_base = OTHER; note = 2'-O-methylcytidine
gtaacctttgcatagggctgggc

SEQ ID NO: 1035 - RNA, 23 nt, synthetic construct
  source 1..23: mol_type = other RNA
  modified_base 1: mod_base = OTHER; note = 5'-(E)-vinylphosphonate 2'-O-methylated uridine with phosphorothioate linkage
  modified_base 2: mod_base = OTHER; note = 2'-fluorocytidine with phosphorothioate linkage
  modified_base 3: mod_base = OTHER; note = 2'-O-methylcytidine
  modified_base 4: mod_base = OTHER; note = 2'-fluorocytidine
  modified_base 5: mod_base = OTHER; note = 2'-O-methyladenosine
  modified_base 6: mod_base = OTHER; note = 2'-fluoroadenosine
  modified_base 7: mod_base = OTHER; note = 2'-O-methylcytidine
  modified_base 8: mod_base = OTHER; note = 2'-fluoroguanosine
  modified_base 9: mod_base = OTHER; note = 2'-O-methylguanosine
  modified_base 10: mod_base = OTHER; note = 2'-fluoroguanosine
  modified_base 11: mod_base = OTHER; note = 2'-O-methylcytidine
  modified_base 12: mod_base = OTHER; note = 2'-fluorocytidine
  modified_base 13: mod_base = OTHER; note = 2'-O-methylguanosine
  modified_base 14: mod_base = OTHER; note = 2'-fluorouridine
  modified_base 15: mod_base = OTHER; note = 2'-O-methylguanosine
  modified_base 16: mod_base = OTHER; note = 2'-fluoroguanosine
  modified_base 17: mod_base = OTHER; note = 2'-O-methyluridine
  modified_base 18: mod_base = OTHER; note = 2'-fluorocytidine
  modified_base 19: mod_base = OTHER; note = 2'-O-methyluridine
  modified_base 20: mod_base = OTHER; note = 2'-fluoroguanosine
  modified_base 21: mod_base = OTHER; note = 2'-O-methylguanosine with phosphorothioate linkage
  modified_base 22: mod_base = OTHER; note = 2'-O-methyluridine with phosphorothioate linkage
  modified_base 23: mod_base = OTHER; note = 2'-O-methyluridine
tcccaacgggccgtggtctggtt

SEQ ID NO: 1036 - RNA, 23 nt, synthetic construct
  source 1..23: mol_type = other RNA
  modified_base 1: mod_base = OTHER; note = 5'-(E)-vinylphosphonate 2'-O-methylated uridine with phosphorothioate linkage
  modified_base 2: mod_base = OTHER; note = 2'-fluorocytidine with phosphorothioate linkage
  modified_base 3: mod_base = OTHER; note = 2'-O-methylguanosine
  modified_base 4: mod_base = OTHER; note = 2'-fluoroadenosine
  modified_base 5: mod_base = OTHER; note = 2'-O-methylguanosine
  modified_base 6: mod_base = OTHER; note = 2'-fluorocytidine
  modified_base 7: mod_base = OTHER; note = 2'-O-methyluridine
  modified_base 8: mod_base = OTHER; note = 2'-fluorouridine
  modified_base 9: mod_base = OTHER; note = 2'-O-methylguanosine
  modified_base 10: mod_base = OTHER; note = 2'-fluoroadenosine
  modified_base 11: mod_base = OTHER; note = 2'-O-methyluridine
  modified_base 12: mod_base = OTHER; note = 2'-fluoroguanosine
  modified_base 13: mod_base = OTHER; note = 2'-O-methylcytidine
  modified_base 14: mod_base = OTHER; note = 2'-fluoroguanosine
  modified_base 15: mod_base = OTHER; note = 2'-O-methylcytidine
  modified_base 16: mod_base = OTHER; note = 2'-fluorouridine
  modified_base 17: mod_base = OTHER; note = 2'-O-methyluridine
  modified_base 18: mod_base = OTHER; note = 2'-fluoroadenosine
  modified_base 19: mod_base = OTHER; note = 2'-O-methylguanosine
  modified_base 20: mod_base = OTHER; note = 2'-fluoroadenosine
  modified_base 21: mod_base = OTHER; note = 2'-O-methylguanosine with phosphorothioate linkage
  modified_base 22: mod_base = OTHER; note = 2'-O-methyladenosine with phosphorothioate linkage
  modified_base 23: mod_base = OTHER; note = 2'-O-methyladenosine
tcgagcttgatgcgcttagagaa

SEQ ID NO: 1037 - RNA, 23 nt, synthetic construct
  source 1..23: mol_type = other RNA
  modified_base 1: mod_base = OTHER; note = 5'-(E)-vinylphosphonate 2'-O-methylated guanosine with phosphorothioate linkage
  modified_base 2: mod_base = OTHER; note = 2'-fluoroadenosine with phosphorothioate linkage
  modified_base 3: mod_base = OTHER; note = 2'-O-methylguanosine
  modified_base 4: mod_base = OTHER; note = 2'-fluorouridine
  modified_base 5: mod_base = OTHER; note = 2'-O-methylcytidine
  modified_base 6: mod_base = OTHER; note = 2'-fluorouridine
  modified_base 7: mod_base = OTHER; note = 2'-O-methyluridine
  modified_base 8: mod_base = OTHER; note = 2'-fluorocytidine
  modified_base 9: mod_base = OTHER; note = 2'-O-methylguanosine
  modified_base 10: mod_base = OTHER; note = 2'-fluorouridine
  modified_base 11: mod_base = OTHER; note = 2'-O-methylcytidine
  modified_base 12: mod_base = OTHER; note = 2'-fluoroguanosine
  modified_base 13: mod_base = OTHER; note = 2'-O-methylcytidine
  modified_base 14: mod_base = OTHER; note = 2'-fluoroadenosine
  modified_base 15: mod_base = OTHER; note = 2'-O-methyladenosine
  modified_base 16: mod_base = OTHER; note = 2'-fluoroguanosine
  modified_base 17: mod_base = OTHER; note = 2'-O-methyluridine
  modified_base 18: mod_base = OTHER; note = 2'-fluoroguanosine
  modified_base 19: mod_base = OTHER; note = 2'-O-methyluridine
  modified_base 20: mod_base = OTHER; note = 2'-fluorocytidine
  modified_base 21: mod_base = OTHER; note = 2'-O-methylcytidine with phosphorothioate linkage
  modified_base 22: mod_base = OTHER; note = 2'-O-methylcytidine with phosphorothioate linkage
  modified_base 23: mod_base = OTHER; note = 2'-O-methyluridine
gagtcttcgtcgcaagtgtccct

SEQ ID NO: 1038 - RNA, 23 nt, synthetic construct
  source 1..23: mol_type = other RNA
  modified_base 1: mod_base = OTHER; note = 5'-(E)-vinylphosphonate 2'-O-methylated uridine with phosphorothioate linkage
  modified_base 2: mod_base = OTHER; note = 2'-fluoroguanosine with phosphorothioate linkage
  modified_base 3: mod_base = OTHER; note = 2'-O-methyluridine
  modified_base 4: mod_base = OTHER; note = 2'-fluorocytidine
  modified_base 5: mod_base = OTHER; note = 2'-O-methylguanosine
  modified_base 6: mod_base = OTHER; note = 2'-fluorocytidine
  modified_base 7: mod_base = OTHER; note = 2'-O-methyladenosine
  modified_base 8: mod_base = OTHER; note = 2'-fluoroadenosine
  modified_base 9: mod_base = OTHER; note = 2'-O-methylguanosine
  modified_base 10: mod_base = OTHER; note = 2'-fluorouridine
  modified_base 11: mod_base = OTHER; note = 2'-O-methylguanosine
  modified_base 12: mod_base = OTHER; note = 2'-fluorouridine
  modified_base 13: mod_base = OTHER; note = 2'-O-methylcytidine
  modified_base 14: mod_base = OTHER; note = 2'-fluorocytidine
  modified_base 15: mod_base = OTHER; note = 2'-O-methylcytidine
  modified_base 16: mod_base = OTHER; note = 2'-fluorouridine
  modified_base 17: mod_base = OTHER; note = 2'-O-methylguanosine
  modified_base 18: mod_base = OTHER; note = 2'-fluorouridine
  modified_base 19: mod_base = OTHER; note = 2'-O-methylguanosine
  modified_base 20: mod_base = OTHER; note = 2'-fluoroguanosine
  modified_base 21: mod_base = OTHER; note = 2'-O-methylcytidine with phosphorothioate linkage
  modified_base 22: mod_base = OTHER; note = 2'-O-methylcytidine with phosphorothioate linkage
  modified_base 23: mod_base = OTHER; note = 2'-O-methylcytidine
tgtcgcaagtgtccctgtggccc

SEQ ID NO: 1039 - RNA, 23 nt, synthetic construct
  source 1..23: mol_type = other RNA
  modified_base 1: mod_base = OTHER; note = 5'-(E)-vinylphosphonate 2'-O-methylated uridine with phosphorothioate linkage
  modified_base 2: mod_base = OTHER; note = 2'-fluoroguanosine with phosphorothioate linkage
  modified_base 3: mod_base = OTHER; note = 2'-O-methylguanosine
  modified_base 4: mod_base = OTHER; note = 2'-fluoroadenosine
  modified_base 5: mod_base = OTHER; note = 2'-O-methyluridine
  modified_base 6: mod_base = OTHER; note = 2'-fluoroguanosine
  modified_base 7: mod_base = OTHER; note = 2'-O-methylcytidine
  modified_base 8: mod_base = OTHER; note = 2'-fluorocytidine
  modified_base 9: mod_base = OTHER; note = 2'-O-methyladenosine
  modified_base 10: mod_base = OTHER; note = 2'-fluoroadenosine
  modified_base 11: mod_base = OTHER; note = 2'-O-methylcytidine
  modified_base 12: mod_base = OTHER; note = 2'-fluorocytidine
  modified_base 13: mod_base = OTHER; note = 2'-O-methyluridine
  modified_base 14: mod_base = OTHER; note = 2'-fluorocytidine
  modified_base 15: mod_base = OTHER; note = 2'-O-methylcytidine
  modified_base 16: mod_base = OTHER; note = 2'-fluoroadenosine
  modified_base 17: mod_base = OTHER; note = 2'-O-methylcytidine
  modified_base 18: mod_base = OTHER; note = 2'-fluoroguanosine
  modified_base 19: mod_base = OTHER; note = 2'-O-methylguanosine
  modified_base 20: mod_base = OTHER; note = 2'-fluoroguanosine
  modified_base 21: mod_base = OTHER; note = 2'-O-methyladenosine with phosphorothioate linkage
  modified_base 22: mod_base = OTHER; note = 2'-O-methyluridine with phosphorothioate linkage
  modified_base 23: mod_base = OTHER; note = 2'-O-methyluridine
tggatgccaacctccacgggatt

SEQ ID NO: 1040 - RNA, 23 nt, synthetic construct
  source 1..23: mol_type = other RNA
  modified_base 1: mod_base = OTHER; note = 5'-(E)-vinylphosphonate 2'-O-methylated guanosine with phosphorothioate linkage
  modified_base 2: mod_base = OTHER; note = 2'-fluorocytidine with phosphorothioate linkage
  modified_base 3: mod_base = OTHER; note = 2'-O-methylguanosine
  modified_base 4: mod_base = OTHER; note = 2'-fluorocytidine
  modified_base 5: mod_base = OTHER; note = 2'-O-methyluridine
  modified_base 6: mod_base = OTHER; note = 2'-fluorouridine
  modified_base 7: mod_base = OTHER; note = 2'-O-methyladenosine
  modified_base 8: mod_base = OTHER; note = 2'-fluorouridine
  modified_base 9: mod_base = OTHER; note = 2'-O-methylguanosine
  modified_base 10: mod_base = OTHER; note = 2'-fluorocytidine
  modified_base 11: mod_base = OTHER; note = 2'-O-methyluridine
  modified_base 12: mod_base = OTHER; note = 2'-fluorouridine
  modified_base 13: mod_base = OTHER; note = 2'-O-methylcytidine
  modified_base 14: mod_base = OTHER; note = 2'-fluorouridine
  modified_base 15: mod_base = OTHER; note = 2'-O-methylcytidine
  modified_base 16: mod_base = OTHER; note = 2'-fluoroguanosine
  modified_base 17: mod_base = OTHER; note = 2'-O-methylcytidine
  modified_base 18: mod_base = OTHER; note = 2'-fluorocytidine
  modified_base 19: mod_base = OTHER; note = 2'-O-methylcytidine
  modified_base 20: mod_base = OTHER; note = 2'-fluoroadenosine
  modified_base 21: mod_base = OTHER; note = 2'-O-methylguanosine with phosphorothioate linkage
  modified_base 22: mod_base = OTHER; note = 2'-O-methylguanosine with phosphorothioate linkage
  modified_base 23: mod_base = OTHER; note = 2'-O-methyladenosine
gcgcttatgcttctcgcccagga

SEQ ID NO: 1041 - RNA, 23 nt, synthetic construct
  source 1..23: mol_type = other RNA
  modified_base 1: mod_base = OTHER; note = 5'-(E)-vinylphosphonate 2'-O-methylated guanosine with phosphorothioate linkage
  modified_base 2: mod_base = OTHER; note = 2'-fluoroadenosine with phosphorothioate linkage
  modified_base 3: mod_base = OTHER; note = 2'-O-methylguanosine
  modified_base 4: mod_base = OTHER; note = 2'-fluorouridine
  modified_base 5: mod_base = OTHER; note = 2'-O-methyladenosine
  modified_base 6: mod_base = OTHER; note = 2'-fluorocytidine
  modified_base 7: mod_base = OTHER; note = 2'-O-methyladenosine
  modified_base 8: mod_base = OTHER; note = 2'-fluorocytidine
  modified_base 9: mod_base = OTHER; note = 2'-O-methylguanosine
  modified_base 10: mod_base = OTHER; note = 2'-fluorouridine
  modified_base 11: mod_base = OTHER; note = 2'-O-methyluridine
  modified_base 12: mod_base = OTHER; note = 2'-fluorocytidine
  modified_base 13: mod_base = OTHER; note = 2'-O-methyluridine
  modified_base 14: mod_base = OTHER; note = 2'-fluorocytidine
  modified_base 15: mod_base = OTHER; note = 2'-O-methylcytidine
  modified_base 16: mod_base = OTHER; note = 2'-fluoroguanosine
  modified_base 17: mod_base = OTHER; note = 2'-O-methyluridine
  modified_base 18: mod_base = OTHER; note = 2'-fluoroguanosine
  modified_base 19: mod_base = OTHER; note = 2'-O-methyluridine
  modified_base 20: mod_base = OTHER; note = 2'-fluorouridine
  modified_base 21: mod_base = OTHER; note = 2'-O-methylguanosine with phosphorothioate linkage
  modified_base 22: mod_base = OTHER; note = 2'-O-methylguanosine with phosphorothioate linkage
  modified_base 23: mod_base = OTHER; note = 2'-O-methylguanosine
gagtacacgttctccgtgttggg

SEQ ID NO: 1042 - RNA, 23 nt, synthetic construct
  source 1..23: mol_type = other RNA
  modified_base 1: mod_base = OTHER; note = 5'-(E)-vinylphosphonate 2'-O-methylated guanosine with phosphorothioate linkage
  modified_base 2: mod_base = OTHER; note = 2'-fluoroadenosine with phosphorothioate linkage
  modified_base 3: mod_base = OTHER; note = 2'-O-methylguanosine
  modified_base 4: mod_base = OTHER; note = 2'-fluorocytidine
  modified_base 5: mod_base = OTHER; note = 2'-O-methyluridine
  modified_base 6: mod_base = OTHER; note = 2'-fluorocytidine
  modified_base 7: mod_base = OTHER; note = 2'-O-methylcytidine
  modified_base 8: mod_base = OTHER; note = 2'-fluorocytidine
  modified_base 9: mod_base = OTHER; note = 2'-O-methyladenosine
  modified_base 10: mod_base = OTHER; note = 2'-fluoroadenosine
  modified_base 11: mod_base = OTHER; note = 2'-O-methylcytidine
  modified_base 12: mod_base = OTHER; note = 2'-fluoroguanosine
  modified_base 13: mod_base = OTHER; note = 2'-O-methylguanosine
  modified_base 14: mod_base = OTHER; note = 2'-fluoroguanosine
  modified_base 15: mod_base = OTHER; note = 2'-O-methylcytidine
  modified_base 16: mod_base = OTHER; note = 2'-fluorocytidine
  modified_base 17: mod_base = OTHER; note = 2'-O-methylguanosine
  modified_base 18: mod_base = OTHER; note = 2'-fluorouridine
  modified_base 19: mod_base = OTHER; note = 2'-O-methylguanosine
  modified_base 20: mod_base = OTHER; note = 2'-fluoroguanosine
  modified_base 21: mod_base = OTHER; note = 2'-O-methyluridine with phosphorothioate linkage
  modified_base 22: mod_base = OTHER; note = 2'-O-methylcytidine with phosphorothioate linkage
  modified_base 23: mod_base = OTHER; note = 2'-O-methyluridine
gagctcccaacgggccgtggtct

SEQ ID NO: 1043 - RNA, 23 nt, synthetic construct
  source 1..23: mol_type = other RNA
  modified_base 1: mod_base = OTHER; note = 5'-(E)-vinylphosphonate 2'-O-methylated uridine with phosphorothioate linkage
  modified_base 2: mod_base = OTHER; note = 2'-fluoroadenosine with phosphorothioate linkage
  modified_base 3: mod_base = OTHER; note = 2'-O-methyluridine
  modified_base 4: mod_base = OTHER; note = 2'-fluorocytidine
  modified_base 5: mod_base = OTHER; note = 2'-O-methylcytidine
  modified_base 6: mod_base = OTHER; note = 2'-fluorouridine
  modified_base 7: mod_base = OTHER; note = 2'-O-methylcytidine
  modified_base 8: mod_base = OTHER; note = 2'-fluorouridine
  modified_base 9: mod_base = OTHER; note = 2'-O-methylguanosine
  modified_base 10: mod_base = OTHER; note = 2'-fluoroguanosine
  modified_base 11: mod_base = OTHER; note = 2'-O-methylcytidine
  modified_base 12: mod_base = OTHER; note = 2'-fluoroguanosine
  modified_base 13: mod_base = OTHER; note = 2'-O-methyluridine
  modified_base 14: mod_base = OTHER; note = 2'-fluoroguanosine
  modified_base 15: mod_base = OTHER; note = 2'-O-methyladenosine
  modified_base 16: mod_base = OTHER; note = 2'-fluorocytidine
  modified_base 17: mod_base = OTHER; note = 2'-O-methylcytidine
  modified_base 18: mod_base = OTHER; note = 2'-fluorouridine
  modified_base 19: mod_base = OTHER; note = 2'-O-methylguanosine
  modified_base 20: mod_base = OTHER; note = 2'-fluoroguanosine
  modified_base 21: mod_base = OTHER; note = 2'-O-methyladenosine with phosphorothioate linkage
  modified_base 22: mod_base = OTHER; note = 2'-O-methyluridine with phosphorothioate linkage
  modified_base 23: mod_base = OTHER; note = 2'-O-methylguanosine
tatcctctggcgtgacctggatg

SEQ ID NO: 1044 - RNA, 23 nt, synthetic construct
  source 1..23: mol_type = other RNA
  modified_base 1: mod_base = OTHER; note = 5'-(E)-vinylphosphonate 2'-O-methylated guanosine with phosphorothioate linkage
  modified_base 2: mod_base = OTHER; note = 2'-fluorouridine with phosphorothioate linkage
  modified_base 3: mod_base = OTHER; note = 2'-O-methyladenosine
  modified_base 4: mod_base = OTHER; note = 2'-fluoroadenosine
  modified_base 5: mod_base = OTHER; note = 2'-O-methyluridine
  modified_base 6: mod_base = OTHER; note = 2'-fluoroguanosine
  modified_base 7: mod_base = OTHER; note = 2'-O-methyladenosine
  modified_base 8: mod_base = OTHER; note = 2'-fluorocytidine
  modified_base 9: mod_base = OTHER; note = 2'-O-methylcytidine
  modified_base 10: mod_base = OTHER; note = 2'-fluorouridine
  modified_base 11: mod_base = OTHER; note = 2'-O-methyluridine
  modified_base 12: mod_base = OTHER; note = 2'-fluorouridine
  modified_base 13: mod_base = OTHER; note = 2'-O-methylguanosine
  modified_base 14: mod_base = OTHER; note = 2'-fluoroguanosine
  modified_base 15: mod_base = OTHER; note = 2'-O-methyluridine
  modified_base 16: mod_base = OTHER; note = 2'-fluorocytidine
  modified_base 17: mod_base = OTHER; note = 2'-O-methyladenosine
  modified_base 18: mod_base = OTHER; note = 2'-fluorouridine
  modified_base 19: mod_base = OTHER; note = 2'-O-methylcytidine
  modified_base 20: mod_base = OTHER; note = 2'-fluorouridine
  modified_base 21: mod_base = OTHER; note = 2'-O-methyladenosine with phosphorothioate linkage
  modified_base 22: mod_base = OTHER; note = 2'-O-methyladenosine with phosphorothioate linkage
  modified_base 23: mod_base = OTHER; note = 2'-O-methyladenosine
gtaatgacctttggtcatctaaa

SEQ ID NO: 1045 - RNA, 23 nt, synthetic construct
  source 1..23: mol_type = other RNA
  modified_base 1: mod_base = OTHER; note = 5'-(E)-vinylphosphonate 2'-O-methylated adenosine with phosphorothioate linkage
  modified_base 2: mod_base = OTHER; note = 2'-fluoroguanosine with phosphorothioate linkage
  modified_base 3: mod_base = OTHER; note = 2'-O-methylguanosine
  modified_base 4: mod_base = OTHER; note = 2'-fluorouridine
  modified_base 5: mod_base = OTHER; note = 2'-O-methylguanosine
  modified_base 6: mod_base = OTHER; note = 2'-fluoroguanosine
  modified_base 7: mod_base = OTHER; note = 2'-O-methylcytidine
  modified_base 8: mod_base = OTHER; note = 2'-fluorocytidine
  modified_base 9: mod_base = OTHER; note = 2'-O-methylguanosine
  modified_base 10: mod_base = OTHER; note = 2'-fluorocytidine
  modified_base 11: mod_base = OTHER; note = 2'-O-methylguanosine
  modified_base 12: mod_base = OTHER; note = 2'-fluorocytidine
  modified_base 13: mod_base = OTHER; note = 2'-O-methyluridine
  modified_base 14: mod_base = OTHER; note = 2'-fluorouridine
  modified_base 15: mod_base = OTHER; note = 2'-O-methyladenosine
  modified_base 16: mod_base = OTHER; note = 2'-fluorouridine
  modified_base 17: mod_base = OTHER; note = 2'-O-methylguanosine
  modified_base 18: mod_base = OTHER; note = 2'-fluorocytidine
  modified_base 19: mod_base = OTHER; note = 2'-O-methyluridine
  modified_base 20: mod_base = OTHER; note = 2'-fluorouridine
  modified_base 21: mod_base = OTHER; note = 2'-O-methylcytidine with phosphorothioate linkage
  modified_base 22: mod_base = OTHER; note = 2'-O-methyluridine with phosphorothioate linkage
  modified_base 23: mod_base = OTHER; note = 2'-O-methylcytidine
aggtggccgcgcttatgcttctc

SEQ ID NO: 1046 - RNA, 23 nt, synthetic construct
  source 1..23: mol_type = other RNA
  modified_base 1: mod_base = OTHER; note = 5'-(E)-vinylphosphonate 2'-O-methylated guanosine with phosphorothioate linkage
  modified_base 2: mod_base = OTHER; note = 2'-fluorouridine with phosphorothioate linkage
  modified_base 3: mod_base = OTHER; note = 2'-O-methylguanosine
  modified_base 4: mod_base = OTHER; note = 2'-fluoroguanosine
  modified_base 5: mod_base = OTHER; note = 2'-O-methyluridine
  modified_base 6: mod_base = OTHER; note = 2'-fluorocytidine
  modified_base 7: mod_base = OTHER; note = 2'-O-methylguanosine
  modified_base 8: mod_base = OTHER; note = 2'-fluorocytidine
  modified_base 9: mod_base = OTHER; note = 2'-O-methyladenosine
  modified_base 10: mod_base = OTHER; note = 2'-fluorocytidine
  modified_base 11: mod_base = OTHER; note = 2'-O-methyladenosine
  modified_base 12: mod_base = OTHER; note = 2'-fluoroguanosine
  modified_base 13: mod_base = OTHER; note = 2'-O-methylguanosine
  modified_base 14: mod_base = OTHER; note = 2'-fluorouridine
  modified_base 15: mod_base = OTHER; note = 2'-O-methyluridine
  modified_base 16: mod_base = OTHER; note = 2'-fluoroguanosine
  modified_base 17: mod_base = OTHER; note = 2'-O-methylcytidine
  modified_base 18: mod_base = OTHER; note = 2'-fluoroadenosine
  modified_base 19: mod_base = OTHER; note = 2'-O-methylcytidine
  modified_base 20: mod_base = OTHER; note = 2'-fluorouridine
  modified_base 21: mod_base = OTHER; note = 2'-O-methyluridine with phosphorothioate linkage
  modified_base 22: mod_base = OTHER; note = 2'-O-methylguanosine with phosphorothioate linkage
  modified_base 23: mod_base = OTHER; note = 2'-O-methyluridine
gtggtcgcacaggttgcacttgt

SEQ ID NO: 1047 - RNA, 23 nt, synthetic construct
  source 1..23: mol_type = other RNA
  modified_base 1: mod_base = OTHER; note = 5'-(E)-vinylphosphonate 2'-O-methylated uridine with phosphorothioate linkage
  modified_base 2: mod_base = OTHER; note = 2'-fluoroguanosine with phosphorothioate linkage
  modified_base 3: mod_base = OTHER; note = 2'-O-methyluridine
  modified_base 4: mod_base = OTHER; note = 2'-fluoroguanosine
  modified_base 5: mod_base = OTHER; note = 2'-O-methylguanosine
  modified_base 6: mod_base = OTHER; note = 2'-fluorouridine
  modified_base 7: mod_base = OTHER; note = 2'-O-methylcytidine
  modified_base 8: mod_base = OTHER; note = 2'-fluoroguanosine
  modified_base 9: mod_base = OTHER; note = 2'-O-methylcytidine
  modified_base 10: mod_base = OTHER; note = 2'-fluoroadenosine
  modified_base 11: mod_base = OTHER; note = 2'-O-methylcytidine
  modified_base 12: mod_base = OTHER; note = 2'-fluoroadenosine
  modified_base 13: mod_base = OTHER; note = 2'-O-methylguanosine
  modified_base 14: mod_base = OTHER; note = 2'-fluoroguanosine
  modified_base 15: mod_base = OTHER; note = 2'-O-methyluridine
  modified_base 16: mod_base = OTHER; note = 2'-fluorouridine
  modified_base 17: mod_base = OTHER; note = 2'-O-methylguanosine
  modified_base 18: mod_base = OTHER; note = 2'-fluorocytidine
  modified_base 19: mod_base = OTHER; note = 2'-O-methyladenosine
  modified_base 20: mod_base = OTHER; note = 2'-fluorocytidine
  modified_base 21: mod_base = OTHER; note = 2'-O-methyluridine with phosphorothioate linkage
  modified_base 22: mod_base = OTHER; note = 2'-O-methyluridine with phosphorothioate linkage
  modified_base 23: mod_base = OTHER; note = 2'-O-methylguanosine
tgtggtcgcacaggttgcacttg

SEQ ID NO: 1048 - RNA, 23 nt, synthetic construct
  source 1..23: mol_type = other RNA
  modified_base 1: mod_base = OTHER; note = 5'-(E)-vinylphosphonate 2'-O-methylated uridine with phosphorothioate linkage
  modified_base 2: mod_base = OTHER; note = 2'-fluorocytidine with phosphorothioate linkage
  modified_base 3: mod_base = OTHER; note = 2'-O-methylcytidine
  modified_base 4: mod_base = OTHER; note = 2'-fluorouridine
  modified_base 5: mod_base = OTHER; note = 2'-O-methylguanosine
  modified_base 6: mod_base = OTHER; note = 2'-fluorocytidine
  modified_base 7: mod_base = OTHER; note = 2'-O-methyladenosine
  modified_base 8: mod_base = OTHER; note = 2'-fluorouridine
  modified_base 9: mod_base = OTHER; note = 2'-O-methylguanosine
  modified_base 10: mod_base = OTHER; note = 2'-fluoroadenosine
  modified_base 11: mod_base = OTHER; note = 2'-O-methylcytidine
  modified_base 12: mod_base = OTHER; note = 2'-fluoroguanosine
  modified_base 13: mod_base = OTHER; note = 2'-O-methyluridine
  modified_base 14: mod_base = OTHER; note = 2'-fluorocytidine
  modified_base 15: mod_base = OTHER; note = 2'-O-methylguanosine
  modified_base 16: mod_base = OTHER; note = 2'-fluoroguanosine
  modified_base 17: mod_base = OTHER; note = 2'-O-methylguanosine
  modified_base 18: mod_base = OTHER; note = 2'-fluorocytidine
  modified_base 19: mod_base = OTHER; note = 2'-O-methyladenosine
  modified_base 20: mod_base = OTHER; note = 2'-fluoroguanosine
  modified_base 21: mod_base = OTHER; note = 2'-O-methylguanosine with phosphorothioate linkage
  modified_base 22: mod_base = OTHER; note = 2'-O-methylguanosine with phosphorothioate linkage
  modified_base 23: mod_base = OTHER; note = 2'-O-methylcytidine
tcctgcatgacgtcgggcagggc

SEQ ID NO: 1049 - RNA, 23 nt, synthetic construct
  source 1..23: mol_type = other RNA
  modified_base 1: mod_base = OTHER; note = 5'-(E)-vinylphosphonate 2'-O-methylated uridine with phosphorothioate linkage
  modified_base 2: mod_base = OTHER; note = 2'-fluoroguanosine with phosphorothioate linkage
  modified_base 3: mod_base = OTHER; note = 2'-O-methylcytidine
  modified_base 4: mod_base = OTHER; note = 2'-fluoroguanosine
  modified_base 5: mod_base = OTHER; note = 2'-O-methyladenosine
  modified_base 6: mod_base = OTHER; note = 2'-fluoroadenosine
  modified_base 7: mod_base = OTHER; note = 2'-O-methylcytidine
  modified_base 8: mod_base = OTHER; note = 2'-fluorouridine
  modified_base 9: mod_base = OTHER; note = 2'-O-methyluridine
  modified_base 10: mod_base = OTHER; note = 2'-fluoroguanosine
  modified_base 11: mod_base = OTHER; note = 2'-O-methyladenosine
  modified_base 12: mod_base = OTHER; note = 2'-fluoroadenosine
  modified_base 13: mod_base = OTHER; note = 2'-O-methylcytidine
  modified_base 14: mod_base = OTHER; note = 2'-fluoroguanosine
  modified_base 15: mod_base = OTHER; note = 2'-O-methyluridine
  modified_base 16: mod_base = OTHER; note = 2'-fluorocytidine
  modified_base 17: mod_base = OTHER; note = 2'-O-methyladenosine
  modified_base 18: mod_base = OTHER; note = 2'-fluoroguanosine
  modified_base 19: mod_base = OTHER; note = 2'-O-methylguanosine
  modified_base 20: mod_base = OTHER; note = 2'-fluoroadenosine
  modified_base 21: mod_base = OTHER; note = 2'-O-methylguanosine with phosphorothioate linkage
  modified_base 22: mod_base = OTHER; note = 2'-O-methyluridine with phosphorothioate linkage
  modified_base 23: mod_base = OTHER; note = 2'-O-methylcytidine
tgcgaacttgaacgtcaggagtc

SEQ ID NO: 1050 - RNA, 23 nt, synthetic construct
  source 1..23: mol_type = other RNA
  modified_base 1: mod_base = OTHER; note = 5'-(E)-vinylphosphonate 2'-O-methylated guanosine with phosphorothioate linkage
  modified_base 2: mod_base = OTHER; note = 2'-fluorocytidine with phosphorothioate linkage
  modified_base 3: mod_base = OTHER; note = 2'-O-methylguanosine
  modified_base 4: mod_base = OTHER; note = 2'-fluorouridine
  modified_base 5: mod_base = OTHER; note = 2'-O-methylguanosine
  modified_base 6: mod_base = OTHER; note = 2'-fluoroguanosine
  modified_base 7: mod_base = OTHER; note = 2'-O-methyluridine
  modified_base 8: mod_base = OTHER; note = 2'-fluorocytidine
  modified_base 9: mod_base = OTHER; note = 2'-O-methylguanosine
  modified_base 10: mod_base = OTHER; note = 2'-fluorocytidine
  modified_base 11: mod_base = OTHER; note = 2'-O-methyladenosine
  modified_base 12: mod_base = OTHER; note = 2'-fluorocytidine
  modified_base 13: mod_base = OTHER; note = 2'-O-methyladenosine
  modified_base 14: mod_base = OTHER; note = 2'-fluoroguanosine
  modified_base 15: mod_base = OTHER; note = 2'-O-methylguanosine
  modified_base 16: mod_base = OTHER; note = 2'-fluorouridine
  modified_base 17: mod_base = OTHER; note = 2'-O-methyluridine
  modified_base 18: mod_base = OTHER; note = 2'-fluoroguanosine
  modified_base 19: mod_base = OTHER; note = 2'-O-methylcytidine
  modified_base 20: mod_base = OTHER; note = 2'-fluoroadenosine
  modified_base 21: mod_base = OTHER; note = 2'-O-methylcytidine with phosphorothioate linkage
  modified_base 22: mod_base = OTHER; note = 2'-O-methyluridine with phosphorothioate linkage
  modified_base 23: mod_base = OTHER; note = 2'-O-methyluridine
gcgtggtcgcacaggttgcactt

SEQ ID NO: 1051 - RNA, 23 nt, synthetic construct
  source 1..23: mol_type = other RNA
  modified_base 1: mod_base = OTHER; note = 5'-(E)-vinylphosphonate 2'-O-methylated uridine with phosphorothioate linkage
  modified_base 2: mod_base = OTHER; note = 2'-fluorouridine with phosphorothioate linkage
  modified_base 3: mod_base = OTHER; note = 2'-O-methyladenosine
  modified_base 4: mod_base = OTHER; note = 2'-fluorouridine
  modified_base 5: mod_base = OTHER; note = 2'-O-methylguanosine
  modified_base 6: mod_base = OTHER; note = 2'-fluorocytidine
  modified_base 7: mod_base = OTHER; note = 2'-O-methyluridine
  modified_base 8: mod_base = OTHER; note = 2'-fluorouridine
  modified_base 9: mod_base = OTHER; note = 2'-O-methylcytidine
  modified_base 10: mod_base = OTHER; note = 2'-fluorouridine
  modified_base 11: mod_base = OTHER; note = 2'-O-methylcytidine
  modified_base 12: mod_base = OTHER; note = 2'-fluoroguanosine
  modified_base 13: mod_base = OTHER; note = 2'-O-methylcytidine
  modified_base 14: mod_base = OTHER; note = 2'-fluorocytidine
  modified_base 15: mod_base = OTHER; note = 2'-O-methylcytidine
  modified_base 16: mod_base = OTHER; note = 2'-fluoroadenosine
  modified_base 17: mod_base = OTHER; note = 2'-O-methylguanosine
  modified_base 18: mod_base = OTHER; note = 2'-fluoroguanosine
  modified_base 19: mod_base = OTHER; note = 2'-O-methyladenosine
  modified_base 20: mod_base = OTHER; note = 2'-fluorocytidine
  modified_base 21: mod_base = OTHER; note = 2'-O-methylcytidine with phosphorothioate linkage
  modified_base 22: mod_base = OTHER; note = 2'-O-methyluridine with phosphorothioate linkage
  modified_base 23: mod_base = OTHER; note = 2'-O-methylguanosine
ttatgcttctcgcccaggacctg

SEQ ID NO: 1052 - RNA, 23 nt, synthetic construct
  source 1..23: mol_type = other RNA
  modified_base 1: mod_base = OTHER; note = 5'-(E)-vinylphosphonate 2'-O-methylated guanosine with phosphorothioate linkage
  modified_base 2: mod_base = OTHER; note = 2'-fluorouridine with phosphorothioate linkage
  modified_base 3: mod_base = OTHER; note = 2'-O-methylcytidine
  modified_base 4: mod_base = OTHER; note = 2'-fluoroguanosine
  modified_base 5: mod_base = OTHER; note = 2'-O-methylcytidine
  modified_base 6: mod_base = OTHER; note = 2'-fluoroadenosine
  modified_base 7: mod_base = OTHER; note = 2'-O-methyladenosine
  modified_base 8: mod_base = OTHER; note = 2'-fluoroguanosine
  modified_base 9: mod_base = OTHER; note = 2'-O-methyluridine
  modified_base 10: mod_base = OTHER; note = 2'-fluoroguanosine
  modified_base 11: mod_base = OTHER; note = 2'-O-methyluridine
  modified_base 12: mod_base = OTHER; note = 2'-fluorocytidine
  modified_base 13: mod_base = OTHER; note = 2'-O-methylcytidine
  modified_base 14: mod_base = OTHER; note = 2'-fluorocytidine
  modified_base 15: mod_base = OTHER; note = 2'-O-methyluridine
  modified_base 16: mod_base = OTHER; note = 2'-fluoroguanosine
  modified_base 17: mod_base = OTHER; note = 2'-O-methyluridine
  modified_base 18: mod_base = OTHER; note = 2'-fluoroguanosine
  modified_base 19: mod_base = OTHER; note = 2'-O-methylguanosine
  modified_base 20: mod_base = OTHER; note = 2'-fluorocytidine
  modified_base 21: mod_base = OTHER; note = 2'-O-methylcytidine with phosphorothioate linkage
  modified_base 22: mod_base = OTHER; note = 2'-O-methylcytidine with phosphorothioate linkage
  modified_base 23: mod_base = OTHER; note = 2'-O-methyluridine
gtcgcaagtgtccctgtggccct

SEQ ID NO: 1053 - RNA, 23 nt, synthetic construct
  source 1..23: mol_type = other RNA
  modified_base 1: mod_base = OTHER; note = 5'-(E)-vinylphosphonate 2'-O-methylated uridine with phosphorothioate linkage
  modified_base 2: mod_base = OTHER; note = 2'-fluoroguanosine with phosphorothioate linkage
  modified_base 3: mod_base = OTHER; note = 2'-O-methyladenosine
  modified_base 4: mod_base = OTHER; note = 2'-fluorouridine
  modified_base 5: mod_base = OTHER; note = 2'-O-methyladenosine
  modified_base 6: mod_base = OTHER; note = 2'-fluorocytidine
  modified_base 7: mod_base = OTHER; note = 2'-O-methyluridine
  modified_base 8: mod_base = OTHER; note = 2'-fluoroguanosine
  modified_base 9: mod_base = OTHER; note = 2'-O-methyladenosine
  modified_base 10: mod_base = OTHER; note = 2'-fluorouridine
  modified_base 11: mod_base = OTHER; note = 2'-O-methylcytidine
  modified_base 12: mod_base = OTHER; note = 2'-fluorocytidine
  modified_base 13: mod_base = OTHER; note = 2'-O-methyluridine
  modified_base 14: mod_base = OTHER; note = 2'-fluoroguanosine
  modified_base 15: mod_base = OTHER; note = 2'-O-methylguanosine
  modified_base 16: mod_base = OTHER; note = 2'-fluorouridine
  modified_base 17: mod_base = OTHER; note = 2'-O-methyladenosine
  modified_base 18: mod_base = OTHER; note = 2'-fluorouridine
  modified_base 19: mod_base = OTHER; note = 2'-O-methyluridine
  modified_base 20: mod_base = OTHER; note = 2'-fluorocytidine
  modified_base 21: mod_base = OTHER; note = 2'-O-methyluridine with phosphorothioate linkage
  modified_base 22: mod_base = OTHER; note = 2'-O-methyluridine with phosphorothioate linkage
  modified_base 23: mod_base = OTHER; note = 2'-O-methyladenosine
tgatactgatcctggtattctta

SEQ ID NO: 1054 - RNA, 23 nt, synthetic construct
  source 1..23: mol_type = other RNA
  modified_base 1: mod_base = OTHER; note = 5'-(E)-vinylphosphonate 2'-O-methylated uridine with phosphorothioate linkage
  modified_base 2: mod_base = OTHER; note = 2'-fluoroadenosine with phosphorothioate linkage
  modified_base 3: mod_base = OTHER; note = 2'-O-methyladenosine
  modified_base 4: mod_base = OTHER; note = 2'-fluorocytidine
  modified_base 5: mod_base = OTHER; note = 2'-O-methylguanosine
  modified_base 6: mod_base = OTHER; note = 2'-fluoroguanosine
  modified_base 7: mod_base = OTHER; note = 2'-O-methylguanosine
  modified_base 8: mod_base = OTHER; note = 2'-fluorocytidine
  modified_base 9: mod_base = OTHER; note = 2'-O-methylcytidine
  modified_base 10: mod_base = OTHER; note = 2'-fluoroguanosine
  modified_base 11: mod_base = OTHER; note = 2'-O-methyluridine
  modified_base 12: mod_base = OTHER; note = 2'-fluoroguanosine
  modified_base 13: mod_base = OTHER; note = 2'-O-methylguanosine
  modified_base 14: mod_base = OTHER; note = 2'-fluorouridine
  modified_base 15: mod_base = OTHER; note = 2'-O-methylcytidine
  modified_base 16: mod_base = OTHER; note = 2'-fluorouridine
  modified_base 17: mod_base = OTHER; note = 2'-O-methylguanosine
  modified_base 18: mod_base = OTHER; note = 2'-fluoroguanosine
  modified_base 19: mod_base = OTHER; note = 2'-O-methyluridine
  modified_base 20: mod_base = OTHER; note = 2'-fluorouridine
  modified_base 21: mod_base = OTHER; note = 2'-O-methylcytidine with phosphorothioate linkage
  modified_base 22: mod_base = OTHER; note = 2'-O-methyladenosine with phosphorothioate linkage
  modified_base 23: mod_base = OTHER; note = 2'-O-methyluridine
taacgggccgtggtctggttcat

SEQ ID NO: 1055 - RNA, 23 nt, synthetic construct
  source 1..23: mol_type = other RNA
  modified_base 1: mod_base = OTHER; note = 5'-(E)-vinylphosphonate 2'-O-methylated adenosine with phosphorothioate linkage
  modified_base 2: mod_base = OTHER; note = 2'-fluoroadenosine with phosphorothioate linkage
  modified_base 3: mod_base = OTHER; note = 2'-O-methyladenosine
  modified_base 4: mod_base = OTHER; note = 2'-fluorouridine
  modified_base 5: mod_base = OTHER; note = 2'-O-methylcytidine
  modified_base 6: mod_base = OTHER; note = 2'-fluorocytidine
  modified_base 7: mod_base = OTHER; note = 2'-O-methyladenosine
  modified_base 8: mod_base = OTHER; note = 2'-fluorouridine
  modified_base 9: mod_base = OTHER; note = 2'-O-methylguanosine
  modified_base 10: mod_base = OTHER; note = 2'-fluoroguanosine
  modified_base 11: mod_base = OTHER; note = 2'-O-methylcytidine
  modified_base 12: mod_base = OTHER; note = 2'-fluoroguanosine
  modified_base 13: mod_base = OTHER; note = 2'-O-methylguanosine
  modified_base 14: mod_base = OTHER; note = 2'-fluoroguanosine
  modified_base 15: mod_base = OTHER; note = 2'-O-methyladenosine
  modified_base 16: mod_base = OTHER; note = 2'-fluoroguanosine
  modified_base 17: mod_base = OTHER; note = 2'-O-methylguanosine
  modified_base 18: mod_base = OTHER; note = 2'-fluorocytidine
  modified_base 19: mod_base = OTHER; note = 2'-O-methyluridine
  modified_base 20: mod_base = OTHER; note = 2'-fluorocytidine
  modified_base 21: mod_base = OTHER; note = 2'-O-methylcytidine with phosphorothioate linkage
  modified_base 22: mod_base = OTHER; note = 2'-O-methyladenosine with phosphorothioate linkage
  modified_base 23: mod_base = OTHER; note = 2'-O-methyluridine
aaatccatggcgggaggctccat

SEQ ID NO: 1056 - RNA, 23 nt, synthetic construct
  source 1..23: mol_type = other RNA
  modified_base 1: mod_base = OTHER; note = 5'-(E)-vinylphosphonate 2'-O-methylated adenosine with phosphorothioate linkage
  modified_base 2: mod_base = OTHER; note = 2'-fluoroadenosine with phosphorothioate linkage
  modified_base 3: mod_base = OTHER; note = 2'-O-methylcytidine
  modified_base 4: mod_base = OTHER; note = 2'-fluoroguanosine
  modified_base 5: mod_base = OTHER; note = 2'-O-methylguanosine
  modified_base 6: mod_base = OTHER; note = 2'-fluoroguanosine
  modified_base 7: mod_base = OTHER; note = 2'-O-methylcytidine
  modified_base 8: mod_base = OTHER; note = 2'-fluorocytidine
  modified_base 9: mod_base = OTHER; note = 2'-O-methylguanosine
  modified_base 10: mod_base = OTHER; note = 2'-fluorouridine
  modified_base 11: mod_base = OTHER; note = 2'-O-methylguanosine
  modified_base 12: mod_base = OTHER; note = 2'-fluoroguanosine
  modified_base 13: mod_base = OTHER; note = 2'-O-methyluridine
  modified_base 14: mod_base = OTHER; note = 2'-fluorocytidine
  modified_base 15: mod_base = OTHER; note = 2'-O-methyluridine
  modified_base 16: mod_base = OTHER; note = 2'-fluoroguanosine
  modified_base 17: mod_base = OTHER; note = 2'-O-methylguanosine
  modified_base 18: mod_base = OTHER; note = 2'-fluorouridine
  modified_base 19: mod_base = OTHER; note = 2'-O-methyluridine
  modified_base 20: mod_base = OTHER; note = 2'-fluorocytidine
  modified_base 21: mod_base = OTHER; note = 2'-O-methyladenosine with phosphorothioate linkage
  modified_base 22: mod_base = OTHER; note = 2'-O-methyluridine with phosphorothioate linkage
  modified_base 23: mod_base = OTHER; note = 2'-O-methylcytidine
aacgggccgtggtctggttcatc

SEQ ID NO: 1057 - RNA, 23 nt, synthetic construct
  source 1..23: mol_type = other RNA
  modified_base 1: mod_base = OTHER; note = 5'-(E)-vinylphosphonate 2'-O-methylated adenosine with phosphorothioate linkage
  modified_base 2: mod_base = OTHER; note = 2'-fluoroguanosine with phosphorothioate linkage
  modified_base 3: mod_base = OTHER; note = 2'-O-methylguanosine
  modified_base 4: mod_base = OTHER; note = 2'-fluoroguanosine
  modified_base 5: mod_base = OTHER; note = 2'-O-methylcytidine
  modified_base 6: mod_base = OTHER; note = 2'-fluoroguanosine
  modified_base 7: mod_base = OTHER; note = 2'-O-methylguanosine
  modified_base 8: mod_base = OTHER; note = 2'-fluorocytidine
  modified_base 9: mod_base = OTHER; note = 2'-O-methyluridine
  modified_base 10: mod_base = OTHER; note = 2'-fluorouridine
  modified_base 11: mod_base = OTHER; note = 2'-O-methylguanosine
  modified_base 12: mod_base = OTHER; note = 2'-fluorocytidine
  modified_base 13: mod_base = OTHER; note = 2'-O-methyluridine
  modified_base 14: mod_base = OTHER; note = 2'-fluoroadenosine
  modified_base 15: mod_base = OTHER; note = 2'-O-methylcytidine
  modified_base 16: mod_base = OTHER; note = 2'-fluorocytidine
  modified_base 17: mod_base = OTHER; note = 2'-O-methyluridine
  modified_base 18: mod_base = OTHER; note = 2'-fluoroguanosine
  modified_base 19: mod_base = OTHER; note = 2'-O-methylguanosine
  modified_base 20: mod_base = OTHER; note = 2'-fluorocytidine
  modified_base 21: mod_base = OTHER; note = 2'-O-methyluridine with phosphorothioate linkage
  modified_base 22: mod_base = OTHER; note = 2'-O-methylguanosine with phosphorothioate linkage
  modified_base 23: mod_base = OTHER; note = 2'-O-methylguanosine
agggcggcttgctacctggctgg

SEQ ID NO: 1058 - RNA, 23 nt, synthetic construct
  source 1..23: mol_type = other RNA
  modified_base 1: mod_base = OTHER; note = 5'-(E)-vinylphosphonate 2'-O-methylated guanosine with phosphorothioate linkage
  modified_base 2: mod_base = OTHER; note = 2'-fluoroadenosine with phosphorothioate linkage
  modified_base 3: mod_base = OTHER; note = 2'-O-methyladenosine
  modified_base 4: mod_base = OTHER; note = 2'-fluorocytidine
  modified_base 5: mod_base = OTHER; note = 2'-O-methyluridine
  modified_base 6: mod_base = OTHER; note = 2'-fluorouridine
  modified_base 7: mod_base = OTHER; note = 2'-O-methylguanosine
  modified_base 8: mod_base = OTHER; note = 2'-fluoroadenosine
  modified_base 9: mod_base = OTHER; note = 2'-O-methyladenosine
  modified_base 10: mod_base = OTHER; note = 2'-fluorocytidine
  modified_base 11: mod_base = OTHER; note = 2'-O-methylguanosine
  modified_base 12: mod_base = OTHER; note = 2'-fluorouridine
  modified_base 13: mod_base = OTHER; note = 2'-O-methylcytidine
  modified_base 14: mod_base = OTHER; note = 2'-fluoroadenosine
  modified_base 15: mod_base = OTHER; note = 2'-O-methylguanosine
  modified_base 16: mod_base = OTHER; note = 2'-fluoroguanosine
  modified_base 17: mod_base = OTHER; note = 2'-O-methyladenosine
  modified_base 18: mod_base = OTHER; note = 2'-fluoroguanosine
  modified_base 19: mod_base = OTHER; note = 2'-O-methyluridine
  modified_base 20: mod_base = OTHER; note = 2'-fluorocytidine
  modified_base 21: mod_base = OTHER; note = 2'-O-methyluridine with phosphorothioate linkage
  modified_base 22: mod_base = OTHER; note = 2'-O-methylguanosine with phosphorothioate linkage
  modified_base 23: mod_base = OTHER; note = 2'-O-methylguanosine
gaacttgaacgtcaggagtctgg

SEQ ID NO: 1059 - RNA, 23 nt, synthetic construct
  source 1..23: mol_type = other RNA
  modified_base 1: mod_base = OTHER; note = 5'-(E)-vinylphosphonate 2'-O-methylated adenosine with phosphorothioate linkage
  modified_base 2: mod_base = OTHER; note = 2'-fluoroadenosine with phosphorothioate linkage
  modified_base 3: mod_base = OTHER; note = 2'-O-methyluridine
  modified_base 4: mod_base = OTHER; note = 2'-fluorocytidine
  modified_base 5: mod_base = OTHER; note = 2'-O-methylguanosine
  modified_base 6: mod_base = OTHER; note = 2'-fluorouridine
  modified_base 7: mod_base = OTHER; note = 2'-O-methylcytidine
  modified_base 8: mod_base = OTHER; note = 2'-fluoroadenosine
  modified_base 9: mod_base = OTHER; note = 2'-O-methyluridine
  modified_base 10: mod_base = OTHER; note = 2'-fluorocytidine
  modified_base 11: mod_base = OTHER; note = 2'-O-methylcytidine
  modified_base 12: mod_base = OTHER; note = 2'-fluorouridine
  modified_base 13: mod_base = OTHER; note = 2'-O-methylcytidine
  modified_base 14: mod_base = OTHER; note = 2'-fluorouridine
  modified_base 15: mod_base = OTHER; note = 2'-O-methylguanosine
  modified_base 16: mod_base = OTHER; note = 2'-fluoroguanosine
  modified_base 17: mod_base = OTHER; note = 2'-O-methylcytidine
  modified_base 18: mod_base = OTHER; note = 2'-fluoroguanosine
  modified_base 19: mod_base = OTHER; note = 2'-O-methyluridine
  modified_base 20: mod_base = OTHER; note = 2'-fluoroguanosine
  modified_base 21: mod_base = OTHER; note = 2'-O-methyladenosine with phosphorothioate linkage
  modified_base 22: mod_base = OTHER; note = 2'-O-methylcytidine with phosphorothioate linkage
  modified_base 23: mod_base = OTHER; note = 2'-O-methylcytidine
aatcgtcatcctctggcgtgacc

SEQ ID NO: 1060 - RNA, 23 nt, synthetic construct
  source 1..23: mol_type = other RNA
  modified_base 1: mod_base = OTHER; note = 5'-(E)-vinylphosphonate 2'-O-methylated adenosine with phosphorothioate linkage
  modified_base 2: mod_base = OTHER; note = 2'-fluorouridine with phosphorothioate linkage
  modified_base 3: mod_base = OTHER; note = 2'-O-methylcytidine
  modified_base 4: mod_base = OTHER; note = 2'-fluoroguanosine
  modified_base 5: mod_base = OTHER; note = 2'-O-methyluridine
  modified_base 6: mod_base = OTHER; note = 2'-fluorocytidine
  modified_base 7: mod_base = OTHER; note = 2'-O-methyladenosine
  modified_base 8: mod_base = OTHER; note = 2'-fluorouridine
  modified_base 9: mod_base = OTHER; note = 2'-O-methylcytidine
  modified_base 10: mod_base = OTHER; note = 2'-fluorocytidine
  modified_base 11: mod_base = OTHER; note = 2'-O-methyluridine
  modified_base 12: mod_base = OTHER; note = 2'-fluorocytidine
  modified_base 13: mod_base = OTHER; note = 2'-O-methyluridine
  modified_base 14: mod_base = OTHER; note = 2'-fluoroguanosine
  modified_base 15: mod_base = OTHER; note = 2'-O-methylguanosine
  modified_base 16: mod_base = OTHER; note = 2'-fluorocytidine
  modified_base 17: mod_base = OTHER; note = 2'-O-methylguanosine
  modified_base 18: mod_base = OTHER; note = 2'-fluorouridine
  modified_base 19: mod_base = OTHER; note = 2'-O-methylguanosine
  modified_base 20: mod_base = OTHER; note = 2'-fluoroadenosine
  modified_base 21: mod_base = OTHER; note = 2'-O-methylcytidine with phosphorothioate linkage
  modified_base 22: mod_base = OTHER; note = 2'-O-methylcytidine with phosphorothioate linkage
  modified_base 23: mod_base = OTHER; note = 2'-O-methyluridine
atcgtcatcctctggcgtgacct

SEQ ID NO: 1061 - RNA, 23 nt, synthetic construct
  source 1..23: mol_type = other RNA
  modified_base 1: mod_base = OTHER; note = 5'-(E)-vinylphosphonate 2'-O-methylated guanosine with phosphorothioate linkage
  modified_base 2: mod_base = OTHER; note = 2'-fluorocytidine with phosphorothioate linkage
  modified_base 3: mod_base = OTHER; note = 2'-O-methylcytidine
  modified_base 4: mod_base = OTHER; note = 2'-fluoroadenosine
  modified_base 5: mod_base = OTHER; note = 2'-O-methyladenosine
  modified_base 6: mod_base = OTHER; note = 2'-fluorocytidine
  modified_base 7: mod_base = OTHER; note = 2'-O-methylcytidine
  modified_base 8: mod_base = OTHER; note = 2'-fluorouridine
  modified_base 9: mod_base = OTHER; note = 2'-O-methylcytidine
  modified_base 10: mod_base = OTHER; note = 2'-fluorocytidine
  modified_base 11: mod_base = OTHER; note = 2'-O-methyladenosine
  modified_base 12: mod_base = OTHER; note = 2'-fluorocytidine
  modified_base 13: mod_base = OTHER; note = 2'-O-methylguanosine
  modified_base 14: mod_base = OTHER; note = 2'-fluoroguanosine
  modified_base 15: mod_base = OTHER; note = 2'-O-methylguanosine
  modified_base 16: mod_base = OTHER; note = 2'-fluoroadenosine
  modified_base 17: mod_base = OTHER; note = 2'-O-methyluridine
  modified_base 18: mod_base = OTHER; note = 2'-fluorouridine
  modified_base 19: mod_base = OTHER; note = 2'-O-methylguanosine
  modified_base 20: mod_base = OTHER; note = 2'-fluoroguanosine
  modified_base 21: mod_base = OTHER; note = 2'-O-methyladenosine with phosphorothioate linkage
  modified_base 22: mod_base = OTHER; note = 2'-O-methyluridine with phosphorothioate linkage
  modified_base 23: mod_base = OTHER; note = 2'-O-methylguanosine
gccaacctccacgggattggatg

SEQ ID NO: 1062 - RNA, 23 nt, synthetic construct
  source 1..23: mol_type = other RNA
  modified_base 1: mod_base = OTHER; note = 5'-(E)-vinylphosphonate 2'-O-methylated uridine with phosphorothioate linkage
  modified_base 2: mod_base = OTHER; note = 2'-fluorouridine with phosphorothioate linkage
  modified_base 3: mod_base = OTHER; note = 2'-O-methylcytidine
  modified_base 4: mod_base = OTHER; note = 2'-fluorocytidine
  modified_base 5: mod_base = OTHER; note = 2'-O-methylcytidine
  modified_base 6: mod_base = OTHER; note = 2'-fluoroadenosine
  modified_base 7: mod_base = OTHER; note = 2'-O-methyladenosine
  modified_base 8: mod_base = OTHER; note = 2'-fluorocytidine
  modified_base 9: mod_base = OTHER; note = 2'-O-methylguanosine
  modified_base 10: mod_base = OTHER; note = 2'-fluoroguanosine
  modified_base 11: mod_base = OTHER; note = 2'-O-methylguanosine
  modified_base 12: mod_base = OTHER; note = 2'-fluorocytidine
  modified_base 13: mod_base = OTHER; note = 2'-O-methylcytidine
  modified_base 14: mod_base = OTHER; note = 2'-fluoroguanosine
  modified_base 15: mod_base = OTHER; note = 2'-O-methyluridine
  modified_base 16: mod_base = OTHER; note = 2'-fluoroguanosine
  modified_base 17: mod_base = OTHER; note = 2'-O-methylguanosine
  modified_base 18: mod_base = OTHER; note = 2'-fluorouridine
  modified_base 19: mod_base = OTHER; note = 2'-O-methylcytidine
  modified_base 20: mod_base = OTHER; note = 2'-fluorouridine
  modified_base 21: mod_base = OTHER; note = 2'-O-methylguanosine with phosphorothioate linkage
  modified_base 22: mod_base = OTHER; note = 2'-O-methylguanosine with phosphorothioate linkage
  modified_base 23: mod_base = OTHER; note = 2'-O-methyluridine
ttcccaacgggccgtggtctggt

SEQ ID NO: 1063 - RNA, 23 nt, synthetic construct
  source 1..23: mol_type = other RNA
  modified_base 1: mod_base = OTHER; note = 5'-(E)-vinylphosphonate 2'-O-methylated guanosine with phosphorothioate linkage
  modified_base 2: mod_base = OTHER; note = 2'-fluorouridine with phosphorothioate linkage
  modified_base 3: mod_base = OTHER; note = 2'-O-methyluridine
  modified_base 4: mod_base = OTHER; note = 2'-fluorocytidine
  modified_base 5: mod_base = OTHER; note = 2'-O-methyluridine
  modified_base 6: mod_base = OTHER; note = 2'-fluorocytidine
  modified_base 7: mod_base = OTHER; note = 2'-O-methylguanosine
  modified_base 8: mod_base = OTHER; note = 2'-fluorocytidine
  modified_base 9: mod_base = OTHER; note = 2'-O-methyluridine
  modified_base 10: mod_base = OTHER; note = 2'-fluorocytidine
  modified_base 11: mod_base = OTHER; note = 2'-O-methyluridine
  modified_base 12: mod_base = OTHER; note = 2'-fluorouridine
  modified_base 13: mod_base = OTHER; note = 2'-O-methylguanosine
  modified_base 14: mod_base = OTHER; note = 2'-fluoroadenosine
  modified_base 15: mod_base = OTHER; note = 2'-O-methyladenosine
  modified_base 16: mod_base = OTHER; note = 2'-fluorocytidine
  modified_base 17: mod_base = OTHER; note = 2'-O-methyluridine
  modified_base 18: mod_base = OTHER; note = 2'-fluorouridine
  modified_base 19: mod_base = OTHER; note = 2'-O-methylguanosine
  modified_base 20: mod_base = OTHER; note = 2'-fluoroguanosine
  modified_base 21: mod_base = OTHER; note = 2'-O-methylcytidine with phosphorothioate linkage
  modified_base 22: mod_base = OTHER; note = 2'-O-methylcytidine with phosphorothioate linkage
  modified_base 23: mod_base = OTHER; note = 2'-O-methyladenosine
gttctcgctcttgaacttggcca

SEQ ID NO: 1064 - RNA, 23 nt, synthetic construct
  source 1..23: mol_type = other RNA
  modified_base 1: mod_base = OTHER; note = 5'-(E)-vinylphosphonate 2'-O-methylated uridine with phosphorothioate linkage
  modified_base 2: mod_base = OTHER; note = 2'-fluoroguanosine with phosphorothioate linkage
  modified_base 3: mod_base = OTHER; note = 2'-O-methyluridine
  modified_base 4: mod_base = OTHER; note = 2'-fluoroadenosine
  modified_base 5: mod_base = OTHER; note = 2'-O-methyladenosine
  modified_base 6: mod_base = OTHER; note = 2'-fluorouridine
  modified_base 7: mod_base = OTHER; note = 2'-O-methylguanosine
  modified_base 8: mod_base = OTHER; note = 2'-fluoroadenosine
  modified_base 9: mod_base = OTHER; note = 2'-O-methylcytidine
  modified_base 10: mod_base = OTHER; note = 2'-fluorocytidine
  modified_base 11: mod_base = OTHER; note = 2'-O-methyluridine
  modified_base 12: mod_base = OTHER; note = 2'-fluorouridine
  modified_base 13: mod_base = OTHER; note = 2'-O-methyluridine
  modified_base 14: mod_base = OTHER; note = 2'-fluoroguanosine
  modified_base 15: mod_base = OTHER; note = 2'-O-methylguanosine
  modified_base 16: mod_base = OTHER; note = 2'-fluorouridine
  modified_base 17: mod_base = OTHER; note = 2'-O-methylcytidine
  modified_base 18: mod_base = OTHER; note = 2'-fluoroadenosine
  modified_base 19: mod_base = OTHER; note = 2'-O-methyluridine
  modified_base 20: mod_base = OTHER; note = 2'-fluorocytidine
  modified_base 21: mod_base = OTHER; note = 2'-O-methyluridine with phosphorothioate linkage
  modified_base 22: mod_base = OTHER; note = 2'-O-methyladenosine with phosphorothioate linkage
  modified_base 23: mod_base = OTHER; note = 2'-O-methyladenosine
tgtaatgacctttggtcatctaa

SEQ ID NO: 1065 - RNA, 23 nt, synthetic construct
  source 1..23: mol_type = other RNA
  modified_base 1: mod_base = OTHER; note = 5'-(E)-vinylphosphonate 2'-O-methylated uridine with phosphorothioate linkage
  modified_base 2: mod_base = OTHER; note = 2'-fluorocytidine with phosphorothioate linkage
  modified_base 3: mod_base = OTHER; note = 2'-O-methyluridine
  modified_base 4: mod_base = OTHER; note = 2'-fluorocytidine
  modified_base 5: mod_base = OTHER; note = 2'-O-methylcytidine
  modified_base 6: mod_base = OTHER; note = 2'-fluoroguanosine
  modified_base 7: mod_base = OTHER; note = 2'-O-methyladenosine
  modified_base 8: mod_base = OTHER; note = 2'-fluoroadenosine
  modified_base 9: mod_base = OTHER; note = 2'-O-methylguanosine
  modified_base 10: mod_base = OTHER; note = 2'-fluorocytidine
  modified_base 11: mod_base = OTHER; note = 2'-O-methyluridine
  modified_base 12: mod_base = OTHER; note = 2'-fluoroadenosine
  modified_base 13: mod_base = OTHER; note = 2'-O-methyladenosine
  modified_base 14: mod_base = OTHER; note = 2'-fluoroguanosine
  modified_base 15: mod_base = OTHER; note = 2'-O-methylguanosine
  modified_base 16: mod_base = OTHER; note = 2'-fluoroadenosine
  modified_base 17: mod_base = OTHER; note = 2'-O-methyladenosine
  modified_base 18: mod_base = OTHER; note = 2'-fluoroguanosine
  modified_base 19: mod_base = OTHER; note = 2'-O-methylguanosine
  modified_base 20: mod_base = OTHER; note = 2'-fluoroguanosine
  modified_base 21: mod_base = OTHER; note = 2'-O-methyladenosine with phosphorothioate linkage
  modified_base 22: mod_base = OTHER; note = 2'-O-methyluridine with phosphorothioate linkage
  modified_base 23: mod_base = OTHER; note = 2'-O-methylcytidine
tctccgaagctaaggaagggatc

SEQ ID NO: 1066 - RNA, 23 nt, synthetic construct
  source 1..23: mol_type = other RNA
  modified_base 1: mod_base = OTHER; note = 5'-(E)-vinylphosphonate 2'-O-methylated adenosine with phosphorothioate linkage
  modified_base 2: mod_base = OTHER; note = 2'-fluorocytidine with phosphorothioate linkage
  modified_base 3: mod_base = OTHER; note = 2'-O-methyladenosine
  modified_base 4: mod_base = OTHER; note = 2'-fluoroguanosine
  modified_base 5: mod_base = OTHER; note = 2'-O-methylcytidine
  modified_base 6: mod_base = OTHER; note = 2'-fluoroguanosine
  modified_base 7: mod_base = OTHER; note = 2'-O-methylguanosine
  modified_base 8: mod_base = OTHER; note = 2'-fluorouridine
  modified_base 9: mod_base = OTHER; note = 2'-O-methylguanosine
  modified_base 10: mod_base = OTHER; note = 2'-fluoroguanosine
  modified_base 11: mod_base = OTHER; note = 2'-O-methylguanosine
  modified_base 12: mod_base = OTHER; note = 2'-fluorocytidine
  modified_base 13: mod_base = OTHER; note = 2'-O-methyluridine
  modified_base 14: mod_base = OTHER; note = 2'-fluoroadenosine
  modified_base 15: mod_base = OTHER; note = 2'-O-methylguanosine
  modified_base 16: mod_base = OTHER; note = 2'-fluoroadenosine
  modified_base 17: mod_base = OTHER; note = 2'-O-methylcytidine
  modified_base 18: mod_base = OTHER; note = 2'-fluoroguanosine
  modified_base 19: mod_base = OTHER; note = 2'-O-methyluridine
  modified_base 20: mod_base = OTHER; note = 2'-fluoroguanosine
  modified_base 21: mod_base = OTHER; note = 2'-O-methyluridine with phosphorothioate linkage
  modified_base 22: mod_base = OTHER; note = 2'-O-methyluridine with phosphorothioate linkage
  modified_base 23: mod_base = OTHER; note = 2'-O-methylcytidine
acagcggtgggctagacgtgttc

SEQ ID NO: 1067 - RNA, 23 nt, synthetic construct
  source 1..23: mol_type = other RNA
  modified_base 1: mod_base = OTHER; note = 5'-(E)-vinylphosphonate 2'-O-methylated guanosine with phosphorothioate linkage
  modified_base 2: mod_base = OTHER; note = 2'-fluorocytidine with phosphorothioate linkage
  modified_base 3: mod_base = OTHER; note = 2'-O-methyluridine
  modified_base 4: mod_base = OTHER; note = 2'-fluorocytidine
  modified_base 5: mod_base = OTHER; note = 2'-O-methyluridine
  modified_base 6: mod_base = OTHER; note = 2'-fluorouridine
  modified_base 7: mod_base = OTHER; note = 2'-O-methylguanosine
  modified_base 8: mod_base = OTHER; note = 2'-fluoroadenosine
  modified_base 9: mod_base = OTHER; note = 2'-O-methyladenosine
  modified_base 10: mod_base = OTHER; note = 2'-fluorocytidine
  modified_base 11: mod_base = OTHER; note = 2'-O-methyluridine
  modified_base 12: mod_base = OTHER; note = 2'-fluorouridine
  modified_base 13: mod_base = OTHER; note = 2'-O-methylguanosine
  modified_base 14: mod_base = OTHER; note = 2'-fluoroguanosine
  modified_base 15: mod_base = OTHER; note = 2'-O-methylcytidine
  modified_base 16: mod_base = OTHER; note = 2'-fluorocytidine
  modified_base 17: mod_base = OTHER; note = 2'-O-methyladenosine
  modified_base 18: mod_base = OTHER; note = 2'-fluorocytidine
  modified_base 19: mod_base = OTHER; note = 2'-O-methylcytidine
  modified_base 20: mod_base = OTHER; note = 2'-fluoroadenosine
  modified_base 21: mod_base = OTHER; note = 2'-O-methylcytidine with phosphorothioate linkage
  modified_base 22: mod_base = OTHER; note = 2'-O-methylguanosine with phosphorothioate linkage
  modified_base 23: mod_base = OTHER; note = 2'-O-methylguanosine
gctcttgaacttggccaccacgg

SEQ ID NO: 1068 - RNA, 23 nt, synthetic construct
  source 1..23: mol_type = other RNA
  modified_base 1: mod_base = OTHER; note = 5'-(E)-vinylphosphonate 2'-O-methylated guanosine with phosphorothioate linkage
  modified_base 2: mod_base = OTHER; note = 2'-fluorouridine with phosphorothioate linkage
  modified_base 3: mod_base = OTHER; note = 2'-O-methylcytidine
  modified_base 4: mod_base = OTHER; note = 2'-fluorouridine
  modified_base 5: mod_base = OTHER; note = 2'-O-methylcytidine
  modified_base 6: mod_base = OTHER; note = 2'-fluorocytidine
  modified_base 7: mod_base = OTHER; note = 2'-O-methylguanosine
  modified_base 8: mod_base = OTHER; note = 2'-fluoroadenosine
  modified_base 9: mod_base = OTHER; note = 2'-O-methyladenosine
  modified_base 10: mod_base = OTHER; note = 2'-fluoroguanosine
  modified_base 11: mod_base = OTHER; note = 2'-O-methylcytidine
  modified_base 12: mod_base = OTHER; note = 2'-fluorouridine
  modified_base 13: mod_base = OTHER; note = 2'-O-methyladenosine
  modified_base 14: mod_base = OTHER; note = 2'-fluoroadenosine
  modified_base 15: mod_base = OTHER; note = 2'-O-methylguanosine
  modified_base 16: mod_base = OTHER; note = 2'-fluoroguanosine
  modified_base 17: mod_base = OTHER; note = 2'-O-methyladenosine
  modified_base 18: mod_base = OTHER; note = 2'-fluoroadenosine
  modified_base 19: mod_base = OTHER; note = 2'-O-methylguanosine
  modified_base 20: mod_base = OTHER; note = 2'-fluoroguanosine
  modified_base 21: mod_base = OTHER; note = 2'-O-methylguanosine with phosphorothioate linkage
  modified_base 22: mod_base = OTHER; note = 2'-O-methyladenosine with phosphorothioate linkage
  modified_base 23: mod_base = OTHER; note = 2'-O-methyluridine
gtctccgaagctaaggaagggat

SEQ ID NO: 1069 - RNA, 23 nt, synthetic construct
  source 1..23: mol_type = other RNA
  modified_base 1: mod_base = OTHER; note = 5'-(E)-vinylphosphonate 2'-O-methylated adenosine with phosphorothioate linkage
  modified_base 2: mod_base = OTHER; note = 2'-fluorocytidine with phosphorothioate linkage
  modified_base 3: mod_base = OTHER; note = 2'-O-methyladenosine
  modified_base 4: mod_base = OTHER; note = 2'-fluorocytidine
  modified_base 5: mod_base = OTHER; note = 2'-O-methylguanosine
  modified_base 6: mod_base = OTHER; note = 2'-fluorouridine
  modified_base 7: mod_base = OTHER; note = 2'-O-methyluridine
  modified_base 8: mod_base = OTHER; note = 2'-fluorocytidine
  modified_base 9: mod_base = OTHER; note = 2'-O-methyluridine
  modified_base 10: mod_base = OTHER; note = 2'-fluorocytidine
  modified_base 11: mod_base = OTHER; note = 2'-O-methylcytidine
  modified_base 12: mod_base = OTHER; note = 2'-fluoroguanosine
  modified_base 13: mod_base = OTHER; note = 2'-O-methyluridine
  modified_base 14: mod_base = OTHER; note = 2'-fluoroguanosine
  modified_base 15: mod_base = OTHER; note = 2'-O-methyluridine
  modified_base 16: mod_base = OTHER; note = 2'-fluorouridine
  modified_base 17: mod_base = OTHER; note = 2'-O-methylguanosine
  modified_base 18: mod_base = OTHER; note = 2'-fluoroguanosine
  modified_base 19: mod_base = OTHER; note = 2'-O-methylguanosine
  modified_base 20: mod_base = OTHER; note = 2'-fluorocytidine
  modified_base 21: mod_base = OTHER; note = 2'-O-methyladenosine with phosphorothioate linkage
  modified_base 22: mod_base = OTHER; note = 2'-O-methyluridine with phosphorothioate linkage
  modified_base 23: mod_base = OTHER; note = 2'-O-methylcytidine
acacgttctccgtgttgggcatc

SEQ ID NO: 1070 - RNA, 23 nt, synthetic construct
  source 1..23: mol_type = other RNA
  modified_base 1: mod_base = OTHER; note = 5'-(E)-vinylphosphonate 2'-O-methylated guanosine with phosphorothioate linkage
  modified_base 2: mod_base = OTHER; note = 2'-fluorocytidine with phosphorothioate linkage
  modified_base 3: mod_base = OTHER; note = 2'-O-methylcytidine
  modified_base 4: mod_base = OTHER; note = 2'-fluoroguanosine
  modified_base 5: mod_base = OTHER; note = 2'-O-methylguanosine
  modified_base 6: mod_base = OTHER; note = 2'-fluoroadenosine
  modified_base 7: mod_base = OTHER; note = 2'-O-methyladenosine
  modified_base 8: mod_base = OTHER; note = 2'-fluoroguanosine
  modified_base 9: mod_base = OTHER; note = 2'-O-methylcytidine
  modified_base 10: mod_base = OTHER; note = 2'-fluorocytidine
  modified_base 11: mod_base = OTHER; note = 2'-O-methyluridine
  modified_base 12: mod_base = OTHER; note = 2'-fluorocytidine
  modified_base 13: mod_base = OTHER; note = 2'-O-methyluridine
  modified_base 14: mod_base = OTHER; note = 2'-fluorocytidine
  modified_base 15: mod_base = OTHER; note = 2'-O-methyluridine
  modified_base 16: mod_base = OTHER; note = 2'-fluorocytidine
  modified_base 17: mod_base = OTHER; note = 2'-O-methylguanosine
  modified_base 18: mod_base = OTHER; note = 2'-fluoroadenosine
  modified_base 19: mod_base = OTHER; note = 2'-O-methyluridine
  modified_base 20: mod_base = OTHER; note = 2'-fluoroadenosine
  modified_base 21: mod_base = OTHER; note = 2'-O-methylcytidine with phosphorothioate linkage
  modified_base 22: mod_base = OTHER; note = 2'-O-methyluridine with phosphorothioate linkage
  modified_base 23: mod_base = OTHER; note = 2'-O-methylguanosine
gccggaagcctctctcgatactg

SEQ ID NO: 1071 - RNA, 23 nt, synthetic construct
  source 1..23: mol_type = other RNA
  modified_base 1: mod_base = OTHER; note = 5'-(E)-vinylphosphonate 2'-O-methylated guanosine with phosphorothioate linkage
  modified_base 2: mod_base = OTHER; note = 2'-fluoroguanosine with phosphorothioate linkage
  modified_base 3: mod_base = OTHER; note = 2'-O-methylguanosine
  modified_base 4: mod_base = OTHER; note = 2'-fluoroadenosine
  modified_base 5: mod_base = OTHER; note = 2'-O-methylcytidine
  modified_base 6: mod_base = OTHER; note = 2'-fluoroadenosine
  modified_base 7: mod_base = OTHER; note = 2'-O-methylguanosine
  modified_base 8: mod_base = OTHER; note = 2'-fluorocytidine
  modified_base 9: mod_base = OTHER; note = 2'-O-methylguanosine
  modified_base 10: mod_base = OTHER; note = 2'-fluoroguanosine
  modified_base 11: mod_base = OTHER; note = 2'-O-methyluridine
  modified_base 12: mod_base = OTHER; note = 2'-fluoroguanosine
  modified_base 13: mod_base = OTHER; note = 2'-O-methylguanosine
  modified_base 14: mod_base = OTHER; note = 2'-fluoroguanosine
  modified_base 15: mod_base = OTHER; note = 2'-O-methylcytidine
  modified_base 16: mod_base = OTHER; note = 2'-fluorouridine
  modified_base 17: mod_base = OTHER; note = 2'-O-methyladenosine
  modified_base 18: mod_base = OTHER; note = 2'-fluoroguanosine
  modified_base 19: mod_base = OTHER; note = 2'-O-methyladenosine
  modified_base 20: mod_base = OTHER; note = 2'-fluorocytidine
  modified_base 21: mod_base = OTHER; note = 2'-O-methylguanosine with phosphorothioate linkage
  modified_base 22: mod_base = OTHER; note = 2'-O-methyluridine with phosphorothioate linkage
  modified_base 23: mod_base = OTHER; note = 2'-O-methylguanosine
gggacagcggtgggctagacgtg

SEQ ID NO: 1072 - RNA, 23 nt, synthetic construct
  source 1..23: mol_type = other RNA
  modified_base 1: mod_base = OTHER; note = 5'-(E)-vinylphosphonate 2'-O-methylated guanosine with phosphorothioate linkage
  modified_base 2: mod_base = OTHER; note = 2'-fluorocytidine with phosphorothioate linkage
  modified_base 3: mod_base = OTHER; note = 2'-O-methylguanosine
  modified_base 4: mod_base = OTHER; note = 2'-fluorouridine
  modified_base 5: mod_base = OTHER; note = 2'-O-methylguanosine
  modified_base 6: mod_base = OTHER; note = 2'-fluoroadenosine
  modified_base 7: mod_base = OTHER; note = 2'-O-methylcytidine
  modified_base 8: mod_base = OTHER; note = 2'-fluorocytidine
  modified_base 9: mod_base = OTHER; note = 2'-O-methyluridine
  modified_base 10: mod_base = OTHER; note = 2'-fluoroguanosine
  modified_base 11: mod_base = OTHER; note = 2'-O-methylguanosine
  modified_base 12: mod_base = OTHER; note = 2'-fluoroadenosine
  modified_base 13: mod_base = OTHER; note = 2'-O-methyluridine
  modified_base 14: mod_base = OTHER; note = 2'-fluoroguanosine
  modified_base 15: mod_base = OTHER; note = 2'-O-methylcytidine
  modified_base 16: mod_base = OTHER; note = 2'-fluorocytidine
  modified_base 17: mod_base = OTHER; note = 2'-O-methyladenosine
  modified_base 18: mod_base = OTHER; note = 2'-fluoroadenosine
  modified_base 19: mod_base = OTHER; note = 2'-O-methylcytidine
  modified_base 20: mod_base = OTHER; note = 2'-fluorocytidine
  modified_base 21: mod_base = OTHER; note = 2'-O-methyluridine with phosphorothioate linkage
  modified_base 22: mod_base = OTHER; note = 2'-O-methylcytidine with phosphorothioate linkage
  modified_base 23: mod_base = OTHER; note = 2'-O-methylcytidine
gcgtgacctggatgccaacctcc

SEQ ID NO: 1073 - RNA, 23 nt, synthetic construct
  source 1..23: mol_type = other RNA
  modified_base 1: mod_base = OTHER; note = 5'-(E)-vinylphosphonate 2'-O-methylated uridine with phosphorothioate linkage
  modified_base 2: mod_base = OTHER; note = 2'-fluorocytidine with phosphorothioate linkage
  modified_base 3: mod_base = OTHER; note = 2'-O-methylcytidine
  modified_base 4: mod_base = OTHER; note = 2'-fluoroadenosine
  modified_base 5: mod_base = OTHER; note = 2'-O-methyluridine
  modified_base 6: mod_base = OTHER; note = 2'-fluoroguanosine
  modified_base 7: mod_base = OTHER; note = 2'-O-methylguanosine
  modified_base 8: mod_base = OTHER; note = 2'-fluorocytidine
  modified_base 9: mod_base = OTHER; note = 2'-O-methylguanosine
  modified_base 10: mod_base = OTHER; note = 2'-fluoroguanosine
  modified_base 11: mod_base = OTHER; note = 2'-O-methylguanosine
  modified_base 12: mod_base = OTHER; note = 2'-fluoroadenosine
  modified_base 13: mod_base = OTHER; note = 2'-O-methylguanosine
  modified_base 14: mod_base = OTHER; note = 2'-fluoroguanosine
  modified_base 15: mod_base = OTHER; note = 2'-O-methylcytidine
  modified_base 16: mod_base = OTHER; note = 2'-fluorouridine
  modified_base 17: mod_base = OTHER; note = 2'-O-methylcytidine
  modified_base 18: mod_base = OTHER; note = 2'-fluorocytidine
  modified_base 19: mod_base = OTHER; note = 2'-O-methyladenosine
  modified_base 20: mod_base = OTHER; note = 2'-fluorouridine
  modified_base 21: mod_base = OTHER; note = 2'-O-methyladenosine with phosphorothioate linkage
  modified_base 22: mod_base = OTHER; note = 2'-O-methylguanosine with phosphorothioate linkage
  modified_base 23: mod_base = OTHER; note = 2'-O-methylcytidine
tccatggcgggaggctccatagc

SEQ ID NO: 1074 - RNA, 23 nt, synthetic construct
  source 1..23: mol_type = other RNA
  modified_base 1: mod_base = OTHER; note = 5'-(E)-vinylphosphonate 2'-O-methylated guanosine with phosphorothioate linkage
  modified_base 2: mod_base = OTHER; note = 2'-fluoroadenosine with phosphorothioate linkage
  modified_base 3: mod_base = OTHER; note = 2'-O-methyluridine
  modified_base 4: mod_base = OTHER; note = 2'-fluoroguanosine
  modified_base 5: mod_base = OTHER; note = 2'-O-methylcytidine
  modified_base 6: mod_base = OTHER; note = 2'-fluorocytidine
  modified_base 7: mod_base = OTHER; note = 2'-O-methyladenosine
  modified_base 8: mod_base = OTHER; note = 2'-fluoroadenosine
  modified_base 9: mod_base = OTHER; note = 2'-O-methylcytidine
  modified_base 10: mod_base = OTHER; note = 2'-fluorocytidine
  modified_base 11: mod_base = OTHER; note = 2'-O-methyluridine
  modified_base 12: mod_base = OTHER; note = 2'-fluorocytidine
  modified_base 13: mod_base = OTHER; note = 2'-O-methylcytidine
  modified_base 14: mod_base = OTHER; note = 2'-fluoroadenosine
  modified_base 15: mod_base = OTHER; note = 2'-O-methylcytidine
  modified_base 16: mod_base = OTHER; note = 2'-fluoroguanosine
  modified_base 17: mod_base = OTHER; note = 2'-O-methylguanosine
  modified_base 18: mod_base = OTHER; note = 2'-fluoroguanosine
  modified_base 19: mod_base = OTHER; note = 2'-O-methyladenosine
  modified_base 20: mod_base = OTHER; note = 2'-fluorouridine
  modified_base 21: mod_base = OTHER; note = 2'-O-methyluridine with phosphorothioate linkage
  modified_base 22: mod_base = OTHER; note = 2'-O-methylguanosine with phosphorothioate linkage
  modified_base 23: mod_base = OTHER; note = 2'-O-methylguanosine
gatgccaacctccacgggattgg

SEQ ID NO: 1075 - RNA, 23 nt, synthetic construct
  source 1..23: mol_type = other RNA
  modified_base 1: mod_base = OTHER; note = 5'-(E)-vinylphosphonate 2'-O-methylated uridine with phosphorothioate linkage
  modified_base 2: mod_base = OTHER; note = 2'-fluorouridine with phosphorothioate linkage
  modified_base 3: mod_base = OTHER; note = 2'-O-methylguanosine
  modified_base 4: mod_base = OTHER; note = 2'-fluoroguanosine
  modified_base 5: mod_base = OTHER; note = 2'-O-methylcytidine
  modified_base 6: mod_base = OTHER; note = 2'-fluoroguanosine
  modified_base 7: mod_base = OTHER; note = 2'-O-methyluridine
  modified_base 8: mod_base = OTHER; note = 2'-fluoroguanosine
  modified_base 9: mod_base = OTHER; note = 2'-O-methyladenosine
  modified_base 10: mod_base = OTHER; note = 2'-fluorocytidine
  modified_base 11: mod_base = OTHER; note = 2'-O-methylcytidine
  modified_base 12: mod_base = OTHER; note = 2'-fluorouridine
  modified_base 13: mod_base = OTHER; note = 2'-O-methylguanosine
  modified_base 14: mod_base = OTHER; note = 2'-fluoroguanosine
  modified_base 15: mod_base = OTHER; note = 2'-O-methyladenosine
  modified_base 16: mod_base = OTHER; note = 2'-fluorouridine
  modified_base 17: mod_base = OTHER; note = 2'-O-methylguanosine
  modified_base 18: mod_base = OTHER; note = 2'-fluorocytidine
  modified_base 19: mod_base = OTHER; note = 2'-O-methylcytidine
  modified_base 20: mod_base = OTHER; note = 2'-fluoroadenosine
  modified_base 21: mod_base = OTHER; note = 2'-O-methyladenosine with phosphorothioate linkage
  modified_base 22: mod_base = OTHER; note = 2'-O-methylcytidine with phosphorothioate linkage
  modified_base 23: mod_base = OTHER; note = 2'-O-methylcytidine
ttggcgtgacctggatgccaacc

SEQ ID NO: 1076 - RNA, 23 nt, synthetic construct
  source 1..23: mol_type = other RNA
  modified_base 1: mod_base = OTHER; note = 5'-(E)-vinylphosphonate 2'-O-methylated uridine with phosphorothioate linkage
  modified_base 2: mod_base = OTHER; note = 2'-fluorocytidine with phosphorothioate linkage
  modified_base 3: mod_base = OTHER; note = 2'-O-methyluridine
  modified_base 4: mod_base = OTHER; note = 2'-fluoroguanosine
  modified_base 5: mod_base = OTHER; note = 2'-O-methylguanosine
  modified_base 6: mod_base = OTHER; note = 2'-fluoroadenosine
  modified_base 7: mod_base = OTHER; note = 2'-O-methylguanosine
  modified_base 8: mod_base = OTHER; note = 2'-fluorouridine
  modified_base 9: mod_base = OTHER; note = 2'-O-methylcytidine
  modified_base 10: mod_base = OTHER; note = 2'-fluorouridine
  modified_base 11: mod_base = OTHER; note = 2'-O-methylcytidine
  modified_base 12: mod_base = OTHER; note = 2'-fluorocytidine
  modified_base 13: mod_base = OTHER; note = 2'-O-methylguanosine
  modified_base 14: mod_base = OTHER; note = 2'-fluoroadenosine
  modified_base 15: mod_base = OTHER; note = 2'-O-methyladenosine
  modified_base 16: mod_base = OTHER; note = 2'-fluoroguanosine
  modified_base 17: mod_base = OTHER; note = 2'-O-methylcytidine
  modified_base 18: mod_base = OTHER; note = 2'-fluorouridine
  modified_base 19: mod_base = OTHER; note = 2'-O-methyladenosine
  modified_base 20: mod_base = OTHER; note = 2'-fluoroadenosine
  modified_base 21: mod_base = OTHER; note = 2'-O-methylguanosine with phosphorothioate linkage
  modified_base 22: mod_base = OTHER; note = 2'-O-methylguanosine with phosphorothioate linkage
  modified_base 23: mod_base = OTHER; note = 2'-O-methyladenosine
tctggagtctccgaagctaagga

SEQ ID NO: 1077 - RNA, 23 nt, synthetic construct
  source 1..23: mol_type = other RNA
  modified_base 1: mod_base = OTHER; note = 5'-(E)-vinylphosphonate 2'-O-methylated guanosine with phosphorothioate linkage
  modified_base 2: mod_base = OTHER; note = 2'-fluoroadenosine with phosphorothioate linkage
  modified_base 3: mod_base = OTHER; note = 2'-O-methylcytidine
  modified_base 4: mod_base = OTHER; note = 2'-fluoroadenosine
  modified_base 5: mod_base = OTHER; note = 2'-O-methylguanosine
  modified_base 6: mod_base = OTHER; note = 2'-fluorocytidine
  modified_base 7: mod_base = OTHER; note = 2'-O-methylguanosine
  modified_base 8: mod_base = OTHER; note = 2'-fluoroguanosine
  modified_base 9: mod_base = OTHER; note = 2'-O-methyluridine
  modified_base 10: mod_base = OTHER; note = 2'-fluoroguanosine
  modified_base 11: mod_base = OTHER; note = 2'-O-methylguanosine
  modified_base 12: mod_base = OTHER; note = 2'-fluoroguanosine
  modified_base 13: mod_base = OTHER; note = 2'-O-methylcytidine
  modified_base 14: mod_base = OTHER; note = 2'-fluorouridine
  modified_base 15: mod_base = OTHER; note = 2'-O-methyladenosine
  modified_base 16: mod_base = OTHER; note = 2'-fluoroguanosine
  modified_base 17: mod_base = OTHER; note = 2'-O-methyladenosine
  modified_base 18: mod_base = OTHER; note = 2'-fluorocytidine
  modified_base 19: mod_base = OTHER; note = 2'-O-methylguanosine
  modified_base 20: mod_base = OTHER; note = 2'-fluorouridine
  modified_base 21: mod_base = OTHER; note = 2'-O-methylguanosine with phosphorothioate linkage
  modified_base 22: mod_base = OTHER; note = 2'-O-methyluridine with phosphorothioate linkage
  modified_base 23: mod_base = OTHER; note = 2'-O-methyluridine
gacagcggtgggctagacgtgtt

SEQ ID NO: 1078 - RNA, 23 nt, synthetic construct
  source 1..23: mol_type = other RNA
  modified_base 1: mod_base = OTHER; note = 5'-(E)-vinylphosphonate 2'-O-methylated uridine with phosphorothioate linkage
  modified_base 2: mod_base = OTHER; note = 2'-fluorocytidine with phosphorothioate linkage
  modified_base 3: mod_base = OTHER; note = 2'-O-methyladenosine
  modified_base 4: mod_base = OTHER; note = 2'-fluoroadenosine
  modified_base 5: mod_base = OTHER; note = 2'-O-methylcytidine
  modified_base 6: mod_base = OTHER; note = 2'-fluoroguanosine
  modified_base 7: mod_base = OTHER; note = 2'-O-methylguanosine
  modified_base 8: mod_base = OTHER; note = 2'-fluoroguanosine
  modified_base 9: mod_base = OTHER; note = 2'-O-methylcytidine
  modified_base 10: mod_base = OTHER; note = 2'-fluorocytidine
  modified_base 11: mod_base = OTHER; note = 2'-O-methylguanosine
  modified_base 12: mod_base = OTHER; note = 2'-fluorouridine
  modified_base 13: mod_base = OTHER; note = 2'-O-methylguanosine
  modified_base 14: mod_base = OTHER; note = 2'-fluoroguanosine
  modified_base 15: mod_base = OTHER; note = 2'-O-methyluridine
  modified_base 16: mod_base = OTHER; note = 2'-fluorocytidine
  modified_base 17: mod_base = OTHER; note = 2'-O-methyluridine
  modified_base 18: mod_base = OTHER; note = 2'-fluoroguanosine
  modified_base 19: mod_base = OTHER; note = 2'-O-methylguanosine
  modified_base 20: mod_base = OTHER; note = 2'-fluorouridine
  modified_base 21: mod_base = OTHER; note = 2'-O-methyluridine with phosphorothioate linkage
  modified_base 22: mod_base = OTHER; note = 2'-O-methylcytidine with phosphorothioate linkage
  modified_base 23: mod_base = OTHER; note = 2'-O-methyladenosine
tcaacgggccgtggtctggttca

SEQ ID NO: 1079 - RNA, 23 nt, synthetic construct
  source 1..23: mol_type = other RNA
  modified_base 1: mod_base = OTHER; note = 5'-(E)-vinylphosphonate 2'-O-methylated uridine with phosphorothioate linkage
  modified_base 2: mod_base = OTHER; note = 2'-fluoroadenosine with phosphorothioate linkage
  modified_base 3: mod_base = OTHER; note = 2'-O-methylguanosine
  modified_base 4: mod_base = OTHER; note = 2'-fluorocytidine
  modified_base 5: mod_base = OTHER; note = 2'-O-methylguanosine
  modified_base 6: mod_base = OTHER; note = 2'-fluoroguanosine
  modified_base 7: mod_base = OTHER; note = 2'-O-methyluridine
  modified_base 8: mod_base = OTHER; note = 2'-fluoroguanosine
  modified_base 9: mod_base = OTHER; note = 2'-O-methylguanosine
  modified_base 10: mod_base = OTHER; note = 2'-fluoroguanosine
  modified_base 11: mod_base = OTHER; note = 2'-O-methylcytidine
  modified_base 12: mod_base = OTHER; note = 2'-fluorouridine
  modified_base 13: mod_base = OTHER; note = 2'-O-methyladenosine
  modified_base 14: mod_base = OTHER; note = 2'-fluoroguanosine
  modified_base 15: mod_base = OTHER; note = 2'-O-methyladenosine
  modified_base 16: mod_base = OTHER; note = 2'-fluorocytidine
  modified_base 17: mod_base = OTHER; note = 2'-O-methylguanosine
  modified_base 18: mod_base = OTHER; note = 2'-fluorouridine
  modified_base 19: mod_base = OTHER; note = 2'-O-methylguanosine
  modified_base 20: mod_base = OTHER; note = 2'-fluorouridine
  modified_base 21: mod_base = OTHER; note = 2'-O-methyluridine with phosphorothioate linkage
  modified_base 22: mod_base = OTHER; note = 2'-O-methylcytidine with phosphorothioate linkage
  modified_base 23: mod_base = OTHER; note = 2'-O-methylcytidine
tagcggtgggctagacgtgttcc

SEQ ID NO: 1080 - RNA, 23 nt, synthetic construct
  source 1..23: mol_type = other RNA
  modified_base 1: mod_base = OTHER; note = 5'-(E)-vinylphosphonate 2'-O-methylated adenosine with phosphorothioate linkage
  modified_base 2: mod_base = OTHER; note = 2'-fluorocytidine with phosphorothioate linkage
  modified_base 3: mod_base = OTHER; note = 2'-O-methylguanosine
  modified_base 4: mod_base = OTHER; note = 2'-fluorouridine
  modified_base 5: mod_base = OTHER; note = 2'-O-methylcytidine
  modified_base 6: mod_base = OTHER; note = 2'-fluoroadenosine
  modified_base 7: mod_base = OTHER; note = 2'-O-methylguanosine
  modified_base 8: mod_base = OTHER; note = 2'-fluoroguanosine
  modified_base 9: mod_base = OTHER; note = 2'-O-methyladenosine
  modified_base 10: mod_base = OTHER; note = 2'-fluoroguanosine
  modified_base 11: mod_base = OTHER; note = 2'-O-methyluridine
  modified_base 12: mod_base = OTHER; note = 2'-fluorocytidine
  modified_base 13: mod_base = OTHER; note = 2'-O-methyluridine
  modified_base 14: mod_base = OTHER; note = 2'-fluoroguanosine
  modified_base 15: mod_base = OTHER; note = 2'-O-methylguanosine
  modified_base 16: mod_base = OTHER; note = 2'-fluoroadenosine
  modified_base 17: mod_base = OTHER; note = 2'-O-methyluridine
  modified_base 18: mod_base = OTHER; note = 2'-fluoroguanosine
  modified_base 19: mod_base = OTHER; note = 2'-O-methylguanosine
  modified_base 20: mod_base = OTHER; note = 2'-fluoroadenosine
  modified_base 21: mod_base = OTHER; note = 2'-O-methylcytidine with phosphorothioate linkage
  modified_base 22: mod_base = OTHER; note = 2'-O-methyladenosine with phosphorothioate linkage
  modified_base 23: mod_base = OTHER; note = 2'-O-methylguanosine
acgtcaggagtctggatggacag

SEQ ID NO: 1081 - RNA, 23 nt, synthetic construct
  source 1..23: mol_type = other RNA
  modified_base 1: mod_base = OTHER; note = 5'-(E)-vinylphosphonate 2'-O-methylated uridine with phosphorothioate linkage
  modified_base 2: mod_base = OTHER; note = 2'-fluorocytidine with phosphorothioate linkage
  modified_base 3: mod_base = OTHER; note = 2'-O-methylguanosine
  modified_base 4: mod_base = OTHER; note = 2'-fluoroadenosine
  modified_base 5: mod_base = OTHER; note = 2'-O-methylguanosine
  modified_base 6: mod_base = OTHER; note = 2'-fluoroadenosine
  modified_base 7: mod_base = OTHER; note = 2'-O-methyluridine
  modified_base 8: mod_base = OTHER; note = 2'-fluorocytidine
  modified_base 9: mod_base = OTHER; note = 2'-O-methylcytidine
  modified_base 10: mod_base = OTHER; note = 2'-fluorocytidine
  modified_base 11: mod_base = OTHER; note = 2'-O-methyluridine
  modified_base 12: mod_base = OTHER; note = 2'-fluorocytidine
  modified_base 13: mod_base = OTHER; note = 2'-O-methylcytidine
  modified_base 14: mod_base = OTHER; note = 2'-fluoroguanosine
  modified_base 15: mod_base = OTHER; note = 2'-O-methyluridine
  modified_base 16: mod_base = OTHER; note = 2'-fluorocytidine
  modified_base 17: mod_base = OTHER; note = 2'-O-methylcytidine
  modified_base 18: mod_base = OTHER; note = 2'-fluoroadenosine
  modified_base 19: mod_base = OTHER; note = 2'-O-methylguanosine
  modified_base 20: mod_base = OTHER; note = 2'-fluorocytidine
  modified_base 21: mod_base = OTHER; note = 2'-O-methyluridine with phosphorothioate linkage
  modified_base 22: mod_base = OTHER; note = 2'-O-methylcytidine with phosphorothioate linkage
  modified_base 23: mod_base = OTHER; note = 2'-O-methylcytidine
tcgagatccctccgtccagctcc

SEQ ID NO: 1082 - RNA, 23 nt, synthetic construct
  source 1..23: mol_type = other RNA
  modified_base 1: mod_base = OTHER; note = 5'-(E)-vinylphosphonate 2'-O-methylated uridine with phosphorothioate linkage
  modified_base 2: mod_base = OTHER; note = 2'-fluorocytidine with phosphorothioate linkage
  modified_base 3: mod_base = OTHER; note = 2'-O-methyluridine
  modified_base 4: mod_base = OTHER; note = 2'-fluorocytidine
  modified_base 5: mod_base = OTHER; note = 2'-O-methylguanosine
  modified_base 6: mod_base = OTHER; note = 2'-fluoroadenosine
  modified_base 7: mod_base = OTHER; note = 2'-O-methylguanosine
  modified_base 8: mod_base = OTHER; note = 2'-fluorocytidine
  modified_base 9: mod_base = OTHER; note = 2'-O-methyluridine
  modified_base 10: mod_base = OTHER; note = 2'-fluorouridine
  modified_base 11: mod_base = OTHER; note = 2'-O-methylguanosine
  modified_base 12: mod_base = OTHER; note = 2'-fluoroadenosine
  modified_base 13: mod_base = OTHER; note = 2'-O-methyluridine
  modified_base 14: mod_base = OTHER; note = 2'-fluoroguanosine
  modified_base 15: mod_base = OTHER; note = 2'-O-methylcytidine
  modified_base 16: mod_base = OTHER; note = 2'-fluoroguanosine
  modified_base 17: mod_base = OTHER; note = 2'-O-methylcytidine
  modified_base 18: mod_base = OTHER; note = 2'-fluorouridine
  modified_base 19: mod_base = OTHER; note = 2'-O-methyluridine
  modified_base 20: mod_base = OTHER; note = 2'-fluoroadenosine
  modified_base 21: mod_base = OTHER; note = 2'-O-methylguanosine with phosphorothioate linkage
  modified_base 22: mod_base = OTHER; note = 2'-O-methyladenosine with phosphorothioate linkage
  modified_base 23: mod_base = OTHER; note = 2'-O-methylguanosine
tctcgagcttgatgcgcttagag

SEQ ID NO: 1083 - RNA, 23 nt, synthetic construct
  source 1..23: mol_type = other RNA
  modified_base 1: mod_base = OTHER; note = 5'-(E)-vinylphosphonate 2'-O-methylated uridine with phosphorothioate linkage
  modified_base 2: mod_base = OTHER; note = 2'-fluoroguanosine with phosphorothioate linkage
  modified_base 3: mod_base = OTHER; note = 2'-O-methylguanosine
  modified_base 4: mod_base = OTHER; note = 2'-fluorocytidine
  modified_base 5: mod_base = OTHER; note = 2'-O-methylguanosine
  modified_base 6: mod_base = OTHER; note = 2'-fluorouridine
  modified_base 7: mod_base = OTHER; note = 2'-O-methylguanosine
  modified_base 8: mod_base = OTHER; note = 2'-fluoroadenosine
  modified_base 9: mod_base = OTHER; note = 2'-O-methylcytidine
  modified_base 10: mod_base = OTHER; note = 2'-fluorocytidine
  modified_base 11: mod_base = OTHER; note = 2'-O-methyluridine
  modified_base 12: mod_base = OTHER; note = 2'-fluoroguanosine
  modified_base 13: mod_base = OTHER; note = 2'-O-methylguanosine
  modified_base 14: mod_base = OTHER; note = 2'-fluoroadenosine
  modified_base 15: mod_base = OTHER; note = 2'-O-methyluridine
  modified_base 16: mod_base = OTHER; note = 2'-fluoroguanosine
  modified_base 17: mod_base = OTHER; note = 2'-O-methylcytidine
  modified_base 18: mod_base = OTHER; note = 2'-fluorocytidine
  modified_base 19: mod_base = OTHER; note = 2'-O-methyladenosine
  modified_base 20: mod_base = OTHER; note = 2'-fluoroadenosine
  modified_base 21: mod_base = OTHER; note = 2'-O-methylcytidine with phosphorothioate linkage
  modified_base 22: mod_base = OTHER; note = 2'-O-methylcytidine with phosphorothioate linkage
  modified_base 23: mod_base = OTHER; note = 2'-O-methyluridine
tggcgtgacctggatgccaacct

SEQ ID NO: 1084 - RNA, 23 nt, synthetic construct
  source 1..23: mol_type = other RNA
  modified_base 1: mod_base = OTHER; note = 5'-(E)-vinylphosphonate 2'-O-methylated guanosine with phosphorothioate linkage
  modified_base 2: mod_base = OTHER; note = 2'-fluoroadenosine with phosphorothioate linkage
  modified_base 3: mod_base = OTHER; note = 2'-O-methyladenosine
  modified_base 4: mod_base = OTHER; note = 2'-fluoroguanosine
  modified_base 5: mod_base = OTHER; note = 2'-O-methylguanosine
  modified_base 6: mod_base = OTHER; note = 2'-fluoroguanosine
  modified_base 7: mod_base = OTHER; note = 2'-O-methylcytidine
  modified_base 8: mod_base = OTHER; note = 2'-fluoroguanosine
  modified_base 9: mod_base = OTHER; note = 2'-O-methylguanosine
  modified_base 10: mod_base = OTHER; note = 2'-fluorocytidine
  modified_base 11: mod_base = OTHER; note = 2'-O-methyluridine
  modified_base 12: mod_base = OTHER; note = 2'-fluorouridine
  modified_base 13: mod_base = OTHER; note = 2'-O-methylguanosine
  modified_base 14: mod_base = OTHER; note = 2'-fluorocytidine
  modified_base 15: mod_base = OTHER; note = 2'-O-methyluridine
  modified_base 16: mod_base = OTHER; note = 2'-fluoroadenosine
  modified_base 17: mod_base = OTHER; note = 2'-O-methylcytidine
  modified_base 18: mod_base = OTHER; note = 2'-fluorocytidine
  modified_base 19: mod_base = OTHER; note = 2'-O-methyluridine
  modified_base 20: mod_base = OTHER; note = 2'-fluoroguanosine
  modified_base 21: mod_base = OTHER; note = 2'-O-methylguanosine with phosphorothioate linkage
  modified_base 22: mod_base = OTHER; note = 2'-O-methylcytidine with phosphorothioate linkage
  modified_base 23: mod_base = OTHER; note = 2'-O-methyluridine
gaagggcggcttgctacctggct

SEQ ID NO: 1085 - RNA, 23 nt, synthetic construct
  source 1..23: mol_type = other RNA
  modified_base 1: mod_base = OTHER; note = 5'-(E)-vinylphosphonate 2'-O-methylated adenosine with phosphorothioate linkage
  modified_base 2: mod_base = OTHER; note = 2'-fluorouridine with phosphorothioate linkage
  modified_base 3: mod_base = OTHER; note = 2'-O-methyladenosine
  modified_base 4: mod_base = OTHER; note = 2'-fluorouridine
  modified_base 5: mod_base = OTHER; note = 2'-O-methylguanosine
  modified_base 6: mod_base = OTHER; note = 2'-fluoroadenosine
  modified_base 7: mod_base = OTHER; note = 2'-O-methyladenosine
  modified_base 8: mod_base = OTHER; note = 2'-fluorouridine
  modified_base 9: mod_base = OTHER; note = 2'-O-methylcytidine
  modified_base 10: mod_base = OTHER; note = 2'-fluorocytidine
  modified_base 11: mod_base = OTHER; note = 2'-O-methylcytidine
  modified_base 12: mod_base = OTHER; note = 2'-fluoroadenosine
  modified_base 13: mod_base = OTHER; note = 2'-O-methyluridine
  modified_base 14: mod_base = OTHER; note = 2'-fluoroguanosine
  modified_base 15: mod_base = OTHER; note = 2'-O-methylguanosine
  modified_base 16: mod_base = OTHER; note = 2'-fluoroadenosine
  modified_base 17: mod_base = OTHER; note = 2'-O-methylguanosine
  modified_base 18: mod_base = OTHER; note = 2'-fluoroadenosine
  modified_base 19: mod_base = OTHER; note = 2'-O-methylguanosine
  modified_base 20: mod_base = OTHER; note = 2'-fluoroguanosine
  modified_base 21: mod_base = OTHER; note = 2'-O-methyluridine with phosphorothioate linkage
  modified_base 22: mod_base = OTHER; note = 2'-O-methylguanosine with phosphorothioate linkage
  modified_base 23: mod_base = OTHER; note = 2'-O-methylguanosine
atatgaatcccatggagaggtgg

SEQ ID NO: 1086 - RNA, 23 nt, synthetic construct
  source 1..23: mol_type = other RNA
  modified_base 1: mod_base = OTHER; note = 5'-(E)-vinylphosphonate 2'-O-methylated guanosine with phosphorothioate linkage
  modified_base 2: mod_base = OTHER; note = 2'-fluoroguanosine with phosphorothioate linkage
  modified_base 3: mod_base = OTHER; note = 2'-O-methylcytidine
  modified_base 4: mod_base = OTHER; note = 2'-fluoroguanosine
  modified_base 5: mod_base = OTHER; note = 2'-O-methylguanosine
  modified_base 6: mod_base = OTHER; note = 2'-fluorocytidine
  modified_base 7: mod_base = OTHER; note = 2'-O-methyluridine
  modified_base 8: mod_base = OTHER; note = 2'-fluorouridine
  modified_base 9: mod_base = OTHER; note = 2'-O-methylguanosine
  modified_base 10: mod_base = OTHER; note = 2'-fluorocytidine
  modified_base 11: mod_base = OTHER; note = 2'-O-methyluridine
  modified_base 12: mod_base = OTHER; note = 2'-fluoroadenosine
  modified_base 13: mod_base = OTHER; note = 2'-O-methylcytidine
  modified_base 14: mod_base = OTHER; note = 2'-fluorocytidine
  modified_base 15: mod_base = OTHER; note = 2'-O-methyluridine
  modified_base 16: mod_base = OTHER; note = 2'-fluoroguanosine
  modified_base 17: mod_base = OTHER; note = 2'-O-methylguanosine
  modified_base 18: mod_base = OTHER; note = 2'-fluorocytidine
  modified_base 19: mod_base = OTHER; note = 2'-O-methyluridine
  modified_base 20: mod_base = OTHER; note = 2'-fluoroguanosine
  modified_base 21: mod_base = OTHER; note = 2'-O-methylguanosine with phosphorothioate linkage
  modified_base 22: mod_base = OTHER; note = 2'-O-methyladenosine with phosphorothioate linkage
  modified_base 23: mod_base = OTHER; note = 2'-O-methyladenosine
ggcggcttgctacctggctggaa

SEQ ID NO: 1087 - RNA, 23 nt, synthetic construct
  source 1..23: mol_type = other RNA
  modified_base 1: mod_base = OTHER; note = 5'-(E)-vinylphosphonate 2'-O-methylated guanosine with phosphorothioate linkage
  modified_base 2: mod_base = OTHER; note = 2'-fluorouridine with phosphorothioate linkage
  modified_base 3: mod_base = OTHER; note = 2'-O-methylcytidine
  modified_base 4: mod_base = OTHER; note = 2'-fluorouridine
  modified_base 5: mod_base = OTHER; note = 2'-O-methyluridine
  modified_base 6: mod_base = OTHER; note = 2'-fluorocytidine
  modified_base 7: mod_base = OTHER; note = 2'-O-methylguanosine
  modified_base 8: mod_base = OTHER; note = 2'-fluorouridine
  modified_base 9: mod_base = OTHER; note = 2'-O-methylcytidine
  modified_base 10: mod_base = OTHER; note = 2'-fluoroguanosine
  modified_base 11: mod_base = OTHER; note = 2'-O-methylcytidine
  modified_base 12: mod_base = OTHER; note = 2'-fluoroadenosine
  modified_base 13: mod_base = OTHER; note = 2'-O-methyladenosine
  modified_base 14: mod_base = OTHER; note = 2'-fluoroguanosine
  modified_base 15: mod_base = OTHER; note = 2'-O-methyluridine
  modified_base 16: mod_base = OTHER; note = 2'-fluoroguanosine
  modified_base 17: mod_base = OTHER; note = 2'-O-methyluridine
  modified_base 18: mod_base = OTHER; note = 2'-fluorocytidine
  modified_base 19: mod_base = OTHER; note = 2'-O-methylcytidine
  modified_base 20: mod_base = OTHER; note = 2'-fluorocytidine
  modified_base 21: mod_base = OTHER; note = 2'-O-methyluridine with phosphorothioate linkage
  modified_base 22: mod_base = OTHER; note = 2'-O-methylguanosine with phosphorothioate linkage
  modified_base 23: mod_base = OTHER; note = 2'-O-methyluridine
gtcttcgtcgcaagtgtccctgt

SEQ ID NO: 1088 - RNA, 23 nt, synthetic construct
  source 1..23: mol_type = other RNA
  modified_base 1: mod_base = OTHER; note = 5'-(E)-vinylphosphonate 2'-O-methylated guanosine with phosphorothioate linkage
  modified_base 2: mod_base = OTHER; note = 2'-fluoroguanosine with phosphorothioate linkage
  modified_base 3: mod_base = OTHER; note = 2'-O-methyluridine
  modified_base 4: mod_base = OTHER; note = 2'-fluorocytidine
  modified_base 5: mod_base = OTHER; note = 2'-O-methylguanosine
  modified_base 6: mod_base = OTHER; note = 2'-fluorocytidine
  modified_base 7: mod_base = OTHER; note = 2'-O-methyladenosine
  modified_base 8: mod_base = OTHER; note = 2'-fluorocytidine
  modified_base 9: mod_base = OTHER; note = 2'-O-methyladenosine
  modified_base 10: mod_base = OTHER; note = 2'-fluoroguanosine
  modified_base 11: mod_base = OTHER; note = 2'-O-methylguanosine
  modified_base 12: mod_base = OTHER; note = 2'-fluorouridine
  modified_base 13: mod_base = OTHER; note = 2'-O-methyluridine
  modified_base 14: mod_base = OTHER; note = 2'-fluoroguanosine
  modified_base 15: mod_base = OTHER; note = 2'-O-methylcytidine
  modified_base 16: mod_base = OTHER; note = 2'-fluoroadenosine
  modified_base 17: mod_base = OTHER; note = 2'-O-methylcytidine
  modified_base 18: mod_base = OTHER; note = 2'-fluorouridine
  modified_base 19: mod_base = OTHER; note = 2'-O-methyluridine
  modified_base 20: mod_base = OTHER; note = 2'-fluoroguanosine
  modified_base 21: mod_base = OTHER; note = 2'-O-methyluridine with phosphorothioate linkage
  modified_base 22: mod_base = OTHER; note = 2'-O-methyladenosine with phosphorothioate linkage
  modified_base 23: mod_base = OTHER; note = 2'-O-methylguanosine
ggtcgcacaggttgcacttgtag

SEQ ID NO: 1089 - RNA, 23 nt, synthetic construct
  source 1..23: mol_type = other RNA
  modified_base 1: mod_base = OTHER; note = 5'-(E)-vinylphosphonate 2'-O-methylated uridine with phosphorothioate linkage
  modified_base 2: mod_base = OTHER; note = 2'-fluorocytidine with phosphorothioate linkage
  modified_base 3: mod_base = OTHER; note = 2'-O-methylcytidine
  modified_base 4: mod_base = OTHER; note = 2'-fluoroguanosine
  modified_base 5: mod_base = OTHER; note = 2'-O-methyladenosine
  modified_base 6: mod_base = OTHER; note = 2'-fluoroguanosine
  modified_base 7: mod_base = OTHER; note = 2'-O-methyladenosine
  modified_base 8: mod_base = OTHER; note = 2'-fluorouridine
  modified_base 9: mod_base = OTHER; note = 2'-O-methylcytidine
  modified_base 10: mod_base = OTHER; note = 2'-fluorocytidine
  modified_base 11: mod_base = OTHER; note = 2'-O-methylcytidine
  modified_base 12: mod_base = OTHER; note = 2'-fluorouridine
  modified_base 13: mod_base = OTHER; note = 2'-O-methylcytidine
  modified_base 14: mod_base = OTHER; note = 2'-fluorocytidine
  modified_base 15: mod_base = OTHER; note = 2'-O-methylguanosine
  modified_base 16: mod_base = OTHER; note = 2'-fluorouridine
  modified_base 17: mod_base = OTHER; note = 2'-O-methylcytidine
  modified_base 18: mod_base = OTHER; note = 2'-fluorocytidine
  modified_base 19: mod_base = OTHER; note = 2'-O-methyladenosine
  modified_base 20: mod_base = OTHER; note = 2'-fluoroguanosine
  modified_base 21: mod_base = OTHER; note = 2'-O-methylcytidine with phosphorothioate linkage
  modified_base 22: mod_base = OTHER; note = 2'-O-methyluridine with phosphorothioate linkage
  modified_base 23: mod_base = OTHER; note = 2'-O-methylcytidine
tccgagatccctccgtccagctc

SEQ ID NO: 1090 - RNA, 23 nt, synthetic construct
  source 1..23: mol_type = other RNA
  modified_base 1: mod_base = OTHER; note = 5'-(E)-vinylphosphonate 2'-O-methylated adenosine with phosphorothioate linkage
  modified_base 2: mod_base = OTHER; note = 2'-fluorocytidine with phosphorothioate linkage
  modified_base 3: mod_base = OTHER; note = 2'-O-methylcytidine
  modified_base 4: mod_base = OTHER; note = 2'-fluoroadenosine
  modified_base 5: mod_base = OTHER; note = 2'-O-methylguanosine
  modified_base 6: mod_base = OTHER; note = 2'-fluoroguanosine
  modified_base 7: mod_base = OTHER; note = 2'-O-methyluridine
  modified_base 8: mod_base = OTHER; note = 2'-fluorouridine
  modified_base 9: mod_base = OTHER; note = 2'-O-methylguanosine
  modified_base 10: mod_base = OTHER; note = 2'-fluorocytidine
  modified_base 11: mod_base = OTHER; note = 2'-O-methyluridine
  modified_base 12: mod_base = OTHER; note = 2'-fluorocytidine
  modified_base 13: mod_base = OTHER; note = 2'-O-methyluridine
  modified_base 14: mod_base = OTHER; note = 2'-fluoroguanosine
  modified_base 15: mod_base = OTHER; note = 2'-O-methyladenosine
  modified_base 16: mod_base = OTHER; note = 2'-fluoroadenosine
  modified_base 17: mod_base = OTHER; note = 2'-O-methyladenosine
  modified_base 18: mod_base = OTHER; note = 2'-fluorouridine
  modified_base 19: mod_base = OTHER; note = 2'-O-methyluridine
  modified_base 20: mod_base = OTHER; note = 2'-fluorouridine
  modified_base 21: mod_base = OTHER; note = 2'-O-methylguanosine with phosphorothioate linkage
  modified_base 22: mod_base = OTHER; note = 2'-O-methyladenosine with phosphorothioate linkage
  modified_base 23: mod_base = OTHER; note = 2'-O-methyladenosine
accaggttgctctgaaatttgaa

SEQ ID NO: 1091 - RNA, 23 nt, synthetic construct
  source 1..23: mol_type = other RNA
  modified_base 1: mod_base = OTHER; note = 5'-(E)-vinylphosphonate 2'-O-methylated guanosine with phosphorothioate linkage
  modified_base 2: mod_base = OTHER; note = 2'-fluorouridine with phosphorothioate linkage
  modified_base 3: mod_base = OTHER; note = 2'-O-methylcytidine
  modified_base 4: mod_base = OTHER; note = 2'-fluoroadenosine
  modified_base 5: mod_base = OTHER; note = 2'-O-methylguanosine
  modified_base 6: mod_base = OTHER; note = 2'-fluoroguanosine
  modified_base 7: mod_base = OTHER; note = 2'-O-methyladenosine
  modified_base 8: mod_base = OTHER; note = 2'-fluoroguanosine
  modified_base 9: mod_base = OTHER; note = 2'-O-methyluridine
  modified_base 10: mod_base = OTHER; note = 2'-fluorocytidine
  modified_base 11: mod_base = OTHER; note = 2'-O-methyluridine
  modified_base 12: mod_base = OTHER; note = 2'-fluoroguanosine
  modified_base 13: mod_base = OTHER; note = 2'-O-methylguanosine
  modified_base 14: mod_base = OTHER; note = 2'-fluoroadenosine
  modified_base 15: mod_base = OTHER; note = 2'-O-methyluridine
  modified_base 16: mod_base = OTHER; note = 2'-fluoroguanosine
  modified_base 17: mod_base = OTHER; note = 2'-O-methylguanosine
  modified_base 18: mod_base = OTHER; note = 2'-fluoroadenosine
  modified_base 19: mod_base = OTHER; note = 2'-O-methylcytidine
  modified_base 20: mod_base = OTHER; note = 2'-fluoroadenosine
  modified_base 21: mod_base = OTHER; note = 2'-O-methylguanosine with phosphorothioate linkage
  modified_base 22: mod_base = OTHER; note = 2'-O-methyladenosine with phosphorothioate linkage
  modified_base 23: mod_base = OTHER; note = 2'-O-methylguanosine
gtcaggagtctggatggacagag

SEQ ID NO: 1092 - RNA, 23 nt, synthetic construct
  source 1..23: mol_type = other RNA
  modified_base 1: mod_base = OTHER; note = 5'-(E)-vinylphosphonate 2'-O-methylated guanosine with phosphorothioate linkage
  modified_base 2: mod_base = OTHER; note = 2'-fluoroguanosine with phosphorothioate linkage
  modified_base 3: mod_base = OTHER; note = 2'-O-methyladenosine
  modified_base 4: mod_base = OTHER; note = 2'-fluorouridine
  modified_base 5: mod_base = OTHER; note = 2'-O-methylguanosine
  modified_base 6: mod_base = OTHER; note = 2'-fluorocytidine
  modified_base 7: mod_base = OTHER; note = 2'-O-methylcytidine
  modified_base 8: mod_base = OTHER; note = 2'-fluoroadenosine
  modified_base 9: mod_base = OTHER; note = 2'-O-methyladenosine
  modified_base 10: mod_base = OTHER; note = 2'-fluorocytidine
  modified_base 11: mod_base = OTHER; note = 2'-O-methylcytidine
  modified_base 12: mod_base = OTHER; note = 2'-fluorouridine
  modified_base 13: mod_base = OTHER; note = 2'-O-methylcytidine
  modified_base 14: mod_base = OTHER; note = 2'-fluorocytidine
  modified_base 15: mod_base = OTHER; note = 2'-O-methyladenosine
  modified_base 16: mod_base = OTHER; note = 2'-fluorocytidine
  modified_base 17: mod_base = OTHER; note = 2'-O-methylguanosine
  modified_base 18: mod_base = OTHER; note = 2'-fluoroguanosine
  modified_base 19: mod_base = OTHER; note = 2'-O-methylguanosine
  modified_base 20: mod_base = OTHER; note = 2'-fluoroadenosine
  modified_base 21: mod_base = OTHER; note = 2'-O-methyluridine with phosphorothioate linkage
  modified_base 22: mod_base = OTHER; note = 2'-O-methyluridine with phosphorothioate linkage
  modified_base 23: mod_base = OTHER; note = 2'-O-methylguanosine
ggatgccaacctccacgggattg

SEQ ID NO: 1093 - RNA, 23 nt, synthetic construct
  source 1..23: mol_type = other RNA
  modified_base 1: mod_base = OTHER; note = 5'-(E)-vinylphosphonate 2'-O-methylated guanosine with phosphorothioate linkage
  modified_base 2: mod_base = OTHER; note = 2'-fluorocytidine with phosphorothioate linkage
  modified_base 3: mod_base = OTHER; note = 2'-O-methyluridine
  modified_base 4: mod_base = OTHER; note = 2'-fluorouridine
  modified_base 5: mod_base = OTHER; note = 2'-O-methyladenosine
  modified_base 6: mod_base = OTHER; note = 2'-fluorouridine
  modified_base 7: mod_base = OTHER; note = 2'-O-methylguanosine
  modified_base 8: mod_base = OTHER; note = 2'-fluorocytidine
  modified_base 9: mod_base = OTHER; note = 2'-O-methyluridine
  modified_base 10: mod_base = OTHER; note = 2'-fluorouridine
  modified_base 11: mod_base = OTHER; note = 2'-O-methylcytidine
  modified_base 12: mod_base = OTHER; note = 2'-fluorouridine
  modified_base 13: mod_base = OTHER; note = 2'-O-methylcytidine
  modified_base 14: mod_base = OTHER; note = 2'-fluoroguanosine
  modified_base 15: mod_base = OTHER; note = 2'-O-methylcytidine
  modified_base 16: mod_base = OTHER; note = 2'-fluorocytidine
  modified_base 17: mod_base = OTHER; note = 2'-O-methylcytidine
  modified_base 18: mod_base = OTHER; note = 2'-fluoroadenosine
  modified_base 19: mod_base = OTHER; note = 2'-O-methylguanosine
  modified_base 20: mod_base = OTHER; note = 2'-fluoroguanosine
  modified_base 21: mod_base = OTHER; note = 2'-O-methyladenosine with phosphorothioate linkage
  modified_base 22: mod_base = OTHER; note = 2'-O-methylcytidine with phosphorothioate linkage
  modified_base 23: mod_base = OTHER; note = 2'-O-methylcytidine
gcttatgcttctcgcccaggacc

SEQ ID NO: 1094 - RNA, 23 nt, synthetic construct
  source 1..23: mol_type = other RNA
  modified_base 1: mod_base = OTHER; note = 5'-(E)-vinylphosphonate 2'-O-methylated uridine with phosphorothioate linkage
  modified_base 2: mod_base = OTHER; note = 2'-fluoroguanosine with phosphorothioate linkage
  modified_base 3: mod_base = OTHER; note = 2'-O-methyluridine
  modified_base 4: mod_base = OTHER; note = 2'-fluorocytidine
  modified_base 5: mod_base = OTHER; note = 2'-O-methyluridine
  modified_base 6: mod_base = OTHER; note = 2'-fluoroguanosine
  modified_base 7: mod_base = OTHER; note = 2'-O-methylguanosine
  modified_base 8: mod_base = OTHER; note = 2'-fluoroadenosine
  modified_base 9: mod_base = OTHER; note = 2'-O-methylguanosine
  modified_base 10: mod_base = OTHER; note = 2'-fluorouridine
  modified_base 11: mod_base = OTHER; note = 2'-O-methylcytidine
  modified_base 12: mod_base = OTHER; note = 2'-fluorouridine
  modified_base 13: mod_base = OTHER; note = 2'-O-methylcytidine
  modified_base 14: mod_base = OTHER; note = 2'-fluorocytidine
  modified_base 15: mod_base = OTHER; note = 2'-O-methylguanosine
  modified_base 16: mod_base = OTHER; note = 2'-fluoroadenosine
  modified_base 17: mod_base = OTHER; note = 2'-O-methyladenosine
  modified_base 18: mod_base = OTHER; note = 2'-fluoroguanosine
  modified_base 19: mod_base = OTHER; note = 2'-O-methylcytidine
  modified_base 20: mod_base = OTHER; note = 2'-fluorouridine
  modified_base 21: mod_base = OTHER; note = 2'-O-methyladenosine with phosphorothioate linkage
  modified_base 22: mod_base = OTHER; note = 2'-O-methyladenosine with phosphorothioate linkage
  modified_base 23: mod_base = OTHER; note = 2'-O-methylguanosine
tgtctggagtctccgaagctaag

SEQ ID NO: 1095 - RNA, 23 nt, synthetic construct
  source 1..23: mol_type = other RNA
  modified_base 1: mod_base = OTHER; note = 5'-(E)-vinylphosphonate 2'-O-methylated guanosine with phosphorothioate linkage
  modified_base 2: mod_base = OTHER; note = 2'-fluoroguanosine with phosphorothioate linkage
  modified_base 3: mod_base = OTHER; note = 2'-O-methylcytidine
  modified_base 4: mod_base = OTHER; note = 2'-fluorocytidine
  modified_base 5: mod_base = OTHER; note = 2'-O-methylguanosine
  modified_base 6: mod_base = OTHER; note = 2'-fluoroguanosine
  modified_base 7: mod_base = OTHER; note = 2'-O-methyladenosine
  modified_base 8: mod_base = OTHER; note = 2'-fluoroadenosine
  modified_base 9: mod_base = OTHER; note = 2'-O-methylguanosine
  modified_base 10: mod_base = OTHER; note = 2'-fluorocytidine
  modified_base 11: mod_base = OTHER; note = 2'-O-methylcytidine
  modified_base 12: mod_base = OTHER; note = 2'-fluorouridine
  modified_base 13: mod_base = OTHER; note = 2'-O-methylcytidine
  modified_base 14: mod_base = OTHER; note = 2'-fluorouridine
  modified_base 15: mod_base = OTHER; note = 2'-O-methylcytidine
  modified_base 16: mod_base = OTHER; note = 2'-fluorouridine
  modified_base 17: mod_base = OTHER; note = 2'-O-methylcytidine
  modified_base 18: mod_base = OTHER; note = 2'-fluoroguanosine
  modified_base 19: mod_base = OTHER; note = 2'-O-methyladenosine
  modified_base 20: mod_base = OTHER; note = 2'-fluorouridine
  modified_base 21: mod_base = OTHER; note = 2'-O-methyladenosine with phosphorothioate linkage
  modified_base 22: mod_base = OTHER; note = 2'-O-methylcytidine with phosphorothioate linkage
  modified_base 23: mod_base = OTHER; note = 2'-O-methyluridine
ggccggaagcctctctcgatact

SEQ ID NO: 1096 - RNA, 23 nt, synthetic construct
  source 1..23: mol_type = other RNA
  modified_base 1: mod_base = OTHER; note = 5'-(E)-vinylphosphonate 2'-O-methylated uridine with phosphorothioate linkage
  modified_base 2: mod_base = OTHER; note = 2'-fluorocytidine with phosphorothioate linkage
  modified_base 3: mod_base = OTHER; note = 2'-O-methyladenosine
  modified_base 4: mod_base = OTHER; note = 2'-fluorouridine
  modified_base 5: mod_base = OTHER; note = 2'-O-methylguanosine
  modified_base 6: mod_base = OTHER; note = 2'-fluorocytidine
  modified_base 7: mod_base = OTHER; note = 2'-O-methylcytidine
  modified_base 8: mod_base = OTHER; note = 2'-fluorocytidine
  modified_base 9: mod_base = OTHER; note = 2'-O-methyluridine
  modified_base 10: mod_base = OTHER; note = 2'-fluoroguanosine
  modified_base 11: mod_base = OTHER; note = 2'-O-methylcytidine
  modified_base 12: mod_base = OTHER; note = 2'-fluoroadenosine
  modified_base 13: mod_base = OTHER; note = 2'-O-methyluridine
  modified_base 14: mod_base = OTHER; note = 2'-fluoroguanosine
  modified_base 15: mod_base = OTHER; note = 2'-O-methyladenosine
  modified_base 16: mod_base = OTHER; note = 2'-fluorocytidine
  modified_base 17: mod_base = OTHER; note = 2'-O-methylguanosine
  modified_base 18: mod_base = OTHER; note = 2'-fluorouridine
  modified_base 19: mod_base = OTHER; note = 2'-O-methylcytidine
  modified_base 20: mod_base = OTHER; note = 2'-fluoroguanosine
  modified_base 21: mod_base = OTHER; note = 2'-O-methylguanosine with phosphorothioate linkage
  modified_base 22: mod_base = OTHER; note = 2'-O-methylguanosine with phosphorothioate linkage
  modified_base 23: mod_base = OTHER; note = 2'-O-methylcytidine
tcatgccctgcatgacgtcgggc

SEQ ID NO: 1097 - RNA, 23 nt, synthetic construct
  source 1..23: mol_type = other RNA
  modified_base 1: mod_base = OTHER; note = 5'-(E)-vinylphosphonate 2'-O-methylated uridine with phosphorothioate linkage
  modified_base 2: mod_base = OTHER; note = 2'-fluoroguanosine with phosphorothioate linkage
  modified_base 3: mod_base = OTHER; note = 2'-O-methyluridine
  modified_base 4: mod_base = OTHER; note = 2'-fluorocytidine
  modified_base 5: mod_base = OTHER; note = 2'-O-methyladenosine
  modified_base 6: mod_base = OTHER; note = 2'-fluoroguanosine
  modified_base 7: mod_base = OTHER; note = 2'-O-methylguanosine
  modified_base 8: mod_base = OTHER; note = 2'-fluoroadenosine
  modified_base 9: mod_base = OTHER; note = 2'-O-methylguanosine
  modified_base 10: mod_base = OTHER; note = 2'-fluorouridine
  modified_base 11: mod_base = OTHER; note = 2'-O-methylcytidine
  modified_base 12: mod_base = OTHER; note = 2'-fluorouridine
  modified_base 13: mod_base = OTHER; note = 2'-O-methylguanosine
  modified_base 14: mod_base = OTHER; note = 2'-fluoroguanosine
  modified_base 15: mod_base = OTHER; note = 2'-O-methyladenosine
  modified_base 16: mod_base = OTHER; note = 2'-fluorouridine
  modified_base 17: mod_base = OTHER; note = 2'-O-methylguanosine
  modified_base 18: mod_base = OTHER; note = 2'-fluoroguanosine
  modified_base 19: mod_base = OTHER; note = 2'-O-methyladenosine
  modified_base 20: mod_base = OTHER; note = 2'-fluorocytidine
  modified_base 21: mod_base = OTHER; note = 2'-O-methyladenosine with phosphorothioate linkage
  modified_base 22: mod_base = OTHER; note = 2'-O-methylguanosine with phosphorothioate linkage
  modified_base 23: mod_base = OTHER; note = 2'-O-methyladenosine
tgtcaggagtctggatggacaga

SEQ ID NO: 1098 - RNA, 23 nt, synthetic construct
  source 1..23: mol_type = other RNA
  modified_base 1: mod_base = OTHER; note = 5'-(E)-vinylphosphonate 2'-O-methylated uridine with phosphorothioate linkage
  modified_base 2: mod_base = OTHER; note = 2'-fluoroguanosine with phosphorothioate linkage
  modified_base 3: mod_base = OTHER; note = 2'-O-methylcytidine
  modified_base 4: mod_base = OTHER; note = 2'-fluoroadenosine
  modified_base 5: mod_base = OTHER; note = 2'-O-methyladenosine
  modified_base 6: mod_base = OTHER; note = 2'-fluoroguanosine
  modified_base 7: mod_base = OTHER; note = 2'-O-methyluridine
  modified_base 8: mod_base = OTHER; note = 2'-fluoroguanosine
  modified_base 9: mod_base = OTHER; note = 2'-O-methyluridine
  modified_base 10: mod_base = OTHER; note = 2'-fluorocytidine
  modified_base 11: mod_base = OTHER; note = 2'-O-methylcytidine
  modified_base 12: mod_base = OTHER; note = 2'-fluorocytidine
  modified_base 13: mod_base = OTHER; note = 2'-O-methyluridine
  modified_base 14: mod_base = OTHER; note = 2'-fluoroguanosine
  modified_base 15: mod_base = OTHER; note = 2'-O-methyluridine
  modified_base 16: mod_base = OTHER; note = 2'-fluoroguanosine
  modified_base 17: mod_base = OTHER; note = 2'-O-methylguanosine
  modified_base 18: mod_base = OTHER; note = 2'-fluorocytidine
  modified_base 19: mod_base = OTHER; note = 2'-O-methylcytidine
  modified_base 20: mod_base = OTHER; note = 2'-fluorocytidine
  modified_base 21: mod_base = OTHER; note = 2'-O-methyluridine with phosphorothioate linkage
  modified_base 22: mod_base = OTHER; note = 2'-O-methylcytidine with phosphorothioate linkage
  modified_base 23: mod_base = OTHER; note = 2'-O-methylguanosine
tgcaagtgtccctgtggccctcg

SEQ ID NO: 1099 - RNA, 23 nt, synthetic construct
  source 1..23: mol_type = other RNA
  modified_base 1: mod_base = OTHER; note = 5'-(E)-vinylphosphonate 2'-O-methylated uridine with phosphorothioate linkage
  modified_base 2: mod_base = OTHER; note = 2'-fluorocytidine with phosphorothioate linkage
  modified_base 3: mod_base = OTHER; note = 2'-O-methylcytidine
  modified_base 4: mod_base = OTHER; note = 2'-fluoroadenosine
  modified_base 5: mod_base = OTHER; note = 2'-O-methyladenosine
  modified_base 6: mod_base = OTHER; note = 2'-fluorocytidine
  modified_base 7: mod_base = OTHER; note = 2'-O-methylguanosine
  modified_base 8: mod_base = OTHER; note = 2'-fluoroguanosine
  modified_base 9: mod_base = OTHER; note = 2'-O-methylguanosine
  modified_base 10: mod_base = OTHER; note = 2'-fluorocytidine
  modified_base 11: mod_base = OTHER; note = 2'-O-methylcytidine
  modified_base 12: mod_base = OTHER; note = 2'-fluoroguanosine
  modified_base 13: mod_base = OTHER; note = 2'-O-methyluridine
  modified_base 14: mod_base = OTHER; note = 2'-fluoroguanosine
  modified_base 15: mod_base = OTHER; note = 2'-O-methylguanosine
  modified_base 16: mod_base = OTHER; note = 2'-fluorouridine
  modified_base 17: mod_base = OTHER; note = 2'-O-methylcytidine
  modified_base 18: mod_base = OTHER; note = 2'-fluorouridine
  modified_base 19: mod_base = OTHER; note = 2'-O-methylguanosine
  modified_base 20: mod_base = OTHER; note = 2'-fluoroguanosine
  modified_base 21: mod_base = OTHER; note = 2'-O-methyluridine with phosphorothioate linkage
  modified_base 22: mod_base = OTHER; note = 2'-O-methyluridine with phosphorothioate linkage
  modified_base 23: mod_base = OTHER; note = 2'-O-methylcytidine
tccaacgggccgtggtctggttc

SEQ ID NO: 1100 - RNA, 23 nt, synthetic construct
  source 1..23: mol_type = other RNA
  modified_base 1: mod_base = OTHER; note = 5'-(E)-vinylphosphonate 2'-O-methylated guanosine with phosphorothioate linkage
  modified_base 2: mod_base = OTHER; note = 2'-fluorocytidine with phosphorothioate linkage
  modified_base 3: mod_base = OTHER; note = 2'-O-methylcytidine
  modified_base 4: mod_base = OTHER; note = 2'-fluoroadenosine
  modified_base 5: mod_base = OTHER; note = 2'-O-methylguanosine
  modified_base 6: mod_base = OTHER; note = 2'-fluoroguanosine
  modified_base 7: mod_base = OTHER; note = 2'-O-methyluridine
  modified_base 8: mod_base = OTHER; note = 2'-fluoroguanosine
  modified_base 9: mod_base = OTHER; note = 2'-O-methylguanosine
  modified_base 10: mod_base = OTHER; note = 2'-fluorocytidine
  modified_base 11: mod_base = OTHER; note = 2'-O-methylcytidine
  modified_base 12: mod_base = OTHER; note = 2'-fluoroguanosine
  modified_base 13: mod_base = OTHER; note = 2'-O-methylcytidine
  modified_base 14: mod_base = OTHER; note = 2'-fluoroguanosine
  modified_base 15: mod_base = OTHER; note = 2'-O-methylcytidine
  modified_base 16: mod_base = OTHER; note = 2'-fluorouridine
  modified_base 17: mod_base = OTHER; note = 2'-O-methyluridine
  modified_base 18: mod_base = OTHER; note = 2'-fluoroadenosine
  modified_base 19: mod_base = OTHER; note = 2'-O-methyluridine
  modified_base 20: mod_base = OTHER; note = 2'-fluoroguanosine
  modified_base 21: mod_base = OTHER; note = 2'-O-methylcytidine with phosphorothioate linkage
  modified_base 22: mod_base = OTHER; note = 2'-O-methyluridine with phosphorothioate linkage
  modified_base 23: mod_base = OTHER; note = 2'-O-methyluridine
gccaggtggccgcgcttatgctt

SEQ ID NO: 1101 - RNA, 23 nt, synthetic construct
  source 1..23: mol_type = other RNA
  modified_base 1: mod_base = OTHER; note = 5'-(E)-vinylphosphonate 2'-O-methylated guanosine with phosphorothioate linkage
  modified_base 2: mod_base = OTHER; note = 2'-fluoroguanosine with phosphorothioate linkage
  modified_base 3: mod_base = OTHER; note = 2'-O-methylcytidine
  modified_base 4: mod_base = OTHER; note = 2'-fluoroguanosine
  modified_base 5: mod_base = OTHER; note = 2'-O-methylguanosine
  modified_base 6: mod_base = OTHER; note = 2'-fluoroguanosine
  modified_base 7: mod_base = OTHER; note = 2'-O-methyladenosine
  modified_base 8: mod_base = OTHER; note = 2'-fluoroguanosine
  modified_base 9: mod_base = OTHER; note = 2'-O-methylguanosine
  modified_base 10: mod_base = OTHER; note = 2'-fluorocytidine
  modified_base 11: mod_base = OTHER; note = 2'-O-methyluridine
  modified_base 12: mod_base = OTHER; note = 2'-fluorocytidine
  modified_base 13: mod_base = OTHER; note = 2'-O-methylcytidine
  modified_base 14: mod_base = OTHER; note = 2'-fluoroadenosine
  modified_base 15: mod_base = OTHER; note = 2'-O-methyluridine
  modified_base 16: mod_base = OTHER; note = 2'-fluoroadenosine
  modified_base 17: mod_base = OTHER; note = 2'-O-methylguanosine
  modified_base 18: mod_base = OTHER; note = 2'-fluorocytidine
  modified_base 19: mod_base = OTHER; note = 2'-O-methylcytidine
  modified_base 20: mod_base = OTHER; note = 2'-fluoroadenosine
  modified_base 21: mod_base = OTHER; note = 2'-O-methyluridine with phosphorothioate linkage
  modified_base 22: mod_base = OTHER; note = 2'-O-methyluridine with phosphorothioate linkage
  modified_base 23: mod_base = OTHER; note = 2'-O-methylguanosine
ggcgggaggctccatagccattg

SEQ ID NO: 1102 - RNA, 23 nt, synthetic construct
  source 1..23: mol_type = other RNA
  modified_base 1: mod_base = OTHER; note = 5'-(E)-vinylphosphonate 2'-O-methylated uridine with phosphorothioate linkage
  modified_base 2: mod_base = OTHER; note = 2'-fluorouridine with phosphorothioate linkage
  modified_base 3: mod_base = OTHER; note = 2'-O-methyluridine
  modified_base 4: mod_base = OTHER; note = 2'-fluoroadenosine
  modified_base 5: mod_base = OTHER; note = 2'-O-methyluridine
  modified_base 6: mod_base = OTHER; note = 2'-fluorocytidine
  modified_base 7: mod_base = OTHER; note = 2'-O-methyluridine
  modified_base 8: mod_base = OTHER; note = 2'-fluoroguanosine
  modified_base 9: mod_base = OTHER; note = 2'-O-methylcytidine
  modified_base 10: mod_base = OTHER; note = 2'-fluorouridine
  modified_base 11: mod_base = OTHER; note = 2'-O-methyladenosine
  modified_base 12: mod_base = OTHER; note = 2'-fluorouridine
  modified_base 13: mod_base = OTHER; note = 2'-O-methylguanosine
  modified_base 14: mod_base = OTHER; note = 2'-fluorouridine
  modified_base 15: mod_base = OTHER; note = 2'-O-methylguanosine
  modified_base 16: mod_base = OTHER; note = 2'-fluorouridine
  modified_base 17: mod_base = OTHER; note = 2'-O-methyluridine
  modified_base 18: mod_base = OTHER; note = 2'-fluorocytidine
  modified_base 19: mod_base = OTHER; note = 2'-O-methylcytidine
  modified_base 20: mod_base = OTHER; note = 2'-fluorouridine
  modified_base 21: mod_base = OTHER; note = 2'-O-methylguanosine with phosphorothioate linkage
  modified_base 22: mod_base = OTHER; note = 2'-fluorouridine with phosphorothioate linkage
  modified_base 23: mod_base = OTHER; note = 2'-O-methyluridine
tttatctgctatgtgttcctgtt

SEQ ID NO: 1103 - RNA, 23 nt, synthetic construct
  source 1..23: mol_type = other RNA
  modified_base 1: mod_base = OTHER; note = 5'-(E)-vinylphosphonate 2'-O-methylated guanosine with phosphorothioate linkage
  modified_base 2: mod_base = OTHER; note = 2'-fluorouridine with phosphorothioate linkage
  modified_base 3: mod_base = OTHER; note = 2'-O-methyluridine
  modified_base 4: mod_base = OTHER; note = 2'-fluorouridine
  modified_base 5: mod_base = OTHER; note = 2'-O-methyladenosine
  modified_base 6: mod_base = OTHER; note = 2'-fluorouridine
  modified_base 7: mod_base = OTHER; note = 2'-O-methylcytidine
  modified_base 8: mod_base = OTHER; note = 2'-fluorouridine
  modified_base 9: mod_base = OTHER; note = 2'-O-methylguanosine
  modified_base 10: mod_base = OTHER; note = 2'-fluorocytidine
  modified_base 11: mod_base = OTHER; note = 2'-O-methyluridine
  modified_base 12: mod_base = OTHER; note = 2'-fluoroadenosine
  modified_base 13: mod_base = OTHER; note = 2'-O-methyluridine
  modified_base 14: mod_base = OTHER; note = 2'-fluoroguanosine
  modified_base 15: mod_base = OTHER; note = 2'-O-methyluridine
  modified_base 16: mod_base = OTHER; note = 2'-fluoroguanosine
  modified_base 17: mod_base = OTHER; note = 2'-O-methyluridine
  modified_base 18: mod_base = OTHER; note = 2'-fluorouridine
  modified_base 19: mod_base = OTHER; note = 2'-O-methylcytidine
  modified_base 20: mod_base = OTHER; note = 2'-fluorocytidine
  modified_base 21: mod_base = OTHER; note = 2'-O-methyluridine with phosphorothioate linkage
  modified_base 22: mod_base = OTHER; note = 2'-fluoroguanosine with phosphorothioate linkage
  modified_base 23: mod_base = OTHER; note = 2'-O-methyluridine
gtttatctgctatgtgttcctgt

SEQ ID NO: 1104 - RNA, 23 nt, synthetic construct
  source 1..23: mol_type = other RNA
  modified_base 1: mod_base = OTHER; note = 5'-(E)-vinylphosphonate 2'-O-methylated adenosine with phosphorothioate linkage
  modified_base 2: mod_base = OTHER; note = 2'-fluoroguanosine with phosphorothioate linkage
  modified_base 3: mod_base = OTHER; note = 2'-O-methyluridine
  modified_base 4: mod_base = OTHER; note = 2'-fluorouridine
  modified_base 5: mod_base = OTHER; note = 2'-O-methyluridine
  modified_base 6: mod_base = OTHER; note = 2'-fluoroadenosine
  modified_base 7: mod_base = OTHER; note = 2'-O-methyluridine
  modified_base 8: mod_base = OTHER; note = 2'-fluorocytidine
  modified_base 9: mod_base = OTHER; note = 2'-O-methyluridine
  modified_base 10: mod_base = OTHER; note = 2'-fluoroguanosine
  modified_base 11: mod_base = OTHER; note = 2'-O-methylcytidine
  modified_base 12: mod_base = OTHER; note = 2'-fluorouridine
  modified_base 13: mod_base = OTHER; note = 2'-O-methyladenosine
  modified_base 14: mod_base = OTHER; note = 2'-fluorouridine
  modified_base 15: mod_base = OTHER; note = 2'-O-methylguanosine
  modified_base 16: mod_base = OTHER; note = 2'-fluorouridine
  modified_base 17: mod_base = OTHER; note = 2'-O-methylguanosine
  modified_base 18: mod_base = OTHER; note = 2'-fluorouridine
  modified_base 19: mod_base = OTHER; note = 2'-O-methyluridine
  modified_base 20: mod_base = OTHER; note = 2'-fluorocytidine
  modified_base 21: mod_base = OTHER; note = 2'-O-methylcytidine with phosphorothioate linkage
  modified_base 22: mod_base = OTHER; note = 2'-fluorouridine with phosphorothioate linkage
  modified_base 23: mod_base = OTHER; note = 2'-O-methylguanosine
agtttatctgctatgtgttcctg

SEQ ID NO: 1105 - RNA, 23 nt, synthetic construct
  source 1..23: mol_type = other RNA
  modified_base 1: mod_base = OTHER; note = 5'-(E)-vinylphosphonate 2'-O-methylated adenosine with phosphorothioate linkage
  modified_base 2: mod_base = OTHER; note = 2'-fluoroadenosine with phosphorothioate linkage
  modified_base 3: mod_base = OTHER; note = 2'-O-methylguanosine
  modified_base 4: mod_base = OTHER; note = 2'-fluorouridine
  modified_base 5: mod_base = OTHER; note = 2'-O-methyluridine
  modified_base 6: mod_base = OTHER; note = 2'-fluorouridine
  modified_base 7: mod_base = OTHER; note = 2'-O-methyladenosine
  modified_base 8: mod_base = OTHER; note = 2'-fluorouridine
  modified_base 9: mod_base = OTHER; note = 2'-O-methylcytidine
  modified_base 10: mod_base = OTHER; note = 2'-fluorouridine
  modified_base 11: mod_base = OTHER; note = 2'-O-methylguanosine
  modified_base 12: mod_base = OTHER; note = 2'-fluorocytidine
  modified_base 13: mod_base = OTHER; note = 2'-O-methyluridine
  modified_base 14: mod_base = OTHER; note = 2'-fluoroadenosine
  modified_base 15: mod_base = OTHER; note = 2'-O-methyluridine
  modified_base 16: mod_base = OTHER; note = 2'-fluoroguanosine
  modified_base 17: mod_base = OTHER; note = 2'-O-methyluridine
  modified_base 18: mod_base = OTHER; note = 2'-fluoroguanosine
  modified_base 19: mod_base = OTHER; note = 2'-O-methyluridine
  modified_base 20: mod_base = OTHER; note = 2'-fluorouridine
  modified_base 21: mod_base = OTHER; note = 2'-O-methylcytidine with phosphorothioate linkage
  modified_base 22: mod_base = OTHER; note = 2'-fluorocytidine with phosphorothioate linkage
  modified_base 23: mod_base = OTHER; note = 2'-O-methyluridine
aagtttatctgctatgtgttcct

SEQ ID NO: 1106 - RNA, 23 nt, synthetic construct
  source 1..23: mol_type = other RNA
  modified_base 1: mod_base = OTHER; note = 5'-(E)-vinylphosphonate 2'-O-methylated guanosine with phosphorothioate linkage
  modified_base 2: mod_base = OTHER; note = 2'-fluoroadenosine with phosphorothioate linkage
  modified_base 3: mod_base = OTHER; note = 2'-O-methyladenosine
  modified_base 4: mod_base = OTHER; note = 2'-fluoroguanosine
  modified_base 5: mod_base = OTHER; note = 2'-O-methyluridine
  modified_base 6: mod_base = OTHER; note = 2'-fluorouridine
  modified_base 7: mod_base = OTHER; note = 2'-O-methyluridine
  modified_base 8: mod_base = OTHER; note = 2'-fluoroadenosine
  modified_base 9: mod_base = OTHER; note = 2'-O-methyluridine
  modified_base 10: mod_base = OTHER; note = 2'-fluorocytidine
  modified_base 11: mod_base = OTHER; note = 2'-O-methyluridine
  modified_base 12: mod_base = OTHER; note = 2'-fluoroguanosine
  modified_base 13: mod_base = OTHER; note = 2'-O-methylcytidine
  modified_base 14: mod_base = OTHER; note = 2'-fluorouridine
  modified_base 15: mod_base = OTHER; note = 2'-O-methyladenosine
  modified_base 16: mod_base = OTHER; note = 2'-fluorouridine
  modified_base 17: mod_base = OTHER; note = 2'-O-methylguanosine
  modified_base 18: mod_base = OTHER; note = 2'-fluorouridine
  modified_base 19: mod_base = OTHER; note = 2'-O-methylguanosine
  modified_base 20: mod_base = OTHER; note = 2'-fluorouridine
  modified_base 21: mod_base = OTHER; note = 2'-O-methyluridine with phosphorothioate linkage
  modified_base 22: mod_base = OTHER; note = 2'-fluorocytidine with phosphorothioate linkage
  modified_base 23: mod_base = OTHER; note = 2'-O-methylcytidine
gaagtttatctgctatgtgttcc

SEQ ID NO: 1107 - RNA, 23 nt, synthetic construct
  source 1..23: mol_type = other RNA
  modified_base 1: mod_base = OTHER; note = 5'-(E)-vinylphosphonate 2'-O-methylated uridine with phosphorothioate linkage
  modified_base 2: mod_base = OTHER; note = 2'-fluoroguanosine with phosphorothioate linkage
  modified_base 3: mod_base = OTHER; note = 2'-O-methyluridine
  modified_base 4: mod_base = OTHER; note = 2'-fluoroadenosine
  modified_base 5: mod_base = OTHER; note = 2'-O-methylcytidine
  modified_base 6: mod_base = OTHER; note = 2'-fluoroadenosine
  modified_base 7: mod_base = OTHER; note = 2'-O-methyluridine
  modified_base 8: mod_base = OTHER; note = 2'-fluoroguanosine
  modified_base 9: mod_base = OTHER; note = 2'-O-methyluridine
  modified_base 10: mod_base = OTHER; note = 2'-fluoroguanosine
  modified_base 11: mod_base = OTHER; note = 2'-O-methyluridine
  modified_base 12: mod_base = OTHER; note = 2'-fluoroadenosine
  modified_base 13: mod_base = OTHER; note = 2'-O-methylguanosine
  modified_base 14: mod_base = OTHER; note = 2'-fluorocytidine
  modified_base 15: mod_base = OTHER; note = 2'-O-methyluridine
  modified_base 16: mod_base = OTHER; note = 2'-fluoroguanosine
  modified_base 17: mod_base = OTHER; note = 2'-O-methylcytidine
  modified_base 18: mod_base = OTHER; note = 2'-fluorouridine
  modified_base 19: mod_base = OTHER; note = 2'-O-methylguanosine
  modified_base 20: mod_base = OTHER; note = 2'-fluoroguanosine
  modified_base 21: mod_base = OTHER; note = 2'-O-methylguanosine with phosphorothioate linkage
  modified_base 22: mod_base = OTHER; note = 2'-fluorocytidine with phosphorothioate linkage
  modified_base 23: mod_base = OTHER; note = 2'-O-methyluridine
tgtacatgtgtagctgctgggct

SEQ ID NO: 1108 - RNA, 23 nt, synthetic construct
  source 1..23: mol_type = other RNA
  modified_base 1: mod_base = OTHER; note = 5'-(E)-vinylphosphonate 2'-O-methylated guanosine with phosphorothioate linkage
  modified_base 2: mod_base = OTHER; note = 2'-fluorouridine with phosphorothioate linkage
  modified_base 3: mod_base = OTHER; note = 2'-O-methyluridine
  modified_base 4: mod_base = OTHER; note = 2'-fluoroguanosine
  modified_base 5: mod_base = OTHER; note = 2'-O-methyluridine
  modified_base 6: mod_base = OTHER; note = 2'-fluoroadenosine
  modified_base 7: mod_base = OTHER; note = 2'-O-methylcytidine
  modified_base 8: mod_base = OTHER; note = 2'-fluoroadenosine
  modified_base 9: mod_base = OTHER; note = 2'-O-methyluridine
  modified_base 10: mod_base = OTHER; note = 2'-fluoroguanosine
  modified_base 11: mod_base = OTHER; note = 2'-O-methyluridine
  modified_base 12: mod_base = OTHER; note = 2'-fluoroguanosine
  modified_base 13: mod_base = OTHER; note = 2'-O-methyluridine
  modified_base 14: mod_base = OTHER; note = 2'-fluoroadenosine
  modified_base 15: mod_base = OTHER; note = 2'-O-methylguanosine
  modified_base 16: mod_base = OTHER; note = 2'-fluorocytidine
  modified_base 17: mod_base = OTHER; note = 2'-O-methyluridine
  modified_base 18: mod_base = OTHER; note = 2'-fluoroguanosine
  modified_base 19: mod_base = OTHER; note = 2'-O-methylcytidine
  modified_base 20: mod_base = OTHER; note = 2'-fluorouridine
  modified_base 21: mod_base = OTHER; note = 2'-O-methylguanosine with phosphorothioate linkage
  modified_base 22: mod_base = OTHER; note = 2'-fluoroguanosine with phosphorothioate linkage
  modified_base 23: mod_base = OTHER; note = 2'-O-methylguanosine
gttgtacatgtgtagctgctggg

SEQ ID NO: 1109 - RNA, 23 nt, synthetic construct
  source 1..23: mol_type = other RNA
  modified_base 1: mod_base = OTHER; note = 5'-(E)-vinylphosphonate 2'-O-methylated adenosine with phosphorothioate linkage
  modified_base 2: mod_base = OTHER; note = 2'-fluoroadenosine with phosphorothioate linkage
  modified_base 3: mod_base = OTHER; note = 2'-O-methylguanosine
  modified_base 4: mod_base = OTHER; note = 2'-fluorouridine
  modified_base 5: mod_base = OTHER; note = 2'-O-methyluridine
  modified_base 6: mod_base = OTHER; note = 2'-fluoroguanosine
  modified_base 7: mod_base = OTHER; note = 2'-O-methyluridine
  modified_base 8: mod_base = OTHER; note = 2'-fluoroadenosine
  modified_base 9: mod_base = OTHER; note = 2'-O-methylcytidine
  modified_base 10: mod_base = OTHER; note = 2'-fluoroadenosine
  modified_base 11: mod_base = OTHER; note = 2'-O-methyluridine
  modified_base 12: mod_base = OTHER; note = 2'-fluoroguanosine
  modified_base 13: mod_base = OTHER; note = 2'-O-methyluridine
  modified_base 14: mod_base = OTHER; note = 2'-fluoroguanosine
  modified_base 15: mod_base = OTHER; note = 2'-O-methyluridine
  modified_base 16: mod_base = OTHER; note = 2'-fluoroadenosine
  modified_base 17: mod_base = OTHER; note = 2'-O-methylguanosine
  modified_base 18: mod_base = OTHER; note = 2'-fluorocytidine
  modified_base 19: mod_base = OTHER; note = 2'-O-methyluridine
  modified_base 20: mod_base = OTHER; note = 2'-fluoroguanosine
  modified_base 21: mod_base = OTHER; note = 2'-O-methylcytidine with phosphorothioate linkage
  modified_base 22: mod_base = OTHER; note = 2'-fluorouridine with phosphorothioate linkage
  modified_base 23: mod_base = OTHER; note = 2'-O-methylguanosine
aagttgtacatgtgtagctgctg

SEQ ID NO: 1110 - RNA, 23 nt, synthetic construct
  source 1..23: mol_type = other RNA
  modified_base 1: mod_base = OTHER; note = 5'-(E)-vinylphosphonate 2'-O-methylated guanosine with phosphorothioate linkage
  modified_base 2: mod_base = OTHER; note = 2'-fluorocytidine with phosphorothioate linkage
  modified_base 3: mod_base = OTHER; note = 2'-O-methyladenosine
  modified_base 4: mod_base = OTHER; note = 2'-fluoroadenosine
  modified_base 5: mod_base = OTHER; note = 2'-O-methylguanosine
  modified_base 6: mod_base = OTHER; note = 2'-fluorouridine
  modified_base 7: mod_base = OTHER; note = 2'-O-methyluridine
  modified_base 8: mod_base = OTHER; note = 2'-fluoroguanosine
  modified_base 9: mod_base = OTHER; note = 2'-O-methyluridine
  modified_base 10: mod_base = OTHER; note = 2'-fluoroadenosine
  modified_base 11: mod_base = OTHER; note = 2'-O-methylcytidine
  modified_base 12: mod_base = OTHER; note = 2'-fluoroadenosine
  modified_base 13: mod_base = OTHER; note = 2'-O-methyluridine
  modified_base 14: mod_base = OTHER; note = 2'-fluoroguanosine
  modified_base 15: mod_base = OTHER; note = 2'-O-methyluridine
  modified_base 16: mod_base = OTHER; note = 2'-fluoroguanosine
  modified_base 17: mod_base = OTHER; note = 2'-O-methyluridine
  modified_base 18: mod_base = OTHER; note = 2'-fluoroadenosine
  modified_base 19: mod_base = OTHER; note = 2'-O-methylguanosine
  modified_base 20: mod_base = OTHER; note = 2'-fluorocytidine
  modified_base 21: mod_base = OTHER; note = 2'-O-methyluridine with phosphorothioate linkage
  modified_base 22: mod_base = OTHER; note = 2'-fluoroguanosine with phosphorothioate linkage
  modified_base 23: mod_base = OTHER; note = 2'-O-methylcytidine
gcaagttgtacatgtgtagctgc

SEQ ID NO: 1111 - RNA, 23 nt, synthetic construct
  source 1..23: mol_type = other RNA
  modified_base 1: mod_base = OTHER; note = 5'-(E)-vinylphosphonate 2'-O-methylated uridine with phosphorothioate linkage
  modified_base 2: mod_base = OTHER; note = 2'-fluorouridine with phosphorothioate linkage
  modified_base 3: mod_base = OTHER; note = 2'-O-methylguanosine
  modified_base 4: mod_base = OTHER; note = 2'-fluorocytidine
  modified_base 5: mod_base = OTHER; note = 2'-O-methyladenosine
  modified_base 6: mod_base = OTHER; note = 2'-fluoroadenosine
  modified_base 7: mod_base = OTHER; note = 2'-O-methylguanosine
  modified_base 8: mod_base = OTHER; note = 2'-fluorouridine
  modified_base 9: mod_base = OTHER; note = 2'-O-methyluridine
  modified_base 10: mod_base = OTHER; note = 2'-fluoroguanosine
  modified_base 11: mod_base = OTHER; note = 2'-O-methyluridine
  modified_base 12: mod_base = OTHER; note = 2'-fluoroadenosine
  modified_base 13: mod_base = OTHER; note = 2'-O-methylcytidine
  modified_base 14: mod_base = OTHER; note = 2'-fluoroadenosine
  modified_base 15: mod_base = OTHER; note = 2'-O-methyluridine
  modified_base 16: mod_base = OTHER; note = 2'-fluoroguanosine
  modified_base 17: mod_base = OTHER; note = 2'-O-methyluridine
  modified_base 18: mod_base = OTHER; note = 2'-fluoroguanosine
  modified_base 19: mod_base = OTHER; note = 2'-O-methyluridine
  modified_base 20: mod_base = OTHER; note = 2'-fluoroadenosine
  modified_base 21: mod_base = OTHER; note = 2'-O-methylguanosine with phosphorothioate linkage
  modified_base 22: mod_base = OTHER; note = 2'-fluorocytidine with phosphorothioate linkage
  modified_base 23: mod_base = OTHER; note = 2'-O-methyluridine
ttgcaagttgtacatgtgtagct

SEQ ID NO: 1112 - RNA, 23 nt, synthetic construct
  source 1..23: mol_type = other RNA
  modified_base 1: mod_base = OTHER; note = 5'-(E)-vinylphosphonate 2'-O-methylated uridine with phosphorothioate linkage
  modified_base 2: mod_base = OTHER; note = 2'-fluorouridine with phosphorothioate linkage
  modified_base 3: mod_base = OTHER; note = 2'-O-methyluridine
  modified_base 4: mod_base = OTHER; note = 2'-fluoroguanosine
  modified_base 5: mod_base = OTHER; note = 2'-O-methylcytidine
  modified_base 6: mod_base = OTHER; note = 2'-fluoroadenosine
  modified_base 7: mod_base = OTHER; note = 2'-O-methyladenosine
  modified_base 8: mod_base = OTHER; note = 2'-fluoroguanosine
  modified_base 9: mod_base = OTHER; note = 2'-O-methyluridine
  modified_base 10: mod_base = OTHER; note = 2'-fluorouridine
  modified_base 11: mod_base = OTHER; note = 2'-O-methylguanosine
  modified_base 12: mod_base = OTHER; note = 2'-fluorouridine
  modified_base 13: mod_base = OTHER; note = 2'-O-methyladenosine
  modified_base 14: mod_base = OTHER; note = 2'-fluorocytidine
  modified_base 15: mod_base = OTHER; note = 2'-O-methyladenosine
  modified_base 16: mod_base = OTHER; note = 2'-fluorouridine
  modified_base 17: mod_base = OTHER; note = 2'-O-methylguanosine
  modified_base 18: mod_base = OTHER; note = 2'-fluorouridine
  modified_base 19: mod_base = OTHER; note = 2'-O-methylguanosine
  modified_base 20: mod_base = OTHER; note = 2'-fluorouridine
  modified_base 21: mod_base = OTHER; note = 2'-O-methyladenosine with phosphorothioate linkage
  modified_base 22: mod_base = OTHER; note = 2'-fluoroguanosine with phosphorothioate linkage
  modified_base 23: mod_base = OTHER; note = 2'-O-methylcytidine
tttgcaagttgtacatgtgtagc

SEQ ID NO: 1113 - RNA, 23 nt, synthetic construct
  source 1..23: mol_type = other RNA
  modified_base 1: mod_base = OTHER; note = 5'-(E)-vinylphosphonate 2'-O-methylated adenosine with phosphorothioate linkage
  modified_base 2: mod_base = OTHER; note = 2'-fluorouridine with phosphorothioate linkage
  modified_base 3: mod_base = OTHER; note = 2'-O-methylguanosine
  modified_base 4: mod_base = OTHER; note = 2'-fluorouridine
  modified_base 5: mod_base = OTHER; note = 2'-O-methyluridine
  modified_base 6: mod_base = OTHER; note = 2'-fluorouridine
  modified_base 7: mod_base = OTHER; note = 2'-O-methylguanosine
  modified_base 8: mod_base = OTHER; note = 2'-fluorocytidine
  modified_base 9: mod_base = OTHER; note = 2'-O-methyladenosine
  modified_base 10: mod_base = OTHER; note = 2'-fluoroadenosine
  modified_base 11: mod_base = OTHER; note = 2'-O-methylguanosine
  modified_base 12: mod_base = OTHER; note = 2'-fluorouridine
  modified_base 13: mod_base = OTHER; note = 2'-O-methyluridine
  modified_base 14: mod_base = OTHER; note = 2'-fluoroguanosine
  modified_base 15: mod_base = OTHER; note = 2'-O-methyluridine
  modified_base 16: mod_base = OTHER; note = 2'-fluoroadenosine
  modified_base 17: mod_base = OTHER; note = 2'-O-methylcytidine
  modified_base 18: mod_base = OTHER; note = 2'-fluoroadenosine
  modified_base 19: mod_base = OTHER; note = 2'-O-methyluridine
  modified_base 20: mod_base = OTHER; note = 2'-fluoroguanosine
  modified_base 21: mod_base = OTHER; note = 2'-O-methyluridine with phosphorothioate linkage
  modified_base 22: mod_base = OTHER; note = 2'-fluoroguanosine with phosphorothioate linkage
  modified_base 23: mod_base = OTHER; note = 2'-O-methyluridine
atgtttgcaagttgtacatgtgt

SEQ ID NO: 1114 - RNA, 23 nt, synthetic construct
  source 1..23: mol_type = other RNA
  modified_base 1: mod_base = OTHER; note = 5'-(E)-vinylphosphonate 2'-O-methylated guanosine with phosphorothioate linkage
  modified_base 2: mod_base = OTHER; note = 2'-fluorocytidine with phosphorothioate linkage
  modified_base 3: mod_base = OTHER; note = 2'-O-methyluridine
  modified_base 4: mod_base = OTHER; note = 2'-fluoroguanosine
  modified_base 5: mod_base = OTHER; note = 2'-O-methyluridine
  modified_base 6: mod_base = OTHER; note = 2'-fluorouridine
  modified_base 7: mod_base = OTHER; note = 2'-O-methyluridine
  modified_base 8: mod_base = OTHER; note = 2'-fluoroguanosine
  modified_base 9: mod_base = OTHER; note = 2'-O-methylcytidine
  modified_base 10: mod_base = OTHER; note = 2'-fluoroadenosine
  modified_base 11: mod_base = OTHER; note = 2'-O-methyladenosine
  modified_base 12: mod_base = OTHER; note = 2'-fluoroguanosine
  modified_base 13: mod_base = OTHER; note = 2'-O-methyluridine
  modified_base 14: mod_base = OTHER; note = 2'-fluorouridine
  modified_base 15: mod_base = OTHER; note = 2'-O-methylguanosine
  modified_base 16: mod_base = OTHER; note = 2'-fluorouridine
  modified_base 17: mod_base = OTHER; note = 2'-O-methyladenosine
  modified_base 18: mod_base = OTHER; note = 2'-fluorocytidine
  modified_base 19: mod_base = OTHER; note = 2'-O-methyladenosine
  modified_base 20: mod_base = OTHER; note = 2'-fluorouridine
  modified_base 21: mod_base = OTHER; note = 2'-O-methylguanosine with phosphorothioate linkage
  modified_base 22: mod_base = OTHER; note = 2'-fluorouridine with phosphorothioate linkage
  modified_base 23: mod_base = OTHER; note = 2'-O-methylguanosine
gctgtttgcaagttgtacatgtg

SEQ ID NO: 1115 - RNA, 23 nt, synthetic construct
  source 1..23: mol_type = other RNA
  modified_base 1: mod_base = OTHER; note = 5'-(E)-vinylphosphonate 2'-O-methylated guanosine with phosphorothioate linkage
  modified_base 2: mod_base = OTHER; note = 2'-fluoroguanosine with phosphorothioate linkage
  modified_base 3: mod_base = OTHER; note = 2'-O-methylcytidine
  modified_base 4: mod_base = OTHER; note = 2'-fluorouridine
  modified_base 5: mod_base = OTHER; note = 2'-O-methylguanosine
  modified_base 6: mod_base = OTHER; note = 2'-fluorouridine
  modified_base 7: mod_base = OTHER; note = 2'-O-methyluridine
  modified_base 8: mod_base = OTHER; note = 2'-fluorouridine
  modified_base 9: mod_base = OTHER; note = 2'-O-methylguanosine
  modified_base 10: mod_base = OTHER; note = 2'-fluorocytidine
  modified_base 11: mod_base = OTHER; note = 2'-O-methyladenosine
  modified_base 12: mod_base = OTHER; note = 2'-fluoroadenosine
  modified_base 13: mod_base = OTHER; note = 2'-O-methylguanosine
  modified_base 14: mod_base = OTHER; note = 2'-fluorouridine
  modified_base 15: mod_base = OTHER; note = 2'-O-methyluridine
  modified_base 16: mod_base = OTHER; note = 2'-fluoroguanosine
  modified_base 17: mod_base = OTHER; note = 2'-O-methyluridine
  modified_base 18: mod_base = OTHER; note = 2'-fluoroadenosine
  modified_base 19: mod_base = OTHER; note = 2'-O-methylcytidine
  modified_base 20: mod_base = OTHER; note = 2'-fluoroadenosine
  modified_base 21: mod_base = OTHER; note = 2'-O-methyluridine with phosphorothioate linkage
  modified_base 22: mod_base = OTHER; note = 2'-fluoroguanosine with phosphorothioate linkage
  modified_base 23: mod_base = OTHER; note = 2'-O-methyluridine
ggctgtttgcaagttgtacatgt

SEQ ID NO: 1116 - RNA, 23 nt, synthetic construct
  source 1..23: mol_type = other RNA
  modified_base 1: mod_base = OTHER; note = 5'-(E)-vinylphosphonate 2'-O-methylated uridine with phosphorothioate linkage
  modified_base 2: mod_base = OTHER; note = 2'-fluoroguanosine with phosphorothioate linkage
  modified_base 3: mod_base = OTHER; note = 2'-O-methylguanosine
  modified_base 4: mod_base = OTHER; note = 2'-fluorocytidine
  modified_base 5: mod_base = OTHER; note = 2'-O-methyluridine
  modified_base 6: mod_base = OTHER; note = 2'-fluoroguanosine
  modified_base 7: mod_base = OTHER; note = 2'-O-methyluridine
  modified_base 8: mod_base = OTHER; note = 2'-fluorouridine
  modified_base 9: mod_base = OTHER; note = 2'-O-methyluridine
  modified_base 10: mod_base = OTHER; note = 2'-fluoroguanosine
  modified_base 11: mod_base = OTHER; note = 2'-O-methylcytidine
  modified_base 12: mod_base = OTHER; note = 2'-fluoroadenosine
  modified_base 13: mod_base = OTHER; note = 2'-O-methyladenosine
  modified_base 14: mod_base = OTHER; note = 2'-fluoroguanosine
  modified_base 15: mod_base = OTHER; note = 2'-O-methyluridine
  modified_base 16: mod_base = OTHER; note = 2'-fluorouridine
  modified_base 17: mod_base = OTHER; note = 2'-O-methylguanosine
  modified_base 18: mod_base = OTHER; note = 2'-fluorouridine
  modified_base 19: mod_base = OTHER; note = 2'-O-methyladenosine
  modified_base 20: mod_base = OTHER; note = 2'-fluorocytidine
  modified_base 21: mod_base = OTHER; note = 2'-O-methyladenosine with phosphorothioate linkage
  modified_base 22: mod_base = OTHER; note = 2'-fluorouridine with phosphorothioate linkage
  modified_base 23: mod_base = OTHER; note = 2'-O-methylguanosine
tggctgtttgcaagttgtacatg

SEQ ID NO: 1117 - RNA, 23 nt, synthetic construct
  source 1..23: mol_type = other RNA
  modified_base 1: mod_base = OTHER; note = 5'-(E)-vinylphosphonate 2'-O-methylated adenosine with phosphorothioate linkage
  modified_base 2: mod_base = OTHER; note = 2'-fluorouridine with phosphorothioate linkage
  modified_base 3: mod_base = OTHER; note = 2'-O-methylguanosine
  modified_base 4: mod_base = OTHER; note = 2'-fluoroguanosine
  modified_base 5: mod_base = OTHER; note = 2'-O-methylcytidine
  modified_base 6: mod_base = OTHER; note = 2'-fluorouridine
  modified_base 7: mod_base = OTHER; note = 2'-O-methylguanosine
  modified_base 8: mod_base = OTHER; note = 2'-fluorouridine
  modified_base 9: mod_base = OTHER; note = 2'-O-methyluridine
  modified_base 10: mod_base = OTHER; note = 2'-fluorouridine
  modified_base 11: mod_base = OTHER; note = 2'-O-methylguanosine
  modified_base 12: mod_base = OTHER; note = 2'-fluorocytidine
  modified_base 13: mod_base = OTHER; note = 2'-O-methyladenosine
  modified_base 14: mod_base = OTHER; note = 2'-fluoroadenosine
  modified_base 15: mod_base = OTHER; note = 2'-O-methylguanosine
  modified_base 16: mod_base = OTHER; note = 2'-fluorouridine
  modified_base 17: mod_base = OTHER; note = 2'-O-methyluridine
  modified_base 18: mod_base = OTHER; note = 2'-fluoroguanosine
  modified_base 19: mod_base = OTHER; note = 2'-O-methyluridine
  modified_base 20: mod_base = OTHER; note = 2'-fluoroadenosine
  modified_base 21: mod_base = OTHER; note = 2'-O-methylcytidine with phosphorothioate linkage
  modified_base 22: mod_base = OTHER; note = 2'-fluoroadenosine with phosphorothioate linkage
  modified_base 23: mod_base = OTHER; note = 2'-O-methyluridine
atggctgtttgcaagttgtacat

SEQ ID NO: 1118 - RNA, 23 nt, synthetic construct
  source 1..23: mol_type = other RNA
  modified_base 1: mod_base = OTHER; note = 5'-(E)-vinylphosphonate 2'-O-methylated adenosine with phosphorothioate linkage
  modified_base 2: mod_base = OTHER; note = 2'-fluoroadenosine with phosphorothioate linkage
  modified_base 3: mod_base = OTHER; note = 2'-O-methyluridine
  modified_base 4: mod_base = OTHER; note = 2'-fluoroguanosine
  modified_base 5: mod_base = OTHER; note = 2'-O-methylguanosine
  modified_base 6: mod_base = OTHER; note = 2'-fluorocytidine
  modified_base 7: mod_base = OTHER; note = 2'-O-methyluridine
  modified_base 8: mod_base = OTHER; note = 2'-fluoroguanosine
  modified_base 9: mod_base = OTHER; note = 2'-O-methyluridine
  modified_base 10: mod_base = OTHER; note = 2'-fluorouridine
  modified_base 11: mod_base = OTHER; note = 2'-O-methyluridine
  modified_base 12: mod_base = OTHER; note = 2'-fluoroguanosine
  modified_base 13: mod_base = OTHER; note = 2'-O-methylcytidine
  modified_base 14: mod_base = OTHER; note = 2'-fluoroadenosine
  modified_base 15: mod_base = OTHER; note = 2'-O-methyladenosine
  modified_base 16: mod_base = OTHER; note = 2'-fluoroguanosine
  modified_base 17: mod_base = OTHER; note = 2'-O-methyluridine
  modified_base 18: mod_base = OTHER; note = 2'-fluorouridine
  modified_base 19: mod_base = OTHER; note = 2'-O-methylguanosine
  modified_base 20: mod_base = OTHER; note = 2'-fluorouridine
  modified_base 21: mod_base = OTHER; note = 2'-O-methyladenosine with phosphorothioate linkage
  modified_base 22: mod_base = OTHER; note = 2'-fluorocytidine with phosphorothioate linkage
  modified_base 23: mod_base = OTHER; note = 2'-O-methyladenosine
aatggctgtttgcaagttgtaca

SEQ ID NO: 1119 - RNA, 23 nt, synthetic construct
  source 1..23: mol_type = other RNA
  modified_base 1: mod_base = OTHER; note = 5'-(E)-vinylphosphonate 2'-O-methylated guanosine with phosphorothioate linkage
  modified_base 2: mod_base = OTHER; note = 2'-fluoroadenosine with phosphorothioate linkage
  modified_base 3: mod_base = OTHER; note = 2'-O-methyladenosine
  modified_base 4: mod_base = OTHER; note = 2'-fluorouridine
  modified_base 5: mod_base = OTHER; note = 2'-O-methylguanosine
  modified_base 6: mod_base = OTHER; note = 2'-fluoroguanosine
  modified_base 7: mod_base = OTHER; note = 2'-O-methylcytidine
  modified_base 8: mod_base = OTHER; note = 2'-fluorouridine
  modified_base 9: mod_base = OTHER; note = 2'-O-methylguanosine
  modified_base 10: mod_base = OTHER; note = 2'-fluorouridine
  modified_base 11: mod_base = OTHER; note = 2'-O-methyluridine
  modified_base 12: mod_base = OTHER; note = 2'-fluorouridine
  modified_base 13: mod_base = OTHER; note = 2'-O-methylguanosine
  modified_base 14: mod_base = OTHER; note = 2'-fluorocytidine
  modified_base 15: mod_base = OTHER; note = 2'-O-methyladenosine
  modified_base 16: mod_base = OTHER; note = 2'-fluoroadenosine
  modified_base 17: mod_base = OTHER; note = 2'-O-methylguanosine
  modified_base 18: mod_base = OTHER; note = 2'-fluorouridine
  modified_base 19: mod_base = OTHER; note = 2'-O-methyluridine
  modified_base 20: mod_base = OTHER; note = 2'-fluoroguanosine
  modified_base 21: mod_base = OTHER; note = 2'-O-methyluridine with phosphorothioate linkage
  modified_base 22: mod_base = OTHER; note = 2'-fluoroadenosine with phosphorothioate linkage
  modified_base 23: mod_base = OTHER; note = 2'-O-methylcytidine
gaatggctgtttgcaagttgtac

SEQ ID NO: 1120 - RNA, 23 nt, synthetic construct
  source 1..23: mol_type = other RNA
  modified_base 1: mod_base = OTHER; note = 5'-(E)-vinylphosphonate 2'-O-methylated uridine with phosphorothioate linkage
  modified_base 2: mod_base = OTHER; note = 2'-fluoroguanosine with phosphorothioate linkage
  modified_base 3: mod_base = OTHER; note = 2'-O-methyladenosine
  modified_base 4: mod_base = OTHER; note = 2'-fluoroadenosine
  modified_base 5: mod_base = OTHER; note = 2'-O-methyluridine
  modified_base 6: mod_base = OTHER; note = 2'-fluoroguanosine
  modified_base 7: mod_base = OTHER; note = 2'-O-methylguanosine
  modified_base 8: mod_base = OTHER; note = 2'-fluorocytidine
  modified_base 9: mod_base = OTHER; note = 2'-O-methyluridine
  modified_base 10: mod_base = OTHER; note = 2'-fluoroguanosine
  modified_base 11: mod_base = OTHER; note = 2'-O-methyluridine
  modified_base 12: mod_base = OTHER; note = 2'-fluorouridine
  modified_base 13: mod_base = OTHER; note = 2'-O-methyluridine
  modified_base 14: mod_base = OTHER; note = 2'-fluoroguanosine
  modified_base 15: mod_base = OTHER; note = 2'-O-methylcytidine
  modified_base 16: mod_base = OTHER; note = 2'-fluoroadenosine
  modified_base 17: mod_base = OTHER; note = 2'-O-methyladenosine
  modified_base 18: mod_base = OTHER; note = 2'-fluoroguanosine
  modified_base 19: mod_base = OTHER; note = 2'-O-methyluridine
  modified_base 20: mod_base = OTHER; note = 2'-fluorouridine
  modified_base 21: mod_base = OTHER; note = 2'-O-methylguanosine with phosphorothioate linkage
  modified_base 22: mod_base = OTHER; note = 2'-fluorouridine with phosphorothioate linkage
  modified_base 23: mod_base = OTHER; note = 2'-O-methyladenosine
tgaatggctgtttgcaagttgta

SEQ ID NO: 1121 - RNA, 23 nt, synthetic construct
  source 1..23: mol_type = other RNA
  modified_base 1: mod_base = OTHER; note = 5'-(E)-vinylphosphonate 2'-O-methylated guanosine with phosphorothioate linkage
  modified_base 2: mod_base = OTHER; note = 2'-fluorouridine with phosphorothioate linkage
  modified_base 3: mod_base = OTHER; note = 2'-O-methylguanosine
  modified_base 4: mod_base = OTHER; note = 2'-fluoroadenosine
  modified_base 5: mod_base = OTHER; note = 2'-O-methyladenosine
  modified_base 6: mod_base = OTHER; note = 2'-fluorouridine
  modified_base 7: mod_base = OTHER; note = 2'-O-methylguanosine
  modified_base 8: mod_base = OTHER; note = 2'-fluoroguanosine
  modified_base 9: mod_base = OTHER; note = 2'-O-methylcytidine
  modified_base 10: mod_base = OTHER; note = 2'-fluorouridine
  modified_base 11: mod_base = OTHER; note = 2'-O-methylguanosine
  modified_base 12: mod_base = OTHER; note = 2'-fluorouridine
  modified_base 13: mod_base = OTHER; note = 2'-O-methyluridine
  modified_base 14: mod_base = OTHER; note = 2'-fluorouridine
  modified_base 15: mod_base = OTHER; note = 2'-O-methylguanosine
  modified_base 16: mod_base = OTHER; note = 2'-fluorocytidine
  modified_base 17: mod_base = OTHER; note = 2'-O-methyladenosine
  modified_base 18: mod_base = OTHER; note = 2'-fluoroadenosine
  modified_base 19: mod_base = OTHER; note = 2'-O-methylguanosine
  modified_base 20: mod_base = OTHER; note = 2'-fluorouridine
  modified_base 21: mod_base = OTHER; note = 2'-O-methyluridine with phosphorothioate linkage
  modified_base 22: mod_base = OTHER; note = 2'-fluoroguanosine with phosphorothioate linkage
  modified_base 23: mod_base = OTHER; note = 2'-O-methyluridine
gtgaatggctgtttgcaagttgt

SEQ ID NO: 1122 - RNA, 23 nt, synthetic construct
  source 1..23: mol_type = other RNA
  modified_base 1: mod_base = OTHER; note = 5'-(E)-vinylphosphonate 2'-O-methylated guanosine with phosphorothioate linkage
  modified_base 2: mod_base = OTHER; note = 2'-fluoroguanosine with phosphorothioate linkage
  modified_base 3: mod_base = OTHER; note = 2'-O-methyluridine
  modified_base 4: mod_base = OTHER; note = 2'-fluoroguanosine
  modified_base 5: mod_base = OTHER; note = 2'-O-methyladenosine
  modified_base 6: mod_base = OTHER; note = 2'-fluoroadenosine
  modified_base 7: mod_base = OTHER; note = 2'-O-methyluridine
  modified_base 8: mod_base = OTHER; note = 2'-fluoroguanosine
  modified_base 9: mod_base = OTHER; note = 2'-O-methylguanosine
  modified_base 10: mod_base = OTHER; note = 2'-fluorocytidine
  modified_base 11: mod_base = OTHER; note = 2'-O-methyluridine
  modified_base 12: mod_base = OTHER; note = 2'-fluoroguanosine
  modified_base 13: mod_base = OTHER; note = 2'-O-methyluridine
  modified_base 14: mod_base = OTHER; note = 2'-fluorouridine
  modified_base 15: mod_base = OTHER; note = 2'-O-methyluridine
  modified_base 16: mod_base = OTHER; note = 2'-fluoroguanosine
  modified_base 17: mod_base = OTHER; note = 2'-O-methylcytidine
  modified_base 18: mod_base = OTHER; note = 2'-fluoroadenosine
  modified_base 19: mod_base = OTHER; note = 2'-O-methyladenosine
  modified_base 20: mod_base = OTHER; note = 2'-fluoroguanosine
  modified_base 21: mod_base = OTHER; note = 2'-O-methyluridine with phosphorothioate linkage
  modified_base 22: mod_base = OTHER; note = 2'-fluorouridine with phosphorothioate linkage
  modified_base 23: mod_base = OTHER; note = 2'-O-methylguanosine
ggtgaatggctgtttgcaagttg

SEQ ID NO: 1123 - RNA, 23 nt, synthetic construct
  source 1..23: mol_type = other RNA
  modified_base 1: mod_base = OTHER; note = 5'-(E)-vinylphosphonate 2'-O-methylated uridine with phosphorothioate linkage
  modified_base 2: mod_base = OTHER; note = 2'-fluoroguanosine with phosphorothioate linkage
  modified_base 3: mod_base = OTHER; note = 2'-O-methylguanosine
  modified_base 4: mod_base = OTHER; note = 2'-fluorouridine
  modified_base 5: mod_base = OTHER; note = 2'-O-methylguanosine
  modified_base 6: mod_base = OTHER; note = 2'-fluoroadenosine
  modified_base 7: mod_base = OTHER; note = 2'-O-methyladenosine
  modified_base 8: mod_base = OTHER; note = 2'-fluorouridine
  modified_base 9: mod_base = OTHER; note = 2'-O-methylguanosine
  modified_base 10: mod_base = OTHER; note = 2'-fluoroguanosine
  modified_base 11: mod_base = OTHER; note = 2'-O-methylcytidine
  modified_base 12: mod_base = OTHER; note = 2'-fluorouridine
  modified_base 13: mod_base = OTHER; note = 2'-O-methylguanosine
  modified_base 14: mod_base = OTHER; note = 2'-fluorouridine
  modified_base 15: mod_base = OTHER; note = 2'-O-methyluridine
  modified_base 16: mod_base = OTHER; note = 2'-fluorouridine
  modified_base 17: mod_base = OTHER; note = 2'-O-methylguanosine
  modified_base 18: mod_base = OTHER; note = 2'-fluorocytidine
  modified_base 19: mod_base = OTHER; note = 2'-O-methyladenosine
  modified_base 20: mod_base = OTHER; note = 2'-fluoroadenosine
  modified_base 21: mod_base = OTHER; note = 2'-O-methylguanosine with phosphorothioate linkage
  modified_base 22: mod_base = OTHER; note = 2'-fluorouridine with phosphorothioate linkage
  modified_base 23: mod_base = OTHER; note = 2'-O-methyluridine
tggtgaatggctgtttgcaagtt

SEQ ID NO: 1124 - RNA, 23 nt, synthetic construct
  source 1..23: mol_type = other RNA
  modified_base 1: mod_base = OTHER; note = 5'-(E)-vinylphosphonate 2'-O-methylated adenosine with phosphorothioate linkage
  modified_base 2: mod_base = OTHER; note = 2'-fluorouridine with phosphorothioate linkage
  modified_base 3: mod_base = OTHER; note = 2'-O-methylguanosine
  modified_base 4: mod_base = OTHER; note = 2'-fluoroguanosine
  modified_base 5: mod_base = OTHER; note = 2'-O-methyluridine
  modified_base 6: mod_base = OTHER; note = 2'-fluoroguanosine
  modified_base 7: mod_base = OTHER; note = 2'-O-methyladenosine
  modified_base 8: mod_base = OTHER; note = 2'-fluoroadenosine
  modified_base 9: mod_base = OTHER; note = 2'-O-methyluridine
  modified_base 10: mod_base = OTHER; note = 2'-fluoroguanosine
  modified_base 11: mod_base = OTHER; note = 2'-O-methylguanosine
  modified_base 12: mod_base = OTHER; note = 2'-fluorocytidine
  modified_base 13: mod_base = OTHER; note = 2'-O-methyluridine
  modified_base 14: mod_base = OTHER; note = 2'-fluoroguanosine
  modified_base 15: mod_base = OTHER; note = 2'-O-methyluridine
  modified_base 16: mod_base = OTHER; note = 2'-fluorouridine
  modified_base 17: mod_base = OTHER; note = 2'-O-methyluridine
  modified_base 18: mod_base = OTHER; note = 2'-fluoroguanosine
  modified_base 19: mod_base = OTHER; note = 2'-O-methylcytidine
  modified_base 20: mod_base = OTHER; note = 2'-fluoroadenosine
  modified_base 21: mod_base = OTHER; note = 2'-O-methyladenosine with phosphorothioate linkage
  modified_base 22: mod_base = OTHER; note = 2'-fluoroguanosine with phosphorothioate linkage
  modified_base 23: mod_base = OTHER; note = 2'-O-methyluridine
atggtgaatggctgtttgcaagt

SEQ ID NO: 1125 - RNA, 23 nt, synthetic construct
  source 1..23: mol_type = other RNA
  modified_base 1: mod_base = OTHER; note = 5'-(E)-vinylphosphonate 2'-O-methylated adenosine with phosphorothioate linkage
  modified_base 2: mod_base = OTHER; note = 2'-fluorocytidine with phosphorothioate linkage
  modified_base 3: mod_base = OTHER; note = 2'-O-methyluridine
  modified_base 4: mod_base = OTHER; note = 2'-fluoroguanosine
  modified_base 5: mod_base = OTHER; note = 2'-O-methylguanosine
  modified_base 6: mod_base = OTHER; note = 2'-fluorouridine
  modified_base 7: mod_base = OTHER; note = 2'-O-methylguanosine
  modified_base 8: mod_base = OTHER; note = 2'-fluoroadenosine
  modified_base 9: mod_base = OTHER; note = 2'-O-methyladenosine
  modified_base 10: mod_base = OTHER; note = 2'-fluorouridine
  modified_base 11: mod_base = OTHER; note = 2'-O-methylguanosine
  modified_base 12: mod_base = OTHER; note = 2'-fluoroguanosine
  modified_base 13: mod_base = OTHER; note = 2'-O-methylcytidine
  modified_base 14: mod_base = OTHER; note = 2'-fluorouridine
  modified_base 15: mod_base = OTHER; note = 2'-O-methylguanosine
  modified_base 16: mod_base = OTHER; note = 2'-fluorouridine
  modified_base 17: mod_base = OTHER; note = 2'-O-methyluridine
  modified_base 18: mod_base = OTHER; note = 2'-fluorouridine
  modified_base 19: mod_base = OTHER; note = 2'-O-methylguanosine
  modified_base 20: mod_base = OTHER; note = 2'-fluorocytidine
  modified_base 21: mod_base = OTHER; note = 2'-O-methyladenosine with phosphorothioate linkage
  modified_base 22: mod_base = OTHER; note = 2'-fluoroadenosine with phosphorothioate linkage
  modified_base 23: mod_base = OTHER; note = 2'-O-methylguanosine
actggtgaatggctgtttgcaag

SEQ ID NO: 1126 - RNA, 23 nt, synthetic construct
  source 1..23: mol_type = other RNA
  modified_base 1: mod_base = OTHER; note = 5'-(E)-vinylphosphonate 2'-O-methylated adenosine with phosphorothioate linkage
  modified_base 2: mod_base = OTHER; note = 2'-fluoroadenosine with phosphorothioate linkage
  modified_base 3: mod_base = OTHER; note = 2'-O-methylcytidine
  modified_base 4: mod_base = OTHER; note = 2'-fluorouridine
  modified_base 5: mod_base = OTHER; note = 2'-O-methylguanosine
  modified_base 6: mod_base = OTHER; note = 2'-fluoroguanosine
  modified_base 7: mod_base = OTHER; note = 2'-O-methyluridine
  modified_base 8: mod_base = OTHER; note = 2'-fluoroguanosine
  modified_base 9: mod_base = OTHER; note = 2'-O-methyladenosine
  modified_base 10: mod_base = OTHER; note = 2'-fluoroadenosine
  modified_base 11: mod_base = OTHER; note = 2'-O-methyluridine
  modified_base 12: mod_base = OTHER; note = 2'-fluoroguanosine
  modified_base 13: mod_base = OTHER; note = 2'-O-methylguanosine
  modified_base 14: mod_base = OTHER; note = 2'-fluorocytidine
  modified_base 15: mod_base = OTHER; note = 2'-O-methyluridine
  modified_base 16: mod_base = OTHER; note = 2'-fluoroguanosine
  modified_base 17: mod_base = OTHER; note = 2'-O-methyluridine
  modified_base 18: mod_base = OTHER; note = 2'-fluorouridine
  modified_base 19: mod_base = OTHER; note = 2'-O-methyluridine
  modified_base 20: mod_base = OTHER; note = 2'-fluoroguanosine
  modified_base 21: mod_base = OTHER; note = 2'-O-methylcytidine with phosphorothioate linkage
  modified_base 22: mod_base = OTHER; note = 2'-fluoroadenosine with phosphorothioate linkage
  modified_base 23: mod_base = OTHER; note = 2'-O-methyladenosine
aactggtgaatggctgtttgcaa

SEQ ID NO: 1127 - RNA, 23 nt, synthetic construct
  source 1..23: mol_type = other RNA
  modified_base 1: mod_base = OTHER; note = 5'-(E)-vinylphosphonate 2'-O-methylated guanosine with phosphorothioate linkage
  modified_base 2: mod_base = OTHER; note = 2'-fluorocytidine with phosphorothioate linkage
  modified_base 3: mod_base = OTHER; note = 2'-O-methyladenosine
  modified_base 4: mod_base = OTHER; note = 2'-fluorocytidine
  modified_base 5: mod_base = OTHER; note = 2'-O-methyluridine
  modified_base 6: mod_base = OTHER; note = 2'-fluoroguanosine
  modified_base 7: mod_base = OTHER; note = 2'-O-methylguanosine
  modified_base 8: mod_base = OTHER; note = 2'-fluorouridine
  modified_base 9: mod_base = OTHER; note = 2'-O-methylguanosine
  modified_base 10: mod_base = OTHER; note = 2'-fluoroadenosine
  modified_base 11: mod_base = OTHER; note = 2'-O-methyladenosine
  modified_base 12: mod_base = OTHER; note = 2'-fluorouridine
  modified_base 13: mod_base = OTHER; note = 2'-O-methylguanosine
  modified_base 14: mod_base = OTHER; note = 2'-fluoroguanosine
  modified_base 15: mod_base = OTHER; note = 2'-O-methylcytidine
  modified_base 16: mod_base = OTHER; note = 2'-fluorouridine
  modified_base 17: mod_base = OTHER; note = 2'-O-methylguanosine
  modified_base 18: mod_base = OTHER; note = 2'-fluorouridine
  modified_base 19: mod_base = OTHER; note = 2'-O-methyluridine
  modified_base 20: mod_base = OTHER; note = 2'-fluorouridine
  modified_base 21: mod_base = OTHER; note = 2'-O-methylguanosine with phosphorothioate linkage
  modified_base 22: mod_base = OTHER; note = 2'-fluorocytidine with phosphorothioate linkage
  modified_base 23: mod_base = OTHER; note = 2'-O-methyladenosine
gcactggtgaatggctgtttgca

SEQ ID NO: 1128 - RNA, 23 nt, synthetic construct
  source 1..23: mol_type = other RNA
  modified_base 1: mod_base = OTHER; note = 5'-(E)-vinylphosphonate 2'-O-methylated uridine with phosphorothioate linkage
  modified_base 2: mod_base = OTHER; note = 2'-fluoroguanosine with phosphorothioate linkage
  modified_base 3: mod_base = OTHER; note = 2'-O-methylcytidine
  modified_base 4: mod_base = OTHER; note = 2'-fluoroadenosine
  modified_base 5: mod_base = OTHER; note = 2'-O-methylcytidine
  modified_base 6: mod_base = OTHER; note = 2'-fluorouridine
  modified_base 7: mod_base = OTHER; note = 2'-O-methylguanosine
  modified_base 8: mod_base = OTHER; note = 2'-fluoroguanosine
  modified_base 9: mod_base = OTHER; note = 2'-O-methyluridine
  modified_base 10: mod_base = OTHER; note = 2'-fluoroguanosine
  modified_base 11: mod_base = OTHER; note = 2'-O-methyladenosine
  modified_base 12: mod_base = OTHER; note = 2'-fluoroadenosine
  modified_base 13: mod_base = OTHER; note = 2'-O-methyluridine
  modified_base 14: mod_base = OTHER; note = 2'-fluoroguanosine
  modified_base 15: mod_base = OTHER; note = 2'-O-methylguanosine
  modified_base 16: mod_base = OTHER; note = 2'-fluorocytidine
  modified_base 17: mod_base = OTHER; note = 2'-O-methyluridine
  modified_base 18: mod_base = OTHER; note = 2'-fluoroguanosine
  modified_base 19: mod_base = OTHER; note = 2'-O-methyluridine
  modified_base 20: mod_base = OTHER; note = 2'-fluorouridine
  modified_base 21: mod_base = OTHER; note = 2'-O-methyluridine with phosphorothioate linkage
  modified_base 22: mod_base = OTHER; note = 2'-fluoroguanosine with phosphorothioate linkage
  modified_base 23: mod_base = OTHER; note = 2'-O-methylcytidine
tgcactggtgaatggctgtttgc

SEQ ID NO: 1129 - RNA, 23 nt, synthetic construct
  source 1..23: mol_type = other RNA
  modified_base 1: mod_base = OTHER; note = 5'-(E)-vinylphosphonate 2'-O-methylated adenosine with phosphorothioate linkage
  modified_base 2: mod_base = OTHER; note = 2'-fluorouridine with phosphorothioate linkage
  modified_base 3: mod_base = OTHER; note = 2'-O-methylguanosine
  modified_base 4: mod_base = OTHER; note = 2'-fluorocytidine
  modified_base 5: mod_base = OTHER; note = 2'-O-methyladenosine
  modified_base 6: mod_base = OTHER; note = 2'-fluorocytidine
  modified_base 7: mod_base = OTHER; note = 2'-O-methyluridine
  modified_base 8: mod_base = OTHER; note = 2'-fluoroguanosine
  modified_base 9: mod_base = OTHER; note = 2'-O-methylguanosine
  modified_base 10: mod_base = OTHER; note = 2'-fluorouridine
  modified_base 11: mod_base = OTHER; note = 2'-O-methylguanosine
  modified_base 12: mod_base = OTHER; note = 2'-fluoroadenosine
  modified_base 13: mod_base = OTHER; note = 2'-O-methyladenosine
  modified_base 14: mod_base = OTHER; note = 2'-fluorouridine
  modified_base 15: mod_base = OTHER; note = 2'-O-methylguanosine
  modified_base 16: mod_base = OTHER; note = 2'-fluoroguanosine
  modified_base 17: mod_base = OTHER; note = 2'-O-methylcytidine
  modified_base 18: mod_base = OTHER; note = 2'-fluorouridine
  modified_base 19: mod_base = OTHER; note = 2'-O-methylguanosine
  modified_base 20: mod_base = OTHER; note = 2'-fluorouridine
  modified_base 21: mod_base = OTHER; note = 2'-O-methyluridine with phosphorothioate linkage
  modified_base 22: mod_base = OTHER; note = 2'-fluorouridine with phosphorothioate linkage
  modified_base 23: mod_base = OTHER; note = 2'-O-methylguanosine
atgcactggtgaatggctgtttg

SEQ ID NO: 1130 - RNA, 23 nt, synthetic construct
  source 1..23: mol_type = other RNA
  modified_base 1: mod_base = OTHER; note = 5'-(E)-vinylphosphonate 2'-O-methylated adenosine with phosphorothioate linkage
  modified_base 2: mod_base = OTHER; note = 2'-fluoroadenosine with phosphorothioate linkage
  modified_base 3: mod_base = OTHER; note = 2'-O-methyluridine
  modified_base 4: mod_base = OTHER; note = 2'-fluoroguanosine
  modified_base 5: mod_base = OTHER; note = 2'-O-methylcytidine
  modified_base 6: mod_base = OTHER; note = 2'-fluoroadenosine
  modified_base 7: mod_base = OTHER; note = 2'-O-methylcytidine
  modified_base 8: mod_base = OTHER; note = 2'-fluorouridine
  modified_base 9: mod_base = OTHER; note = 2'-O-methylguanosine
  modified_base 10: mod_base = OTHER; note = 2'-fluoroguanosine
  modified_base 11: mod_base = OTHER; note = 2'-O-methyluridine
  modified_base 12: mod_base = OTHER; note = 2'-fluoroguanosine
  modified_base 13: mod_base = OTHER; note = 2'-O-methyladenosine
  modified_base 14: mod_base = OTHER; note = 2'-fluoroadenosine
  modified_base 15: mod_base = OTHER; note = 2'-O-methyluridine
  modified_base 16: mod_base = OTHER; note = 2'-fluoroguanosine
  modified_base 17: mod_base = OTHER; note = 2'-O-methylguanosine
  modified_base 18: mod_base = OTHER; note = 2'-fluorocytidine
  modified_base 19: mod_base = OTHER; note = 2'-O-methyluridine
  modified_base 20: mod_base = OTHER; note = 2'-fluoroguanosine
  modified_base 21: mod_base = OTHER; note = 2'-O-methyluridine with phosphorothioate linkage
  modified_base 22: mod_base = OTHER; note = 2'-fluorouridine with phosphorothioate linkage
  modified_base 23: mod_base = OTHER; note = 2'-O-methyluridine
aatgcactggtgaatggctgttt

SEQ ID NO: 1131 - RNA, 23 nt, synthetic construct
  source 1..23: mol_type = other RNA
  modified_base 1: mod_base = OTHER; note = 5'-(E)-vinylphosphonate 2'-O-methylated adenosine with phosphorothioate linkage
  modified_base 2: mod_base = OTHER; note = 2'-fluorocytidine with phosphorothioate linkage
  modified_base 3: mod_base = OTHER; note = 2'-O-methyladenosine
  modified_base 4: mod_base = OTHER; note = 2'-fluorouridine
  modified_base 5: mod_base = OTHER; note = 2'-O-methylguanosine
  modified_base 6: mod_base = OTHER; note = 2'-fluorocytidine
  modified_base 7: mod_base = OTHER; note = 2'-O-methyladenosine
  modified_base 8: mod_base = OTHER; note = 2'-fluorocytidine
  modified_base 9: mod_base = OTHER; note = 2'-O-methyluridine
  modified_base 10: mod_base = OTHER; note = 2'-fluoroguanosine
  modified_base 11: mod_base = OTHER; note = 2'-O-methylguanosine
  modified_base 12: mod_base = OTHER; note = 2'-fluorouridine
  modified_base 13: mod_base = OTHER; note = 2'-O-methylguanosine
  modified_base 14: mod_base = OTHER; note = 2'-fluoroadenosine
  modified_base 15: mod_base = OTHER; note = 2'-O-methyladenosine
  modified_base 16: mod_base = OTHER; note = 2'-fluorouridine
  modified_base 17: mod_base = OTHER; note = 2'-O-methylguanosine
  modified_base 18: mod_base = OTHER; note = 2'-fluoroguanosine
  modified_base 19: mod_base = OTHER; note = 2'-O-methylcytidine
  modified_base 20: mod_base = OTHER; note = 2'-fluorouridine
  modified_base 21: mod_base = OTHER; note = 2'-O-methylguanosine with phosphorothioate linkage
  modified_base 22: mod_base = OTHER; note = 2'-fluorouridine with phosphorothioate linkage
  modified_base 23: mod_base = OTHER; note = 2'-O-methyluridine
acatgcactggtgaatggctgtt

SEQ ID NO: 1132 - RNA, 23 nt, synthetic construct
  source 1..23: mol_type = other RNA
  modified_base 1: mod_base = OTHER; note = 5'-(E)-vinylphosphonate 2'-O-methylated adenosine with phosphorothioate linkage
  modified_base 2: mod_base = OTHER; note = 2'-fluorocytidine with phosphorothioate linkage
  modified_base 3: mod_base = OTHER; note = 2'-O-methylcytidine
  modified_base 4: mod_base = OTHER; note = 2'-fluoroadenosine
  modified_base 5: mod_base = OTHER; note = 2'-O-methyluridine
  modified_base 6: mod_base = OTHER; note = 2'-fluoroguanosine
  modified_base 7: mod_base = OTHER; note = 2'-O-methylcytidine
  modified_base 8: mod_base = OTHER; note = 2'-fluoroadenosine
  modified_base 9: mod_base = OTHER; note = 2'-O-methylcytidine
  modified_base 10: mod_base = OTHER; note = 2'-fluorouridine
  modified_base 11: mod_base = OTHER; note = 2'-O-methylguanosine
  modified_base 12: mod_base = OTHER; note = 2'-fluoroguanosine
  modified_base 13: mod_base = OTHER; note = 2'-O-methyluridine
  modified_base 14: mod_base = OTHER; note = 2'-fluoroguanosine
  modified_base 15: mod_base = OTHER; note = 2'-O-methyladenosine
  modified_base 16: mod_base = OTHER; note = 2'-fluoroadenosine
  modified_base 17: mod_base = OTHER; note = 2'-O-methyluridine
  modified_base 18: mod_base = OTHER; note = 2'-fluoroguanosine
  modified_base 19: mod_base = OTHER; note = 2'-O-methylguanosine
  modified_base 20: mod_base = OTHER; note = 2'-fluorocytidine
  modified_base 21: mod_base = OTHER; note = 2'-O-methyluridine with phosphorothioate linkage
  modified_base 22: mod_base = OTHER; note = 2'-fluoroguanosine with phosphorothioate linkage
  modified_base 23: mod_base = OTHER; note = 2'-O-methyluridine
accatgcactggtgaatggctgt

SEQ ID NO: 1133 - RNA, 23 nt, synthetic construct
  source 1..23: mol_type = other RNA
  modified_base 1: mod_base = OTHER; note = 5'-(E)-vinylphosphonate 2'-O-methylated adenosine with phosphorothioate linkage
  modified_base 2: mod_base = OTHER; note = 2'-fluoroadenosine with phosphorothioate linkage
  modified_base 3: mod_base = OTHER; note = 2'-O-methylcytidine
  modified_base 4: mod_base = OTHER; note = 2'-fluorocytidine
  modified_base 5: mod_base = OTHER; note = 2'-O-methyladenosine
  modified_base 6: mod_base = OTHER; note = 2'-fluorouridine
  modified_base 7: mod_base = OTHER; note = 2'-O-methylguanosine
  modified_base 8: mod_base = OTHER; note = 2'-fluorocytidine
  modified_base 9: mod_base = OTHER; note = 2'-O-methyladenosine
  modified_base 10: mod_base = OTHER; note = 2'-fluorocytidine
  modified_base 11: mod_base = OTHER; note = 2'-O-methyluridine
  modified_base 12: mod_base = OTHER; note = 2'-fluoroguanosine
  modified_base 13: mod_base = OTHER; note = 2'-O-methylguanosine
  modified_base 14: mod_base = OTHER; note = 2'-fluorouridine
  modified_base 15: mod_base = OTHER; note = 2'-O-methylguanosine
  modified_base 16: mod_base = OTHER; note = 2'-fluoroadenosine
  modified_base 17: mod_base = OTHER; note = 2'-O-methyladenosine
  modified_base 18: mod_base = OTHER; note = 2'-fluorouridine
  modified_base 19: mod_base = OTHER; note = 2'-O-methylguanosine
  modified_base 20: mod_base = OTHER; note = 2'-fluoroguanosine
  modified_base 21: mod_base = OTHER; note = 2'-O-methylcytidine with phosphorothioate linkage
  modified_base 22: mod_base = OTHER; note = 2'-fluorouridine with phosphorothioate linkage
  modified_base 23: mod_base = OTHER; note = 2'-O-methylguanosine
aaccatgcactggtgaatggctg

SEQ ID NO: 1134 - RNA, 23 nt, synthetic construct
  source 1..23: mol_type = other RNA
  modified_base 1: mod_base = OTHER; note = 5'-(E)-vinylphosphonate 2'-O-methylated adenosine with phosphorothioate linkage
  modified_base 2: mod_base = OTHER; note = 2'-fluoroadenosine with phosphorothioate linkage
  modified_base 3: mod_base = OTHER; note = 2'-O-methyladenosine
  modified_base 4: mod_base = OTHER; note = 2'-fluorocytidine
  modified_base 5: mod_base = OTHER; note = 2'-O-methylcytidine
  modified_base 6: mod_base = OTHER; note = 2'-fluoroadenosine
  modified_base 7: mod_base = OTHER; note = 2'-O-methyluridine
  modified_base 8: mod_base = OTHER; note = 2'-fluoroguanosine
  modified_base 9: mod_base = OTHER; note = 2'-O-methylcytidine
  modified_base 10: mod_base = OTHER; note = 2'-fluoroadenosine
  modified_base 11: mod_base = OTHER; note = 2'-O-methylcytidine
  modified_base 12: mod_base = OTHER; note = 2'-fluorouridine
  modified_base 13: mod_base = OTHER; note = 2'-O-methylguanosine
  modified_base 14: mod_base = OTHER; note = 2'-fluoroguanosine
  modified_base 15: mod_base = OTHER; note = 2'-O-methyluridine
  modified_base 16: mod_base = OTHER; note = 2'-fluoroguanosine
  modified_base 17: mod_base = OTHER; note = 2'-O-methyladenosine
  modified_base 18: mod_base = OTHER; note = 2'-fluoroadenosine
  modified_base 19: mod_base = OTHER; note = 2'-O-methyluridine
  modified_base 20: mod_base = OTHER; note = 2'-fluoroguanosine
  modified_base 21: mod_base = OTHER; note = 2'-O-methylguanosine with phosphorothioate linkage
  modified_base 22: mod_base = OTHER; note = 2'-fluorocytidine with phosphorothioate linkage
  modified_base 23: mod_base = OTHER; note = 2'-O-methyluridine
aaaccatgcactggtgaatggct

SEQ ID NO: 1135 - RNA, 23 nt, synthetic construct
  source 1..23: mol_type = other RNA
  modified_base 1: mod_base = OTHER; note = 5'-(E)-vinylphosphonate 2'-O-methylated guanosine with phosphorothioate linkage
  modified_base 2: mod_base = OTHER; note = 2'-fluoroadenosine with phosphorothioate linkage
  modified_base 3: mod_base = OTHER; note = 2'-O-methyladenosine
  modified_base 4: mod_base = OTHER; note = 2'-fluoroadenosine
  modified_base 5: mod_base = OTHER; note = 2'-O-methylcytidine
  modified_base 6: mod_base = OTHER; note = 2'-fluorocytidine
  modified_base 7: mod_base = OTHER; note = 2'-O-methyladenosine
  modified_base 8: mod_base = OTHER; note = 2'-fluorouridine
  modified_base 9: mod_base = OTHER; note = 2'-O-methylguanosine
  modified_base 10: mod_base = OTHER; note = 2'-fluorocytidine
  modified_base 11: mod_base = OTHER; note = 2'-O-methyladenosine
  modified_base 12: mod_base = OTHER; note = 2'-fluorocytidine
  modified_base 13: mod_base = OTHER; note = 2'-O-methyluridine
  modified_base 14: mod_base = OTHER; note = 2'-fluoroguanosine
  modified_base 15: mod_base = OTHER; note = 2'-O-methylguanosine
  modified_base 16: mod_base = OTHER; note = 2'-fluorouridine
  modified_base 17: mod_base = OTHER; note = 2'-O-methylguanosine
  modified_base 18: mod_base = OTHER; note = 2'-fluoroadenosine
  modified_base 19: mod_base = OTHER; note = 2'-O-methyladenosine
  modified_base 20: mod_base = OTHER; note = 2'-fluorouridine
  modified_base 21: mod_base = OTHER; note = 2'-O-methylguanosine with phosphorothioate linkage
  modified_base 22: mod_base = OTHER; note = 2'-fluoroguanosine with phosphorothioate linkage
  modified_base 23: mod_base = OTHER; note = 2'-O-methylcytidine
gaaaccatgcactggtgaatggc

SEQ ID NO: 1136 - RNA, 23 nt, synthetic construct
  source 1..23: mol_type = other RNA
  modified_base 1: mod_base = OTHER; note = 5'-(E)-vinylphosphonate 2'-O-methylated adenosine with phosphorothioate linkage
  modified_base 2: mod_base = OTHER; note = 2'-fluoroguanosine with phosphorothioate linkage
  modified_base 3: mod_base = OTHER; note = 2'-O-methyladenosine
  modified_base 4: mod_base = OTHER; note = 2'-fluoroadenosine
  modified_base 5: mod_base = OTHER; note = 2'-O-methyladenosine
  modified_base 6: mod_base = OTHER; note = 2'-fluorocytidine
  modified_base 7: mod_base = OTHER; note = 2'-O-methylcytidine
  modified_base 8: mod_base = OTHER; note = 2'-fluoroadenosine
  modified_base 9: mod_base = OTHER; note = 2'-O-methyluridine
  modified_base 10: mod_base = OTHER; note = 2'-fluoroguanosine
  modified_base 11: mod_base = OTHER; note = 2'-O-methylcytidine
  modified_base 12: mod_base = OTHER; note = 2'-fluoroadenosine
  modified_base 13: mod_base = OTHER; note = 2'-O-methylcytidine
  modified_base 14: mod_base = OTHER; note = 2'-fluorouridine
  modified_base 15: mod_base = OTHER; note = 2'-O-methylguanosine
  modified_base 16: mod_base = OTHER; note = 2'-fluoroguanosine
  modified_base 17: mod_base = OTHER; note = 2'-O-methyluridine
  modified_base 18: mod_base = OTHER; note = 2'-fluoroguanosine
  modified_base 19: mod_base = OTHER; note = 2'-O-methyladenosine
  modified_base 20: mod_base = OTHER; note = 2'-fluoroadenosine
  modified_base 21: mod_base = OTHER; note = 2'-O-methyluridine with phosphorothioate linkage
  modified_base 22: mod_base = OTHER; note = 2'-fluoroguanosine with phosphorothioate linkage
  modified_base 23: mod_base = OTHER; note = 2'-O-methylguanosine
agaaaccatgcactggtgaatgg

SEQ ID NO: 1137 - RNA, 23 nt, synthetic construct
  source 1..23: mol_type = other RNA
  modified_base 1: mod_base = OTHER; note = 5'-(E)-vinylphosphonate 2'-O-methylated guanosine with phosphorothioate linkage
  modified_base 2: mod_base = OTHER; note = 2'-fluoroadenosine with phosphorothioate linkage
  modified_base 3: mod_base = OTHER; note = 2'-O-methylguanosine
  modified_base 4: mod_base = OTHER; note = 2'-fluoroadenosine
  modified_base 5: mod_base = OTHER; note = 2'-O-methyladenosine
  modified_base 6: mod_base = OTHER; note = 2'-fluoroadenosine
  modified_base 7: mod_base = OTHER; note = 2'-O-methylcytidine
  modified_base 8: mod_base = OTHER; note = 2'-fluorocytidine
  modified_base 9: mod_base = OTHER; note = 2'-O-methyladenosine
  modified_base 10: mod_base = OTHER; note = 2'-fluorouridine
  modified_base 11: mod_base = OTHER; note = 2'-O-methylguanosine
  modified_base 12: mod_base = OTHER; note = 2'-fluorocytidine
  modified_base 13: mod_base = OTHER; note = 2'-O-methyladenosine
  modified_base 14: mod_base = OTHER; note = 2'-fluorocytidine
  modified_base 15: mod_base = OTHER; note = 2'-O-methyluridine
  modified_base 16: mod_base = OTHER; note = 2'-fluoroguanosine
  modified_base 17: mod_base = OTHER; note = 2'-O-methylguanosine
  modified_base 18: mod_base = OTHER; note = 2'-fluorouridine
  modified_base 19: mod_base = OTHER; note = 2'-O-methylguanosine
  modified_base 20: mod_base = OTHER; note = 2'-fluoroadenosine
  modified_base 21: mod_base = OTHER; note = 2'-O-methyladenosine with phosphorothioate linkage
  modified_base 22: mod_base = OTHER; note = 2'-fluorouridine with phosphorothioate linkage
  modified_base 23: mod_base = OTHER; note = 2'-O-methylguanosine
gagaaaccatgcactggtgaatg

SEQ ID NO: 1138 - RNA, 23 nt, synthetic construct
  source 1..23: mol_type = other RNA
  modified_base 1: mod_base = OTHER; note = 5'-(E)-vinylphosphonate 2'-O-methylated adenosine with phosphorothioate linkage
  modified_base 2: mod_base = OTHER; note = 2'-fluoroguanosine with phosphorothioate linkage
  modified_base 3: mod_base = OTHER; note = 2'-O-methyladenosine
  modified_base 4: mod_base = OTHER; note = 2'-fluoroguanosine
  modified_base 5: mod_base = OTHER; note = 2'-O-methyladenosine
  modified_base 6: mod_base = OTHER; note = 2'-fluoroadenosine
  modified_base 7: mod_base = OTHER; note = 2'-O-methyladenosine
  modified_base 8: mod_base = OTHER; note = 2'-fluorocytidine
  modified_base 9: mod_base = OTHER; note = 2'-O-methylcytidine
  modified_base 10: mod_base = OTHER; note = 2'-fluoroadenosine
  modified_base 11: mod_base = OTHER; note = 2'-O-methyluridine
  modified_base 12: mod_base = OTHER; note = 2'-fluoroguanosine
  modified_base 13: mod_base = OTHER; note = 2'-O-methylcytidine
  modified_base 14: mod_base = OTHER; note = 2'-fluoroadenosine
  modified_base 15: mod_base = OTHER; note = 2'-O-methylcytidine
  modified_base 16: mod_base = OTHER; note = 2'-fluorouridine
  modified_base 17: mod_base = OTHER; note = 2'-O-methylguanosine
  modified_base 18: mod_base = OTHER; note = 2'-fluoroguanosine
  modified_base 19: mod_base = OTHER; note = 2'-O-methyluridine
  modified_base 20: mod_base = OTHER; note = 2'-fluoroguanosine
  modified_base 21: mod_base = OTHER; note = 2'-O-methyladenosine with phosphorothioate linkage
  modified_base 22: mod_base = OTHER; note = 2'-fluoroadenosine with phosphorothioate linkage
  modified_base 23: mod_base = OTHER; note = 2'-O-methyluridine
agagaaaccatgcactggtgaat

SEQ ID NO: 1139 - RNA, 23 nt, synthetic construct
  source 1..23: mol_type = other RNA
  modified_base 1: mod_base = OTHER; note = 5'-(E)-vinylphosphonate 2'-O-methylated adenosine with phosphorothioate linkage
  modified_base 2: mod_base = OTHER; note = 2'-fluoroadenosine with phosphorothioate linkage
  modified_base 3: mod_base = OTHER; note = 2'-O-methylguanosine
  modified_base 4: mod_base = OTHER; note = 2'-fluoroadenosine
  modified_base 5: mod_base = OTHER; note = 2'-O-methylguanosine
  modified_base 6: mod_base = OTHER; note = 2'-fluoroadenosine
  modified_base 7: mod_base = OTHER; note = 2'-O-methyladenosine
  modified_base 8: mod_base = OTHER; note = 2'-fluoroadenosine
  modified_base 9: mod_base = OTHER; note = 2'-O-methylcytidine
  modified_base 10: mod_base = OTHER; note = 2'-fluorocytidine
  modified_base 11: mod_base = OTHER; note = 2'-O-methyladenosine
  modified_base 12: mod_base = OTHER; note = 2'-fluorouridine
  modified_base 13: mod_base = OTHER; note = 2'-O-methylguanosine
  modified_base 14: mod_base = OTHER; note = 2'-fluorocytidine
  modified_base 15: mod_base = OTHER; note = 2'-O-methyladenosine
  modified_base 16: mod_base = OTHER; note = 2'-fluorocytidine
  modified_base 17: mod_base = OTHER; note = 2'-O-methyluridine
  modified_base 18: mod_base = OTHER; note = 2'-fluoroguanosine
  modified_base 19: mod_base = OTHER; note = 2'-O-methylguanosine
  modified_base 20: mod_base = OTHER; note = 2'-fluorouridine
  modified_base 21: mod_base = OTHER; note = 2'-O-methylguanosine with phosphorothioate linkage
  modified_base 22: mod_base = OTHER; note = 2'-fluoroadenosine with phosphorothioate linkage
  modified_base 23: mod_base = OTHER; note = 2'-O-methyladenosine
aagagaaaccatgcactggtgaa

SEQ ID NO: 1140 - RNA, 23 nt, synthetic construct
  source 1..23: mol_type = other RNA
  modified_base 1: mod_base = OTHER; note = 5'-(E)-vinylphosphonate 2'-O-methylated adenosine with phosphorothioate linkage
  modified_base 2: mod_base = OTHER; note = 2'-fluoroadenosine with phosphorothioate linkage
  modified_base 3: mod_base = OTHER; note = 2'-O-methyladenosine
  modified_base 4: mod_base = OTHER; note = 2'-fluoroguanosine
  modified_base 5: mod_base = OTHER; note = 2'-O-methyladenosine
  modified_base 6: mod_base = OTHER; note = 2'-fluoroguanosine
  modified_base 7: mod_base = OTHER; note = 2'-O-methyladenosine
  modified_base 8: mod_base = OTHER; note = 2'-fluoroadenosine
  modified_base 9: mod_base = OTHER; note = 2'-O-methyladenosine
  modified_base 10: mod_base = OTHER; note = 2'-fluorocytidine
  modified_base 11: mod_base = OTHER; note = 2'-O-methylcytidine
  modified_base 12: mod_base = OTHER; note = 2'-fluoroadenosine
  modified_base 13: mod_base = OTHER; note = 2'-O-methyluridine
  modified_base 14: mod_base = OTHER; note = 2'-fluoroguanosine
  modified_base 15: mod_base = OTHER; note = 2'-O-methylcytidine
  modified_base 16: mod_base = OTHER; note = 2'-fluoroadenosine
  modified_base 17: mod_base = OTHER; note = 2'-O-methylcytidine
  modified_base 18: mod_base = OTHER; note = 2'-fluorouridine
  modified_base 19: mod_base = OTHER; note = 2'-O-methylguanosine
  modified_base 20: mod_base = OTHER; note = 2'-fluoroguanosine
  modified_base 21: mod_base = OTHER; note = 2'-O-methyluridine with phosphorothioate linkage
  modified_base 22: mod_base = OTHER; note = 2'-fluoroguanosine with phosphorothioate linkage
  modified_base 23: mod_base = OTHER; note = 2'-O-methyladenosine
aaagagaaaccatgcactggtga

SEQ ID NO: 1141 - RNA, 23 nt, synthetic construct
  source 1..23: mol_type = other RNA
  modified_base 1: mod_base = OTHER; note = 5'-(E)-vinylphosphonate 2'-O-methylated uridine with phosphorothioate linkage
  modified_base 2: mod_base = OTHER; note = 2'-fluorouridine with phosphorothioate linkage
  modified_base 3: mod_base = OTHER; note = 2'-O-methylguanosine
  modified_base 4: mod_base = OTHER; note = 2'-fluorocytidine
  modified_base 5: mod_base = OTHER; note = 2'-O-methyladenosine
  modified_base 6: mod_base = OTHER; note = 2'-fluoroadenosine
  modified_base 7: mod_base = OTHER; note = 2'-O-methylguanosine
  modified_base 8: mod_base = OTHER; note = 2'-fluoroadenosine
  modified_base 9: mod_base = OTHER; note = 2'-O-methylguanosine
  modified_base 10: mod_base = OTHER; note = 2'-fluoroadenosine
  modified_base 11: mod_base = OTHER; note = 2'-O-methyladenosine
  modified_base 12: mod_base = OTHER; note = 2'-fluoroadenosine
  modified_base 13: mod_base = OTHER; note = 2'-O-methylcytidine
  modified_base 14: mod_base = OTHER; note = 2'-fluorocytidine
  modified_base 15: mod_base = OTHER; note = 2'-O-methyladenosine
  modified_base 16: mod_base = OTHER; note = 2'-fluorouridine
  modified_base 17: mod_base = OTHER; note = 2'-O-methylguanosine
  modified_base 18: mod_base = OTHER; note = 2'-fluorocytidine
  modified_base 19: mod_base = OTHER; note = 2'-O-methyladenosine
  modified_base 20: mod_base = OTHER; note = 2'-fluorocytidine
  modified_base 21: mod_base = OTHER; note = 2'-O-methyluridine with phosphorothioate linkage
  modified_base 22: mod_base = OTHER; note = 2'-fluoroguanosine with phosphorothioate linkage
  modified_base 23: mod_base = OTHER; note = 2'-O-methylguanosine
ttgcaagagaaaccatgcactgg

SEQ ID NO: 1142 - RNA, 23 nt, synthetic construct
  source 1..23: mol_type = other RNA
  modified_base 1: mod_base = OTHER; note = 5'-(E)-vinylphosphonate 2'-O-methylated guanosine with phosphorothioate linkage
  modified_base 2: mod_base = OTHER; note = 2'-fluorouridine with phosphorothioate linkage
  modified_base 3: mod_base = OTHER; note = 2'-O-methylguanosine
  modified_base 4: mod_base = OTHER; note = 2'-fluorocytidine
  modified_base 5: mod_base = OTHER; note = 2'-O-methylguanosine
  modified_base 6: mod_base = OTHER; note = 2'-fluorouridine
  modified_base 7: mod_base = OTHER; note = 2'-O-methylguanosine
  modified_base 8: mod_base = OTHER; note = 2'-fluorouridine
  modified_base 9: mod_base = OTHER; note = 2'-O-methyluridine
  modified_base 10: mod_base = OTHER; note = 2'-fluoroguanosine
  modified_base 11: mod_base = OTHER; note = 2'-O-methylcytidine
  modified_base 12: mod_base = OTHER; note = 2'-fluoroadenosine
  modified_base 13: mod_base = OTHER; note = 2'-O-methyladenosine
  modified_base 14: mod_base = OTHER; note = 2'-fluoroguanosine
  modified_base 15: mod_base = OTHER; note = 2'-O-methyladenosine
  modified_base 16: mod_base = OTHER; note = 2'-fluoroguanosine
  modified_base 17: mod_base = OTHER; note = 2'-O-methyladenosine
  modified_base 18: mod_base = OTHER; note = 2'-fluoroadenosine
  modified_base 19: mod_base = OTHER; note = 2'-O-methyladenosine
  modified_base 20: mod_base = OTHER; note = 2'-fluorocytidine
  modified_base 21: mod_base = OTHER; note = 2'-O-methylcytidine with phosphorothioate linkage
  modified_base 22: mod_base = OTHER; note = 2'-fluoroadenosine with phosphorothioate linkage
  modified_base 23: mod_base = OTHER; note = 2'-O-methyluridine
gtgcgtgttgcaagagaaaccat

SEQ ID NO: 1143 - RNA, 23 nt, synthetic construct
  source 1..23: mol_type = other RNA
  modified_base 1: mod_base = OTHER; note = 5'-(E)-vinylphosphonate 2'-O-methylated uridine with phosphorothioate linkage
  modified_base 2: mod_base = OTHER; note = 2'-fluoroguanosine with phosphorothioate linkage
  modified_base 3: mod_base = OTHER; note = 2'-O-methyluridine
  modified_base 4: mod_base = OTHER; note = 2'-fluoroguanosine
  modified_base 5: mod_base = OTHER; note = 2'-O-methylcytidine
  modified_base 6: mod_base = OTHER; note = 2'-fluoroguanosine
  modified_base 7: mod_base = OTHER; note = 2'-O-methyluridine
  modified_base 8: mod_base = OTHER; note = 2'-fluoroguanosine
  modified_base 9: mod_base = OTHER; note = 2'-O-methyluridine
  modified_base 10: mod_base = OTHER; note = 2'-fluorouridine
  modified_base 11: mod_base = OTHER; note = 2'-O-methylguanosine
  modified_base 12: mod_base = OTHER; note = 2'-fluorocytidine
  modified_base 13: mod_base = OTHER; note = 2'-O-methyladenosine
  modified_base 14: mod_base = OTHER; note = 2'-fluoroadenosine
  modified_base 15: mod_base = OTHER; note = 2'-O-methylguanosine
  modified_base 16: mod_base = OTHER; note = 2'-fluoroadenosine
  modified_base 17: mod_base = OTHER; note = 2'-O-methylguanosine
  modified_base 18: mod_base = OTHER; note = 2'-fluoroadenosine
  modified_base 19: mod_base = OTHER; note = 2'-O-methyladenosine
  modified_base 20: mod_base = OTHER; note = 2'-fluoroadenosine
  modified_base 21: mod_base = OTHER; note = 2'-O-methylcytidine with phosphorothioate linkage
  modified_base 22: mod_base = OTHER; note = 2'-fluorocytidine with phosphorothioate linkage
  modified_base 23: mod_base = OTHER; note = 2'-O-methyladenosine
tgtgcgtgttgcaagagaaacca

SEQ ID NO: 1144 - RNA, 23 nt, synthetic construct
  source 1..23: mol_type = other RNA
  modified_base 1: mod_base = OTHER; note = 5'-(E)-vinylphosphonate 2'-O-methylated uridine with phosphorothioate linkage
  modified_base 2: mod_base = OTHER; note = 2'-fluorocytidine with phosphorothioate linkage
  modified_base 3: mod_base = OTHER; note = 2'-O-methyluridine
  modified_base 4: mod_base = OTHER; note = 2'-fluoroguanosine
  modified_base 5: mod_base = OTHER; note = 2'-O-methyluridine
  modified_base 6: mod_base = OTHER; note = 2'-fluoroguanosine
  modified_base 7: mod_base = OTHER; note = 2'-O-methylcytidine
  modified_base 8: mod_base = OTHER; note = 2'-fluoroguanosine
  modified_base 9: mod_base = OTHER; note = 2'-O-methyluridine
  modified_base 10: mod_base = OTHER; note = 2'-fluoroguanosine
  modified_base 11: mod_base = OTHER; note = 2'-O-methyluridine
  modified_base 12: mod_base = OTHER; note = 2'-fluorouridine
  modified_base 13: mod_base = OTHER; note = 2'-O-methylguanosine
  modified_base 14: mod_base = OTHER; note = 2'-fluorocytidine
  modified_base 15: mod_base = OTHER; note = 2'-O-methyladenosine
  modified_base 16: mod_base = OTHER; note = 2'-fluoroadenosine
  modified_base 17: mod_base = OTHER; note = 2'-O-methylguanosine
  modified_base 18: mod_base = OTHER; note = 2'-fluoroadenosine
  modified_base 19: mod_base = OTHER; note = 2'-O-methylguanosine
  modified_base 20: mod_base = OTHER; note = 2'-fluoroadenosine
  modified_base 21: mod_base = OTHER; note = 2'-O-methyladenosine with phosphorothioate linkage
  modified_base 22: mod_base = OTHER; note = 2'-fluoroadenosine with phosphorothioate linkage
  modified_base 23: mod_base = OTHER; note = 2'-O-methylcytidine
tctgtgcgtgttgcaagagaaac

SEQ ID NO: 1145 - RNA, 23 nt, synthetic construct
  source 1..23: mol_type = other RNA
  modified_base 1: mod_base = OTHER; note = 5'-(E)-vinylphosphonate 2'-O-methylated uridine with phosphorothioate linkage
  modified_base 2: mod_base = OTHER; note = 2'-fluorouridine with phosphorothioate linkage
  modified_base 3: mod_base = OTHER; note = 2'-O-methylcytidine
  modified_base 4: mod_base = OTHER; note = 2'-fluorouridine
  modified_base 5: mod_base = OTHER; note = 2'-O-methylguanosine
  modified_base 6: mod_base = OTHER; note = 2'-fluorouridine
  modified_base 7: mod_base = OTHER; note = 2'-O-methylguanosine
  modified_base 8: mod_base = OTHER; note = 2'-fluorocytidine
  modified_base 9: mod_base = OTHER; note = 2'-O-methylguanosine
  modified_base 10: mod_base = OTHER; note = 2'-fluorouridine
  modified_base 11: mod_base = OTHER; note = 2'-O-methylguanosine
  modified_base 12: mod_base = OTHER; note = 2'-fluorouridine
  modified_base 13: mod_base = OTHER; note = 2'-O-methyluridine
  modified_base 14: mod_base = OTHER; note = 2'-fluoroguanosine
  modified_base 15: mod_base = OTHER; note = 2'-O-methylcytidine
  modified_base 16: mod_base = OTHER; note = 2'-fluoroadenosine
  modified_base 17: mod_base = OTHER; note = 2'-O-methyladenosine
  modified_base 18: mod_base = OTHER; note = 2'-fluoroguanosine
  modified_base 19: mod_base = OTHER; note = 2'-O-methyladenosine
  modified_base 20: mod_base = OTHER; note = 2'-fluoroguanosine
  modified_base 21: mod_base = OTHER; note = 2'-O-methyladenosine with phosphorothioate linkage
  modified_base 22: mod_base = OTHER; note = 2'-fluoroadenosine with phosphorothioate linkage
  modified_base 23: mod_base = OTHER; note = 2'-O-methyladenosine
ttctgtgcgtgttgcaagagaaa

SEQ ID NO: 1146 - RNA, 23 nt, synthetic construct
  source 1..23: mol_type = other RNA
  modified_base 1: mod_base = OTHER; note = 5'-(E)-vinylphosphonate 2'-O-methylated guanosine with phosphorothioate linkage
  modified_base 2: mod_base = OTHER; note = 2'-fluorouridine with phosphorothioate linkage
  modified_base 3: mod_base = OTHER; note = 2'-O-methylguanosine
  modified_base 4: mod_base = OTHER; note = 2'-fluorouridine
  modified_base 5: mod_base = OTHER; note = 2'-O-methyluridine
  modified_base 6: mod_base = OTHER; note = 2'-fluorocytidine
  modified_base 7: mod_base = OTHER; note = 2'-O-methyluridine
  modified_base 8: mod_base = OTHER; note = 2'-fluoroguanosine
  modified_base 9: mod_base = OTHER; note = 2'-O-methyluridine
  modified_base 10: mod_base = OTHER; note = 2'-fluoroguanosine
  modified_base 11: mod_base = OTHER; note = 2'-O-methylcytidine
  modified_base 12: mod_base = OTHER; note = 2'-fluoroguanosine
  modified_base 13: mod_base = OTHER; note = 2'-O-methyluridine
  modified_base 14: mod_base = OTHER; note = 2'-fluoroguanosine
  modified_base 15: mod_base = OTHER; note = 2'-O-methyluridine
  modified_base 16: mod_base = OTHER; note = 2'-fluorouridine
  modified_base 17: mod_base = OTHER; note = 2'-O-methylguanosine
  modified_base 18: mod_base = OTHER; note = 2'-fluorocytidine
  modified_base 19: mod_base = OTHER; note = 2'-O-methyladenosine
  modified_base 20: mod_base = OTHER; note = 2'-fluoroadenosine
  modified_base 21: mod_base = OTHER; note = 2'-O-methylguanosine with phosphorothioate linkage
  modified_base 22: mod_base = OTHER; note = 2'-fluoroadenosine with phosphorothioate linkage
  modified_base 23: mod_base = OTHER; note = 2'-O-methylguanosine
gtgttctgtgcgtgttgcaagag

SEQ ID NO: 1147 - RNA, 23 nt, synthetic construct
  source 1..23: mol_type = other RNA
  modified_base 1: mod_base = OTHER; note = 5'-(E)-vinylphosphonate 2'-O-methylated adenosine with phosphorothioate linkage
  modified_base 2: mod_base = OTHER; note = 2'-fluoroguanosine with phosphorothioate linkage
  modified_base 3: mod_base = OTHER; note = 2'-O-methyluridine
  modified_base 4: mod_base = OTHER; note = 2'-fluoroguanosine
  modified_base 5: mod_base = OTHER; note = 2'-O-methyluridine
  modified_base 6: mod_base = OTHER; note = 2'-fluorouridine
  modified_base 7: mod_base = OTHER; note = 2'-O-methylcytidine
  modified_base 8: mod_base = OTHER; note = 2'-fluorouridine
  modified_base 9: mod_base = OTHER; note = 2'-O-methylguanosine
  modified_base 10: mod_base = OTHER; note = 2'-fluorouridine
  modified_base 11: mod_base = OTHER; note = 2'-O-methylguanosine
  modified_base 12: mod_base = OTHER; note = 2'-fluorocytidine
  modified_base 13: mod_base = OTHER; note = 2'-O-methylguanosine
  modified_base 14: mod_base = OTHER; note = 2'-fluorouridine
  modified_base 15: mod_base = OTHER; note = 2'-O-methylguanosine
  modified_base 16: mod_base = OTHER; note = 2'-fluorouridine
  modified_base 17: mod_base = OTHER; note = 2'-O-methyluridine
  modified_base 18: mod_base = OTHER; note = 2'-fluoroguanosine
  modified_base 19: mod_base = OTHER; note = 2'-O-methylcytidine
  modified_base 20: mod_base = OTHER; note = 2'-fluoroadenosine
  modified_base 21: mod_base = OTHER; note = 2'-O-methyladenosine with phosphorothioate linkage
  modified_base 22: mod_base = OTHER; note = 2'-fluoroguanosine with phosphorothioate linkage
  modified_base 23: mod_base = OTHER; note = 2'-O-methyladenosine
agtgttctgtgcgtgttgcaaga

SEQ ID NO: 1148 - RNA, 23 nt, synthetic construct
  source 1..23: mol_type = other RNA
  modified_base 1: mod_base = OTHER; note = 5'-(E)-vinylphosphonate 2'-O-methylated guanosine with phosphorothioate linkage
  modified_base 2: mod_base = OTHER; note = 2'-fluoroadenosine with phosphorothioate linkage
  modified_base 3: mod_base = OTHER; note = 2'-O-methylguanosine
  modified_base 4: mod_base = OTHER; note = 2'-fluorouridine
  modified_base 5: mod_base = OTHER; note = 2'-O-methylguanosine
  modified_base 6: mod_base = OTHER; note = 2'-fluorouridine
  modified_base 7: mod_base = OTHER; note = 2'-O-methyluridine
  modified_base 8: mod_base = OTHER; note = 2'-fluorocytidine
  modified_base 9: mod_base = OTHER; note = 2'-O-methyluridine
  modified_base 10: mod_base = OTHER; note = 2'-fluoroguanosine
  modified_base 11: mod_base = OTHER; note = 2'-O-methyluridine
  modified_base 12: mod_base = OTHER; note = 2'-fluoroguanosine
  modified_base 13: mod_base = OTHER; note = 2'-O-methylcytidine
  modified_base 14: mod_base = OTHER; note = 2'-fluoroguanosine
  modified_base 15: mod_base = OTHER; note = 2'-O-methyluridine
  modified_base 16: mod_base = OTHER; note = 2'-fluoroguanosine
  modified_base 17: mod_base = OTHER; note = 2'-O-methyluridine
  modified_base 18: mod_base = OTHER; note = 2'-fluorouridine
  modified_base 19: mod_base = OTHER; note = 2'-O-methylguanosine
  modified_base 20: mod_base = OTHER; note = 2'-fluorocytidine
  modified_base 21: mod_base = OTHER; note = 2'-O-methyladenosine with phosphorothioate linkage
  modified_base 22: mod_base = OTHER; note = 2'-fluoroadenosine with phosphorothioate linkage
  modified_base 23: mod_base = OTHER; note = 2'-O-methylguanosine
gagtgttctgtgcgtgttgcaag

SEQ ID NO: 1149 - RNA, 23 nt, synthetic construct
  source 1..23: mol_type = other RNA
  modified_base 1: mod_base = OTHER; note = 5'-(E)-vinylphosphonate 2'-O-methylated uridine with phosphorothioate linkage
  modified_base 2: mod_base = OTHER; note = 2'-fluoroguanosine with phosphorothioate linkage
  modified_base 3: mod_base = OTHER; note = 2'-O-methyladenosine
  modified_base 4: mod_base = OTHER; note = 2'-fluoroguanosine
  modified_base 5: mod_base = OTHER; note = 2'-O-methyluridine
  modified_base 6: mod_base = OTHER; note = 2'-fluoroguanosine
  modified_base 7: mod_base = OTHER; note = 2'-O-methyluridine
  modified_base 8: mod_base = OTHER; note = 2'-fluorouridine
  modified_base 9: mod_base = OTHER; note = 2'-O-methylcytidine
  modified_base 10: mod_base = OTHER; note = 2'-fluorouridine
  modified_base 11: mod_base = OTHER; note = 2'-O-methylguanosine
  modified_base 12: mod_base = OTHER; note = 2'-fluorouridine
  modified_base 13: mod_base = OTHER; note = 2'-O-methylguanosine
  modified_base 14: mod_base = OTHER; note = 2'-fluorocytidine
  modified_base 15: mod_base = OTHER; note = 2'-O-methylguanosine
  modified_base 16: mod_base = OTHER; note = 2'-fluorouridine
  modified_base 17: mod_base = OTHER; note = 2'-O-methylguanosine
  modified_base 18: mod_base = OTHER; note = 2'-fluorouridine
  modified_base 19: mod_base = OTHER; note = 2'-O-methyluridine
  modified_base 20: mod_base = OTHER; note = 2'-fluoroguanosine
  modified_base 21: mod_base = OTHER; note = 2'-O-methylcytidine with phosphorothioate linkage
  modified_base 22: mod_base = OTHER; note = 2'-fluoroadenosine with phosphorothioate linkage
  modified_base 23: mod_base = OTHER; note = 2'-O-methyladenosine
tgagtgttctgtgcgtgttgcaa

SEQ ID NO: 1150 - RNA, 23 nt, synthetic construct
  source 1..23: mol_type = other RNA
  modified_base 1: mod_base = OTHER; note = 5'-(E)-vinylphosphonate 2'-O-methylated adenosine with phosphorothioate linkage
  modified_base 2: mod_base = OTHER; note = 2'-fluorouridine with phosphorothioate linkage
  modified_base 3: mod_base = OTHER; note = 2'-O-methylguanosine
  modified_base 4: mod_base = OTHER; note = 2'-fluoroadenosine
  modified_base 5: mod_base = OTHER; note = 2'-O-methylguanosine
  modified_base 6: mod_base = OTHER; note = 2'-fluorouridine
  modified_base 7: mod_base = OTHER; note = 2'-O-methylguanosine
  modified_base 8: mod_base = OTHER; note = 2'-fluorouridine
  modified_base 9: mod_base = OTHER; note = 2'-O-methyluridine
  modified_base 10: mod_base = OTHER; note = 2'-fluorocytidine
  modified_base 11: mod_base = OTHER; note = 2'-O-methyluridine
  modified_base 12: mod_base = OTHER; note = 2'-fluoroguanosine
  modified_base 13: mod_base = OTHER; note = 2'-O-methyluridine
  modified_base 14: mod_base = OTHER; note = 2'-fluoroguanosine
  modified_base 15: mod_base = OTHER; note = 2'-O-methylcytidine
  modified_base 16: mod_base = OTHER; note = 2'-fluoroguanosine
  modified_base 17: mod_base = OTHER; note = 2'-O-methyluridine
  modified_base 18: mod_base = OTHER; note = 2'-fluoroguanosine
  modified_base 19: mod_base = OTHER; note = 2'-O-methyluridine
  modified_base 20: mod_base = OTHER; note = 2'-fluorouridine
  modified_base 21: mod_base = OTHER; note = 2'-O-methylguanosine with phosphorothioate linkage
  modified_base 22: mod_base = OTHER; note = 2'-fluorocytidine with phosphorothioate linkage
  modified_base 23: mod_base = OTHER; note = 2'-O-methyladenosine
atgagtgttctgtgcgtgttgca

SEQ ID NO: 1151 - RNA, 23 nt, synthetic construct
  source 1..23: mol_type = other RNA
  modified_base 1: mod_base = OTHER; note = 5'-(E)-vinylphosphonate 2'-O-methylated adenosine with phosphorothioate linkage
  modified_base 2: mod_base = OTHER; note = 2'-fluorocytidine with phosphorothioate linkage
  modified_base 3: mod_base = OTHER; note = 2'-O-methyladenosine
  modified_base 4: mod_base = OTHER; note = 2'-fluorouridine
  modified_base 5: mod_base = OTHER; note = 2'-O-methylguanosine
  modified_base 6: mod_base = OTHER; note = 2'-fluoroadenosine
  modified_base 7: mod_base = OTHER; note = 2'-O-methylguanosine
  modified_base 8: mod_base = OTHER; note = 2'-fluorouridine
  modified_base 9: mod_base = OTHER; note = 2'-O-methylguanosine
  modified_base 10: mod_base = OTHER; note = 2'-fluorouridine
  modified_base 11: mod_base = OTHER; note = 2'-O-methyluridine
  modified_base 12: mod_base = OTHER; note = 2'-fluorocytidine
  modified_base 13: mod_base = OTHER; note = 2'-O-methyluridine
  modified_base 14: mod_base = OTHER; note = 2'-fluoroguanosine
  modified_base 15: mod_base = OTHER; note = 2'-O-methyluridine
  modified_base 16: mod_base = OTHER; note = 2'-fluoroguanosine
  modified_base 17: mod_base = OTHER; note = 2'-O-methylcytidine
  modified_base 18: mod_base = OTHER; note = 2'-fluoroguanosine
  modified_base 19: mod_base = OTHER; note = 2'-O-methyluridine
  modified_base 20: mod_base = OTHER; note = 2'-fluoroguanosine
  modified_base 21: mod_base = OTHER; note = 2'-O-methyluridine with phosphorothioate linkage
  modified_base 22: mod_base = OTHER; note = 2'-fluorouridine with phosphorothioate linkage
  modified_base 23: mod_base = OTHER; note = 2'-O-methylguanosine
acatgagtgttctgtgcgtgttg

SEQ ID NO: 1152 - RNA, 23 nt, synthetic construct
  source 1..23: mol_type = other RNA
  modified_base 1: mod_base = OTHER; note = 5'-(E)-vinylphosphonate 2'-O-methylated uridine with phosphorothioate linkage
  modified_base 2: mod_base = OTHER; note = 2'-fluorocytidine with phosphorothioate linkage
  modified_base 3: mod_base = OTHER; note = 2'-O-methylcytidine
  modified_base 4: mod_base = OTHER; note = 2'-fluoroadenosine
  modified_base 5: mod_base = OTHER; note = 2'-O-methyluridine
  modified_base 6: mod_base = OTHER; note = 2'-fluoroguanosine
  modified_base 7: mod_base = OTHER; note = 2'-O-methyladenosine
  modified_base 8: mod_base = OTHER; note = 2'-fluoroguanosine
  modified_base 9: mod_base = OTHER; note = 2'-O-methyluridine
  modified_base 10: mod_base = OTHER; note = 2'-fluoroguanosine
  modified_base 11: mod_base = OTHER; note = 2'-O-methyluridine
  modified_base 12: mod_base = OTHER; note = 2'-fluorouridine
  modified_base 13: mod_base = OTHER; note = 2'-O-methylcytidine
  modified_base 14: mod_base = OTHER; note = 2'-fluorouridine
  modified_base 15: mod_base = OTHER; note = 2'-O-methylguanosine
  modified_base 16: mod_base = OTHER; note = 2'-fluorouridine
  modified_base 17: mod_base = OTHER; note = 2'-O-methylguanosine
  modified_base 18: mod_base = OTHER; note = 2'-fluorocytidine
  modified_base 19: mod_base = OTHER; note = 2'-O-methylguanosine
  modified_base 20: mod_base = OTHER; note = 2'-fluorouridine
  modified_base 21: mod_base = OTHER; note = 2'-O-methylguanosine with phosphorothioate linkage
  modified_base 22: mod_base = OTHER; note = 2'-fluorouridine with phosphorothioate linkage
  modified_base 23: mod_base = OTHER; note = 2'-O-methyluridine
tccatgagtgttctgtgcgtgtt

SEQ ID NO: 1153 - RNA, 23 nt, synthetic construct
  source 1..23: mol_type = other RNA
  modified_base 1: mod_base = OTHER; note = 5'-(E)-vinylphosphonate 2'-O-methylated adenosine with phosphorothioate linkage
  modified_base 2: mod_base = OTHER; note = 2'-fluorouridine with phosphorothioate linkage
  modified_base 3: mod_base = OTHER; note = 2'-O-methylcytidine
  modified_base 4: mod_base = OTHER; note = 2'-fluorocytidine
  modified_base 5: mod_base = OTHER; note = 2'-O-methyladenosine
  modified_base 6: mod_base = OTHER; note = 2'-fluorouridine
  modified_base 7: mod_base = OTHER; note = 2'-O-methylguanosine
  modified_base 8: mod_base = OTHER; note = 2'-fluoroadenosine
  modified_base 9: mod_base = OTHER; note = 2'-O-methylguanosine
  modified_base 10: mod_base = OTHER; note = 2'-fluorouridine
  modified_base 11: mod_base = OTHER; note = 2'-O-methylguanosine
  modified_base 12: mod_base = OTHER; note = 2'-fluorouridine
  modified_base 13: mod_base = OTHER; note = 2'-O-methyluridine
  modified_base 14: mod_base = OTHER; note = 2'-fluorocytidine
  modified_base 15: mod_base = OTHER; note = 2'-O-methyluridine
  modified_base 16: mod_base = OTHER; note = 2'-fluoroguanosine
  modified_base 17: mod_base = OTHER; note = 2'-O-methyluridine
  modified_base 18: mod_base = OTHER; note = 2'-fluoroguanosine
  modified_base 19: mod_base = OTHER; note = 2'-O-methylcytidine
  modified_base 20: mod_base = OTHER; note = 2'-fluoroguanosine
  modified_base 21: mod_base = OTHER; note = 2'-O-methyluridine with phosphorothioate linkage
  modified_base 22: mod_base = OTHER; note = 2'-fluoroguanosine with phosphorothioate linkage
  modified_base 23: mod_base = OTHER; note = 2'-O-methyluridine
atccatgagtgttctgtgcgtgt

SEQ ID NO: 1154 - RNA, 23 nt, synthetic construct
  source 1..23: mol_type = other RNA
  modified_base 1: mod_base = OTHER; note = 5'-(E)-vinylphosphonate 2'-O-methylated adenosine with phosphorothioate linkage
  modified_base 2: mod_base = OTHER; note = 2'-fluoroadenosine with phosphorothioate linkage
  modified_base 3: mod_base = OTHER; note = 2'-O-methyluridine
  modified_base 4: mod_base = OTHER; note = 2'-fluorocytidine
  modified_base 5: mod_base = OTHER; note = 2'-O-methylcytidine
  modified_base 6: mod_base = OTHER; note = 2'-fluoroadenosine
  modified_base 7: mod_base = OTHER; note = 2'-O-methyluridine
  modified_base 8: mod_base = OTHER; note = 2'-fluoroguanosine
  modified_base 9: mod_base = OTHER; note = 2'-O-methyladenosine
  modified_base 10: mod_base = OTHER; note = 2'-fluoroguanosine
  modified_base 11: mod_base = OTHER; note = 2'-O-methyluridine
  modified_base 12: mod_base = OTHER; note = 2'-fluoroguanosine
  modified_base 13: mod_base = OTHER; note = 2'-O-methyluridine
  modified_base 14: mod_base = OTHER; note = 2'-fluorouridine
  modified_base 15: mod_base = OTHER; note = 2'-O-methylcytidine
  modified_base 16: mod_base = OTHER; note = 2'-fluorouridine
  modified_base 17: mod_base = OTHER; note = 2'-O-methylguanosine
  modified_base 18: mod_base = OTHER; note = 2'-fluorouridine
  modified_base 19: mod_base = OTHER; note = 2'-O-methylguanosine
  modified_base 20: mod_base = OTHER; note = 2'-fluorocytidine
  modified_base 21: mod_base = OTHER; note = 2'-O-methylguanosine with phosphorothioate linkage
  modified_base 22: mod_base = OTHER; note = 2'-fluorouridine with phosphorothioate linkage
  modified_base 23: mod_base = OTHER; note = 2'-O-methylguanosine
aatccatgagtgttctgtgcgtg

SEQ ID NO: 1155 - RNA, 23 nt, synthetic construct
  source 1..23: mol_type = other RNA
  modified_base 1: mod_base = OTHER; note = 5'-(E)-vinylphosphonate 2'-O-methylated uridine with phosphorothioate linkage
  modified_base 2: mod_base = OTHER; note = 2'-fluoroadenosine with phosphorothioate linkage
  modified_base 3: mod_base = OTHER; note = 2'-O-methyladenosine
  modified_base 4: mod_base = OTHER; note = 2'-fluorouridine
  modified_base 5: mod_base = OTHER; note = 2'-O-methylcytidine
  modified_base 6: mod_base = OTHER; note = 2'-fluorocytidine
  modified_base 7: mod_base = OTHER; note = 2'-O-methyladenosine
  modified_base 8: mod_base = OTHER; note = 2'-fluorouridine
  modified_base 9: mod_base = OTHER; note = 2'-O-methylguanosine
  modified_base 10: mod_base = OTHER; note = 2'-fluoroadenosine
  modified_base 11: mod_base = OTHER; note = 2'-O-methylguanosine
  modified_base 12: mod_base = OTHER; note = 2'-fluorouridine
  modified_base 13: mod_base = OTHER; note = 2'-O-methylguanosine
  modified_base 14: mod_base = OTHER; note = 2'-fluorouridine
  modified_base 15: mod_base = OTHER; note = 2'-O-methyluridine
  modified_base 16: mod_base = OTHER; note = 2'-fluorocytidine
  modified_base 17: mod_base = OTHER; note = 2'-O-methyluridine
  modified_base 18: mod_base = OTHER; note = 2'-fluoroguanosine
  modified_base 19: mod_base = OTHER; note = 2'-O-methyluridine
  modified_base 20: mod_base = OTHER; note = 2'-fluoroguanosine
  modified_base 21: mod_base = OTHER; note = 2'-O-methylcytidine with phosphorothioate linkage
  modified_base 22: mod_base = OTHER; note = 2'-fluoroguanosine with phosphorothioate linkage
  modified_base 23: mod_base = OTHER; note = 2'-O-methyluridine
taatccatgagtgttctgtgcgt

SEQ ID NO: 1156 - RNA, 23 nt, synthetic construct
  source 1..23: mol_type = other RNA
  modified_base 1: mod_base = OTHER; note = 5'-(E)-vinylphosphonate 2'-O-methylated uridine with phosphorothioate linkage
  modified_base 2: mod_base = OTHER; note = 2'-fluorouridine with phosphorothioate linkage
  modified_base 3: mod_base = OTHER; note = 2'-O-methyladenosine
  modified_base 4: mod_base = OTHER; note = 2'-fluoroadenosine
  modified_base 5: mod_base = OTHER; note = 2'-O-methyluridine
  modified_base 6: mod_base = OTHER; note = 2'-fluorocytidine
  modified_base 7: mod_base = OTHER; note = 2'-O-methylcytidine
  modified_base 8: mod_base = OTHER; note = 2'-fluoroadenosine
  modified_base 9: mod_base = OTHER; note = 2'-O-methyluridine
  modified_base 10: mod_base = OTHER; note = 2'-fluoroguanosine
  modified_base 11: mod_base = OTHER; note = 2'-O-methyladenosine
  modified_base 12: mod_base = OTHER; note = 2'-fluoroguanosine
  modified_base 13: mod_base = OTHER; note = 2'-O-methyluridine
  modified_base 14: mod_base = OTHER; note = 2'-fluoroguanosine
  modified_base 15: mod_base = OTHER; note = 2'-O-methyluridine
  modified_base 16: mod_base = OTHER; note = 2'-fluorouridine
  modified_base 17: mod_base = OTHER; note = 2'-O-methylcytidine
  modified_base 18: mod_base = OTHER; note = 2'-fluorouridine
  modified_base 19: mod_base = OTHER; note = 2'-O-methylguanosine
  modified_base 20: mod_base = OTHER; note = 2'-fluorouridine
  modified_base 21: mod_base = OTHER; note = 2'-O-methylguanosine with phosphorothioate linkage
  modified_base 22: mod_base = OTHER; note = 2'-fluorocytidine with phosphorothioate linkage
  modified_base 23: mod_base = OTHER; note = 2'-O-methylguanosine
ttaatccatgagtgttctgtgcg

SEQ ID NO: 1157 - RNA, 23 nt, synthetic construct
  source 1..23: mol_type = other RNA
  modified_base 1: mod_base = OTHER; note = 5'-(E)-vinylphosphonate 2'-O-methylated adenosine with phosphorothioate linkage
  modified_base 2: mod_base = OTHER; note = 2'-fluorouridine with phosphorothioate linkage
  modified_base 3: mod_base = OTHER; note = 2'-O-methyluridine
  modified_base 4: mod_base = OTHER; note = 2'-fluoroadenosine
  modified_base 5: mod_base = OTHER; note = 2'-O-methyladenosine
  modified_base 6: mod_base = OTHER; note = 2'-fluorouridine
  modified_base 7: mod_base = OTHER; note = 2'-O-methylcytidine
  modified_base 8: mod_base = OTHER; note = 2'-fluorocytidine
  modified_base 9: mod_base = OTHER; note = 2'-O-methyladenosine
  modified_base 10: mod_base = OTHER; note = 2'-fluorouridine
  modified_base 11: mod_base = OTHER; note = 2'-O-methylguanosine
  modified_base 12: mod_base = OTHER; note = 2'-fluoroadenosine
  modified_base 13: mod_base = OTHER; note = 2'-O-methylguanosine
  modified_base 14: mod_base = OTHER; note = 2'-fluorouridine
  modified_base 15: mod_base = OTHER; note = 2'-O-methylguanosine
  modified_base 16: mod_base = OTHER; note = 2'-fluorouridine
  modified_base 17: mod_base = OTHER; note = 2'-O-methyluridine
  modified_base 18: mod_base = OTHER; note = 2'-fluorocytidine
  modified_base 19: mod_base = OTHER; note = 2'-O-methyluridine
  modified_base 20: mod_base = OTHER; note = 2'-fluoroguanosine
  modified_base 21: mod_base = OTHER; note = 2'-O-methyluridine with phosphorothioate linkage
  modified_base 22: mod_base = OTHER; note = 2'-fluoroguanosine with phosphorothioate linkage
  modified_base 23: mod_base = OTHER; note = 2'-O-methylcytidine
attaatccatgagtgttctgtgc

SEQ ID NO: 1158 - RNA, 23 nt, synthetic construct
  source 1..23: mol_type = other RNA
  modified_base 1: mod_base = OTHER; note = 5'-(E)-vinylphosphonate 2'-O-methylated uridine with phosphorothioate linkage
  modified_base 2: mod_base = OTHER; note = 2'-fluorocytidine with phosphorothioate linkage
  modified_base 3: mod_base = OTHER; note = 2'-O-methyluridine
  modified_base 4: mod_base = OTHER; note = 2'-fluorouridine
  modified_base 5: mod_base = OTHER; note = 2'-O-methyladenosine
  modified_base 6: mod_base = OTHER; note = 2'-fluoroadenosine
  modified_base 7: mod_base = OTHER; note = 2'-O-methyluridine
  modified_base 8: mod_base = OTHER; note = 2'-fluorocytidine
  modified_base 9: mod_base = OTHER; note = 2'-O-methylcytidine
  modified_base 10: mod_base = OTHER; note = 2'-fluoroadenosine
  modified_base 11: mod_base = OTHER; note = 2'-O-methyluridine
  modified_base 12: mod_base = OTHER; note = 2'-fluoroguanosine
  modified_base 13: mod_base = OTHER; note = 2'-O-methyladenosine
  modified_base 14: mod_base = OTHER; note = 2'-fluoroguanosine
  modified_base 15: mod_base = OTHER; note = 2'-O-methyluridine
  modified_base 16: mod_base = OTHER; note = 2'-fluoroguanosine
  modified_base 17: mod_base = OTHER; note = 2'-O-methyluridine
  modified_base 18: mod_base = OTHER; note = 2'-fluorouridine
  modified_base 19: mod_base = OTHER; note = 2'-O-methylcytidine
  modified_base 20: mod_base = OTHER; note = 2'-fluorouridine
  modified_base 21: mod_base = OTHER; note = 2'-O-methylguanosine with phosphorothioate linkage
  modified_base 22: mod_base = OTHER; note = 2'-fluorouridine with phosphorothioate linkage
  modified_base 23: mod_base = OTHER; note = 2'-O-methylguanosine
tcttaatccatgagtgttctgtg

SEQ ID NO: 1159 - RNA, 23 nt, synthetic construct
  source 1..23: mol_type = other RNA
  modified_base 1: mod_base = OTHER; note = 5'-(E)-vinylphosphonate 2'-O-methylated uridine with phosphorothioate linkage
  modified_base 2: mod_base = OTHER; note = 2'-fluorouridine with phosphorothioate linkage
  modified_base 3: mod_base = OTHER; note = 2'-O-methylcytidine
  modified_base 4: mod_base = OTHER; note = 2'-fluorouridine
  modified_base 5: mod_base = OTHER; note = 2'-O-methyluridine
  modified_base 6: mod_base = OTHER; note = 2'-fluoroadenosine
  modified_base 7: mod_base = OTHER; note = 2'-O-methyladenosine
  modified_base 8: mod_base = OTHER; note = 2'-fluorouridine
  modified_base 9: mod_base = OTHER; note = 2'-O-methylcytidine
  modified_base 10: mod_base = OTHER; note = 2'-fluorocytidine
  modified_base 11: mod_base = OTHER; note = 2'-O-methyladenosine
  modified_base 12: mod_base = OTHER; note = 2'-fluorouridine
  modified_base 13: mod_base = OTHER; note = 2'-O-methylguanosine
  modified_base 14: mod_base = OTHER; note = 2'-fluoroadenosine
  modified_base 15: mod_base = OTHER; note = 2'-O-methylguanosine
  modified_base 16: mod_base = OTHER; note = 2'-fluorouridine
  modified_base 17: mod_base = OTHER; note = 2'-O-methylguanosine
  modified_base 18: mod_base = OTHER; note = 2'-fluorouridine
  modified_base 19: mod_base = OTHER; note = 2'-O-methyluridine
  modified_base 20: mod_base = OTHER; note = 2'-fluorocytidine
  modified_base 21: mod_base = OTHER; note = 2'-O-methyluridine with phosphorothioate linkage
  modified_base 22: mod_base = OTHER; note = 2'-fluoroguanosine with phosphorothioate linkage
  modified_base 23: mod_base = OTHER; note = 2'-O-methyluridine
ttcttaatccatgagtgttctgt

SEQ ID NO: 1160 - RNA, 23 nt, synthetic construct
  source 1..23: mol_type = other RNA
  modified_base 1: mod_base = OTHER; note = 5'-(E)-vinylphosphonate 2'-O-methylated adenosine with phosphorothioate linkage
  modified_base 2: mod_base = OTHER; note = 2'-fluorouridine with phosphorothioate linkage
  modified_base 3: mod_base = OTHER; note = 2'-O-methyluridine
  modified_base 4: mod_base = OTHER; note = 2'-fluorocytidine
  modified_base 5: mod_base = OTHER; note = 2'-O-methyluridine
  modified_base 6: mod_base = OTHER; note = 2'-fluorouridine
  modified_base 7: mod_base = OTHER; note = 2'-O-methyladenosine
  modified_base 8: mod_base = OTHER; note = 2'-fluoroadenosine
  modified_base 9: mod_base = OTHER; note = 2'-O-methyluridine
  modified_base 10: mod_base = OTHER; note = 2'-fluorocytidine
  modified_base 11: mod_base = OTHER; note = 2'-O-methylcytidine
  modified_base 12: mod_base = OTHER; note = 2'-fluoroadenosine
  modified_base 13: mod_base = OTHER; note = 2'-O-methyluridine
  modified_base 14: mod_base = OTHER; note = 2'-fluoroguanosine
  modified_base 15: mod_base = OTHER; note = 2'-O-methyladenosine
  modified_base 16: mod_base = OTHER; note = 2'-fluoroguanosine
  modified_base 17: mod_base = OTHER; note = 2'-O-methyluridine
  modified_base 18: mod_base = OTHER; note = 2'-fluoroguanosine
  modified_base 19: mod_base = OTHER; note = 2'-O-methyluridine
  modified_base 20: mod_base = OTHER; note = 2'-fluorouridine
  modified_base 21: mod_base = OTHER; note = 2'-O-methylcytidine with phosphorothioate linkage
  modified_base 22: mod_base = OTHER; note = 2'-fluorouridine with phosphorothioate linkage
  modified_base 23: mod_base = OTHER; note = 2'-O-methylguanosine
attcttaatccatgagtgttctg

SEQ ID NO: 1161 - RNA, 23 nt, synthetic construct
  source 1..23: mol_type = other RNA
  modified_base 1: mod_base = OTHER; note = 5'-(E)-vinylphosphonate 2'-O-methylated guanosine with phosphorothioate linkage
  modified_base 2: mod_base = OTHER; note = 2'-fluoroadenosine with phosphorothioate linkage
  modified_base 3: mod_base = OTHER; note = 2'-O-methyluridine
  modified_base 4: mod_base = OTHER; note = 2'-fluorouridine
  modified_base 5: mod_base = OTHER; note = 2'-O-methylcytidine
  modified_base 6: mod_base = OTHER; note = 2'-fluorouridine
  modified_base 7: mod_base = OTHER; note = 2'-O-methyluridine
  modified_base 8: mod_base = OTHER; note = 2'-fluoroadenosine
  modified_base 9: mod_base = OTHER; note = 2'-O-methyladenosine
  modified_base 10: mod_base = OTHER; note = 2'-fluorouridine
  modified_base 11: mod_base = OTHER; note = 2'-O-methylcytidine
  modified_base 12: mod_base = OTHER; note = 2'-fluorocytidine
  modified_base 13: mod_base = OTHER; note = 2'-O-methyladenosine
  modified_base 14: mod_base = OTHER; note = 2'-fluorouridine
  modified_base 15: mod_base = OTHER; note = 2'-O-methylguanosine
  modified_base 16: mod_base = OTHER; note = 2'-fluoroadenosine
  modified_base 17: mod_base = OTHER; note = 2'-O-methylguanosine
  modified_base 18: mod_base = OTHER; note = 2'-fluorouridine
  modified_base 19: mod_base = OTHER; note = 2'-O-methylguanosine
  modified_base 20: mod_base = OTHER; note = 2'-fluorouridine
  modified_base 21: mod_base = OTHER; note = 2'-O-methyluridine with phosphorothioate linkage
  modified_base 22: mod_base = OTHER; note = 2'-fluorocytidine with phosphorothioate linkage
  modified_base 23: mod_base = OTHER; note = 2'-O-methyluridine
gattcttaatccatgagtgttct

SEQ ID NO: 1162 - RNA, 23 nt, synthetic construct
  source 1..23: mol_type = other RNA
  modified_base 1: mod_base = OTHER; note = 5'-(E)-vinylphosphonate 2'-O-methylated guanosine with phosphorothioate linkage
  modified_base 2: mod_base = OTHER; note = 2'-fluorocytidine with phosphorothioate linkage
  modified_base 3: mod_base = OTHER; note = 2'-O-methyluridine
  modified_base 4: mod_base = OTHER; note = 2'-fluorouridine
  modified_base 5: mod_base = OTHER; note = 2'-O-methyluridine
  modified_base 6: mod_base = OTHER; note = 2'-fluorocytidine
  modified_base 7: mod_base = OTHER; note = 2'-O-methyluridine
  modified_base 8: mod_base = OTHER; note = 2'-fluoroadenosine
  modified_base 9: mod_base = OTHER; note = 2'-O-methyladenosine
  modified_base 10: mod_base = OTHER; note = 2'-fluoroguanosine
  modified_base 11: mod_base = OTHER; note = 2'-O-methyluridine
  modified_base 12: mod_base = OTHER; note = 2'-fluoroadenosine
  modified_base 13: mod_base = OTHER; note = 2'-O-methylguanosine
  modified_base 14: mod_base = OTHER; note = 2'-fluoroadenosine
  modified_base 15: mod_base = OTHER; note = 2'-O-methyluridine
  modified_base 16: mod_base = OTHER; note = 2'-fluorouridine
  modified_base 17: mod_base = OTHER; note = 2'-O-methylcytidine
  modified_base 18: mod_base = OTHER; note = 2'-fluorouridine
  modified_base 19: mod_base = OTHER; note = 2'-O-methyluridine
  modified_base 20: mod_base = OTHER; note = 2'-fluoroadenosine
  modified_base 21: mod_base = OTHER; note = 2'-O-methyladenosine with phosphorothioate linkage
  modified_base 22: mod_base = OTHER; note = 2'-fluorouridine with phosphorothioate linkage
  modified_base 23: mod_base = OTHER; note = 2'-O-methylcytidine
gctttctaagtagattcttaatc

SEQ ID NO: 1163 - RNA, 23 nt, synthetic construct
  source 1..23: mol_type = other RNA
  modified_base 1: mod_base = OTHER; note = 5'-(E)-vinylphosphonate 2'-O-methylated adenosine with phosphorothioate linkage
  modified_base 2: mod_base = OTHER; note = 2'-fluoroguanosine with phosphorothioate linkage
  modified_base 3: mod_base = OTHER; note = 2'-O-methyluridine
  modified_base 4: mod_base = OTHER; note = 2'-fluorocytidine
  modified_base 5: mod_base = OTHER; note = 2'-O-methylcytidine
  modified_base 6: mod_base = OTHER; note = 2'-fluorouridine
  modified_base 7: mod_base = OTHER; note = 2'-O-methylguanosine
  modified_base 8: mod_base = OTHER; note = 2'-fluoroadenosine
  modified_base 9: mod_base = OTHER; note = 2'-O-methyladenosine
  modified_base 10: mod_base = OTHER; note = 2'-fluoroguanosine
  modified_base 11: mod_base = OTHER; note = 2'-O-methylguanosine
  modified_base 12: mod_base = OTHER; note = 2'-fluoroguanosine
  modified_base 13: mod_base = OTHER; note = 2'-O-methyladenosine
  modified_base 14: mod_base = OTHER; note = 2'-fluorouridine
  modified_base 15: mod_base = OTHER; note = 2'-O-methyladenosine
  modified_base 16: mod_base = OTHER; note = 2'-fluorocytidine
  modified_base 17: mod_base = OTHER; note = 2'-O-methylcytidine
  modified_base 18: mod_base = OTHER; note = 2'-fluoroadenosine
  modified_base 19: mod_base = OTHER; note = 2'-O-methyladenosine
  modified_base 20: mod_base = OTHER; note = 2'-fluorocytidine
  modified_base 21: mod_base = OTHER; note = 2'-O-methylcytidine with phosphorothioate linkage
  modified_base 22: mod_base = OTHER; note = 2'-fluorocytidine with phosphorothioate linkage
  modified_base 23: mod_base = OTHER; note = 2'-O-methylguanosine
agtcctgaagggataccaacccg

SEQ ID NO: 1164 - RNA, 23 nt, synthetic construct
  source 1..23: mol_type = other RNA
  modified_base 1: mod_base = OTHER; note = 5'-(E)-vinylphosphonate 2'-O-methylated uridine with phosphorothioate linkage
  modified_base 2: mod_base = OTHER; note = 2'-fluoroadenosine with phosphorothioate linkage
  modified_base 3: mod_base = OTHER; note = 2'-O-methylguanosine
  modified_base 4: mod_base = OTHER; note = 2'-fluorouridine
  modified_base 5: mod_base = OTHER; note = 2'-O-methylcytidine
  modified_base 6: mod_base = OTHER; note = 2'-fluorocytidine
  modified_base 7: mod_base = OTHER; note = 2'-O-methyluridine
  modified_base 8: mod_base = OTHER; note = 2'-fluoroguanosine
  modified_base 9: mod_base = OTHER; note = 2'-O-methyladenosine
  modified_base 10: mod_base = OTHER; note = 2'-fluoroadenosine
  modified_base 11: mod_base = OTHER; note = 2'-O-methylguanosine
  modified_base 12: mod_base = OTHER; note = 2'-fluoroguanosine
  modified_base 13: mod_base = OTHER; note = 2'-O-methylguanosine
  modified_base 14: mod_base = OTHER; note = 2'-fluoroadenosine
  modified_base 15: mod_base = OTHER; note = 2'-O-methyluridine
  modified_base 16: mod_base = OTHER; note = 2'-fluoroadenosine
  modified_base 17: mod_base = OTHER; note = 2'-O-methylcytidine
  modified_base 18: mod_base = OTHER; note = 2'-fluorocytidine
  modified_base 19: mod_base = OTHER; note = 2'-O-methyladenosine
  modified_base 20: mod_base = OTHER; note = 2'-fluoroadenosine
  modified_base 21: mod_base = OTHER; note = 2'-O-methylcytidine with phosphorothioate linkage
  modified_base 22: mod_base = OTHER; note = 2'-fluorocytidine with phosphorothioate linkage
  modified_base 23: mod_base = OTHER; note = 2'-O-methylcytidine
tagtcctgaagggataccaaccc

SEQ ID NO: 1165 - RNA, 23 nt, synthetic construct
  source 1..23: mol_type = other RNA
  modified_base 1: mod_base = OTHER; note = 5'-(E)-vinylphosphonate 2'-O-methylated adenosine with phosphorothioate linkage
  modified_base 2: mod_base = OTHER; note = 2'-fluorouridine with phosphorothioate linkage
  modified_base 3: mod_base = OTHER; note = 2'-O-methyladenosine
  modified_base 4: mod_base = OTHER; note = 2'-fluoroguanosine
  modified_base 5: mod_base = OTHER; note = 2'-O-methyluridine
  modified_base 6: mod_base = OTHER; note = 2'-fluorocytidine
  modified_base 7: mod_base = OTHER; note = 2'-O-methylcytidine
  modified_base 8: mod_base = OTHER; note = 2'-fluorouridine
  modified_base 9: mod_base = OTHER; note = 2'-O-methylguanosine
  modified_base 10: mod_base = OTHER; note = 2'-fluoroadenosine
  modified_base 11: mod_base = OTHER; note = 2'-O-methyladenosine
  modified_base 12: mod_base = OTHER; note = 2'-fluoroguanosine
  modified_base 13: mod_base = OTHER; note = 2'-O-methylguanosine
  modified_base 14: mod_base = OTHER; note = 2'-fluoroguanosine
  modified_base 15: mod_base = OTHER; note = 2'-O-methyladenosine
  modified_base 16: mod_base = OTHER; note = 2'-fluorouridine
  modified_base 17: mod_base = OTHER; note = 2'-O-methyladenosine
  modified_base 18: mod_base = OTHER; note = 2'-fluorocytidine
  modified_base 19: mod_base = OTHER; note = 2'-O-methylcytidine
  modified_base 20: mod_base = OTHER; note = 2'-fluoroadenosine
  modified_base 21: mod_base = OTHER; note = 2'-O-methyladenosine with phosphorothioate linkage
  modified_base 22: mod_base = OTHER; note = 2'-fluorocytidine with phosphorothioate linkage
  modified_base 23: mod_base = OTHER; note = 2'-O-methylcytidine
atagtcctgaagggataccaacc

SEQ ID NO: 1166 - RNA, 23 nt, synthetic construct
  source 1..23: mol_type = other RNA
  modified_base 1: mod_base = OTHER; note = 5'-(E)-vinylphosphonate 2'-O-methylated adenosine with phosphorothioate linkage
  modified_base 2: mod_base = OTHER; note = 2'-fluorocytidine with phosphorothioate linkage
  modified_base 3: mod_base = OTHER; note = 2'-O-methyluridine
  modified_base 4: mod_base = OTHER; note = 2'-fluoroadenosine
  modified_base 5: mod_base = OTHER; note = 2'-O-methylguanosine
  modified_base 6: mod_base = OTHER; note = 2'-fluorouridine
  modified_base 7: mod_base = OTHER; note = 2'-O-methylcytidine
  modified_base 8: mod_base = OTHER; note = 2'-fluorocytidine
  modified_base 9: mod_base = OTHER; note = 2'-O-methyluridine
  modified_base 10: mod_base = OTHER; note = 2'-fluoroguanosine
  modified_base 11: mod_base = OTHER; note = 2'-O-methyladenosine
  modified_base 12: mod_base = OTHER; note = 2'-fluoroadenosine
  modified_base 13: mod_base = OTHER; note = 2'-O-methylguanosine
  modified_base 14: mod_base = OTHER; note = 2'-fluoroguanosine
  modified_base 15: mod_base = OTHER; note = 2'-O-methylguanosine
  modified_base 16: mod_base = OTHER; note = 2'-fluoroadenosine
  modified_base 17: mod_base = OTHER; note = 2'-O-methyluridine
  modified_base 18: mod_base = OTHER; note = 2'-fluoroadenosine
  modified_base 19: mod_base = OTHER; note = 2'-O-methylcytidine
  modified_base 20: mod_base = OTHER; note = 2'-fluorocytidine
  modified_base 21: mod_base = OTHER; note = 2'-O-methyladenosine with phosphorothioate linkage
  modified_base 22: mod_base = OTHER; note = 2'-fluoroadenosine with phosphorothioate linkage
  modified_base 23: mod_base = OTHER; note = 2'-O-methylcytidine
actagtcctgaagggataccaac

SEQ ID NO: 1167 - RNA, 23 nt, synthetic construct
  source 1..23: mol_type = other RNA
  modified_base 1: mod_base = OTHER; note = 5'-(E)-vinylphosphonate 2'-O-methylated adenosine with phosphorothioate linkage
  modified_base 2: mod_base = OTHER; note = 2'-fluorocytidine with phosphorothioate linkage
  modified_base 3: mod_base = OTHER; note = 2'-O-methylcytidine
  modified_base 4: mod_base = OTHER; note = 2'-fluorouridine
  modified_base 5: mod_base = OTHER; note = 2'-O-methyladenosine
  modified_base 6: mod_base = OTHER; note = 2'-fluoroguanosine
  modified_base 7: mod_base = OTHER; note = 2'-O-methyluridine
  modified_base 8: mod_base = OTHER; note = 2'-fluorocytidine
  modified_base 9: mod_base = OTHER; note = 2'-O-methylcytidine
  modified_base 10: mod_base = OTHER; note = 2'-fluorouridine
  modified_base 11: mod_base = OTHER; note = 2'-O-methylguanosine
  modified_base 12: mod_base = OTHER; note = 2'-fluoroadenosine
  modified_base 13: mod_base = OTHER; note = 2'-O-methyladenosine
  modified_base 14: mod_base = OTHER; note = 2'-fluoroguanosine
  modified_base 15: mod_base = OTHER; note = 2'-O-methylguanosine
  modified_base 16: mod_base = OTHER; note = 2'-fluoroguanosine
  modified_base 17: mod_base = OTHER; note = 2'-O-methyladenosine
  modified_base 18: mod_base = OTHER; note = 2'-fluorouridine
  modified_base 19: mod_base = OTHER; note = 2'-O-methyladenosine
  modified_base 20: mod_base = OTHER; note = 2'-fluorocytidine
  modified_base 21: mod_base = OTHER; note = 2'-O-methylcytidine with phosphorothioate linkage
  modified_base 22: mod_base = OTHER; note = 2'-fluoroadenosine with phosphorothioate linkage
  modified_base 23: mod_base = OTHER; note = 2'-O-methyladenosine
acctagtcctgaagggataccaa

SEQ ID NO: 1168 - RNA, 23 nt, synthetic construct
  source 1..23: mol_type = other RNA
  modified_base 1: mod_base = OTHER; note = 5'-(E)-vinylphosphonate 2'-O-methylated uridine with phosphorothioate linkage
  modified_base 2: mod_base = OTHER; note = 2'-fluoroguanosine with phosphorothioate linkage
  modified_base 3: mod_base = OTHER; note = 2'-O-methylcytidine
  modified_base 4: mod_base = OTHER; note = 2'-fluoroadenosine
  modified_base 5: mod_base = OTHER; note = 2'-O-methylcytidine
  modified_base 6: mod_base = OTHER; note = 2'-fluorocytidine
  modified_base 7: mod_base = OTHER; note = 2'-O-methyluridine
  modified_base 8: mod_base = OTHER; note = 2'-fluoroadenosine
  modified_base 9: mod_base = OTHER; note = 2'-O-methylguanosine
  modified_base 10: mod_base = OTHER; note = 2'-fluorouridine
  modified_base 11: mod_base = OTHER; note = 2'-O-methylcytidine
  modified_base 12: mod_base = OTHER; note = 2'-fluorocytidine
  modified_base 13: mod_base = OTHER; note = 2'-O-methyluridine
  modified_base 14: mod_base = OTHER; note = 2'-fluoroguanosine
  modified_base 15: mod_base = OTHER; note = 2'-O-methyladenosine
  modified_base 16: mod_base = OTHER; note = 2'-fluoroadenosine
  modified_base 17: mod_base = OTHER; note = 2'-O-methylguanosine
  modified_base 18: mod_base = OTHER; note = 2'-fluoroguanosine
  modified_base 19: mod_base = OTHER; note = 2'-O-methylguanosine
  modified_base 20: mod_base = OTHER; note = 2'-fluoroadenosine
  modified_base 21: mod_base = OTHER; note = 2'-O-methyluridine with phosphorothioate linkage
  modified_base 22: mod_base = OTHER; note = 2'-fluoroadenosine with phosphorothioate linkage
  modified_base 23: mod_base = OTHER; note = 2'-O-methylcytidine
tgcacctagtcctgaagggatac

SEQ ID NO: 1169 - RNA, 23 nt, synthetic construct
  source 1..23: mol_type = other RNA
  modified_base 1: mod_base = OTHER; note = 5'-(E)-vinylphosphonate 2'-O-methylated uridine with phosphorothioate linkage
  modified_base 2: mod_base = OTHER; note = 2'-fluorouridine with phosphorothioate linkage
  modified_base 3: mod_base = OTHER; note = 2'-O-methylcytidine
  modified_base 4: mod_base = OTHER; note = 2'-fluorouridine
  modified_base 5: mod_base = OTHER; note = 2'-O-methylguanosine
  modified_base 6: mod_base = OTHER; note = 2'-fluorocytidine
  modified_base 7: mod_base = OTHER; note = 2'-O-methyladenosine
  modified_base 8: mod_base = OTHER; note = 2'-fluorocytidine
  modified_base 9: mod_base = OTHER; note = 2'-O-methylcytidine
  modified_base 10: mod_base = OTHER; note = 2'-fluorouridine
  modified_base 11: mod_base = OTHER; note = 2'-O-methyladenosine
  modified_base 12: mod_base = OTHER; note = 2'-fluoroguanosine
  modified_base 13: mod_base = OTHER; note = 2'-O-methyluridine
  modified_base 14: mod_base = OTHER; note = 2'-fluorocytidine
  modified_base 15: mod_base = OTHER; note = 2'-O-methylcytidine
  modified_base 16: mod_base = OTHER; note = 2'-fluorouridine
  modified_base 17: mod_base = OTHER; note = 2'-O-methylguanosine
  modified_base 18: mod_base = OTHER; note = 2'-fluoroadenosine
  modified_base 19: mod_base = OTHER; note = 2'-O-methyladenosine
  modified_base 20: mod_base = OTHER; note = 2'-fluoroguanosine
  modified_base 21: mod_base = OTHER; note = 2'-O-methylguanosine with phosphorothioate linkage
  modified_base 22: mod_base = OTHER; note = 2'-fluoroguanosine with phosphorothioate linkage
  modified_base 23: mod_base = OTHER; note = 2'-O-methyladenosine
ttctgcacctagtcctgaaggga

SEQ ID NO: 1170 - RNA, 23 nt, synthetic construct
  source 1..23: mol_type = other RNA
  modified_base 1: mod_base = OTHER; note = 5'-(E)-vinylphosphonate 2'-O-methylated adenosine with phosphorothioate linkage
  modified_base 2: mod_base = OTHER; note = 2'-fluoroadenosine with phosphorothioate linkage
  modified_base 3: mod_base = OTHER; note = 2'-O-methyluridine
  modified_base 4: mod_base = OTHER; note = 2'-fluorouridine
  modified_base 5: mod_base = OTHER; note = 2'-O-methylcytidine
  modified_base 6: mod_base = OTHER; note = 2'-fluorouridine
  modified_base 7: mod_base = OTHER; note = 2'-O-methylguanosine
  modified_base 8: mod_base = OTHER; note = 2'-fluorocytidine
  modified_base 9: mod_base = OTHER; note = 2'-O-methyladenosine
  modified_base 10: mod_base = OTHER; note = 2'-fluorocytidine
  modified_base 11: mod_base = OTHER; note = 2'-O-methylcytidine
  modified_base 12: mod_base = OTHER; note = 2'-fluorouridine
  modified_base 13: mod_base = OTHER; note = 2'-O-methyladenosine
  modified_base 14: mod_base = OTHER; note = 2'-fluoroguanosine
  modified_base 15: mod_base = OTHER; note = 2'-O-methyluridine
  modified_base 16: mod_base = OTHER; note = 2'-fluorocytidine
  modified_base 17: mod_base = OTHER; note = 2'-O-methylcytidine
  modified_base 18: mod_base = OTHER; note = 2'-fluorouridine
  modified_base 19: mod_base = OTHER; note = 2'-O-methylguanosine
  modified_base 20: mod_base = OTHER; note = 2'-fluoroadenosine
  modified_base 21: mod_base = OTHER; note = 2'-O-methyladenosine with phosphorothioate linkage
  modified_base 22: mod_base = OTHER; note = 2'-fluoroguanosine with phosphorothioate linkage
  modified_base 23: mod_base = OTHER; note = 2'-O-methylguanosine
aattctgcacctagtcctgaagg

SEQ ID NO: 1171 - RNA, 23 nt, synthetic construct
  source 1..23: mol_type = other RNA
  modified_base 1: mod_base = OTHER; note = 5'-(E)-vinylphosphonate 2'-O-methylated adenosine with phosphorothioate linkage
  modified_base 2: mod_base = OTHER; note = 2'-fluorocytidine with phosphorothioate linkage
  modified_base 3: mod_base = OTHER; note = 2'-O-methyladenosine
  modified_base 4: mod_base = OTHER; note = 2'-fluorouridine
  modified_base 5: mod_base = OTHER; note = 2'-O-methyluridine
  modified_base 6: mod_base = OTHER; note = 2'-fluorocytidine
  modified_base 7: mod_base = OTHER; note = 2'-O-methyluridine
  modified_base 8: mod_base = OTHER; note = 2'-fluoroguanosine
  modified_base 9: mod_base = OTHER; note = 2'-O-methylcytidine
  modified_base 10: mod_base = OTHER; note = 2'-fluoroadenosine
  modified_base 11: mod_base = OTHER; note = 2'-O-methylcytidine
  modified_base 12: mod_base = OTHER; note = 2'-fluorocytidine
  modified_base 13: mod_base = OTHER; note = 2'-O-methyluridine
  modified_base 14: mod_base = OTHER; note = 2'-fluoroadenosine
  modified_base 15: mod_base = OTHER; note = 2'-O-methylguanosine
  modified_base 16: mod_base = OTHER; note = 2'-fluorouridine
  modified_base 17: mod_base = OTHER; note = 2'-O-methylcytidine
  modified_base 18: mod_base = OTHER; note = 2'-fluorocytidine
  modified_base 19: mod_base = OTHER; note = 2'-O-methyluridine
  modified_base 20: mod_base = OTHER; note = 2'-fluoroguanosine
  modified_base 21: mod_base = OTHER; note = 2'-O-methyladenosine with phosphorothioate linkage
  modified_base 22: mod_base = OTHER; note = 2'-fluoroadenosine with phosphorothioate linkage
  modified_base 23: mod_base = OTHER; note = 2'-O-methylguanosine
acattctgcacctagtcctgaag

SEQ ID NO: 1172 - RNA, 23 nt, synthetic construct
  source 1..23: mol_type = other RNA
  modified_base 1: mod_base = OTHER; note = 5'-(E)-vinylphosphonate 2'-O-methylated guanosine with phosphorothioate linkage
  modified_base 2: mod_base = OTHER; note = 2'-fluoroadenosine with phosphorothioate linkage
  modified_base 3: mod_base = OTHER; note = 2'-O-methylcytidine
  modified_base 4: mod_base = OTHER; note = 2'-fluoroadenosine
  modified_base 5: mod_base = OTHER; note = 2'-O-methyluridine
  modified_base 6: mod_base = OTHER; note = 2'-fluorouridine
  modified_base 7: mod_base = OTHER; note = 2'-O-methylcytidine
  modified_base 8: mod_base = OTHER; note = 2'-fluorouridine
  modified_base 9: mod_base = OTHER; note = 2'-O-methylguanosine
  modified_base 10: mod_base = OTHER; note = 2'-fluorocytidine
  modified_base 11: mod_base = OTHER; note = 2'-O-methyladenosine
  modified_base 12: mod_base = OTHER; note = 2'-fluorocytidine
  modified_base 13: mod_base = OTHER; note = 2'-O-methylcytidine
  modified_base 14: mod_base = OTHER; note = 2'-fluorouridine
  modified_base 15: mod_base = OTHER; note = 2'-O-methyladenosine
  modified_base 16: mod_base = OTHER; note = 2'-fluoroguanosine
  modified_base 17: mod_base = OTHER; note = 2'-O-methyluridine
  modified_base 18: mod_base = OTHER; note = 2'-fluorocytidine
  modified_base 19: mod_base = OTHER; note = 2'-O-methylcytidine
  modified_base 20: mod_base = OTHER; note = 2'-fluorouridine
  modified_base 21: mod_base = OTHER; note = 2'-O-methylguanosine with phosphorothioate linkage
  modified_base 22: mod_base = OTHER; note = 2'-fluoroadenosine with phosphorothioate linkage
  modified_base 23: mod_base = OTHER; note = 2'-O-methyladenosine
gacattctgcacctagtcctgaa

SEQ ID NO: 1173 - RNA, 23 nt, synthetic construct
  source 1..23: mol_type = other RNA
  modified_base 1: mod_base = OTHER; note = 5'-(E)-vinylphosphonate 2'-O-methylated guanosine with phosphorothioate linkage
  modified_base 2: mod_base = OTHER; note = 2'-fluoroguanosine with phosphorothioate linkage
  modified_base 3: mod_base = OTHER; note = 2'-O-methyladenosine
  modified_base 4: mod_base = OTHER; note = 2'-fluorocytidine
  modified_base 5: mod_base = OTHER; note = 2'-O-methyladenosine
  modified_base 6: mod_base = OTHER; note = 2'-fluorouridine
  modified_base 7: mod_base = OTHER; note = 2'-O-methyluridine
  modified_base 8: mod_base = OTHER; note = 2'-fluorocytidine
  modified_base 9: mod_base = OTHER; note = 2'-O-methyluridine
  modified_base 10: mod_base = OTHER; note = 2'-fluoroguanosine
  modified_base 11: mod_base = OTHER; note = 2'-O-methylcytidine
  modified_base 12: mod_base = OTHER; note = 2'-fluoroadenosine
  modified_base 13: mod_base = OTHER; note = 2'-O-methylcytidine
  modified_base 14: mod_base = OTHER; note = 2'-fluorocytidine
  modified_base 15: mod_base = OTHER; note = 2'-O-methyluridine
  modified_base 16: mod_base = OTHER; note = 2'-fluoroadenosine
  modified_base 17: mod_base = OTHER; note = 2'-O-methylguanosine
  modified_base 18: mod_base = OTHER; note = 2'-fluorouridine
  modified_base 19: mod_base = OTHER; note = 2'-O-methylcytidine
  modified_base 20: mod_base = OTHER; note = 2'-fluorocytidine
  modified_base 21: mod_base = OTHER; note = 2'-O-methyluridine with phosphorothioate linkage
  modified_base 22: mod_base = OTHER; note = 2'-fluoroguanosine with phosphorothioate linkage
  modified_base 23: mod_base = OTHER; note = 2'-O-methyladenosine
ggacattctgcacctagtcctga

SEQ ID NO: 1174 - RNA, 23 nt, synthetic construct
  source 1..23: mol_type = other RNA
  modified_base 1: mod_base = OTHER; note = 5'-(E)-vinylphosphonate 2'-O-methylated adenosine with phosphorothioate linkage
  modified_base 2: mod_base = OTHER; note = 2'-fluoroguanosine with phosphorothioate linkage
  modified_base 3: mod_base = OTHER; note = 2'-O-methylguanosine
  modified_base 4: mod_base = OTHER; note = 2'-fluoroadenosine
  modified_base 5: mod_base = OTHER; note = 2'-O-methylcytidine
  modified_base 6: mod_base = OTHER; note = 2'-fluoroadenosine
  modified_base 7: mod_base = OTHER; note = 2'-O-methyluridine
  modified_base 8: mod_base = OTHER; note = 2'-fluorouridine
  modified_base 9: mod_base = OTHER; note = 2'-O-methylcytidine
  modified_base 10: mod_base = OTHER; note = 2'-fluorouridine
  modified_base 11: mod_base = OTHER; note = 2'-O-methylguanosine
  modified_base 12: mod_base = OTHER; note = 2'-fluorocytidine
  modified_base 13: mod_base = OTHER; note = 2'-O-methyladenosine
  modified_base 14: mod_base = OTHER; note = 2'-fluorocytidine
  modified_base 15: mod_base = OTHER; note = 2'-O-methylcytidine
  modified_base 16: mod_base = OTHER; note = 2'-fluorouridine
  modified_base 17: mod_base = OTHER; note = 2'-O-methyladenosine
  modified_base 18: mod_base = OTHER; note = 2'-fluoroguanosine
  modified_base 19: mod_base = OTHER; note = 2'-O-methyluridine
  modified_base 20: mod_base = OTHER; note = 2'-fluorocytidine
  modified_base 21: mod_base = OTHER; note = 2'-O-methylcytidine with phosphorothioate linkage
  modified_base 22: mod_base = OTHER; note = 2'-fluorouridine with phosphorothioate linkage
  modified_base 23: mod_base = OTHER; note = 2'-O-methylguanosine
aggacattctgcacctagtcctg

SEQ ID NO: 1175 - RNA, 23 nt, synthetic construct
  source 1..23: mol_type = other RNA
  modified_base 1: mod_base = OTHER; note = 5'-(E)-vinylphosphonate 2'-O-methylated adenosine with phosphorothioate linkage
  modified_base 2: mod_base = OTHER; note = 2'-fluoroadenosine with phosphorothioate linkage
  modified_base 3: mod_base = OTHER; note = 2'-O-methylguanosine
  modified_base 4: mod_base = OTHER; note = 2'-fluoroguanosine
  modified_base 5: mod_base = OTHER; note = 2'-O-methyladenosine
  modified_base 6: mod_base = OTHER; note = 2'-fluorocytidine
  modified_base 7: mod_base = OTHER; note = 2'-O-methyladenosine
  modified_base 8: mod_base = OTHER; note = 2'-fluorouridine
  modified_base 9: mod_base = OTHER; note = 2'-O-methyluridine
  modified_base 10: mod_base = OTHER; note = 2'-fluorocytidine
  modified_base 11: mod_base = OTHER; note = 2'-O-methyluridine
  modified_base 12: mod_base = OTHER; note = 2'-fluoroguanosine
  modified_base 13: mod_base = OTHER; note = 2'-O-methylcytidine
  modified_base 14: mod_base = OTHER; note = 2'-fluoroadenosine
  modified_base 15: mod_base = OTHER; note = 2'-O-methylcytidine
  modified_base 16: mod_base = OTHER; note = 2'-fluorocytidine
  modified_base 17: mod_base = OTHER; note = 2'-O-methyluridine
  modified_base 18: mod_base = OTHER; note = 2'-fluoroadenosine
  modified_base 19: mod_base = OTHER; note = 2'-O-methylguanosine
  modified_base 20: mod_base = OTHER; note = 2'-fluorouridine
  modified_base 21: mod_base = OTHER; note = 2'-O-methylcytidine with phosphorothioate linkage
  modified_base 22: mod_base = OTHER; note = 2'-fluorocytidine with phosphorothioate linkage
  modified_base 23: mod_base = OTHER; note = 2'-O-methyluridine
aaggacattctgcacctagtcct

SEQ ID NO: 1176 - RNA, 23 nt, synthetic construct
  source 1..23: mol_type = other RNA
  modified_base 1: mod_base = OTHER; note = 5'-(E)-vinylphosphonate 2'-O-methylated uridine with phosphorothioate linkage
  modified_base 2: mod_base = OTHER; note = 2'-fluoroadenosine with phosphorothioate linkage
  modified_base 3: mod_base = OTHER; note = 2'-O-methyluridine
  modified_base 4: mod_base = OTHER; note = 2'-fluoroguanosine
  modified_base 5: mod_base = OTHER; note = 2'-O-methyladenosine
  modified_base 6: mod_base = OTHER; note = 2'-fluoroadenosine
  modified_base 7: mod_base = OTHER; note = 2'-O-methyluridine
  modified_base 8: mod_base = OTHER; note = 2'-fluorocytidine
  modified_base 9: mod_base = OTHER; note = 2'-O-methylcytidine
  modified_base 10: mod_base = OTHER; note = 2'-fluorocytidine
  modified_base 11: mod_base = OTHER; note = 2'-O-methyladenosine
  modified_base 12: mod_base = OTHER; note = 2'-fluorouridine
  modified_base 13: mod_base = OTHER; note = 2'-O-methylguanosine
  modified_base 14: mod_base = OTHER; note = 2'-fluoroguanosine
  modified_base 15: mod_base = OTHER; note = 2'-O-methyladenosine
  modified_base 16: mod_base = OTHER; note = 2'-fluoroguanosine
  modified_base 17: mod_base = OTHER; note = 2'-O-methyladenosine
  modified_base 18: mod_base = OTHER; note = 2'-fluoroguanosine
  modified_base 19: mod_base = OTHER; note = 2'-O-methylguanosine
  modified_base 20: mod_base = OTHER; note = 2'-fluorouridine
  modified_base 21: mod_base = OTHER; note = 2'-O-methylguanosine with phosphorothioate linkage
  modified_base 22: mod_base = OTHER; note = 2'-fluoroguanosine with phosphorothioate linkage
  modified_base 23: mod_base = OTHER; note = 2'-O-methylcytidine
tatgaatcccatggagaggtggc

SEQ ID NO: 1177 - RNA, 23 nt, synthetic construct
  source 1..23: mol_type = other RNA
  modified_base 1: mod_base = OTHER; note = 5'-(E)-vinylphosphonate 2'-O-methylated adenosine with phosphorothioate linkage
  modified_base 2: mod_base = OTHER; note = 2'-fluorouridine with phosphorothioate linkage
  modified_base 3: mod_base = OTHER; note = 2'-O-methyladenosine
  modified_base 4: mod_base = OTHER; note = 2'-fluorouridine
  modified_base 5: mod_base = OTHER; note = 2'-O-methylguanosine
  modified_base 6: mod_base = OTHER; note = 2'-fluoroadenosine
  modified_base 7: mod_base = OTHER; note = 2'-O-methyladenosine
  modified_base 8: mod_base = OTHER; note = 2'-fluorouridine
  modified_base 9: mod_base = OTHER; note = 2'-O-methylcytidine
  modified_base 10: mod_base = OTHER; note = 2'-fluorocytidine
  modified_base 11: mod_base = OTHER; note = 2'-O-methylcytidine
  modified_base 12: mod_base = OTHER; note = 2'-fluoroadenosine
  modified_base 13: mod_base = OTHER; note = 2'-O-methyluridine
  modified_base 14: mod_base = OTHER; note = 2'-fluoroguanosine
  modified_base 15: mod_base = OTHER; note = 2'-O-methylguanosine
  modified_base 16: mod_base = OTHER; note = 2'-fluoroadenosine
  modified_base 17: mod_base = OTHER; note = 2'-O-methylguanosine
  modified_base 18: mod_base = OTHER; note = 2'-fluoroadenosine
  modified_base 19: mod_base = OTHER; note = 2'-O-methylguanosine
  modified_base 20: mod_base = OTHER; note = 2'-fluoroguanosine
  modified_base 21: mod_base = OTHER; note = 2'-O-methyluridine with phosphorothioate linkage
  modified_base 22: mod_base = OTHER; note = 2'-fluoroguanosine with phosphorothioate linkage
  modified_base 23: mod_base = OTHER; note = 2'-O-methylguanosine
atatgaatcccatggagaggtgg

SEQ ID NO: 1178 - RNA, 23 nt, synthetic construct
  source 1..23: mol_type = other RNA
  modified_base 1: mod_base = OTHER; note = 5'-(E)-vinylphosphonate 2'-O-methylated adenosine with phosphorothioate linkage
  modified_base 2: mod_base = OTHER; note = 2'-fluoroadenosine with phosphorothioate linkage
  modified_base 3: mod_base = OTHER; note = 2'-O-methyluridine
  modified_base 4: mod_base = OTHER; note = 2'-fluoroadenosine
  modified_base 5: mod_base = OTHER; note = 2'-O-methyluridine
  modified_base 6: mod_base = OTHER; note = 2'-fluoroguanosine
  modified_base 7: mod_base = OTHER; note = 2'-O-methyladenosine
  modified_base 8: mod_base = OTHER; note = 2'-fluoroadenosine
  modified_base 9: mod_base = OTHER; note = 2'-O-methyluridine
  modified_base 10: mod_base = OTHER; note = 2'-fluorocytidine
  modified_base 11: mod_base = OTHER; note = 2'-O-methylcytidine
  modified_base 12: mod_base = OTHER; note = 2'-fluorocytidine
  modified_base 13: mod_base = OTHER; note = 2'-O-methyladenosine
  modified_base 14: mod_base = OTHER; note = 2'-fluorouridine
  modified_base 15: mod_base = OTHER; note = 2'-O-methylguanosine
  modified_base 16: mod_base = OTHER; note = 2'-fluoroguanosine
  modified_base 17: mod_base = OTHER; note = 2'-O-methyladenosine
  modified_base 18: mod_base = OTHER; note = 2'-fluoroguanosine
  modified_base 19: mod_base = OTHER; note = 2'-O-methyladenosine
  modified_base 20: mod_base = OTHER; note = 2'-fluoroguanosine
  modified_base 21: mod_base = OTHER; note = 2'-O-methylguanosine with phosphorothioate linkage
  modified_base 22: mod_base = OTHER; note = 2'-fluorouridine with phosphorothioate linkage
  modified_base 23: mod_base = OTHER; note = 2'-O-methylguanosine
aatatgaatcccatggagaggtg

SEQ ID NO: 1179 - RNA, 23 nt, synthetic construct
  source 1..23: mol_type = other RNA
  modified_base 1: mod_base = OTHER; note = 5'-(E)-vinylphosphonate 2'-O-methylated adenosine with phosphorothioate linkage
  modified_base 2: mod_base = OTHER; note = 2'-fluoroadenosine with phosphorothioate linkage
  modified_base 3: mod_base = OTHER; note = 2'-O-methyladenosine
  modified_base 4: mod_base = OTHER; note = 2'-fluorouridine
  modified_base 5: mod_base = OTHER; note = 2'-O-methyladenosine
  modified_base 6: mod_base = OTHER; note = 2'-fluorouridine
  modified_base 7: mod_base = OTHER; note = 2'-O-methylguanosine
  modified_base 8: mod_base = OTHER; note = 2'-fluoroadenosine
  modified_base 9: mod_base = OTHER; note = 2'-O-methyladenosine
  modified_base 10: mod_base = OTHER; note = 2'-fluorouridine
  modified_base 11: mod_base = OTHER; note = 2'-O-methylcytidine
  modified_base 12: mod_base = OTHER; note = 2'-fluorocytidine
  modified_base 13: mod_base = OTHER; note = 2'-O-methylcytidine
  modified_base 14: mod_base = OTHER; note = 2'-fluoroadenosine
  modified_base 15: mod_base = OTHER; note = 2'-O-methyluridine
  modified_base 16: mod_base = OTHER; note = 2'-fluoroguanosine
  modified_base 17: mod_base = OTHER; note = 2'-O-methylguanosine
  modified_base 18: mod_base = OTHER; note = 2'-fluoroadenosine
  modified_base 19: mod_base = OTHER; note = 2'-O-methylguanosine
  modified_base 20: mod_base = OTHER; note = 2'-fluoroadenosine
  modified_base 21: mod_base = OTHER; note = 2'-O-methylguanosine with phosphorothioate linkage
  modified_base 22: mod_base = OTHER; note = 2'-fluoroguanosine with phosphorothioate linkage
  modified_base 23: mod_base = OTHER; note = 2'-O-methyluridine
aaatatgaatcccatggagaggt

SEQ ID NO: 1180 - RNA, 23 nt, synthetic construct
  source 1..23: mol_type = other RNA
  modified_base 1: mod_base = OTHER; note = 5'-(E)-vinylphosphonate 2'-O-methylated guanosine with phosphorothioate linkage
  modified_base 2: mod_base = OTHER; note = 2'-fluorocytidine with phosphorothioate linkage
  modified_base 3: mod_base = OTHER; note = 2'-O-methyladenosine
  modified_base 4: mod_base = OTHER; note = 2'-fluoroadenosine
  modified_base 5: mod_base = OTHER; note = 2'-O-methyluridine
  modified_base 6: mod_base = OTHER; note = 2'-fluoroadenosine
  modified_base 7: mod_base = OTHER; note = 2'-O-methyluridine
  modified_base 8: mod_base = OTHER; note = 2'-fluoroguanosine
  modified_base 9: mod_base = OTHER; note = 2'-O-methyladenosine
  modified_base 10: mod_base = OTHER; note = 2'-fluoroadenosine
  modified_base 11: mod_base = OTHER; note = 2'-O-methyluridine
  modified_base 12: mod_base = OTHER; note = 2'-fluorocytidine
  modified_base 13: mod_base = OTHER; note = 2'-O-methylcytidine
  modified_base 14: mod_base = OTHER; note = 2'-fluorocytidine
  modified_base 15: mod_base = OTHER; note = 2'-O-methyladenosine
  modified_base 16: mod_base = OTHER; note = 2'-fluorouridine
  modified_base 17: mod_base = OTHER; note = 2'-O-methylguanosine
  modified_base 18: mod_base = OTHER; note = 2'-fluoroguanosine
  modified_base 19: mod_base = OTHER; note = 2'-O-methyladenosine
  modified_base 20: mod_base = OTHER; note = 2'-fluoroguanosine
  modified_base 21: mod_base = OTHER; note = 2'-O-methyladenosine with phosphorothioate linkage
  modified_base 22: mod_base = OTHER; note = 2'-fluoroguanosine with phosphorothioate linkage
  modified_base 23: mod_base = OTHER; note = 2'-O-methylguanosine
gcaatatgaatcccatggagagg

SEQ ID NO: 1181 - RNA, 23 nt, synthetic construct
  source 1..23: mol_type = other RNA
  modified_base 1: mod_base = OTHER; note = 5'-(E)-vinylphosphonate 2'-O-methylated uridine with phosphorothioate linkage
  modified_base 2: mod_base = OTHER; note = 2'-fluoroguanosine with phosphorothioate linkage
  modified_base 3: mod_base = OTHER; note = 2'-O-methylcytidine
  modified_base 4: mod_base = OTHER; note = 2'-fluoroadenosine
  modified_base 5: mod_base = OTHER; note = 2'-O-methyladenosine
  modified_base 6: mod_base = OTHER; note = 2'-fluorouridine
  modified_base 7: mod_base = OTHER; note = 2'-O-methyladenosine
  modified_base 8: mod_base = OTHER; note = 2'-fluorouridine
  modified_base 9: mod_base = OTHER; note = 2'-O-methylguanosine
  modified_base 10: mod_base = OTHER; note = 2'-fluoroadenosine
  modified_base 11: mod_base = OTHER; note = 2'-O-methyladenosine
  modified_base 12: mod_base = OTHER; note = 2'-fluorouridine
  modified_base 13: mod_base = OTHER; note = 2'-O-methylcytidine
  modified_base 14: mod_base = OTHER; note = 2'-fluorocytidine
  modified_base 15: mod_base = OTHER; note = 2'-O-methylcytidine
  modified_base 16: mod_base = OTHER; note = 2'-fluoroadenosine
  modified_base 17: mod_base = OTHER; note = 2'-O-methyluridine
  modified_base 18: mod_base = OTHER; note = 2'-fluoroguanosine
  modified_base 19: mod_base = OTHER; note = 2'-O-methylguanosine
  modified_base 20: mod_base = OTHER; note = 2'-fluoroadenosine
  modified_base 21: mod_base = OTHER; note = 2'-O-methylguanosine with phosphorothioate linkage
  modified_base 22: mod_base = OTHER; note = 2'-fluoroadenosine with phosphorothioate linkage
  modified_base 23: mod_base = OTHER; note = 2'-O-methylguanosine
tgcaatatgaatcccatggagag

SEQ ID NO: 1182 - RNA, 23 nt, synthetic construct
  source 1..23: mol_type = other RNA
  modified_base 1: mod_base = OTHER; note = 5'-(E)-vinylphosphonate 2'-O-methylated adenosine with phosphorothioate linkage
  modified_base 2: mod_base = OTHER; note = 2'-fluorouridine with phosphorothioate linkage
  modified_base 3: mod_base = OTHER; note = 2'-O-methylguanosine
  modified_base 4: mod_base = OTHER; note = 2'-fluorocytidine
  modified_base 5: mod_base = OTHER; note = 2'-O-methyladenosine
  modified_base 6: mod_base = OTHER; note = 2'-fluoroadenosine
  modified_base 7: mod_base = OTHER; note = 2'-O-methyluridine
  modified_base 8: mod_base = OTHER; note = 2'-fluoroadenosine
  modified_base 9: mod_base = OTHER; note = 2'-O-methyluridine
  modified_base 10: mod_base = OTHER; note = 2'-fluoroguanosine
  modified_base 11: mod_base = OTHER; note = 2'-O-methyladenosine
  modified_base 12: mod_base = OTHER; note = 2'-fluoroadenosine
  modified_base 13: mod_base = OTHER; note = 2'-O-methyluridine
  modified_base 14: mod_base = OTHER; note = 2'-fluorocytidine
  modified_base 15: mod_base = OTHER; note = 2'-O-methylcytidine
  modified_base 16: mod_base = OTHER; note = 2'-fluorocytidine
  modified_base 17: mod_base = OTHER; note = 2'-O-methyladenosine
  modified_base 18: mod_base = OTHER; note = 2'-fluorouridine
  modified_base 19: mod_base = OTHER; note = 2'-O-methylguanosine
  modified_base 20: mod_base = OTHER; note = 2'-fluoroguanosine
  modified_base 21: mod_base = OTHER; note = 2'-O-methyladenosine with phosphorothioate linkage
  modified_base 22: mod_base = OTHER; note = 2'-fluoroguanosine with phosphorothioate linkage
  modified_base 23: mod_base = OTHER; note = 2'-O-methyladenosine
atgcaatatgaatcccatggaga

SEQ ID NO: 1183 - RNA, 23 nt, synthetic construct
  source 1..23: mol_type = other RNA
  modified_base 1: mod_base = OTHER; note = 5'-(E)-vinylphosphonate 2'-O-methylated uridine with phosphorothioate linkage
  modified_base 2: mod_base = OTHER; note = 2'-fluorocytidine with phosphorothioate linkage
  modified_base 3: mod_base = OTHER; note = 2'-O-methyluridine
  modified_base 4: mod_base = OTHER; note = 2'-fluoroguanosine
  modified_base 5: mod_base = OTHER; note = 2'-O-methylcytidine
  modified_base 6: mod_base = OTHER; note = 2'-fluoroadenosine
  modified_base 7: mod_base = OTHER; note = 2'-O-methyladenosine
  modified_base 8: mod_base = OTHER; note = 2'-fluorouridine
  modified_base 9: mod_base = OTHER; note = 2'-O-methyladenosine
  modified_base 10: mod_base = OTHER; note = 2'-fluorouridine
  modified_base 11: mod_base = OTHER; note = 2'-O-methylguanosine
  modified_base 12: mod_base = OTHER; note = 2'-fluoroadenosine
  modified_base 13: mod_base = OTHER; note = 2'-O-methyladenosine
  modified_base 14: mod_base = OTHER; note = 2'-fluorouridine
  modified_base 15: mod_base = OTHER; note = 2'-O-methylcytidine
  modified_base 16: mod_base = OTHER; note = 2'-fluorocytidine
  modified_base 17: mod_base = OTHER; note = 2'-O-methylcytidine
  modified_base 18: mod_base = OTHER; note = 2'-fluoroadenosine
  modified_base 19: mod_base = OTHER; note = 2'-O-methyluridine
  modified_base 20: mod_base = OTHER; note = 2'-fluoroguanosine
  modified_base 21: mod_base = OTHER; note = 2'-O-methylguanosine with phosphorothioate linkage
  modified_base 22: mod_base = OTHER; note = 2'-fluoroadenosine with phosphorothioate linkage
  modified_base 23: mod_base = OTHER; note = 2'-O-methylguanosine
tctgcaatatgaatcccatggag

SEQ ID NO: 1184 - RNA, 23 nt, synthetic construct
  source 1..23: mol_type = other RNA
  modified_base 1: mod_base = OTHER; note = 5'-(E)-vinylphosphonate 2'-O-methylated guanosine with phosphorothioate linkage
  modified_base 2: mod_base = OTHER; note = 2'-fluorouridine with phosphorothioate linkage
  modified_base 3: mod_base = OTHER; note = 2'-O-methylcytidine
  modified_base 4: mod_base = OTHER; note = 2'-fluorouridine
  modified_base 5: mod_base = OTHER; note = 2'-O-methylguanosine
  modified_base 6: mod_base = OTHER; note = 2'-fluorocytidine
  modified_base 7: mod_base = OTHER; note = 2'-O-methyladenosine
  modified_base 8: mod_base = OTHER; note = 2'-fluoroadenosine
  modified_base 9: mod_base = OTHER; note = 2'-O-methyluridine
  modified_base 10: mod_base = OTHER; note = 2'-fluoroadenosine
  modified_base 11: mod_base = OTHER; note = 2'-O-methyluridine
  modified_base 12: mod_base = OTHER; note = 2'-fluoroguanosine
  modified_base 13: mod_base = OTHER; note = 2'-O-methyladenosine
  modified_base 14: mod_base = OTHER; note = 2'-fluoroadenosine
  modified_base 15: mod_base = OTHER; note = 2'-O-methyluridine
  modified_base 16: mod_base = OTHER; note = 2'-fluorocytidine
  modified_base 17: mod_base = OTHER; note = 2'-O-methylcytidine
  modified_base 18: mod_base = OTHER; note = 2'-fluorocytidine
  modified_base 19: mod_base = OTHER; note = 2'-O-methyladenosine
  modified_base 20: mod_base = OTHER; note = 2'-fluorouridine
  modified_base 21: mod_base = OTHER; note = 2'-O-methylguanosine with phosphorothioate linkage
  modified_base 22: mod_base = OTHER; note = 2'-fluoroguanosine with phosphorothioate linkage
  modified_base 23: mod_base = OTHER; note = 2'-O-methyladenosine
gtctgcaatatgaatcccatgga

SEQ ID NO: 1185 - RNA, 23 nt, synthetic construct
  source 1..23: mol_type = other RNA
  modified_base 1: mod_base = OTHER; note = 5'-(E)-vinylphosphonate 2'-O-methylated uridine with phosphorothioate linkage
  modified_base 2: mod_base = OTHER; note = 2'-fluoroguanosine with phosphorothioate linkage
  modified_base 3: mod_base = OTHER; note = 2'-O-methyluridine
  modified_base 4: mod_base = OTHER; note = 2'-fluorocytidine
  modified_base 5: mod_base = OTHER; note = 2'-O-methyluridine
  modified_base 6: mod_base = OTHER; note = 2'-fluoroguanosine
  modified_base 7: mod_base = OTHER; note = 2'-O-methylcytidine
  modified_base 8: mod_base = OTHER; note = 2'-fluoroadenosine
  modified_base 9: mod_base = OTHER; note = 2'-O-methyladenosine
  modified_base 10: mod_base = OTHER; note = 2'-fluorouridine
  modified_base 11: mod_base = OTHER; note = 2'-O-methyladenosine
  modified_base 12: mod_base = OTHER; note = 2'-fluorouridine
  modified_base 13: mod_base = OTHER; note = 2'-O-methylguanosine
  modified_base 14: mod_base = OTHER; note = 2'-fluoroadenosine
  modified_base 15: mod_base = OTHER; note = 2'-O-methyladenosine
  modified_base 16: mod_base = OTHER; note = 2'-fluorouridine
  modified_base 17: mod_base = OTHER; note = 2'-O-methylcytidine
  modified_base 18: mod_base = OTHER; note = 2'-fluorocytidine
  modified_base 19: mod_base = OTHER; note = 2'-O-methylcytidine
  modified_base 20: mod_base = OTHER; note = 2'-fluoroadenosine
  modified_base 21: mod_base = OTHER; note = 2'-O-methyluridine with phosphorothioate linkage
  modified_base 22: mod_base = OTHER; note = 2'-fluoroguanosine with phosphorothioate linkage
  modified_base 23: mod_base = OTHER; note = 2'-O-methylguanosine
tgtctgcaatatgaatcccatgg

SEQ ID NO: 1186 - RNA, 23 nt, synthetic construct
  source 1..23: mol_type = other RNA
  modified_base 1: mod_base = OTHER; note = 5'-(E)-vinylphosphonate 2'-O-methylated uridine with phosphorothioate linkage
  modified_base 2: mod_base = OTHER; note = 2'-fluorouridine with phosphorothioate linkage
  modified_base 3: mod_base = OTHER; note = 2'-O-methylguanosine
  modified_base 4: mod_base = OTHER; note = 2'-fluorouridine
  modified_base 5: mod_base = OTHER; note = 2'-O-methylcytidine
  modified_base 6: mod_base = OTHER; note = 2'-fluorouridine
  modified_base 7: mod_base = OTHER; note = 2'-O-methylguanosine
  modified_base 8: mod_base = OTHER; note = 2'-fluorocytidine
  modified_base 9: mod_base = OTHER; note = 2'-O-methyladenosine
  modified_base 10: mod_base = OTHER; note = 2'-fluoroadenosine
  modified_base 11: mod_base = OTHER; note = 2'-O-methyluridine
  modified_base 12: mod_base = OTHER; note = 2'-fluoroadenosine
  modified_base 13: mod_base = OTHER; note = 2'-O-methyluridine
  modified_base 14: mod_base = OTHER; note = 2'-fluoroguanosine
  modified_base 15: mod_base = OTHER; note = 2'-O-methyladenosine
  modified_base 16: mod_base = OTHER; note = 2'-fluoroadenosine
  modified_base 17: mod_base = OTHER; note = 2'-O-methyluridine
  modified_base 18: mod_base = OTHER; note = 2'-fluorocytidine
  modified_base 19: mod_base = OTHER; note = 2'-O-methylcytidine
  modified_base 20: mod_base = OTHER; note = 2'-fluorocytidine
  modified_base 21: mod_base = OTHER; note = 2'-O-methyladenosine with phosphorothioate linkage
  modified_base 22: mod_base = OTHER; note = 2'-fluorouridine with phosphorothioate linkage
  modified_base 23: mod_base = OTHER; note = 2'-O-methylguanosine
ttgtctgcaatatgaatcccatg

SEQ ID NO: 1187 - RNA, 23 nt, synthetic construct
  source 1..23: mol_type = other RNA
  modified_base 1: mod_base = OTHER; note = 5'-(E)-vinylphosphonate 2'-O-methylated adenosine with phosphorothioate linkage
  modified_base 2: mod_base = OTHER; note = 2'-fluorouridine with phosphorothioate linkage
  modified_base 3: mod_base = OTHER; note = 2'-O-methyluridine
  modified_base 4: mod_base = OTHER; note = 2'-fluoroguanosine
  modified_base 5: mod_base = OTHER; note = 2'-O-methyluridine
  modified_base 6: mod_base = OTHER; note = 2'-fluorocytidine
  modified_base 7: mod_base = OTHER; note = 2'-O-methyluridine
  modified_base 8: mod_base = OTHER; note = 2'-fluoroguanosine
  modified_base 9: mod_base = OTHER; note = 2'-O-methylcytidine
  modified_base 10: mod_base = OTHER; note = 2'-fluoroadenosine
  modified_base 11: mod_base = OTHER; note = 2'-O-methyladenosine
  modified_base 12: mod_base = OTHER; note = 2'-fluorouridine
  modified_base 13: mod_base = OTHER; note = 2'-O-methyladenosine
  modified_base 14: mod_base = OTHER; note = 2'-fluorouridine
  modified_base 15: mod_base = OTHER; note = 2'-O-methylguanosine
  modified_base 16: mod_base = OTHER; note = 2'-fluoroadenosine
  modified_base 17: mod_base = OTHER; note = 2'-O-methyladenosine
  modified_base 18: mod_base = OTHER; note = 2'-fluorouridine
  modified_base 19: mod_base = OTHER; note = 2'-O-methylcytidine
  modified_base 20: mod_base = OTHER; note = 2'-fluorocytidine
  modified_base 21: mod_base = OTHER; note = 2'-O-methylcytidine with phosphorothioate linkage
  modified_base 22: mod_base = OTHER; note = 2'-fluoroadenosine with phosphorothioate linkage
  modified_base 23: mod_base = OTHER; note = 2'-O-methyluridine
attgtctgcaatatgaatcccat

SEQ ID NO: 1188 - RNA, 23 nt, synthetic construct
  source 1..23: mol_type = other RNA
  modified_base 1: mod_base = OTHER; note = 5'-(E)-vinylphosphonate 2'-O-methylated uridine with phosphorothioate linkage
  modified_base 2: mod_base = OTHER; note = 2'-fluoroadenosine with phosphorothioate linkage
  modified_base 3: mod_base = OTHER; note = 2'-O-methyluridine
  modified_base 4: mod_base = OTHER; note = 2'-fluorouridine
  modified_base 5: mod_base = OTHER; note = 2'-O-methylguanosine
  modified_base 6: mod_base = OTHER; note = 2'-fluorouridine
  modified_base 7: mod_base = OTHER; note = 2'-O-methylcytidine
  modified_base 8: mod_base = OTHER; note = 2'-fluorouridine
  modified_base 9: mod_base = OTHER; note = 2'-O-methylguanosine
  modified_base 10: mod_base = OTHER; note = 2'-fluorocytidine
  modified_base 11: mod_base = OTHER; note = 2'-O-methyladenosine
  modified_base 12: mod_base = OTHER; note = 2'-fluoroadenosine
  modified_base 13: mod_base = OTHER; note = 2'-O-methyluridine
  modified_base 14: mod_base = OTHER; note = 2'-fluoroadenosine
  modified_base 15: mod_base = OTHER; note = 2'-O-methyluridine
  modified_base 16: mod_base = OTHER; note = 2'-fluoroguanosine
  modified_base 17: mod_base = OTHER; note = 2'-O-methyladenosine
  modified_base 18: mod_base = OTHER; note = 2'-fluoroadenosine
  modified_base 19: mod_base = OTHER; note = 2'-O-methyluridine
  modified_base 20: mod_base = OTHER; note = 2'-fluorocytidine
  modified_base 21: mod_base = OTHER; note = 2'-O-methylcytidine with phosphorothioate linkage
  modified_base 22: mod_base = OTHER; note = 2'-fluorocytidine with phosphorothioate linkage
  modified_base 23: mod_base = OTHER; note = 2'-O-methyladenosine
tattgtctgcaatatgaatccca

SEQ ID NO: 1189 - RNA, 23 nt, synthetic construct
  source 1..23: mol_type = other RNA
  modified_base 1: mod_base = OTHER; note = 5'-(E)-vinylphosphonate 2'-O-methylated uridine with phosphorothioate linkage
  modified_base 2: mod_base = OTHER; note = 2'-fluorouridine with phosphorothioate linkage
  modified_base 3: mod_base = OTHER; note = 2'-O-methyladenosine
  modified_base 4: mod_base = OTHER; note = 2'-fluorouridine
  modified_base 5: mod_base = OTHER; note = 2'-O-methyluridine
  modified_base 6: mod_base = OTHER; note = 2'-fluoroguanosine
  modified_base 7: mod_base = OTHER; note = 2'-O-methyluridine
  modified_base 8: mod_base = OTHER; note = 2'-fluorocytidine
  modified_base 9: mod_base = OTHER; note = 2'-O-methyluridine
  modified_base 10: mod_base = OTHER; note = 2'-fluoroguanosine
  modified_base 11: mod_base = OTHER; note = 2'-O-methylcytidine
  modified_base 12: mod_base = OTHER; note = 2'-fluoroadenosine
  modified_base 13: mod_base = OTHER; note = 2'-O-methyladenosine
  modified_base 14: mod_base = OTHER; note = 2'-fluorouridine
  modified_base 15: mod_base = OTHER; note = 2'-O-methyladenosine
  modified_base 16: mod_base = OTHER; note = 2'-fluorouridine
  modified_base 17: mod_base = OTHER; note = 2'-O-methylguanosine
  modified_base 18: mod_base = OTHER; note = 2'-fluoroadenosine
  modified_base 19: mod_base = OTHER; note = 2'-O-methyladenosine
  modified_base 20: mod_base = OTHER; note = 2'-fluorouridine
  modified_base 21: mod_base = OTHER; note = 2'-O-methylcytidine with phosphorothioate linkage
  modified_base 22: mod_base = OTHER; note = 2'-fluorocytidine with phosphorothioate linkage
  modified_base 23: mod_base = OTHER; note = 2'-O-methylcytidine
ttattgtctgcaatatgaatccc

SEQ ID NO: 1190 - RNA, 23 nt, synthetic construct
  source 1..23: mol_type = other RNA
  modified_base 1: mod_base = OTHER; note = 5'-(E)-vinylphosphonate 2'-O-methylated guanosine with phosphorothioate linkage
  modified_base 2: mod_base = OTHER; note = 2'-fluorouridine with phosphorothioate linkage
  modified_base 3: mod_base = OTHER; note = 2'-O-methyluridine
  modified_base 4: mod_base = OTHER; note = 2'-fluoroadenosine
  modified_base 5: mod_base = OTHER; note = 2'-O-methyluridine
  modified_base 6: mod_base = OTHER; note = 2'-fluorouridine
  modified_base 7: mod_base = OTHER; note = 2'-O-methylguanosine
  modified_base 8: mod_base = OTHER; note = 2'-fluorouridine
  modified_base 9: mod_base = OTHER; note = 2'-O-methylcytidine
  modified_base 10: mod_base = OTHER; note = 2'-fluorouridine
  modified_base 11: mod_base = OTHER; note = 2'-O-methylguanosine
  modified_base 12: mod_base = OTHER; note = 2'-fluorocytidine
  modified_base 13: mod_base = OTHER; note = 2'-O-methyladenosine
  modified_base 14: mod_base = OTHER; note = 2'-fluoroadenosine
  modified_base 15: mod_base = OTHER; note = 2'-O-methyluridine
  modified_base 16: mod_base = OTHER; note = 2'-fluoroadenosine
  modified_base 17: mod_base = OTHER; note = 2'-O-methyluridine
  modified_base 18: mod_base = OTHER; note = 2'-fluoroguanosine
  modified_base 19: mod_base = OTHER; note = 2'-O-methyladenosine
  modified_base 20: mod_base = OTHER; note = 2'-fluoroadenosine
  modified_base 21: mod_base = OTHER; note = 2'-O-methyluridine with phosphorothioate linkage
  modified_base 22: mod_base = OTHER; note = 2'-fluorocytidine with phosphorothioate linkage
  modified_base 23: mod_base = OTHER; note = 2'-O-methylcytidine
gttattgtctgcaatatgaatcc

SEQ ID NO: 1191 - RNA, 23 nt, synthetic construct
  source 1..23: mol_type = other RNA
  modified_base 1: mod_base = OTHER; note = 5'-(E)-vinylphosphonate 2'-O-methylated guanosine with phosphorothioate linkage
  modified_base 2: mod_base = OTHER; note = 2'-fluoroguanosine with phosphorothioate linkage
  modified_base 3: mod_base = OTHER; note = 2'-O-methyluridine
  modified_base 4: mod_base = OTHER; note = 2'-fluorouridine
  modified_base 5: mod_base = OTHER; note = 2'-O-methyladenosine
  modified_base 6: mod_base = OTHER; note = 2'-fluorouridine
  modified_base 7: mod_base = OTHER; note = 2'-O-methyluridine
  modified_base 8: mod_base = OTHER; note = 2'-fluoroguanosine
  modified_base 9: mod_base = OTHER; note = 2'-O-methyluridine
  modified_base 10: mod_base = OTHER; note = 2'-fluorocytidine
  modified_base 11: mod_base = OTHER; note = 2'-O-methyluridine
  modified_base 12: mod_base = OTHER; note = 2'-fluoroguanosine
  modified_base 13: mod_base = OTHER; note = 2'-O-methylcytidine
  modified_base 14: mod_base = OTHER; note = 2'-fluoroadenosine
  modified_base 15: mod_base = OTHER; note = 2'-O-methyladenosine
  modified_base 16: mod_base = OTHER; note = 2'-fluorouridine
  modified_base 17: mod_base = OTHER; note = 2'-O-methyladenosine
  modified_base 18: mod_base = OTHER; note = 2'-fluorouridine
  modified_base 19: mod_base = OTHER; note = 2'-O-methylguanosine
  modified_base 20: mod_base = OTHER; note = 2'-fluoroadenosine
  modified_base 21: mod_base = OTHER; note = 2'-O-methyladenosine with phosphorothioate linkage
  modified_base 22: mod_base = OTHER; note = 2'-fluorouridine with phosphorothioate linkage
  modified_base 23: mod_base = OTHER; note = 2'-O-methylcytidine
ggttattgtctgcaatatgaatc

SEQ ID NO: 1192 - RNA, 23 nt, synthetic construct
  source 1..23: mol_type = other RNA
  modified_base 1: mod_base = OTHER; note = 5'-(E)-vinylphosphonate 2'-O-methylated guanosine with phosphorothioate linkage
  modified_base 2: mod_base = OTHER; note = 2'-fluoroguanosine with phosphorothioate linkage
  modified_base 3: mod_base = OTHER; note = 2'-O-methylguanosine
  modified_base 4: mod_base = OTHER; note = 2'-fluorouridine
  modified_base 5: mod_base = OTHER; note = 2'-O-methyluridine
  modified_base 6: mod_base = OTHER; note = 2'-fluoroadenosine
  modified_base 7: mod_base = OTHER; note = 2'-O-methyluridine
  modified_base 8: mod_base = OTHER; note = 2'-fluorouridine
  modified_base 9: mod_base = OTHER; note = 2'-O-methylguanosine
  modified_base 10: mod_base = OTHER; note = 2'-fluorouridine
  modified_base 11: mod_base = OTHER; note = 2'-O-methylcytidine
  modified_base 12: mod_base = OTHER; note = 2'-fluorouridine
  modified_base 13: mod_base = OTHER; note = 2'-O-methylguanosine
  modified_base 14: mod_base = OTHER; note = 2'-fluorocytidine
  modified_base 15: mod_base = OTHER; note = 2'-O-methyladenosine
  modified_base 16: mod_base = OTHER; note = 2'-fluoroadenosine
  modified_base 17: mod_base = OTHER; note = 2'-O-methyluridine
  modified_base 18: mod_base = OTHER; note = 2'-fluoroadenosine
  modified_base 19: mod_base = OTHER; note = 2'-O-methyluridine
  modified_base 20: mod_base = OTHER; note = 2'-fluoroguanosine
  modified_base 21: mod_base = OTHER; note = 2'-O-methyladenosine with phosphorothioate linkage
  modified_base 22: mod_base = OTHER; note = 2'-fluoroadenosine with phosphorothioate linkage
  modified_base 23: mod_base = OTHER; note = 2'-O-methyluridine
gggttattgtctgcaatatgaat

SEQ ID NO: 1193 - RNA, 23 nt, synthetic construct
  source 1..23: mol_type = other RNA
  modified_base 1: mod_base = OTHER; note = 5'-(E)-vinylphosphonate 2'-O-methylated guanosine with phosphorothioate linkage
  modified_base 2: mod_base = OTHER; note = 2'-fluoroguanosine with phosphorothioate linkage
  modified_base 3: mod_base = OTHER; note = 2'-O-methyluridine
  modified_base 4: mod_base = OTHER; note = 2'-fluoroadenosine
  modified_base 5: mod_base = OTHER; note = 2'-O-methyluridine
  modified_base 6: mod_base = OTHER; note = 2'-fluorouridine
  modified_base 7: mod_base = OTHER; note = 2'-O-methylcytidine
  modified_base 8: mod_base = OTHER; note = 2'-fluorouridine
  modified_base 9: mod_base = OTHER; note = 2'-O-methyluridine
  modified_base 10: mod_base = OTHER; note = 2'-fluoroadenosine
  modified_base 11: mod_base = OTHER; note = 2'-O-methylguanosine
  modified_base 12: mod_base = OTHER; note = 2'-fluorocytidine
  modified_base 13: mod_base = OTHER; note = 2'-O-methyladenosine
  modified_base 14: mod_base = OTHER; note = 2'-fluoroguanosine
  modified_base 15: mod_base = OTHER; note = 2'-O-methylguanosine
  modified_base 16: mod_base = OTHER; note = 2'-fluorouridine
  modified_base 17: mod_base = OTHER; note = 2'-O-methyluridine
  modified_base 18: mod_base = OTHER; note = 2'-fluoroadenosine
  modified_base 19: mod_base = OTHER; note = 2'-O-methyladenosine
  modified_base 20: mod_base = OTHER; note = 2'-fluoroadenosine
  modified_base 21: mod_base = OTHER; note = 2'-O-methylguanosine with phosphorothioate linkage
  modified_base 22: mod_base = OTHER; note = 2'-fluoroguanosine with phosphorothioate linkage
  modified_base 23: mod_base = OTHER; note = 2'-O-methylguanosine
ggtattcttagcaggttaaaggg

SEQ ID NO: 1194 - RNA, 23 nt, synthetic construct
  source 1..23: mol_type = other RNA
  modified_base 1: mod_base = OTHER; note = 5'-(E)-vinylphosphonate 2'-O-methylated uridine with phosphorothioate linkage
  modified_base 2: mod_base = OTHER; note = 2'-fluoroguanosine with phosphorothioate linkage
  modified_base 3: mod_base = OTHER; note = 2'-O-methylguanosine
  modified_base 4: mod_base = OTHER; note = 2'-fluorouridine
  modified_base 5: mod_base = OTHER; note = 2'-O-methyladenosine
  modified_base 6: mod_base = OTHER; note = 2'-fluorouridine
  modified_base 7: mod_base = OTHER; note = 2'-O-methyluridine
  modified_base 8: mod_base = OTHER; note = 2'-fluorocytidine
  modified_base 9: mod_base = OTHER; note = 2'-O-methyluridine
  modified_base 10: mod_base = OTHER; note = 2'-fluorouridine
  modified_base 11: mod_base = OTHER; note = 2'-O-methyladenosine
  modified_base 12: mod_base = OTHER; note = 2'-fluoroguanosine
  modified_base 13: mod_base = OTHER; note = 2'-O-methylcytidine
  modified_base 14: mod_base = OTHER; note = 2'-fluoroadenosine
  modified_base 15: mod_base = OTHER; note = 2'-O-methylguanosine
  modified_base 16: mod_base = OTHER; note = 2'-fluoroguanosine
  modified_base 17: mod_base = OTHER; note = 2'-O-methyluridine
  modified_base 18: mod_base = OTHER; note = 2'-fluorouridine
  modified_base 19: mod_base = OTHER; note = 2'-O-methyladenosine
  modified_base 20: mod_base = OTHER; note = 2'-fluoroadenosine
  modified_base 21: mod_base = OTHER; note = 2'-O-methyladenosine with phosphorothioate linkage
  modified_base 22: mod_base = OTHER; note = 2'-fluoroguanosine with phosphorothioate linkage
  modified_base 23: mod_base = OTHER; note = 2'-O-methylguanosine
tggtattcttagcaggttaaagg

SEQ ID NO: 1195 - RNA, 23 nt, synthetic construct
  source 1..23: mol_type = other RNA
  modified_base 1: mod_base = OTHER; note = 5'-(E)-vinylphosphonate 2'-O-methylated adenosine with phosphorothioate linkage
  modified_base 2: mod_base = OTHER; note = 2'-fluorouridine with phosphorothioate linkage
  modified_base 3: mod_base = OTHER; note = 2'-O-methylguanosine
  modified_base 4: mod_base = OTHER; note = 2'-fluoroguanosine
  modified_base 5: mod_base = OTHER; note = 2'-O-methyluridine
  modified_base 6: mod_base = OTHER; note = 2'-fluoroadenosine
  modified_base 7: mod_base = OTHER; note = 2'-O-methyluridine
  modified_base 8: mod_base = OTHER; note = 2'-fluorouridine
  modified_base 9: mod_base = OTHER; note = 2'-O-methylcytidine
  modified_base 10: mod_base = OTHER; note = 2'-fluorouridine
  modified_base 11: mod_base = OTHER; note = 2'-O-methyluridine
  modified_base 12: mod_base = OTHER; note = 2'-fluoroadenosine
  modified_base 13: mod_base = OTHER; note = 2'-O-methylguanosine
  modified_base 14: mod_base = OTHER; note = 2'-fluorocytidine
  modified_base 15: mod_base = OTHER; note = 2'-O-methyladenosine
  modified_base 16: mod_base = OTHER; note = 2'-fluoroguanosine
  modified_base 17: mod_base = OTHER; note = 2'-O-methylguanosine
  modified_base 18: mod_base = OTHER; note = 2'-fluorouridine
  modified_base 19: mod_base = OTHER; note = 2'-O-methyluridine
  modified_base 20: mod_base = OTHER; note = 2'-fluoroadenosine
  modified_base 21: mod_base = OTHER; note = 2'-O-methyladenosine with phosphorothioate linkage
  modified_base 22: mod_base = OTHER; note = 2'-fluoroadenosine with phosphorothioate linkage
  modified_base 23: mod_base = OTHER; note = 2'-O-methylguanosine
atggtattcttagcaggttaaag

SEQ ID NO: 1196 - RNA, 23 nt, synthetic construct
  source 1..23: mol_type = other RNA
  modified_base 1: mod_base = OTHER; note = 5'-(E)-vinylphosphonate 2'-O-methylated adenosine with phosphorothioate linkage
  modified_base 2: mod_base = OTHER; note = 2'-fluorocytidine with phosphorothioate linkage
  modified_base 3: mod_base = OTHER; note = 2'-O-methyluridine
  modified_base 4: mod_base = OTHER; note = 2'-fluoroguanosine
  modified_base 5: mod_base = OTHER; note = 2'-O-methylguanosine
  modified_base 6: mod_base = OTHER; note = 2'-fluorouridine
  modified_base 7: mod_base = OTHER; note = 2'-O-methyladenosine
  modified_base 8: mod_base = OTHER; note = 2'-fluorouridine
  modified_base 9: mod_base = OTHER; note = 2'-O-methyluridine
  modified_base 10: mod_base = OTHER; note = 2'-fluorocytidine
  modified_base 11: mod_base = OTHER; note = 2'-O-methyluridine
  modified_base 12: mod_base = OTHER; note = 2'-fluorouridine
  modified_base 13: mod_base = OTHER; note = 2'-O-methyladenosine
  modified_base 14: mod_base = OTHER; note = 2'-fluoroguanosine
  modified_base 15: mod_base = OTHER; note = 2'-O-methylcytidine
  modified_base 16: mod_base = OTHER; note = 2'-fluoroadenosine
  modified_base 17: mod_base = OTHER; note = 2'-O-methylguanosine
  modified_base 18: mod_base = OTHER; note = 2'-fluoroguanosine
  modified_base 19: mod_base = OTHER; note = 2'-O-methyluridine
  modified_base 20: mod_base = OTHER; note = 2'-fluorouridine
  modified_base 21: mod_base = OTHER; note = 2'-O-methyladenosine with phosphorothioate linkage
  modified_base 22: mod_base = OTHER; note = 2'-fluoroadenosine with phosphorothioate linkage
  modified_base 23: mod_base = OTHER; note = 2'-O-methyladenosine
actggtattcttagcaggttaaa

SEQ ID NO: 1197 - RNA, 23 nt, synthetic construct
  source 1..23: mol_type = other RNA
  modified_base 1: mod_base = OTHER; note = 5'-(E)-vinylphosphonate 2'-O-methylated uridine with phosphorothioate linkage
  modified_base 2: mod_base = OTHER; note = 2'-fluorocytidine with phosphorothioate linkage
  modified_base 3: mod_base = OTHER; note = 2'-O-methylcytidine
  modified_base 4: mod_base = OTHER; note = 2'-fluorouridine
  modified_base 5: mod_base = OTHER; note = 2'-O-methylguanosine
  modified_base 6: mod_base = OTHER; note = 2'-fluoroguanosine
  modified_base 7: mod_base = OTHER; note = 2'-O-methyluridine
  modified_base 8: mod_base = OTHER; note = 2'-fluoroadenosine
  modified_base 9: mod_base = OTHER; note = 2'-O-methyluridine
  modified_base 10: mod_base = OTHER; note = 2'-fluorouridine
  modified_base 11: mod_base = OTHER; note = 2'-O-methylcytidine
  modified_base 12: mod_base = OTHER; note = 2'-fluorouridine
  modified_base 13: mod_base = OTHER; note = 2'-O-methyluridine
  modified_base 14: mod_base = OTHER; note = 2'-fluoroadenosine
  modified_base 15: mod_base = OTHER; note = 2'-O-methylguanosine
  modified_base 16: mod_base = OTHER; note = 2'-fluorocytidine
  modified_base 17: mod_base = OTHER; note = 2'-O-methyladenosine
  modified_base 18: mod_base = OTHER; note = 2'-fluoroguanosine
  modified_base 19: mod_base = OTHER; note = 2'-O-methylguanosine
  modified_base 20: mod_base = OTHER; note = 2'-fluorouridine
  modified_base 21: mod_base = OTHER; note = 2'-O-methyluridine with phosphorothioate linkage
  modified_base 22: mod_base = OTHER; note = 2'-fluoroadenosine with phosphorothioate linkage
  modified_base 23: mod_base = OTHER; note = 2'-O-methyladenosine
tcctggtattcttagcaggttaa

SEQ ID NO: 1198 - RNA, 23 nt, synthetic construct
  source 1..23: mol_type = other RNA
  modified_base 1: mod_base = OTHER; note = 5'-(E)-vinylphosphonate 2'-O-methylated adenosine with phosphorothioate linkage
  modified_base 2: mod_base = OTHER; note = 2'-fluorouridine with phosphorothioate linkage
  modified_base 3: mod_base = OTHER; note = 2'-O-methylcytidine
  modified_base 4: mod_base = OTHER; note = 2'-fluorocytidine
  modified_base 5: mod_base = OTHER; note = 2'-O-methyluridine
  modified_base 6: mod_base = OTHER; note = 2'-fluoroguanosine
  modified_base 7: mod_base = OTHER; note = 2'-O-methylguanosine
  modified_base 8: mod_base = OTHER; note = 2'-fluorouridine
  modified_base 9: mod_base = OTHER; note = 2'-O-methyladenosine
  modified_base 10: mod_base = OTHER; note = 2'-fluorouridine
  modified_base 11: mod_base = OTHER; note = 2'-O-methyluridine
  modified_base 12: mod_base = OTHER; note = 2'-fluorocytidine
  modified_base 13: mod_base = OTHER; note = 2'-O-methyluridine
  modified_base 14: mod_base = OTHER; note = 2'-fluorouridine
  modified_base 15: mod_base = OTHER; note = 2'-O-methyladenosine
  modified_base 16: mod_base = OTHER; note = 2'-fluoroguanosine
  modified_base 17: mod_base = OTHER; note = 2'-O-methylcytidine
  modified_base 18: mod_base = OTHER; note = 2'-fluoroadenosine
  modified_base 19: mod_base = OTHER; note = 2'-O-methylguanosine
  modified_base 20: mod_base = OTHER; note = 2'-fluoroguanosine
  modified_base 21: mod_base = OTHER; note = 2'-O-methyluridine with phosphorothioate linkage
  modified_base 22: mod_base = OTHER; note = 2'-fluorouridine with phosphorothioate linkage
  modified_base 23: mod_base = OTHER; note = 2'-O-methyladenosine
atcctggtattcttagcaggtta

SEQ ID NO: 1199 - RNA, 23 nt, synthetic construct
  source 1..23: mol_type = other RNA
  modified_base 1: mod_base = OTHER; note = 5'-(E)-vinylphosphonate 2'-O-methylated guanosine with phosphorothioate linkage
  modified_base 2: mod_base = OTHER; note = 2'-fluoroadenosine with phosphorothioate linkage
  modified_base 3: mod_base = OTHER; note = 2'-O-methyluridine
  modified_base 4: mod_base = OTHER; note = 2'-fluorocytidine
  modified_base 5: mod_base = OTHER; note = 2'-O-methylcytidine
  modified_base 6: mod_base = OTHER; note = 2'-fluorouridine
  modified_base 7: mod_base = OTHER; note = 2'-O-methylguanosine
  modified_base 8: mod_base = OTHER; note = 2'-fluoroguanosine
  modified_base 9: mod_base = OTHER; note = 2'-O-methyluridine
  modified_base 10: mod_base = OTHER; note = 2'-fluoroadenosine
  modified_base 11: mod_base = OTHER; note = 2'-O-methyluridine
  modified_base 12: mod_base = OTHER; note = 2'-fluorouridine
  modified_base 13: mod_base = OTHER; note = 2'-O-methylcytidine
  modified_base 14: mod_base = OTHER; note = 2'-fluorouridine
  modified_base 15: mod_base = OTHER; note = 2'-O-methyluridine
  modified_base 16: mod_base = OTHER; note = 2'-fluoroadenosine
  modified_base 17: mod_base = OTHER; note = 2'-O-methylguanosine
  modified_base 18: mod_base = OTHER; note = 2'-fluorocytidine
  modified_base 19: mod_base = OTHER; note = 2'-O-methyladenosine
  modified_base 20: mod_base = OTHER; note = 2'-fluoroguanosine
  modified_base 21: mod_base = OTHER; note = 2'-O-methylguanosine with phosphorothioate linkage
  modified_base 22: mod_base = OTHER; note = 2'-fluorouridine with phosphorothioate linkage
  modified_base 23: mod_base = OTHER; note = 2'-O-methyluridine
gatcctggtattcttagcaggtt

SEQ ID NO: 1200 - RNA, 23 nt, synthetic construct
  source 1..23: mol_type = other RNA
  modified_base 1: mod_base = OTHER; note = 5'-(E)-vinylphosphonate 2'-O-methylated uridine with phosphorothioate linkage
  modified_base 2: mod_base = OTHER; note = 2'-fluoroguanosine with phosphorothioate linkage
  modified_base 3: mod_base = OTHER; note = 2'-O-methyladenosine
  modified_base 4: mod_base = OTHER; note = 2'-fluorouridine
  modified_base 5: mod_base = OTHER; note = 2'-O-methylcytidine
  modified_base 6: mod_base = OTHER; note = 2'-fluorocytidine
  modified_base 7: mod_base = OTHER; note = 2'-O-methyluridine
  modified_base 8: mod_base = OTHER; note = 2'-fluoroguanosine
  modified_base 9: mod_base = OTHER; note = 2'-O-methylguanosine
  modified_base 10: mod_base = OTHER; note = 2'-fluorouridine
  modified_base 11: mod_base = OTHER; note = 2'-O-methyladenosine
  modified_base 12: mod_base = OTHER; note = 2'-fluorouridine
  modified_base 13: mod_base = OTHER; note = 2'-O-methyluridine
  modified_base 14: mod_base = OTHER; note = 2'-fluorocytidine
  modified_base 15: mod_base = OTHER; note = 2'-O-methyluridine
  modified_base 16: mod_base = OTHER; note = 2'-fluorouridine
  modified_base 17: mod_base = OTHER; note = 2'-O-methyladenosine
  modified_base 18: mod_base = OTHER; note = 2'-fluoroguanosine
  modified_base 19: mod_base = OTHER; note = 2'-O-methylcytidine
  modified_base 20: mod_base = OTHER; note = 2'-fluoroadenosine
  modified_base 21: mod_base = OTHER; note = 2'-O-methylguanosine with phosphorothioate linkage
  modified_base 22: mod_base = OTHER; note = 2'-fluoroguanosine with phosphorothioate linkage
  modified_base 23: mod_base = OTHER; note = 2'-O-methyluridine
tgatcctggtattcttagcaggt

SEQ ID NO: 1201 - RNA, 23 nt, synthetic construct
  source 1..23: mol_type = other RNA
  modified_base 1: mod_base = OTHER; note = 5'-(E)-vinylphosphonate 2'-O-methylated adenosine with phosphorothioate linkage
  modified_base 2: mod_base = OTHER; note = 2'-fluorouridine with phosphorothioate linkage
  modified_base 3: mod_base = OTHER; note = 2'-O-methylguanosine
  modified_base 4: mod_base = OTHER; note = 2'-fluoroadenosine
  modified_base 5: mod_base = OTHER; note = 2'-O-methyluridine
  modified_base 6: mod_base = OTHER; note = 2'-fluorocytidine
  modified_base 7: mod_base = OTHER; note = 2'-O-methylcytidine
  modified_base 8: mod_base = OTHER; note = 2'-fluorouridine
  modified_base 9: mod_base = OTHER; note = 2'-O-methylguanosine
  modified_base 10: mod_base = OTHER; note = 2'-fluoroguanosine
  modified_base 11: mod_base = OTHER; note = 2'-O-methyluridine
  modified_base 12: mod_base = OTHER; note = 2'-fluoroadenosine
  modified_base 13: mod_base = OTHER; note = 2'-O-methyluridine
  modified_base 14: mod_base = OTHER; note = 2'-fluorouridine
  modified_base 15: mod_base = OTHER; note = 2'-O-methylcytidine
  modified_base 16: mod_base = OTHER; note = 2'-fluorouridine
  modified_base 17: mod_base = OTHER; note = 2'-O-methyluridine
  modified_base 18: mod_base = OTHER; note = 2'-fluoroadenosine
  modified_base 19: mod_base = OTHER; note = 2'-O-methylguanosine
  modified_base 20: mod_base = OTHER; note = 2'-fluorocytidine
  modified_base 21: mod_base = OTHER; note = 2'-O-methyladenosine with phosphorothioate linkage
  modified_base 22: mod_base = OTHER; note = 2'-fluoroguanosine with phosphorothioate linkage
  modified_base 23: mod_base = OTHER; note = 2'-O-methylguanosine
atgatcctggtattcttagcagg

SEQ ID NO: 1202 - RNA, 23 nt, synthetic construct
  source 1..23: mol_type = other RNA
  modified_base 1: mod_base = OTHER; note = 5'-(E)-vinylphosphonate 2'-O-methylated adenosine with phosphorothioate linkage
  modified_base 2: mod_base = OTHER; note = 2'-fluorocytidine with phosphorothioate linkage
  modified_base 3: mod_base = OTHER; note = 2'-O-methyluridine
  modified_base 4: mod_base = OTHER; note = 2'-fluoroguanosine
  modified_base 5: mod_base = OTHER; note = 2'-O-methyladenosine
  modified_base 6: mod_base = OTHER; note = 2'-fluorouridine
  modified_base 7: mod_base = OTHER; note = 2'-O-methylcytidine
  modified_base 8: mod_base = OTHER; note = 2'-fluorocytidine
  modified_base 9: mod_base = OTHER; note = 2'-O-methyluridine
  modified_base 10: mod_base = OTHER; note = 2'-fluoroguanosine
  modified_base 11: mod_base = OTHER; note = 2'-O-methylguanosine
  modified_base 12: mod_base = OTHER; note = 2'-fluorouridine
  modified_base 13: mod_base = OTHER; note = 2'-O-methyladenosine
  modified_base 14: mod_base = OTHER; note = 2'-fluorouridine
  modified_base 15: mod_base = OTHER; note = 2'-O-methyluridine
  modified_base 16: mod_base = OTHER; note = 2'-fluorocytidine
  modified_base 17: mod_base = OTHER; note = 2'-O-methyluridine
  modified_base 18: mod_base = OTHER; note = 2'-fluorouridine
  modified_base 19: mod_base = OTHER; note = 2'-O-methyladenosine
  modified_base 20: mod_base = OTHER; note = 2'-fluoroguanosine
  modified_base 21: mod_base = OTHER; note = 2'-O-methylcytidine with phosphorothioate linkage
  modified_base 22: mod_base = OTHER; note = 2'-fluoroadenosine with phosphorothioate linkage
  modified_base 23: mod_base = OTHER; note = 2'-O-methylguanosine
actgatcctggtattcttagcag

SEQ ID NO: 1203 - RNA, 23 nt, synthetic construct
  source 1..23: mol_type = other RNA
  modified_base 1: mod_base = OTHER; note = 5'-(E)-vinylphosphonate 2'-O-methylated uridine with phosphorothioate linkage
  modified_base 2: mod_base = OTHER; note = 2'-fluoroadenosine with phosphorothioate linkage
  modified_base 3: mod_base = OTHER; note = 2'-O-methylcytidine
  modified_base 4: mod_base = OTHER; note = 2'-fluorouridine
  modified_base 5: mod_base = OTHER; note = 2'-O-methylguanosine
  modified_base 6: mod_base = OTHER; note = 2'-fluoroadenosine
  modified_base 7: mod_base = OTHER; note = 2'-O-methyluridine
  modified_base 8: mod_base = OTHER; note = 2'-fluorocytidine
  modified_base 9: mod_base = OTHER; note = 2'-O-methylcytidine
  modified_base 10: mod_base = OTHER; note = 2'-fluorouridine
  modified_base 11: mod_base = OTHER; note = 2'-O-methylguanosine
  modified_base 12: mod_base = OTHER; note = 2'-fluoroguanosine
  modified_base 13: mod_base = OTHER; note = 2'-O-methyluridine
  modified_base 14: mod_base = OTHER; note = 2'-fluoroadenosine
  modified_base 15: mod_base = OTHER; note = 2'-O-methyluridine
  modified_base 16: mod_base = OTHER; note = 2'-fluorouridine
  modified_base 17: mod_base = OTHER; note = 2'-O-methylcytidine
  modified_base 18: mod_base = OTHER; note = 2'-fluorouridine
  modified_base 19: mod_base = OTHER; note = 2'-O-methyluridine
  modified_base 20: mod_base = OTHER; note = 2'-fluoroadenosine
  modified_base 21: mod_base = OTHER; note = 2'-O-methylguanosine with phosphorothioate linkage
  modified_base 22: mod_base = OTHER; note = 2'-fluorocytidine with phosphorothioate linkage
  modified_base 23: mod_base = OTHER; note = 2'-O-methyladenosine
tactgatcctggtattcttagca

SEQ ID NO: 1204 - RNA, 23 nt, synthetic construct
  source 1..23: mol_type = other RNA
  modified_base 1: mod_base = OTHER; note = 5'-(E)-vinylphosphonate 2'-O-methylated adenosine with phosphorothioate linkage
  modified_base 2: mod_base = OTHER; note = 2'-fluorouridine with phosphorothioate linkage
  modified_base 3: mod_base = OTHER; note = 2'-O-methyladenosine
  modified_base 4: mod_base = OTHER; note = 2'-fluorocytidine
  modified_base 5: mod_base = OTHER; note = 2'-O-methyluridine
  modified_base 6: mod_base = OTHER; note = 2'-fluoroguanosine
  modified_base 7: mod_base = OTHER; note = 2'-O-methyladenosine
  modified_base 8: mod_base = OTHER; note = 2'-fluorouridine
  modified_base 9: mod_base = OTHER; note = 2'-O-methylcytidine
  modified_base 10: mod_base = OTHER; note = 2'-fluorocytidine
  modified_base 11: mod_base = OTHER; note = 2'-O-methyluridine
  modified_base 12: mod_base = OTHER; note = 2'-fluoroguanosine
  modified_base 13: mod_base = OTHER; note = 2'-O-methylguanosine
  modified_base 14: mod_base = OTHER; note = 2'-fluorouridine
  modified_base 15: mod_base = OTHER; note = 2'-O-methyladenosine
  modified_base 16: mod_base = OTHER; note = 2'-fluorouridine
  modified_base 17: mod_base = OTHER; note = 2'-O-methyluridine
  modified_base 18: mod_base = OTHER; note = 2'-fluorocytidine
  modified_base 19: mod_base = OTHER; note = 2'-O-methyluridine
  modified_base 20: mod_base = OTHER; note = 2'-fluorouridine
  modified_base 21: mod_base = OTHER; note = 2'-O-methyladenosine with phosphorothioate linkage
  modified_base 22: mod_base = OTHER; note = 2'-fluoroguanosine with phosphorothioate linkage
  modified_base 23: mod_base = OTHER; note = 2'-O-methylcytidine
atactgatcctggtattcttagc

SEQ ID NO: 1205 - RNA, 23 nt, synthetic construct
  source 1..23: mol_type = other RNA
  modified_base 1: mod_base = OTHER; note = 5'-(E)-vinylphosphonate 2'-O-methylated guanosine with phosphorothioate linkage
  modified_base 2: mod_base = OTHER; note = 2'-fluoroadenosine with phosphorothioate linkage
  modified_base 3: mod_base = OTHER; note = 2'-O-methyluridine
  modified_base 4: mod_base = OTHER; note = 2'-fluoroadenosine
  modified_base 5: mod_base = OTHER; note = 2'-O-methylcytidine
  modified_base 6: mod_base = OTHER; note = 2'-fluorouridine
  modified_base 7: mod_base = OTHER; note = 2'-O-methylguanosine
  modified_base 8: mod_base = OTHER; note = 2'-fluoroadenosine
  modified_base 9: mod_base = OTHER; note = 2'-O-methyluridine
  modified_base 10: mod_base = OTHER; note = 2'-fluorocytidine
  modified_base 11: mod_base = OTHER; note = 2'-O-methylcytidine
  modified_base 12: mod_base = OTHER; note = 2'-fluorouridine
  modified_base 13: mod_base = OTHER; note = 2'-O-methylguanosine
  modified_base 14: mod_base = OTHER; note = 2'-fluoroguanosine
  modified_base 15: mod_base = OTHER; note = 2'-O-methyluridine
  modified_base 16: mod_base = OTHER; note = 2'-fluoroadenosine
  modified_base 17: mod_base = OTHER; note = 2'-O-methyluridine
  modified_base 18: mod_base = OTHER; note = 2'-fluorouridine
  modified_base 19: mod_base = OTHER; note = 2'-O-methylcytidine
  modified_base 20: mod_base = OTHER; note = 2'-fluorouridine
  modified_base 21: mod_base = OTHER; note = 2'-O-methyluridine with phosphorothioate linkage
  modified_base 22: mod_base = OTHER; note = 2'-fluoroadenosine with phosphorothioate linkage
  modified_base 23: mod_base = OTHER; note = 2'-O-methylguanosine
gatactgatcctggtattcttag

SEQ ID NO: 1206 - RNA, 23 nt, synthetic construct
  source 1..23: mol_type = other RNA
  modified_base 1: mod_base = OTHER; note = 5'-(E)-vinylphosphonate 2'-O-methylated adenosine with phosphorothioate linkage
  modified_base 2: mod_base = OTHER; note = 2'-fluoroguanosine with phosphorothioate linkage
  modified_base 3: mod_base = OTHER; note = 2'-O-methyladenosine
  modified_base 4: mod_base = OTHER; note = 2'-fluorouridine
  modified_base 5: mod_base = OTHER; note = 2'-O-methyladenosine
  modified_base 6: mod_base = OTHER; note = 2'-fluorocytidine
  modified_base 7: mod_base = OTHER; note = 2'-O-methyluridine
  modified_base 8: mod_base = OTHER; note = 2'-fluoroguanosine
  modified_base 9: mod_base = OTHER; note = 2'-O-methyladenosine
  modified_base 10: mod_base = OTHER; note = 2'-fluorouridine
  modified_base 11: mod_base = OTHER; note = 2'-O-methylcytidine
  modified_base 12: mod_base = OTHER; note = 2'-fluorocytidine
  modified_base 13: mod_base = OTHER; note = 2'-O-methyluridine
  modified_base 14: mod_base = OTHER; note = 2'-fluoroguanosine
  modified_base 15: mod_base = OTHER; note = 2'-O-methylguanosine
  modified_base 16: mod_base = OTHER; note = 2'-fluorouridine
  modified_base 17: mod_base = OTHER; note = 2'-O-methyladenosine
  modified_base 18: mod_base = OTHER; note = 2'-fluorouridine
  modified_base 19: mod_base = OTHER; note = 2'-O-methyluridine
  modified_base 20: mod_base = OTHER; note = 2'-fluorocytidine
  modified_base 21: mod_base = OTHER; note = 2'-O-methyluridine with phosphorothioate linkage
  modified_base 22: mod_base = OTHER; note = 2'-fluorouridine with phosphorothioate linkage
  modified_base 23: mod_base = OTHER; note = 2'-O-methyladenosine
agatactgatcctggtattctta

SEQ ID NO: 1207 - RNA, 23 nt, synthetic construct
  source 1..23: mol_type = other RNA
  modified_base 1: mod_base = OTHER; note = 5'-(E)-vinylphosphonate 2'-O-methylated uridine with phosphorothioate linkage
  modified_base 2: mod_base = OTHER; note = 2'-fluorocytidine with phosphorothioate linkage
  modified_base 3: mod_base = OTHER; note = 2'-O-methylguanosine
  modified_base 4: mod_base = OTHER; note = 2'-fluoroadenosine
  modified_base 5: mod_base = OTHER; note = 2'-O-methyluridine
  modified_base 6: mod_base = OTHER; note = 2'-fluoroadenosine
  modified_base 7: mod_base = OTHER; note = 2'-O-methylcytidine
  modified_base 8: mod_base = OTHER; note = 2'-fluorouridine
  modified_base 9: mod_base = OTHER; note = 2'-O-methylguanosine
  modified_base 10: mod_base = OTHER; note = 2'-fluoroadenosine
  modified_base 11: mod_base = OTHER; note = 2'-O-methyluridine
  modified_base 12: mod_base = OTHER; note = 2'-fluorocytidine
  modified_base 13: mod_base = OTHER; note = 2'-O-methylcytidine
  modified_base 14: mod_base = OTHER; note = 2'-fluorouridine
  modified_base 15: mod_base = OTHER; note = 2'-O-methylguanosine
  modified_base 16: mod_base = OTHER; note = 2'-fluoroguanosine
  modified_base 17: mod_base = OTHER; note = 2'-O-methyluridine
  modified_base 18: mod_base = OTHER; note = 2'-fluoroadenosine
  modified_base 19: mod_base = OTHER; note = 2'-O-methyluridine
  modified_base 20: mod_base = OTHER; note = 2'-fluorouridine
  modified_base 21: mod_base = OTHER; note = 2'-O-methylcytidine with phosphorothioate linkage
  modified_base 22: mod_base = OTHER; note = 2'-fluorouridine with phosphorothioate linkage
  modified_base 23: mod_base = OTHER; note = 2'-O-methyluridine
tcgatactgatcctggtattctt

SEQ ID NO: 1208 - RNA, 23 nt, synthetic construct
  source 1..23: mol_type = other RNA
  modified_base 1: mod_base = OTHER; note = 5'-(E)-vinylphosphonate 2'-O-methylated adenosine with phosphorothioate linkage
  modified_base 2: mod_base = OTHER; note = 2'-fluorouridine with phosphorothioate linkage
  modified_base 3: mod_base = OTHER; note = 2'-O-methylcytidine
  modified_base 4: mod_base = OTHER; note = 2'-fluoroguanosine
  modified_base 5: mod_base = OTHER; note = 2'-O-methyladenosine
  modified_base 6: mod_base = OTHER; note = 2'-fluorouridine
  modified_base 7: mod_base = OTHER; note = 2'-O-methyladenosine
  modified_base 8: mod_base = OTHER; note = 2'-fluorocytidine
  modified_base 9: mod_base = OTHER; note = 2'-O-methyluridine
  modified_base 10: mod_base = OTHER; note = 2'-fluoroguanosine
  modified_base 11: mod_base = OTHER; note = 2'-O-methyladenosine
  modified_base 12: mod_base = OTHER; note = 2'-fluorouridine
  modified_base 13: mod_base = OTHER; note = 2'-O-methylcytidine
  modified_base 14: mod_base = OTHER; note = 2'-fluorocytidine
  modified_base 15: mod_base = OTHER; note = 2'-O-methyluridine
  modified_base 16: mod_base = OTHER; note = 2'-fluoroguanosine
  modified_base 17: mod_base = OTHER; note = 2'-O-methylguanosine
  modified_base 18: mod_base = OTHER; note = 2'-fluorouridine
  modified_base 19: mod_base = OTHER; note = 2'-O-methyladenosine
  modified_base 20: mod_base = OTHER; note = 2'-fluorouridine
  modified_base 21: mod_base = OTHER; note = 2'-O-methyluridine with phosphorothioate linkage
  modified_base 22: mod_base = OTHER; note = 2'-fluorocytidine with phosphorothioate linkage
  modified_base 23: mod_base = OTHER; note = 2'-O-methyluridine
atcgatactgatcctggtattct

SEQ ID NO: 1209 - RNA, 23 nt, synthetic construct
  source 1..23: mol_type = other RNA
  modified_base 1: mod_base = OTHER; note = 5'-(E)-vinylphosphonate 2'-O-methylated uridine with phosphorothioate linkage
  modified_base 2: mod_base = OTHER; note = 2'-fluorocytidine with phosphorothioate linkage
  modified_base 3: mod_base = OTHER; note = 2'-O-methyluridine
  modified_base 4: mod_base = OTHER; note = 2'-fluorocytidine
  modified_base 5: mod_base = OTHER; note = 2'-O-methylguanosine
  modified_base 6: mod_base = OTHER; note = 2'-fluoroadenosine
  modified_base 7: mod_base = OTHER; note = 2'-O-methyluridine
  modified_base 8: mod_base = OTHER; note = 2'-fluoroadenosine
  modified_base 9: mod_base = OTHER; note = 2'-O-methylcytidine
  modified_base 10: mod_base = OTHER; note = 2'-fluorouridine
  modified_base 11: mod_base = OTHER; note = 2'-O-methylguanosine
  modified_base 12: mod_base = OTHER; note = 2'-fluoroadenosine
  modified_base 13: mod_base = OTHER; note = 2'-O-methyluridine
  modified_base 14: mod_base = OTHER; note = 2'-fluorocytidine
  modified_base 15: mod_base = OTHER; note = 2'-O-methylcytidine
  modified_base 16: mod_base = OTHER; note = 2'-fluorouridine
  modified_base 17: mod_base = OTHER; note = 2'-O-methylguanosine
  modified_base 18: mod_base = OTHER; note = 2'-fluoroguanosine
  modified_base 19: mod_base = OTHER; note = 2'-O-methyluridine
  modified_base 20: mod_base = OTHER; note = 2'-fluoroadenosine
  modified_base 21: mod_base = OTHER; note = 2'-O-methyluridine with phosphorothioate linkage
  modified_base 22: mod_base = OTHER; note = 2'-fluorouridine with phosphorothioate linkage
  modified_base 23: mod_base = OTHER; note = 2'-O-methylcytidine
tctcgatactgatcctggtattc

SEQ ID NO: 1210 - RNA, 23 nt, synthetic construct
  source 1..23: mol_type = other RNA
  modified_base 1: mod_base = OTHER; note = 5'-(E)-vinylphosphonate 2'-O-methylated adenosine with phosphorothioate linkage
  modified_base 2: mod_base = OTHER; note = 2'-fluorouridine with phosphorothioate linkage
  modified_base 3: mod_base = OTHER; note = 2'-O-methylcytidine
  modified_base 4: mod_base = OTHER; note = 2'-fluorouridine
  modified_base 5: mod_base = OTHER; note = 2'-O-methylcytidine
  modified_base 6: mod_base = OTHER; note = 2'-fluoroguanosine
  modified_base 7: mod_base = OTHER; note = 2'-O-methyladenosine
  modified_base 8: mod_base = OTHER; note = 2'-fluorouridine
  modified_base 9: mod_base = OTHER; note = 2'-O-methyladenosine
  modified_base 10: mod_base = OTHER; note = 2'-fluorocytidine
  modified_base 11: mod_base = OTHER; note = 2'-O-methyluridine
  modified_base 12: mod_base = OTHER; note = 2'-fluoroguanosine
  modified_base 13: mod_base = OTHER; note = 2'-O-methyladenosine
  modified_base 14: mod_base = OTHER; note = 2'-fluorouridine
  modified_base 15: mod_base = OTHER; note = 2'-O-methylcytidine
  modified_base 16: mod_base = OTHER; note = 2'-fluorocytidine
  modified_base 17: mod_base = OTHER; note = 2'-O-methyluridine
  modified_base 18: mod_base = OTHER; note = 2'-fluoroguanosine
  modified_base 19: mod_base = OTHER; note = 2'-O-methylguanosine
  modified_base 20: mod_base = OTHER; note = 2'-fluorouridine
  modified_base 21: mod_base = OTHER; note = 2'-O-methyladenosine with phosphorothioate linkage
  modified_base 22: mod_base = OTHER; note = 2'-fluorouridine with phosphorothioate linkage
  modified_base 23: mod_base = OTHER; note = 2'-O-methyluridine
atctcgatactgatcctggtatt

SEQ ID NO: 1211 - RNA, 23 nt, synthetic construct
  source 1..23: mol_type = other RNA
  modified_base 1: mod_base = OTHER; note = 5'-(E)-vinylphosphonate 2'-O-methylated uridine with phosphorothioate linkage
  modified_base 2: mod_base = OTHER; note = 2'-fluorocytidine with phosphorothioate linkage
  modified_base 3: mod_base = OTHER; note = 2'-O-methyluridine
  modified_base 4: mod_base = OTHER; note = 2'-fluorocytidine
  modified_base 5: mod_base = OTHER; note = 2'-O-methyluridine
  modified_base 6: mod_base = OTHER; note = 2'-fluorocytidine
  modified_base 7: mod_base = OTHER; note = 2'-O-methylguanosine
  modified_base 8: mod_base = OTHER; note = 2'-fluoroadenosine
  modified_base 9: mod_base = OTHER; note = 2'-O-methyluridine
  modified_base 10: mod_base = OTHER; note = 2'-fluoroadenosine
  modified_base 11: mod_base = OTHER; note = 2'-O-methylcytidine
  modified_base 12: mod_base = OTHER; note = 2'-fluorouridine
  modified_base 13: mod_base = OTHER; note = 2'-O-methylguanosine
  modified_base 14: mod_base = OTHER; note = 2'-fluoroadenosine
  modified_base 15: mod_base = OTHER; note = 2'-O-methyluridine
  modified_base 16: mod_base = OTHER; note = 2'-fluorocytidine
  modified_base 17: mod_base = OTHER; note = 2'-O-methylcytidine
  modified_base 18: mod_base = OTHER; note = 2'-fluorouridine
  modified_base 19: mod_base = OTHER; note = 2'-O-methylguanosine
  modified_base 20: mod_base = OTHER; note = 2'-fluoroguanosine
  modified_base 21: mod_base = OTHER; note = 2'-O-methyluridine with phosphorothioate linkage
  modified_base 22: mod_base = OTHER; note = 2'-fluoroadenosine with phosphorothioate linkage
  modified_base 23: mod_base = OTHER; note = 2'-O-methyluridine
tctctcgatactgatcctggtat

SEQ ID NO: 1212 - RNA, 23 nt, synthetic construct
  source 1..23: mol_type = other RNA
  modified_base 1: mod_base = OTHER; note = 5'-(E)-vinylphosphonate 2'-O-methylated adenosine with phosphorothioate linkage
  modified_base 2: mod_base = OTHER; note = 2'-fluorouridine with phosphorothioate linkage
  modified_base 3: mod_base = OTHER; note = 2'-O-methylcytidine
  modified_base 4: mod_base = OTHER; note = 2'-fluorouridine
  modified_base 5: mod_base = OTHER; note = 2'-O-methylcytidine
  modified_base 6: mod_base = OTHER; note = 2'-fluorouridine
  modified_base 7: mod_base = OTHER; note = 2'-O-methylcytidine
  modified_base 8: mod_base = OTHER; note = 2'-fluoroguanosine
  modified_base 9: mod_base = OTHER; note = 2'-O-methyladenosine
  modified_base 10: mod_base = OTHER; note = 2'-fluorouridine
  modified_base 11: mod_base = OTHER; note = 2'-O-methyladenosine
  modified_base 12: mod_base = OTHER; note = 2'-fluorocytidine
  modified_base 13: mod_base = OTHER; note = 2'-O-methyluridine
  modified_base 14: mod_base = OTHER; note = 2'-fluoroguanosine
  modified_base 15: mod_base = OTHER; note = 2'-O-methyladenosine
  modified_base 16: mod_base = OTHER; note = 2'-fluorouridine
  modified_base 17: mod_base = OTHER; note = 2'-O-methylcytidine
  modified_base 18: mod_base = OTHER; note = 2'-fluorocytidine
  modified_base 19: mod_base = OTHER; note = 2'-O-methyluridine
  modified_base 20: mod_base = OTHER; note = 2'-fluoroguanosine
  modified_base 21: mod_base = OTHER; note = 2'-O-methylguanosine with phosphorothioate linkage
  modified_base 22: mod_base = OTHER; note = 2'-fluorouridine with phosphorothioate linkage
  modified_base 23: mod_base = OTHER; note = 2'-O-methyladenosine
atctctcgatactgatcctggta

SEQ ID NO: 1213 - RNA, 23 nt, synthetic construct
  source 1..23: mol_type = other RNA
  modified_base 1: mod_base = OTHER; note = 5'-(E)-vinylphosphonate 2'-O-methylated adenosine with phosphorothioate linkage
  modified_base 2: mod_base = OTHER; note = 2'-fluorocytidine with phosphorothioate linkage
  modified_base 3: mod_base = OTHER; note = 2'-O-methyluridine
  modified_base 4: mod_base = OTHER; note = 2'-fluorocytidine
  modified_base 5: mod_base = OTHER; note = 2'-O-methyluridine
  modified_base 6: mod_base = OTHER; note = 2'-fluorocytidine
  modified_base 7: mod_base = OTHER; note = 2'-O-methyluridine
  modified_base 8: mod_base = OTHER; note = 2'-fluorocytidine
  modified_base 9: mod_base = OTHER; note = 2'-O-methylguanosine
  modified_base 10: mod_base = OTHER; note = 2'-fluoroadenosine
  modified_base 11: mod_base = OTHER; note = 2'-O-methyluridine
  modified_base 12: mod_base = OTHER; note = 2'-fluoroadenosine
  modified_base 13: mod_base = OTHER; note = 2'-O-methylcytidine
  modified_base 14: mod_base = OTHER; note = 2'-fluorouridine
  modified_base 15: mod_base = OTHER; note = 2'-O-methylguanosine
  modified_base 16: mod_base = OTHER; note = 2'-fluoroadenosine
  modified_base 17: mod_base = OTHER; note = 2'-O-methyluridine
  modified_base 18: mod_base = OTHER; note = 2'-fluorocytidine
  modified_base 19: mod_base = OTHER; note = 2'-O-methylcytidine
  modified_base 20: mod_base = OTHER; note = 2'-fluorouridine
  modified_base 21: mod_base = OTHER; note = 2'-O-methylguanosine with phosphorothioate linkage
  modified_base 22: mod_base = OTHER; note = 2'-fluoroguanosine with phosphorothioate linkage
  modified_base 23: mod_base = OTHER; note = 2'-O-methyluridine
actctctcgatactgatcctggt

SEQ ID NO: 1214 - RNA, 23 nt, synthetic construct
  source 1..23: mol_type = other RNA
  modified_base 1: mod_base = OTHER; note = 5'-(E)-vinylphosphonate 2'-O-methylated guanosine with phosphorothioate linkage
  modified_base 2: mod_base = OTHER; note = 2'-fluorocytidine with phosphorothioate linkage
  modified_base 3: mod_base = OTHER; note = 2'-O-methylcytidine
  modified_base 4: mod_base = OTHER; note = 2'-fluorouridine
  modified_base 5: mod_base = OTHER; note = 2'-O-methylcytidine
  modified_base 6: mod_base = OTHER; note = 2'-fluorouridine
  modified_base 7: mod_base = OTHER; note = 2'-O-methylcytidine
  modified_base 8: mod_base = OTHER; note = 2'-fluorouridine
  modified_base 9: mod_base = OTHER; note = 2'-O-methylcytidine
  modified_base 10: mod_base = OTHER; note = 2'-fluoroguanosine
  modified_base 11: mod_base = OTHER; note = 2'-O-methyladenosine
  modified_base 12: mod_base = OTHER; note = 2'-fluorouridine
  modified_base 13: mod_base = OTHER; note = 2'-O-methyladenosine
  modified_base 14: mod_base = OTHER; note = 2'-fluorocytidine
  modified_base 15: mod_base = OTHER; note = 2'-O-methyluridine
  modified_base 16: mod_base = OTHER; note = 2'-fluoroguanosine
  modified_base 17: mod_base = OTHER; note = 2'-O-methyladenosine
  modified_base 18: mod_base = OTHER; note = 2'-fluorouridine
  modified_base 19: mod_base = OTHER; note = 2'-O-methylcytidine
  modified_base 20: mod_base = OTHER; note = 2'-fluorocytidine
  modified_base 21: mod_base = OTHER; note = 2'-O-methyluridine with phosphorothioate linkage
  modified_base 22: mod_base = OTHER; note = 2'-fluoroguanosine with phosphorothioate linkage
  modified_base 23: mod_base = OTHER; note = 2'-O-methylguanosine
gcctctctcgatactgatcctgg

SEQ ID NO: 1215 - RNA, 23 nt, synthetic construct
  source 1..23: mol_type = other RNA
  modified_base 1: mod_base = OTHER; note = 5'-(E)-vinylphosphonate 2'-O-methylated guanosine with phosphorothioate linkage
  modified_base 2: mod_base = OTHER; note = 2'-fluoroguanosine with phosphorothioate linkage
  modified_base 3: mod_base = OTHER; note = 2'-O-methyladenosine
  modified_base 4: mod_base = OTHER; note = 2'-fluoroadenosine
  modified_base 5: mod_base = OTHER; note = 2'-O-methyladenosine
  modified_base 6: mod_base = OTHER; note = 2'-fluoroguanosine
  modified_base 7: mod_base = OTHER; note = 2'-O-methylcytidine
  modified_base 8: mod_base = OTHER; note = 2'-fluoroguanosine
  modified_base 9: mod_base = OTHER; note = 2'-O-methylcytidine
  modified_base 10: mod_base = OTHER; note = 2'-fluorocytidine
  modified_base 11: mod_base = OTHER; note = 2'-O-methylcytidine
  modified_base 12: mod_base = OTHER; note = 2'-fluorouridine
  modified_base 13: mod_base = OTHER; note = 2'-O-methyluridine
  modified_base 14: mod_base = OTHER; note = 2'-fluorocytidine
  modified_base 15: mod_base = OTHER; note = 2'-O-methyluridine
  modified_base 16: mod_base = OTHER; note = 2'-fluoroguanosine
  modified_base 17: mod_base = OTHER; note = 2'-O-methylcytidine
  modified_base 18: mod_base = OTHER; note = 2'-fluorocytidine
  modified_base 19: mod_base = OTHER; note = 2'-O-methyladenosine
  modified_base 20: mod_base = OTHER; note = 2'-fluoroguanosine
  modified_base 21: mod_base = OTHER; note = 2'-O-methylguanosine with phosphorothioate linkage
  modified_base 22: mod_base = OTHER; note = 2'-fluorocytidine with phosphorothioate linkage
  modified_base 23: mod_base = OTHER; note = 2'-O-methylcytidine
ggaaagcgcccttctgccaggcc

SEQ ID NO: 1216 - RNA, 23 nt, synthetic construct
  source 1..23: mol_type = other RNA
  modified_base 1: mod_base = OTHER; note = 5'-(E)-vinylphosphonate 2'-O-methylated guanosine with phosphorothioate linkage
  modified_base 2: mod_base = OTHER; note = 2'-fluorouridine with phosphorothioate linkage
  modified_base 3: mod_base = OTHER; note = 2'-O-methylguanosine
  modified_base 4: mod_base = OTHER; note = 2'-fluoroguanosine
  modified_base 5: mod_base = OTHER; note = 2'-O-methylguanosine
  modified_base 6: mod_base = OTHER; note = 2'-fluorouridine
  modified_base 7: mod_base = OTHER; note = 2'-O-methylguanosine
  modified_base 8: mod_base = OTHER; note = 2'-fluoroguanosine
  modified_base 9: mod_base = OTHER; note = 2'-O-methyladenosine
  modified_base 10: mod_base = OTHER; note = 2'-fluoroadenosine
  modified_base 11: mod_base = OTHER; note = 2'-O-methyladenosine
  modified_base 12: mod_base = OTHER; note = 2'-fluoroguanosine
  modified_base 13: mod_base = OTHER; note = 2'-O-methylcytidine
  modified_base 14: mod_base = OTHER; note = 2'-fluoroguanosine
  modified_base 15: mod_base = OTHER; note = 2'-O-methylcytidine
  modified_base 16: mod_base = OTHER; note = 2'-fluorocytidine
  modified_base 17: mod_base = OTHER; note = 2'-O-methylcytidine
  modified_base 18: mod_base = OTHER; note = 2'-fluorouridine
  modified_base 19: mod_base = OTHER; note = 2'-O-methyluridine
  modified_base 20: mod_base = OTHER; note = 2'-fluorocytidine
  modified_base 21: mod_base = OTHER; note = 2'-O-methyluridine with phosphorothioate linkage
  modified_base 22: mod_base = OTHER; note = 2'-fluoroguanosine with phosphorothioate linkage
  modified_base 23: mod_base = OTHER; note = 2'-O-methylcytidine
gtgggtggaaagcgcccttctgc

SEQ ID NO: 1217 - RNA, 23 nt, synthetic construct
  source 1..23: mol_type = other RNA
  modified_base 1: mod_base = OTHER; note = 5'-(E)-vinylphosphonate 2'-O-methylated adenosine with phosphorothioate linkage
  modified_base 2: mod_base = OTHER; note = 2'-fluoroguanosine with phosphorothioate linkage
  modified_base 3: mod_base = OTHER; note = 2'-O-methyluridine
  modified_base 4: mod_base = OTHER; note = 2'-fluoroguanosine
  modified_base 5: mod_base = OTHER; note = 2'-O-methylguanosine
  modified_base 6: mod_base = OTHER; note = 2'-fluoroguanosine
  modified_base 7: mod_base = OTHER; note = 2'-O-methyluridine
  modified_base 8: mod_base = OTHER; note = 2'-fluoroguanosine
  modified_base 9: mod_base = OTHER; note = 2'-O-methylguanosine
  modified_base 10: mod_base = OTHER; note = 2'-fluoroadenosine
  modified_base 11: mod_base = OTHER; note = 2'-O-methyladenosine
  modified_base 12: mod_base = OTHER; note = 2'-fluoroadenosine
  modified_base 13: mod_base = OTHER; note = 2'-O-methylguanosine
  modified_base 14: mod_base = OTHER; note = 2'-fluorocytidine
  modified_base 15: mod_base = OTHER; note = 2'-O-methylguanosine
  modified_base 16: mod_base = OTHER; note = 2'-fluorocytidine
  modified_base 17: mod_base = OTHER; note = 2'-O-methylcytidine
  modified_base 18: mod_base = OTHER; note = 2'-fluorocytidine
  modified_base 19: mod_base = OTHER; note = 2'-O-methyluridine
  modified_base 20: mod_base = OTHER; note = 2'-fluorouridine
  modified_base 21: mod_base = OTHER; note = 2'-O-methylcytidine with phosphorothioate linkage
  modified_base 22: mod_base = OTHER; note = 2'-fluorouridine with phosphorothioate linkage
  modified_base 23: mod_base = OTHER; note = 2'-O-methylguanosine
agtgggtggaaagcgcccttctg

SEQ ID NO: 1218 - RNA, 23 nt, synthetic construct
  source 1..23: mol_type = other RNA
  modified_base 1: mod_base = OTHER; note = 5'-(E)-vinylphosphonate 2'-O-methylated uridine with phosphorothioate linkage
  modified_base 2: mod_base = OTHER; note = 2'-fluorocytidine with phosphorothioate linkage
  modified_base 3: mod_base = OTHER; note = 2'-O-methyluridine
  modified_base 4: mod_base = OTHER; note = 2'-fluorocytidine
  modified_base 5: mod_base = OTHER; note = 2'-O-methylguanosine
  modified_base 6: mod_base = OTHER; note = 2'-fluoroguanosine
  modified_base 7: mod_base = OTHER; note = 2'-O-methyluridine
  modified_base 8: mod_base = OTHER; note = 2'-fluoroguanosine
  modified_base 9: mod_base = OTHER; note = 2'-O-methylguanosine
  modified_base 10: mod_base = OTHER; note = 2'-fluorouridine
  modified_base 11: mod_base = OTHER; note = 2'-O-methylguanosine
  modified_base 12: mod_base = OTHER; note = 2'-fluoroguanosine
  modified_base 13: mod_base = OTHER; note = 2'-O-methyladenosine
  modified_base 14: mod_base = OTHER; note = 2'-fluorocytidine
  modified_base 15: mod_base = OTHER; note = 2'-O-methyluridine
  modified_base 16: mod_base = OTHER; note = 2'-fluoroadenosine
  modified_base 17: mod_base = OTHER; note = 2'-O-methyladenosine
  modified_base 18: mod_base = OTHER; note = 2'-fluoroadenosine
  modified_base 19: mod_base = OTHER; note = 2'-O-methylcytidine
  modified_base 20: mod_base = OTHER; note = 2'-fluoroadenosine
  modified_base 21: mod_base = OTHER; note = 2'-O-methylguanosine with phosphorothioate linkage
  modified_base 22: mod_base = OTHER; note = 2'-fluoroguanosine with phosphorothioate linkage
  modified_base 23: mod_base = OTHER; note = 2'-O-methylguanosine
tctcggtggtggactaaacaggg

SEQ ID NO: 1219 - RNA, 23 nt, synthetic construct
  source 1..23: mol_type = other RNA
  modified_base 1: mod_base = OTHER; note = 5'-(E)-vinylphosphonate 2'-O-methylated guanosine with phosphorothioate linkage
  modified_base 2: mod_base = OTHER; note = 2'-fluorouridine with phosphorothioate linkage
  modified_base 3: mod_base = OTHER; note = 2'-O-methylcytidine
  modified_base 4: mod_base = OTHER; note = 2'-fluorouridine
  modified_base 5: mod_base = OTHER; note = 2'-O-methylcytidine
  modified_base 6: mod_base = OTHER; note = 2'-fluoroguanosine
  modified_base 7: mod_base = OTHER; note = 2'-O-methylguanosine
  modified_base 8: mod_base = OTHER; note = 2'-fluorouridine
  modified_base 9: mod_base = OTHER; note = 2'-O-methylguanosine
  modified_base 10: mod_base = OTHER; note = 2'-fluoroguanosine
  modified_base 11: mod_base = OTHER; note = 2'-O-methyluridine
  modified_base 12: mod_base = OTHER; note = 2'-fluoroguanosine
  modified_base 13: mod_base = OTHER; note = 2'-O-methylguanosine
  modified_base 14: mod_base = OTHER; note = 2'-fluoroadenosine
  modified_base 15: mod_base = OTHER; note = 2'-O-methylcytidine
  modified_base 16: mod_base = OTHER; note = 2'-fluorouridine
  modified_base 17: mod_base = OTHER; note = 2'-O-methyladenosine
  modified_base 18: mod_base = OTHER; note = 2'-fluoroadenosine
  modified_base 19: mod_base = OTHER; note = 2'-O-methyladenosine
  modified_base 20: mod_base = OTHER; note = 2'-fluorocytidine
  modified_base 21: mod_base = OTHER; note = 2'-O-methyladenosine with phosphorothioate linkage
  modified_base 22: mod_base = OTHER; note = 2'-fluoroguanosine with phosphorothioate linkage
  modified_base 23: mod_base = OTHER; note = 2'-O-methylguanosine
gtctcggtggtggactaaacagg

SEQ ID NO: 1220 - RNA, 23 nt, synthetic construct
  source 1..23: mol_type = other RNA
  modified_base 1: mod_base = OTHER; note = 5'-(E)-vinylphosphonate 2'-O-methylated uridine with phosphorothioate linkage
  modified_base 2: mod_base = OTHER; note = 2'-fluoroguanosine with phosphorothioate linkage
  modified_base 3: mod_base = OTHER; note = 2'-O-methyluridine
  modified_base 4: mod_base = OTHER; note = 2'-fluorocytidine
  modified_base 5: mod_base = OTHER; note = 2'-O-methyluridine
  modified_base 6: mod_base = OTHER; note = 2'-fluorocytidine
  modified_base 7: mod_base = OTHER; note = 2'-O-methylguanosine
  modified_base 8: mod_base = OTHER; note = 2'-fluoroguanosine
  modified_base 9: mod_base = OTHER; note = 2'-O-methyluridine
  modified_base 10: mod_base = OTHER; note = 2'-fluoroguanosine
  modified_base 11: mod_base = OTHER; note = 2'-O-methylguanosine
  modified_base 12: mod_base = OTHER; note = 2'-fluorouridine
  modified_base 13: mod_base = OTHER; note = 2'-O-methylguanosine
  modified_base 14: mod_base = OTHER; note = 2'-fluoroguanosine
  modified_base 15: mod_base = OTHER; note = 2'-O-methyladenosine
  modified_base 16: mod_base = OTHER; note = 2'-fluorocytidine
  modified_base 17: mod_base = OTHER; note = 2'-O-methyluridine
  modified_base 18: mod_base = OTHER; note = 2'-fluoroadenosine
  modified_base 19: mod_base = OTHER; note = 2'-O-methyladenosine
  modified_base 20: mod_base = OTHER; note = 2'-fluoroadenosine
  modified_base 21: mod_base = OTHER; note = 2'-O-methylcytidine with phosphorothioate linkage
  modified_base 22: mod_base = OTHER; note = 2'-fluoroadenosine with phosphorothioate linkage
  modified_base 23: mod_base = OTHER; note = 2'-O-methylguanosine
tgtctcggtggtggactaaacag

SEQ ID NO: 1221 - RNA, 23 nt, synthetic construct
  source 1..23: mol_type = other RNA
  modified_base 1: mod_base = OTHER; note = 5'-(E)-vinylphosphonate 2'-O-methylated adenosine with phosphorothioate linkage
  modified_base 2: mod_base = OTHER; note = 2'-fluorouridine with phosphorothioate linkage
  modified_base 3: mod_base = OTHER; note = 2'-O-methylguanosine
  modified_base 4: mod_base = OTHER; note = 2'-fluorouridine
  modified_base 5: mod_base = OTHER; note = 2'-O-methylcytidine
  modified_base 6: mod_base = OTHER; note = 2'-fluorouridine
  modified_base 7: mod_base = OTHER; note = 2'-O-methylcytidine
  modified_base 8: mod_base = OTHER; note = 2'-fluoroguanosine
  modified_base 9: mod_base = OTHER; note = 2'-O-methylguanosine
  modified_base 10: mod_base = OTHER; note = 2'-fluorouridine
  modified_base 11: mod_base = OTHER; note = 2'-O-methylguanosine
  modified_base 12: mod_base = OTHER; note = 2'-fluoroguanosine
  modified_base 13: mod_base = OTHER; note = 2'-O-methyluridine
  modified_base 14: mod_base = OTHER; note = 2'-fluoroguanosine
  modified_base 15: mod_base = OTHER; note = 2'-O-methylguanosine
  modified_base 16: mod_base = OTHER; note = 2'-fluoroadenosine
  modified_base 17: mod_base = OTHER; note = 2'-O-methylcytidine
  modified_base 18: mod_base = OTHER; note = 2'-fluorouridine
  modified_base 19: mod_base = OTHER; note = 2'-O-methyladenosine
  modified_base 20: mod_base = OTHER; note = 2'-fluoroadenosine
  modified_base 21: mod_base = OTHER; note = 2'-O-methyladenosine with phosphorothioate linkage
  modified_base 22: mod_base = OTHER; note = 2'-fluorocytidine with phosphorothioate linkage
  modified_base 23: mod_base = OTHER; note = 2'-O-methyladenosine
atgtctcggtggtggactaaaca

SEQ ID NO: 1222 - RNA, 23 nt, synthetic construct
  source 1..23: mol_type = other RNA
  modified_base 1: mod_base = OTHER; note = 5'-(E)-vinylphosphonate 2'-O-methylated guanosine with phosphorothioate linkage
  modified_base 2: mod_base = OTHER; note = 2'-fluoroadenosine with phosphorothioate linkage
  modified_base 3: mod_base = OTHER; note = 2'-O-methyluridine
  modified_base 4: mod_base = OTHER; note = 2'-fluoroguanosine
  modified_base 5: mod_base = OTHER; note = 2'-O-methyluridine
  modified_base 6: mod_base = OTHER; note = 2'-fluorocytidine
  modified_base 7: mod_base = OTHER; note = 2'-O-methyluridine
  modified_base 8: mod_base = OTHER; note = 2'-fluorocytidine
  modified_base 9: mod_base = OTHER; note = 2'-O-methylguanosine
  modified_base 10: mod_base = OTHER; note = 2'-fluoroguanosine
  modified_base 11: mod_base = OTHER; note = 2'-O-methyluridine
  modified_base 12: mod_base = OTHER; note = 2'-fluoroguanosine
  modified_base 13: mod_base = OTHER; note = 2'-O-methylguanosine
  modified_base 14: mod_base = OTHER; note = 2'-fluorouridine
  modified_base 15: mod_base = OTHER; note = 2'-O-methylguanosine
  modified_base 16: mod_base = OTHER; note = 2'-fluoroguanosine
  modified_base 17: mod_base = OTHER; note = 2'-O-methyladenosine
  modified_base 18: mod_base = OTHER; note = 2'-fluorocytidine
  modified_base 19: mod_base = OTHER; note = 2'-O-methyluridine
  modified_base 20: mod_base = OTHER; note = 2'-fluoroadenosine
  modified_base 21: mod_base = OTHER; note = 2'-O-methyladenosine with phosphorothioate linkage
  modified_base 22: mod_base = OTHER; note = 2'-fluoroadenosine with phosphorothioate linkage
  modified_base 23: mod_base = OTHER; note = 2'-O-methylcytidine
gatgtctcggtggtggactaaac

SEQ ID NO: 1223 - RNA, 23 nt, synthetic construct
  source 1..23: mol_type = other RNA
  modified_base 1: mod_base = OTHER; note = 5'-(E)-vinylphosphonate 2'-O-methylated uridine with phosphorothioate linkage
  modified_base 2: mod_base = OTHER; note = 2'-fluoroguanosine with phosphorothioate linkage
  modified_base 3: mod_base = OTHER; note = 2'-O-methyladenosine
  modified_base 4: mod_base = OTHER; note = 2'-fluorouridine
  modified_base 5: mod_base = OTHER; note = 2'-O-methylguanosine
  modified_base 6: mod_base = OTHER; note = 2'-fluorouridine
  modified_base 7: mod_base = OTHER; note = 2'-O-methylcytidine
  modified_base 8: mod_base = OTHER; note = 2'-fluorouridine
  modified_base 9: mod_base = OTHER; note = 2'-O-methylcytidine
  modified_base 10: mod_base = OTHER; note = 2'-fluoroguanosine
  modified_base 11: mod_base = OTHER; note = 2'-O-methylguanosine
  modified_base 12: mod_base = OTHER; note = 2'-fluorouridine
  modified_base 13: mod_base = OTHER; note = 2'-O-methylguanosine
  modified_base 14: mod_base = OTHER; note = 2'-fluoroguanosine
  modified_base 15: mod_base = OTHER; note = 2'-O-methyluridine
  modified_base 16: mod_base = OTHER; note = 2'-fluoroguanosine
  modified_base 17: mod_base = OTHER; note = 2'-O-methylguanosine
  modified_base 18: mod_base = OTHER; note = 2'-fluoroadenosine
  modified_base 19: mod_base = OTHER; note = 2'-O-methylcytidine
  modified_base 20: mod_base = OTHER; note = 2'-fluorouridine
  modified_base 21: mod_base = OTHER; note = 2'-O-methyladenosine with phosphorothioate linkage
  modified_base 22: mod_base = OTHER; note = 2'-fluoroadenosine with phosphorothioate linkage
  modified_base 23: mod_base = OTHER; note = 2'-O-methyladenosine
tgatgtctcggtggtggactaaa

SEQ ID NO: 1224 - RNA, 23 nt, synthetic construct
  source 1..23: mol_type = other RNA
  modified_base 1: mod_base = OTHER; note = 5'-(E)-vinylphosphonate 2'-O-methylated guanosine with phosphorothioate linkage
  modified_base 2: mod_base = OTHER; note = 2'-fluorouridine with phosphorothioate linkage
  modified_base 3: mod_base = OTHER; note = 2'-O-methylguanosine
  modified_base 4: mod_base = OTHER; note = 2'-fluoroadenosine
  modified_base 5: mod_base = OTHER; note = 2'-O-methyluridine
  modified_base 6: mod_base = OTHER; note = 2'-fluoroguanosine
  modified_base 7: mod_base = OTHER; note = 2'-O-methyluridine
  modified_base 8: mod_base = OTHER; note = 2'-fluorocytidine
  modified_base 9: mod_base = OTHER; note = 2'-O-methyluridine
  modified_base 10: mod_base = OTHER; note = 2'-fluorocytidine
  modified_base 11: mod_base = OTHER; note = 2'-O-methylguanosine
  modified_base 12: mod_base = OTHER; note = 2'-fluoroguanosine
  modified_base 13: mod_base = OTHER; note = 2'-O-methyluridine
  modified_base 14: mod_base = OTHER; note = 2'-fluoroguanosine
  modified_base 15: mod_base = OTHER; note = 2'-O-methylguanosine
  modified_base 16: mod_base = OTHER; note = 2'-fluorouridine
  modified_base 17: mod_base = OTHER; note = 2'-O-methylguanosine
  modified_base 18: mod_base = OTHER; note = 2'-fluoroguanosine
  modified_base 19: mod_base = OTHER; note = 2'-O-methyladenosine
  modified_base 20: mod_base = OTHER; note = 2'-fluorocytidine
  modified_base 21: mod_base = OTHER; note = 2'-O-methyluridine with phosphorothioate linkage
  modified_base 22: mod_base = OTHER; note = 2'-fluoroadenosine with phosphorothioate linkage
  modified_base 23: mod_base = OTHER; note = 2'-O-methyladenosine
gtgatgtctcggtggtggactaa

SEQ ID NO: 1225 - RNA, 23 nt, synthetic construct
  source 1..23: mol_type = other RNA
  modified_base 1: mod_base = OTHER; note = 5'-(E)-vinylphosphonate 2'-O-methylated adenosine with phosphorothioate linkage
  modified_base 2: mod_base = OTHER; note = 2'-fluoroguanosine with phosphorothioate linkage
  modified_base 3: mod_base = OTHER; note = 2'-O-methyluridine
  modified_base 4: mod_base = OTHER; note = 2'-fluoroguanosine
  modified_base 5: mod_base = OTHER; note = 2'-O-methyladenosine
  modified_base 6: mod_base = OTHER; note = 2'-fluorouridine
  modified_base 7: mod_base = OTHER; note = 2'-O-methylguanosine
  modified_base 8: mod_base = OTHER; note = 2'-fluorouridine
  modified_base 9: mod_base = OTHER; note = 2'-O-methylcytidine
  modified_base 10: mod_base = OTHER; note = 2'-fluorouridine
  modified_base 11: mod_base = OTHER; note = 2'-O-methylcytidine
  modified_base 12: mod_base = OTHER; note = 2'-fluoroguanosine
  modified_base 13: mod_base = OTHER; note = 2'-O-methylguanosine
  modified_base 14: mod_base = OTHER; note = 2'-fluorouridine
  modified_base 15: mod_base = OTHER; note = 2'-O-methylguanosine
  modified_base 16: mod_base = OTHER; note = 2'-fluoroguanosine
  modified_base 17: mod_base = OTHER; note = 2'-O-methyluridine
  modified_base 18: mod_base = OTHER; note = 2'-fluoroguanosine
  modified_base 19: mod_base = OTHER; note = 2'-O-methylguanosine
  modified_base 20: mod_base = OTHER; note = 2'-fluoroadenosine
  modified_base 21: mod_base = OTHER; note = 2'-O-methylcytidine with phosphorothioate linkage
  modified_base 22: mod_base = OTHER; note = 2'-fluorouridine with phosphorothioate linkage
  modified_base 23: mod_base = OTHER; note = 2'-O-methyladenosine
agtgatgtctcggtggtggacta

SEQ ID NO: 1226 - RNA, 23 nt, synthetic construct
  source 1..23: mol_type = other RNA
  modified_base 1: mod_base = OTHER; note = 5'-(E)-vinylphosphonate 2'-O-methylated adenosine with phosphorothioate linkage
  modified_base 2: mod_base = OTHER; note = 2'-fluoroadenosine with phosphorothioate linkage
  modified_base 3: mod_base = OTHER; note = 2'-O-methyladenosine
  modified_base 4: mod_base = OTHER; note = 2'-fluoroguanosine
  modified_base 5: mod_base = OTHER; note = 2'-O-methyluridine
  modified_base 6: mod_base = OTHER; note = 2'-fluoroguanosine
  modified_base 7: mod_base = OTHER; note = 2'-O-methyladenosine
  modified_base 8: mod_base = OTHER; note = 2'-fluorouridine
  modified_base 9: mod_base = OTHER; note = 2'-O-methylguanosine
  modified_base 10: mod_base = OTHER; note = 2'-fluorouridine
  modified_base 11: mod_base = OTHER; note = 2'-O-methylcytidine
  modified_base 12: mod_base = OTHER; note = 2'-fluorouridine
  modified_base 13: mod_base = OTHER; note = 2'-O-methylcytidine
  modified_base 14: mod_base = OTHER; note = 2'-fluoroguanosine
  modified_base 15: mod_base = OTHER; note = 2'-O-methylguanosine
  modified_base 16: mod_base = OTHER; note = 2'-fluorouridine
  modified_base 17: mod_base = OTHER; note = 2'-O-methylguanosine
  modified_base 18: mod_base = OTHER; note = 2'-fluoroguanosine
  modified_base 19: mod_base = OTHER; note = 2'-O-methyluridine
  modified_base 20: mod_base = OTHER; note = 2'-fluoroguanosine
  modified_base 21: mod_base = OTHER; note = 2'-O-methylguanosine with phosphorothioate linkage
  modified_base 22: mod_base = OTHER; note = 2'-fluoroadenosine with phosphorothioate linkage
  modified_base 23: mod_base = OTHER; note = 2'-O-methylcytidine
aaagtgatgtctcggtggtggac

SEQ ID NO: 1227 - RNA, 23 nt, synthetic construct
  source 1..23: mol_type = other RNA
  modified_base 1: mod_base = OTHER; note = 5'-(E)-vinylphosphonate 2'-O-methylated adenosine with phosphorothioate linkage
  modified_base 2: mod_base = OTHER; note = 2'-fluorocytidine with phosphorothioate linkage
  modified_base 3: mod_base = OTHER; note = 2'-O-methyladenosine
  modified_base 4: mod_base = OTHER; note = 2'-fluoroadenosine
  modified_base 5: mod_base = OTHER; note = 2'-O-methylguanosine
  modified_base 6: mod_base = OTHER; note = 2'-fluorouridine
  modified_base 7: mod_base = OTHER; note = 2'-O-methylguanosine
  modified_base 8: mod_base = OTHER; note = 2'-fluoroadenosine
  modified_base 9: mod_base = OTHER; note = 2'-O-methyluridine
  modified_base 10: mod_base = OTHER; note = 2'-fluoroguanosine
  modified_base 11: mod_base = OTHER; note = 2'-O-methyluridine
  modified_base 12: mod_base = OTHER; note = 2'-fluorocytidine
  modified_base 13: mod_base = OTHER; note = 2'-O-methyluridine
  modified_base 14: mod_base = OTHER; note = 2'-fluorocytidine
  modified_base 15: mod_base = OTHER; note = 2'-O-methylguanosine
  modified_base 16: mod_base = OTHER; note = 2'-fluoroguanosine
  modified_base 17: mod_base = OTHER; note = 2'-O-methyluridine
  modified_base 18: mod_base = OTHER; note = 2'-fluoroguanosine
  modified_base 19: mod_base = OTHER; note = 2'-O-methylguanosine
  modified_base 20: mod_base = OTHER; note = 2'-fluorouridine
  modified_base 21: mod_base = OTHER; note = 2'-O-methylguanosine with phosphorothioate linkage
  modified_base 22: mod_base = OTHER; note = 2'-fluoroguanosine with phosphorothioate linkage
  modified_base 23: mod_base = OTHER; note = 2'-O-methyladenosine
acaagtgatgtctcggtggtgga

SEQ ID NO: 1228 - RNA, 23 nt, synthetic construct
  source 1..23: mol_type = other RNA
  modified_base 1: mod_base = OTHER; note = 5'-(E)-vinylphosphonate 2'-O-methylated uridine with phosphorothioate linkage
  modified_base 2: mod_base = OTHER; note = 2'-fluorocytidine with phosphorothioate linkage
  modified_base 3: mod_base = OTHER; note = 2'-O-methylcytidine
  modified_base 4: mod_base = OTHER; note = 2'-fluoroadenosine
  modified_base 5: mod_base = OTHER; note = 2'-O-methyladenosine
  modified_base 6: mod_base = OTHER; note = 2'-fluoroguanosine
  modified_base 7: mod_base = OTHER; note = 2'-O-methyluridine
  modified_base 8: mod_base = OTHER; note = 2'-fluoroguanosine
  modified_base 9: mod_base = OTHER; note = 2'-O-methyladenosine
  modified_base 10: mod_base = OTHER; note = 2'-fluorouridine
  modified_base 11: mod_base = OTHER; note = 2'-O-methylguanosine
  modified_base 12: mod_base = OTHER; note = 2'-fluorouridine
  modified_base 13: mod_base = OTHER; note = 2'-O-methylcytidine
  modified_base 14: mod_base = OTHER; note = 2'-fluorouridine
  modified_base 15: mod_base = OTHER; note = 2'-O-methylcytidine
  modified_base 16: mod_base = OTHER; note = 2'-fluoroguanosine
  modified_base 17: mod_base = OTHER; note = 2'-O-methylguanosine
  modified_base 18: mod_base = OTHER; note = 2'-fluorouridine
  modified_base 19: mod_base = OTHER; note = 2'-O-methylguanosine
  modified_base 20: mod_base = OTHER; note = 2'-fluoroguanosine
  modified_base 21: mod_base = OTHER; note = 2'-O-methyluridine with phosphorothioate linkage
  modified_base 22: mod_base = OTHER; note = 2'-fluoroguanosine with phosphorothioate linkage
  modified_base 23: mod_base = OTHER; note = 2'-O-methylguanosine
tccaagtgatgtctcggtggtgg

SEQ ID NO: 1229 - RNA, 23 nt, synthetic construct
  source 1..23: mol_type = other RNA
  modified_base 1: mod_base = OTHER; note = 5'-(E)-vinylphosphonate 2'-O-methylated guanosine with phosphorothioate linkage
  modified_base 2: mod_base = OTHER; note = 2'-fluorouridine with phosphorothioate linkage
  modified_base 3: mod_base = OTHER; note = 2'-O-methylcytidine
  modified_base 4: mod_base = OTHER; note = 2'-fluorocytidine
  modified_base 5: mod_base = OTHER; note = 2'-O-methyladenosine
  modified_base 6: mod_base = OTHER; note = 2'-fluoroadenosine
  modified_base 7: mod_base = OTHER; note = 2'-O-methylguanosine
  modified_base 8: mod_base = OTHER; note = 2'-fluorouridine
  modified_base 9: mod_base = OTHER; note = 2'-O-methylguanosine
  modified_base 10: mod_base = OTHER; note = 2'-fluoroadenosine
  modified_base 11: mod_base = OTHER; note = 2'-O-methyluridine
  modified_base 12: mod_base = OTHER; note = 2'-fluoroguanosine
  modified_base 13: mod_base = OTHER; note = 2'-O-methyluridine
  modified_base 14: mod_base = OTHER; note = 2'-fluorocytidine
  modified_base 15: mod_base = OTHER; note = 2'-O-methyluridine
  modified_base 16: mod_base = OTHER; note = 2'-fluorocytidine
  modified_base 17: mod_base = OTHER; note = 2'-O-methylguanosine
  modified_base 18: mod_base = OTHER; note = 2'-fluoroguanosine
  modified_base 19: mod_base = OTHER; note = 2'-O-methyluridine
  modified_base 20: mod_base = OTHER; note = 2'-fluoroguanosine
  modified_base 21: mod_base = OTHER; note = 2'-O-methylguanosine with phosphorothioate linkage
  modified_base 22: mod_base = OTHER; note = 2'-fluorouridine with phosphorothioate linkage
  modified_base 23: mod_base = OTHER; note = 2'-O-methylguanosine
gtccaagtgatgtctcggtggtg

SEQ ID NO: 1230 - RNA, 23 nt, synthetic construct
  source 1..23: mol_type = other RNA
  modified_base 1: mod_base = OTHER; note = 5'-(E)-vinylphosphonate 2'-O-methylated adenosine with phosphorothioate linkage
  modified_base 2: mod_base = OTHER; note = 2'-fluorocytidine with phosphorothioate linkage
  modified_base 3: mod_base = OTHER; note = 2'-O-methyladenosine
  modified_base 4: mod_base = OTHER; note = 2'-fluorouridine
  modified_base 5: mod_base = OTHER; note = 2'-O-methyluridine
  modified_base 6: mod_base = OTHER; note = 2'-fluoroguanosine
  modified_base 7: mod_base = OTHER; note = 2'-O-methylguanosine
  modified_base 8: mod_base = OTHER; note = 2'-fluoroadenosine
  modified_base 9: mod_base = OTHER; note = 2'-O-methyluridine
  modified_base 10: mod_base = OTHER; note = 2'-fluorouridine
  modified_base 11: mod_base = OTHER; note = 2'-O-methylcytidine
  modified_base 12: mod_base = OTHER; note = 2'-fluoroadenosine
  modified_base 13: mod_base = OTHER; note = 2'-O-methyladenosine
  modified_base 14: mod_base = OTHER; note = 2'-fluorocytidine
  modified_base 15: mod_base = OTHER; note = 2'-O-methylcytidine
  modified_base 16: mod_base = OTHER; note = 2'-fluoroguanosine
  modified_base 17: mod_base = OTHER; note = 2'-O-methylcytidine
  modified_base 18: mod_base = OTHER; note = 2'-fluoroadenosine
  modified_base 19: mod_base = OTHER; note = 2'-O-methylguanosine
  modified_base 20: mod_base = OTHER; note = 2'-fluorocytidine
  modified_base 21: mod_base = OTHER; note = 2'-O-methyladenosine with phosphorothioate linkage
  modified_base 22: mod_base = OTHER; note = 2'-fluorocytidine with phosphorothioate linkage
  modified_base 23: mod_base = OTHER; note = 2'-O-methylcytidine
acattggattcaaccgcagcacc

SEQ ID NO: 1231 - RNA, 23 nt, synthetic construct
  source 1..23: mol_type = other RNA
  modified_base 1: mod_base = OTHER; note = 5'-(E)-vinylphosphonate 2'-O-methylated adenosine with phosphorothioate linkage
  modified_base 2: mod_base = OTHER; note = 2'-fluoroguanosine with phosphorothioate linkage
  modified_base 3: mod_base = OTHER; note = 2'-O-methyladenosine
  modified_base 4: mod_base = OTHER; note = 2'-fluoroadenosine
  modified_base 5: mod_base = OTHER; note = 2'-O-methyladenosine
  modified_base 6: mod_base = OTHER; note = 2'-fluorouridine
  modified_base 7: mod_base = OTHER; note = 2'-O-methylcytidine
  modified_base 8: mod_base = OTHER; note = 2'-fluorocytidine
  modified_base 9: mod_base = OTHER; note = 2'-O-methyladenosine
  modified_base 10: mod_base = OTHER; note = 2'-fluorouridine
  modified_base 11: mod_base = OTHER; note = 2'-O-methylguanosine
  modified_base 12: mod_base = OTHER; note = 2'-fluoroguanosine
  modified_base 13: mod_base = OTHER; note = 2'-O-methylcytidine
  modified_base 14: mod_base = OTHER; note = 2'-fluoroguanosine
  modified_base 15: mod_base = OTHER; note = 2'-O-methylguanosine
  modified_base 16: mod_base = OTHER; note = 2'-fluoroguanosine
  modified_base 17: mod_base = OTHER; note = 2'-O-methyladenosine
  modified_base 18: mod_base = OTHER; note = 2'-fluoroguanosine
  modified_base 19: mod_base = OTHER; note = 2'-O-methylguanosine
  modified_base 20: mod_base = OTHER; note = 2'-fluorocytidine
  modified_base 21: mod_base = OTHER; note = 2'-O-methyluridine with phosphorothioate linkage
  modified_base 22: mod_base = OTHER; note = 2'-fluorocytidine with phosphorothioate linkage
  modified_base 23: mod_base = OTHER; note = 2'-O-methylcytidine
agaaatccatggcgggaggctcc

SEQ ID NO: 1232 - RNA, 23 nt, synthetic construct
  source 1..23: mol_type = other RNA
  modified_base 1: mod_base = OTHER; note = 5'-(E)-vinylphosphonate 2'-O-methylated guanosine with phosphorothioate linkage
  modified_base 2: mod_base = OTHER; note = 2'-fluoroadenosine with phosphorothioate linkage
  modified_base 3: mod_base = OTHER; note = 2'-O-methylguanosine
  modified_base 4: mod_base = OTHER; note = 2'-fluoroadenosine
  modified_base 5: mod_base = OTHER; note = 2'-O-methyladenosine
  modified_base 6: mod_base = OTHER; note = 2'-fluoroadenosine
  modified_base 7: mod_base = OTHER; note = 2'-O-methyluridine
  modified_base 8: mod_base = OTHER; note = 2'-fluorocytidine
  modified_base 9: mod_base = OTHER; note = 2'-O-methylcytidine
  modified_base 10: mod_base = OTHER; note = 2'-fluoroadenosine
  modified_base 11: mod_base = OTHER; note = 2'-O-methyluridine
  modified_base 12: mod_base = OTHER; note = 2'-fluoroguanosine
  modified_base 13: mod_base = OTHER; note = 2'-O-methylguanosine
  modified_base 14: mod_base = OTHER; note = 2'-fluorocytidine
  modified_base 15: mod_base = OTHER; note = 2'-O-methylguanosine
  modified_base 16: mod_base = OTHER; note = 2'-fluoroguanosine
  modified_base 17: mod_base = OTHER; note = 2'-O-methylguanosine
  modified_base 18: mod_base = OTHER; note = 2'-fluoroadenosine
  modified_base 19: mod_base = OTHER; note = 2'-O-methylguanosine
  modified_base 20: mod_base = OTHER; note = 2'-fluoroguanosine
  modified_base 21: mod_base = OTHER; note = 2'-O-methylcytidine with phosphorothioate linkage
  modified_base 22: mod_base = OTHER; note = 2'-fluorouridine with phosphorothioate linkage
  modified_base 23: mod_base = OTHER; note = 2'-O-methylcytidine
gagaaatccatggcgggaggctc

SEQ ID NO: 1233 - RNA, 23 nt, synthetic construct
  source 1..23: mol_type = other RNA
  modified_base 1: mod_base = OTHER; note = 5'-(E)-vinylphosphonate 2'-O-methylated uridine with phosphorothioate linkage
  modified_base 2: mod_base = OTHER; note = 2'-fluoroadenosine with phosphorothioate linkage
  modified_base 3: mod_base = OTHER; note = 2'-O-methylguanosine
  modified_base 4: mod_base = OTHER; note = 2'-fluoroadenosine
  modified_base 5: mod_base = OTHER; note = 2'-O-methylguanosine
  modified_base 6: mod_base = OTHER; note = 2'-fluoroadenosine
  modified_base 7: mod_base = OTHER; note = 2'-O-methyladenosine
  modified_base 8: mod_base = OTHER; note = 2'-fluoroadenosine
  modified_base 9: mod_base = OTHER; note = 2'-O-methyluridine
  modified_base 10: mod_base = OTHER; note = 2'-fluorocytidine
  modified_base 11: mod_base = OTHER; note = 2'-O-methylcytidine
  modified_base 12: mod_base = OTHER; note = 2'-fluoroadenosine
  modified_base 13: mod_base = OTHER; note = 2'-O-methyluridine
  modified_base 14: mod_base = OTHER; note = 2'-fluoroguanosine
  modified_base 15: mod_base = OTHER; note = 2'-O-methylguanosine
  modified_base 16: mod_base = OTHER; note = 2'-fluorocytidine
  modified_base 17: mod_base = OTHER; note = 2'-O-methylguanosine
  modified_base 18: mod_base = OTHER; note = 2'-fluoroguanosine
  modified_base 19: mod_base = OTHER; note = 2'-O-methylguanosine
  modified_base 20: mod_base = OTHER; note = 2'-fluoroadenosine
  modified_base 21: mod_base = OTHER; note = 2'-O-methylguanosine with phosphorothioate linkage
  modified_base 22: mod_base = OTHER; note = 2'-fluoroguanosine with phosphorothioate linkage
  modified_base 23: mod_base = OTHER; note = 2'-O-methylcytidine
tagagaaatccatggcgggaggc

SEQ ID NO: 1234 - RNA, 23 nt, synthetic construct
  source 1..23: mol_type = other RNA
  modified_base 1: mod_base = OTHER; note = 5'-(E)-vinylphosphonate 2'-O-methylated adenosine with phosphorothioate linkage
  modified_base 2: mod_base = OTHER; note = 2'-fluorouridine with phosphorothioate linkage
  modified_base 3: mod_base = OTHER; note = 2'-O-methyladenosine
  modified_base 4: mod_base = OTHER; note = 2'-fluoroguanosine
  modified_base 5: mod_base = OTHER; note = 2'-O-methyladenosine
  modified_base 6: mod_base = OTHER; note = 2'-fluoroguanosine
  modified_base 7: mod_base = OTHER; note = 2'-O-methyladenosine
  modified_base 8: mod_base = OTHER; note = 2'-fluoroadenosine
  modified_base 9: mod_base = OTHER; note = 2'-O-methyladenosine
  modified_base 10: mod_base = OTHER; note = 2'-fluorouridine
  modified_base 11: mod_base = OTHER; note = 2'-O-methylcytidine
  modified_base 12: mod_base = OTHER; note = 2'-fluorocytidine
  modified_base 13: mod_base = OTHER; note = 2'-O-methyladenosine
  modified_base 14: mod_base = OTHER; note = 2'-fluorouridine
  modified_base 15: mod_base = OTHER; note = 2'-O-methylguanosine
  modified_base 16: mod_base = OTHER; note = 2'-fluoroguanosine
  modified_base 17: mod_base = OTHER; note = 2'-O-methylcytidine
  modified_base 18: mod_base = OTHER; note = 2'-fluoroguanosine
  modified_base 19: mod_base = OTHER; note = 2'-O-methylguanosine
  modified_base 20: mod_base = OTHER; note = 2'-fluoroguanosine
  modified_base 21: mod_base = OTHER; note = 2'-O-methyladenosine with phosphorothioate linkage
  modified_base 22: mod_base = OTHER; note = 2'-fluoroguanosine with phosphorothioate linkage
  modified_base 23: mod_base = OTHER; note = 2'-O-methylguanosine
atagagaaatccatggcgggagg

SEQ ID NO: 1235 - RNA, 23 nt, synthetic construct
  source 1..23: mol_type = other RNA
  modified_base 1: mod_base = OTHER; note = 5'-(E)-vinylphosphonate 2'-O-methylated adenosine with phosphorothioate linkage
  modified_base 2: mod_base = OTHER; note = 2'-fluorocytidine with phosphorothioate linkage
  modified_base 3: mod_base = OTHER; note = 2'-O-methyluridine
  modified_base 4: mod_base = OTHER; note = 2'-fluoroadenosine
  modified_base 5: mod_base = OTHER; note = 2'-O-methylguanosine
  modified_base 6: mod_base = OTHER; note = 2'-fluoroadenosine
  modified_base 7: mod_base = OTHER; note = 2'-O-methylguanosine
  modified_base 8: mod_base = OTHER; note = 2'-fluoroadenosine
  modified_base 9: mod_base = OTHER; note = 2'-O-methyladenosine
  modified_base 10: mod_base = OTHER; note = 2'-fluoroadenosine
  modified_base 11: mod_base = OTHER; note = 2'-O-methyluridine
  modified_base 12: mod_base = OTHER; note = 2'-fluorocytidine
  modified_base 13: mod_base = OTHER; note = 2'-O-methylcytidine
  modified_base 14: mod_base = OTHER; note = 2'-fluoroadenosine
  modified_base 15: mod_base = OTHER; note = 2'-O-methyluridine
  modified_base 16: mod_base = OTHER; note = 2'-fluoroguanosine
  modified_base 17: mod_base = OTHER; note = 2'-O-methylguanosine
  modified_base 18: mod_base = OTHER; note = 2'-fluorocytidine
  modified_base 19: mod_base = OTHER; note = 2'-O-methylguanosine
  modified_base 20: mod_base = OTHER; note = 2'-fluoroguanosine
  modified_base 21: mod_base = OTHER; note = 2'-O-methylguanosine with phosphorothioate linkage
  modified_base 22: mod_base = OTHER; note = 2'-fluoroadenosine with phosphorothioate linkage
  modified_base 23: mod_base = OTHER; note = 2'-O-methylguanosine
actagagaaatccatggcgggag

SEQ ID NO: 1236 - RNA, 23 nt, synthetic construct
  source 1..23: mol_type = other RNA
  modified_base 1: mod_base = OTHER; note = 5'-(E)-vinylphosphonate 2'-O-methylated adenosine with phosphorothioate linkage
  modified_base 2: mod_base = OTHER; note = 2'-fluorouridine with phosphorothioate linkage
  modified_base 3: mod_base = OTHER; note = 2'-O-methylcytidine
  modified_base 4: mod_base = OTHER; note = 2'-fluorocytidine
  modified_base 5: mod_base = OTHER; note = 2'-O-methyluridine
  modified_base 6: mod_base = OTHER; note = 2'-fluoroadenosine
  modified_base 7: mod_base = OTHER; note = 2'-O-methylguanosine
  modified_base 8: mod_base = OTHER; note = 2'-fluoroadenosine
  modified_base 9: mod_base = OTHER; note = 2'-O-methylguanosine
  modified_base 10: mod_base = OTHER; note = 2'-fluoroadenosine
  modified_base 11: mod_base = OTHER; note = 2'-O-methyladenosine
  modified_base 12: mod_base = OTHER; note = 2'-fluoroadenosine
  modified_base 13: mod_base = OTHER; note = 2'-O-methyluridine
  modified_base 14: mod_base = OTHER; note = 2'-fluorocytidine
  modified_base 15: mod_base = OTHER; note = 2'-O-methylcytidine
  modified_base 16: mod_base = OTHER; note = 2'-fluoroadenosine
  modified_base 17: mod_base = OTHER; note = 2'-O-methyluridine
  modified_base 18: mod_base = OTHER; note = 2'-fluoroguanosine
  modified_base 19: mod_base = OTHER; note = 2'-O-methylguanosine
  modified_base 20: mod_base = OTHER; note = 2'-fluorocytidine
  modified_base 21: mod_base = OTHER; note = 2'-O-methylguanosine with phosphorothioate linkage
  modified_base 22: mod_base = OTHER; note = 2'-fluoroguanosine with phosphorothioate linkage
  modified_base 23: mod_base = OTHER; note = 2'-O-methylguanosine
atcctagagaaatccatggcggg

SEQ ID NO: 1237 - RNA, 23 nt, synthetic construct
  source 1..23: mol_type = other RNA
  modified_base 1: mod_base = OTHER; note = 5'-(E)-vinylphosphonate 2'-O-methylated guanosine with phosphorothioate linkage
  modified_base 2: mod_base = OTHER; note = 2'-fluorocytidine with phosphorothioate linkage
  modified_base 3: mod_base = OTHER; note = 2'-O-methylcytidine
  modified_base 4: mod_base = OTHER; note = 2'-fluoroadenosine
  modified_base 5: mod_base = OTHER; note = 2'-O-methylguanosine
  modified_base 6: mod_base = OTHER; note = 2'-fluorocytidine
  modified_base 7: mod_base = OTHER; note = 2'-O-methyluridine
  modified_base 8: mod_base = OTHER; note = 2'-fluorocytidine
  modified_base 9: mod_base = OTHER; note = 2'-O-methyluridine
  modified_base 10: mod_base = OTHER; note = 2'-fluorocytidine
  modified_base 11: mod_base = OTHER; note = 2'-O-methyluridine
  modified_base 12: mod_base = OTHER; note = 2'-fluoroadenosine
  modified_base 13: mod_base = OTHER; note = 2'-O-methyladenosine
  modified_base 14: mod_base = OTHER; note = 2'-fluoroguanosine
  modified_base 15: mod_base = OTHER; note = 2'-O-methyluridine
  modified_base 16: mod_base = OTHER; note = 2'-fluorocytidine
  modified_base 17: mod_base = OTHER; note = 2'-O-methyluridine
  modified_base 18: mod_base = OTHER; note = 2'-fluorocytidine
  modified_base 19: mod_base = OTHER; note = 2'-O-methylcytidine
  modified_base 20: mod_base = OTHER; note = 2'-fluorouridine
  modified_base 21: mod_base = OTHER; note = 2'-O-methyladenosine with phosphorothioate linkage
  modified_base 22: mod_base = OTHER; note = 2'-fluoroguanosine with phosphorothioate linkage
  modified_base 23: mod_base = OTHER; note = 2'-O-methyladenosine
gccagctctctaagtctcctaga

SEQ ID NO: 1238 - RNA, 23 nt, synthetic construct
  source 1..23: mol_type = other RNA
  modified_base 1: mod_base = OTHER; note = 5'-(E)-vinylphosphonate 2'-O-methylated uridine with phosphorothioate linkage
  modified_base 2: mod_base = OTHER; note = 2'-fluoroguanosine with phosphorothioate linkage
  modified_base 3: mod_base = OTHER; note = 2'-O-methylcytidine
  modified_base 4: mod_base = OTHER; note = 2'-fluorocytidine
  modified_base 5: mod_base = OTHER; note = 2'-O-methyladenosine
  modified_base 6: mod_base = OTHER; note = 2'-fluoroguanosine
  modified_base 7: mod_base = OTHER; note = 2'-O-methylcytidine
  modified_base 8: mod_base = OTHER; note = 2'-fluorouridine
  modified_base 9: mod_base = OTHER; note = 2'-O-methylcytidine
  modified_base 10: mod_base = OTHER; note = 2'-fluorouridine
  modified_base 11: mod_base = OTHER; note = 2'-O-methylcytidine
  modified_base 12: mod_base = OTHER; note = 2'-fluorouridine
  modified_base 13: mod_base = OTHER; note = 2'-O-methyladenosine
  modified_base 14: mod_base = OTHER; note = 2'-fluoroadenosine
  modified_base 15: mod_base = OTHER; note = 2'-O-methylguanosine
  modified_base 16: mod_base = OTHER; note = 2'-fluorouridine
  modified_base 17: mod_base = OTHER; note = 2'-O-methylcytidine
  modified_base 18: mod_base = OTHER; note = 2'-fluorouridine
  modified_base 19: mod_base = OTHER; note = 2'-O-methylcytidine
  modified_base 20: mod_base = OTHER; note = 2'-fluorocytidine
  modified_base 21: mod_base = OTHER; note = 2'-O-methyluridine with phosphorothioate linkage
  modified_base 22: mod_base = OTHER; note = 2'-fluoroadenosine with phosphorothioate linkage
  modified_base 23: mod_base = OTHER; note = 2'-O-methylguanosine
tgccagctctctaagtctcctag

SEQ ID NO: 1239 - RNA, 23 nt, synthetic construct
  source 1..23: mol_type = other RNA
  modified_base 1: mod_base = OTHER; note = 5'-(E)-vinylphosphonate 2'-O-methylated guanosine with phosphorothioate linkage
  modified_base 2: mod_base = OTHER; note = 2'-fluorocytidine with phosphorothioate linkage
  modified_base 3: mod_base = OTHER; note = 2'-O-methylguanosine
  modified_base 4: mod_base = OTHER; note = 2'-fluoroguanosine
  modified_base 5: mod_base = OTHER; note = 2'-O-methyluridine
  modified_base 6: mod_base = OTHER; note = 2'-fluoroguanosine
  modified_base 7: mod_base = OTHER; note = 2'-O-methylguanosine
  modified_base 8: mod_base = OTHER; note = 2'-fluoroguanosine
  modified_base 9: mod_base = OTHER; note = 2'-O-methylcytidine
  modified_base 10: mod_base = OTHER; note = 2'-fluorouridine
  modified_base 11: mod_base = OTHER; note = 2'-O-methyladenosine
  modified_base 12: mod_base = OTHER; note = 2'-fluoroguanosine
  modified_base 13: mod_base = OTHER; note = 2'-O-methyladenosine
  modified_base 14: mod_base = OTHER; note = 2'-fluorocytidine
  modified_base 15: mod_base = OTHER; note = 2'-O-methylguanosine
  modified_base 16: mod_base = OTHER; note = 2'-fluorouridine
  modified_base 17: mod_base = OTHER; note = 2'-O-methylguanosine
  modified_base 18: mod_base = OTHER; note = 2'-fluorouridine
  modified_base 19: mod_base = OTHER; note = 2'-O-methyluridine
  modified_base 20: mod_base = OTHER; note = 2'-fluorocytidine
  modified_base 21: mod_base = OTHER; note = 2'-O-methylcytidine with phosphorothioate linkage
  modified_base 22: mod_base = OTHER; note = 2'-fluorocytidine with phosphorothioate linkage
  modified_base 23: mod_base = OTHER; note = 2'-O-methyluridine
gcggtgggctagacgtgttccct

SEQ ID NO: 1240 - RNA, 23 nt, synthetic construct
  source 1..23: mol_type = other RNA
  modified_base 1: mod_base = OTHER; note = 5'-(E)-vinylphosphonate 2'-O-methylated uridine with phosphorothioate linkage
  modified_base 2: mod_base = OTHER; note = 2'-fluorouridine with phosphorothioate linkage
  modified_base 3: mod_base = OTHER; note = 2'-O-methylguanosine
  modified_base 4: mod_base = OTHER; note = 2'-fluorocytidine
  modified_base 5: mod_base = OTHER; note = 2'-O-methyladenosine
  modified_base 6: mod_base = OTHER; note = 2'-fluoroguanosine
  modified_base 7: mod_base = OTHER; note = 2'-O-methyluridine
  modified_base 8: mod_base = OTHER; note = 2'-fluoroadenosine
  modified_base 9: mod_base = OTHER; note = 2'-O-methyladenosine
  modified_base 10: mod_base = OTHER; note = 2'-fluorocytidine
  modified_base 11: mod_base = OTHER; note = 2'-O-methylcytidine
  modified_base 12: mod_base = OTHER; note = 2'-fluorouridine
  modified_base 13: mod_base = OTHER; note = 2'-O-methyluridine
  modified_base 14: mod_base = OTHER; note = 2'-fluorouridine
  modified_base 15: mod_base = OTHER; note = 2'-O-methylguanosine
  modified_base 16: mod_base = OTHER; note = 2'-fluorocytidine
  modified_base 17: mod_base = OTHER; note = 2'-O-methyladenosine
  modified_base 18: mod_base = OTHER; note = 2'-fluorouridine
  modified_base 19: mod_base = OTHER; note = 2'-O-methyladenosine
  modified_base 20: mod_base = OTHER; note = 2'-fluoroguanosine
  modified_base 21: mod_base = OTHER; note = 2'-O-methylguanosine with phosphorothioate linkage
  modified_base 22: mod_base = OTHER; note = 2'-fluoroguanosine with phosphorothioate linkage
  modified_base 23: mod_base = OTHER; note = 2'-O-methylcytidine
ttgcagtaacctttgcatagggc

SEQ ID NO: 1241 - RNA, 23 nt, synthetic construct
  source 1..23: mol_type = other RNA
  modified_base 1: mod_base = OTHER; note = 5'-(E)-vinylphosphonate 2'-O-methylated guanosine with phosphorothioate linkage
  modified_base 2: mod_base = OTHER; note = 2'-fluorouridine with phosphorothioate linkage
  modified_base 3: mod_base = OTHER; note = 2'-O-methyluridine
  modified_base 4: mod_base = OTHER; note = 2'-fluoroguanosine
  modified_base 5: mod_base = OTHER; note = 2'-O-methylcytidine
  modified_base 6: mod_base = OTHER; note = 2'-fluoroadenosine
  modified_base 7: mod_base = OTHER; note = 2'-O-methylguanosine
  modified_base 8: mod_base = OTHER; note = 2'-fluorouridine
  modified_base 9: mod_base = OTHER; note = 2'-O-methyladenosine
  modified_base 10: mod_base = OTHER; note = 2'-fluoroadenosine
  modified_base 11: mod_base = OTHER; note = 2'-O-methylcytidine
  modified_base 12: mod_base = OTHER; note = 2'-fluorocytidine
  modified_base 13: mod_base = OTHER; note = 2'-O-methyluridine
  modified_base 14: mod_base = OTHER; note = 2'-fluorouridine
  modified_base 15: mod_base = OTHER; note = 2'-O-methyluridine
  modified_base 16: mod_base = OTHER; note = 2'-fluoroguanosine
  modified_base 17: mod_base = OTHER; note = 2'-O-methylcytidine
  modified_base 18: mod_base = OTHER; note = 2'-fluoroadenosine
  modified_base 19: mod_base = OTHER; note = 2'-O-methyluridine
  modified_base 20: mod_base = OTHER; note = 2'-fluoroadenosine
  modified_base 21: mod_base = OTHER; note = 2'-O-methylguanosine with phosphorothioate linkage
  modified_base 22: mod_base = OTHER; note = 2'-fluoroguanosine with phosphorothioate linkage
  modified_base 23: mod_base = OTHER; note = 2'-O-methylguanosine
gttgcagtaacctttgcataggg

SEQ ID NO: 1242 - RNA, 23 nt, synthetic construct
  source 1..23: mol_type = other RNA
  modified_base 1: mod_base = OTHER; note = 5'-(E)-vinylphosphonate 2'-O-methylated guanosine with phosphorothioate linkage
  modified_base 2: mod_base = OTHER; note = 2'-fluoroguanosine with phosphorothioate linkage
  modified_base 3: mod_base = OTHER; note = 2'-O-methyluridine
  modified_base 4: mod_base = OTHER; note = 2'-fluorouridine
  modified_base 5: mod_base = OTHER; note = 2'-O-methylguanosine
  modified_base 6: mod_base = OTHER; note = 2'-fluorocytidine
  modified_base 7: mod_base = OTHER; note = 2'-O-methyladenosine
  modified_base 8: mod_base = OTHER; note = 2'-fluoroguanosine
  modified_base 9: mod_base = OTHER; note = 2'-O-methyluridine
  modified_base 10: mod_base = OTHER; note = 2'-fluoroadenosine
  modified_base 11: mod_base = OTHER; note = 2'-O-methyladenosine
  modified_base 12: mod_base = OTHER; note = 2'-fluorocytidine
  modified_base 13: mod_base = OTHER; note = 2'-O-methylcytidine
  modified_base 14: mod_base = OTHER; note = 2'-fluorouridine
  modified_base 15: mod_base = OTHER; note = 2'-O-methyluridine
  modified_base 16: mod_base = OTHER; note = 2'-fluorouridine
  modified_base 17: mod_base = OTHER; note = 2'-O-methylguanosine
  modified_base 18: mod_base = OTHER; note = 2'-fluorocytidine
  modified_base 19: mod_base = OTHER; note = 2'-O-methyladenosine
  modified_base 20: mod_base = OTHER; note = 2'-fluorouridine
  modified_base 21: mod_base = OTHER; note = 2'-O-methyladenosine with phosphorothioate linkage
  modified_base 22: mod_base = OTHER; note = 2'-fluoroguanosine with phosphorothioate linkage
  modified_base 23: mod_base = OTHER; note = 2'-O-methylguanosine
ggttgcagtaacctttgcatagg

SEQ ID NO: 1243 - RNA, 23 nt, synthetic construct
  source 1..23: mol_type = other RNA
  modified_base 1: mod_base = OTHER; note = 5'-(E)-vinylphosphonate 2'-O-methylated adenosine with phosphorothioate linkage
  modified_base 2: mod_base = OTHER; note = 2'-fluorouridine with phosphorothioate linkage
  modified_base 3: mod_base = OTHER; note = 2'-O-methylguanosine
  modified_base 4: mod_base = OTHER; note = 2'-fluoroguanosine
  modified_base 5: mod_base = OTHER; note = 2'-O-methyluridine
  modified_base 6: mod_base = OTHER; note = 2'-fluorouridine
  modified_base 7: mod_base = OTHER; note = 2'-O-methylguanosine
  modified_base 8: mod_base = OTHER; note = 2'-fluorocytidine
  modified_base 9: mod_base = OTHER; note = 2'-O-methyladenosine
  modified_base 10: mod_base = OTHER; note = 2'-fluoroguanosine
  modified_base 11: mod_base = OTHER; note = 2'-O-methyluridine
  modified_base 12: mod_base = OTHER; note = 2'-fluoroadenosine
  modified_base 13: mod_base = OTHER; note = 2'-O-methyladenosine
  modified_base 14: mod_base = OTHER; note = 2'-fluorocytidine
  modified_base 15: mod_base = OTHER; note = 2'-O-methylcytidine
  modified_base 16: mod_base = OTHER; note = 2'-fluorouridine
  modified_base 17: mod_base = OTHER; note = 2'-O-methyluridine
  modified_base 18: mod_base = OTHER; note = 2'-fluorouridine
  modified_base 19: mod_base = OTHER; note = 2'-O-methylguanosine
  modified_base 20: mod_base = OTHER; note = 2'-fluorocytidine
  modified_base 21: mod_base = OTHER; note = 2'-O-methyladenosine with phosphorothioate linkage
  modified_base 22: mod_base = OTHER; note = 2'-fluorouridine with phosphorothioate linkage
  modified_base 23: mod_base = OTHER; note = 2'-O-methyladenosine
atggttgcagtaacctttgcata

SEQ ID NO: 1244 - RNA, 23 nt, synthetic construct
  source 1..23: mol_type = other RNA
  modified_base 1: mod_base = OTHER; note = 5'-(E)-vinylphosphonate 2'-O-methylated adenosine with phosphorothioate linkage
  modified_base 2: mod_base = OTHER; note = 2'-fluoroadenosine with phosphorothioate linkage
  modified_base 3: mod_base = OTHER; note = 2'-O-methyluridine
  modified_base 4: mod_base = OTHER; note = 2'-fluoroguanosine
  modified_base 5: mod_base = OTHER; note = 2'-O-methylguanosine
  modified_base 6: mod_base = OTHER; note = 2'-fluorouridine
  modified_base 7: mod_base = OTHER; note = 2'-O-methyluridine
  modified_base 8: mod_base = OTHER; note = 2'-fluoroguanosine
  modified_base 9: mod_base = OTHER; note = 2'-O-methylcytidine
  modified_base 10: mod_base = OTHER; note = 2'-fluoroadenosine
  modified_base 11: mod_base = OTHER; note = 2'-O-methylguanosine
  modified_base 12: mod_base = OTHER; note = 2'-fluorouridine
  modified_base 13: mod_base = OTHER; note = 2'-O-methyladenosine
  modified_base 14: mod_base = OTHER; note = 2'-fluoroadenosine
  modified_base 15: mod_base = OTHER; note = 2'-O-methylcytidine
  modified_base 16: mod_base = OTHER; note = 2'-fluorocytidine
  modified_base 17: mod_base = OTHER; note = 2'-O-methyluridine
  modified_base 18: mod_base = OTHER; note = 2'-fluorouridine
  modified_base 19: mod_base = OTHER; note = 2'-O-methyluridine
  modified_base 20: mod_base = OTHER; note = 2'-fluoroguanosine
  modified_base 21: mod_base = OTHER; note = 2'-O-methylcytidine with phosphorothioate linkage
  modified_base 22: mod_base = OTHER; note = 2'-fluoroadenosine with phosphorothioate linkage
  modified_base 23: mod_base = OTHER; note = 2'-O-methyluridine
aatggttgcagtaacctttgcat

SEQ ID NO: 1245 - RNA, 23 nt, synthetic construct
  source 1..23: mol_type = other RNA
  modified_base 1: mod_base = OTHER; note = 5'-(E)-vinylphosphonate 2'-O-methylated guanosine with phosphorothioate linkage
  modified_base 2: mod_base = OTHER; note = 2'-fluoroadenosine with phosphorothioate linkage
  modified_base 3: mod_base = OTHER; note = 2'-O-methyladenosine
  modified_base 4: mod_base = OTHER; note = 2'-fluorouridine
  modified_base 5: mod_base = OTHER; note = 2'-O-methylguanosine
  modified_base 6: mod_base = OTHER; note = 2'-fluoroguanosine
  modified_base 7: mod_base = OTHER; note = 2'-O-methyluridine
  modified_base 8: mod_base = OTHER; note = 2'-fluorouridine
  modified_base 9: mod_base = OTHER; note = 2'-O-methylguanosine
  modified_base 10: mod_base = OTHER; note = 2'-fluorocytidine
  modified_base 11: mod_base = OTHER; note = 2'-O-methyladenosine
  modified_base 12: mod_base = OTHER; note = 2'-fluoroguanosine
  modified_base 13: mod_base = OTHER; note = 2'-O-methyluridine
  modified_base 14: mod_base = OTHER; note = 2'-fluoroadenosine
  modified_base 15: mod_base = OTHER; note = 2'-O-methyladenosine
  modified_base 16: mod_base = OTHER; note = 2'-fluorocytidine
  modified_base 17: mod_base = OTHER; note = 2'-O-methylcytidine
  modified_base 18: mod_base = OTHER; note = 2'-fluorouridine
  modified_base 19: mod_base = OTHER; note = 2'-O-methyluridine
  modified_base 20: mod_base = OTHER; note = 2'-fluorouridine
  modified_base 21: mod_base = OTHER; note = 2'-O-methylguanosine with phosphorothioate linkage
  modified_base 22: mod_base = OTHER; note = 2'-fluorocytidine with phosphorothioate linkage
  modified_base 23: mod_base = OTHER; note = 2'-O-methyladenosine
gaatggttgcagtaacctttgca

SEQ ID NO: 1246 - RNA, 23 nt, synthetic construct
  source 1..23: mol_type = other RNA
  modified_base 1: mod_base = OTHER; note = 5'-(E)-vinylphosphonate 2'-O-methylated guanosine with phosphorothioate linkage
  modified_base 2: mod_base = OTHER; note = 2'-fluoroguanosine with phosphorothioate linkage
  modified_base 3: mod_base = OTHER; note = 2'-O-methyladenosine
  modified_base 4: mod_base = OTHER; note = 2'-fluoroadenosine
  modified_base 5: mod_base = OTHER; note = 2'-O-methyluridine
  modified_base 6: mod_base = OTHER; note = 2'-fluoroguanosine
  modified_base 7: mod_base = OTHER; note = 2'-O-methylguanosine
  modified_base 8: mod_base = OTHER; note = 2'-fluorouridine
  modified_base 9: mod_base = OTHER; note = 2'-O-methyluridine
  modified_base 10: mod_base = OTHER; note = 2'-fluoroguanosine
  modified_base 11: mod_base = OTHER; note = 2'-O-methylcytidine
  modified_base 12: mod_base = OTHER; note = 2'-fluoroadenosine
  modified_base 13: mod_base = OTHER; note = 2'-O-methylguanosine
  modified_base 14: mod_base = OTHER; note = 2'-fluorouridine
  modified_base 15: mod_base = OTHER; note = 2'-O-methyladenosine
  modified_base 16: mod_base = OTHER; note = 2'-fluoroadenosine
  modified_base 17: mod_base = OTHER; note = 2'-O-methylcytidine
  modified_base 18: mod_base = OTHER; note = 2'-fluorocytidine
  modified_base 19: mod_base = OTHER; note = 2'-O-methyluridine
  modified_base 20: mod_base = OTHER; note = 2'-fluorouridine
  modified_base 21: mod_base = OTHER; note = 2'-O-methyluridine with phosphorothioate linkage
  modified_base 22: mod_base = OTHER; note = 2'-fluoroguanosine with phosphorothioate linkage
  modified_base 23: mod_base = OTHER; note = 2'-O-methylcytidine
ggaatggttgcagtaacctttgc

SEQ ID NO: 1247 - RNA, 23 nt, synthetic construct
  source 1..23: mol_type = other RNA
  modified_base 1: mod_base = OTHER; note = 5'-(E)-vinylphosphonate 2'-O-methylated uridine with phosphorothioate linkage
  modified_base 2: mod_base = OTHER; note = 2'-fluoroguanosine with phosphorothioate linkage
  modified_base 3: mod_base = OTHER; note = 2'-O-methylguanosine
  modified_base 4: mod_base = OTHER; note = 2'-fluoroadenosine
  modified_base 5: mod_base = OTHER; note = 2'-O-methyladenosine
  modified_base 6: mod_base = OTHER; note = 2'-fluorouridine
  modified_base 7: mod_base = OTHER; note = 2'-O-methylguanosine
  modified_base 8: mod_base = OTHER; note = 2'-fluoroguanosine
  modified_base 9: mod_base = OTHER; note = 2'-O-methyluridine
  modified_base 10: mod_base = OTHER; note = 2'-fluorouridine
  modified_base 11: mod_base = OTHER; note = 2'-O-methylguanosine
  modified_base 12: mod_base = OTHER; note = 2'-fluorocytidine
  modified_base 13: mod_base = OTHER; note = 2'-O-methyladenosine
  modified_base 14: mod_base = OTHER; note = 2'-fluoroguanosine
  modified_base 15: mod_base = OTHER; note = 2'-O-methyluridine
  modified_base 16: mod_base = OTHER; note = 2'-fluoroadenosine
  modified_base 17: mod_base = OTHER; note = 2'-O-methyladenosine
  modified_base 18: mod_base = OTHER; note = 2'-fluorocytidine
  modified_base 19: mod_base = OTHER; note = 2'-O-methylcytidine
  modified_base 20: mod_base = OTHER; note = 2'-fluorouridine
  modified_base 21: mod_base = OTHER; note = 2'-O-methyluridine with phosphorothioate linkage
  modified_base 22: mod_base = OTHER; note = 2'-fluorouridine with phosphorothioate linkage
  modified_base 23: mod_base = OTHER; note = 2'-O-methylguanosine
tggaatggttgcagtaacctttg

SEQ ID NO: 1248 - RNA, 23 nt, synthetic construct
  source 1..23: mol_type = other RNA
  modified_base 1: mod_base = OTHER; note = 5'-(E)-vinylphosphonate 2'-O-methylated adenosine with phosphorothioate linkage
  modified_base 2: mod_base = OTHER; note = 2'-fluorouridine with phosphorothioate linkage
  modified_base 3: mod_base = OTHER; note = 2'-O-methylguanosine
  modified_base 4: mod_base = OTHER; note = 2'-fluoroguanosine
  modified_base 5: mod_base = OTHER; note = 2'-O-methyladenosine
  modified_base 6: mod_base = OTHER; note = 2'-fluoroadenosine
  modified_base 7: mod_base = OTHER; note = 2'-O-methyluridine
  modified_base 8: mod_base = OTHER; note = 2'-fluoroguanosine
  modified_base 9: mod_base = OTHER; note = 2'-O-methylguanosine
  modified_base 10: mod_base = OTHER; note = 2'-fluorouridine
  modified_base 11: mod_base = OTHER; note = 2'-O-methyluridine
  modified_base 12: mod_base = OTHER; note = 2'-fluoroguanosine
  modified_base 13: mod_base = OTHER; note = 2'-O-methylcytidine
  modified_base 14: mod_base = OTHER; note = 2'-fluoroadenosine
  modified_base 15: mod_base = OTHER; note = 2'-O-methylguanosine
  modified_base 16: mod_base = OTHER; note = 2'-fluorouridine
  modified_base 17: mod_base = OTHER; note = 2'-O-methyladenosine
  modified_base 18: mod_base = OTHER; note = 2'-fluoroadenosine
  modified_base 19: mod_base = OTHER; note = 2'-O-methylcytidine
  modified_base 20: mod_base = OTHER; note = 2'-fluorocytidine
  modified_base 21: mod_base = OTHER; note = 2'-O-methyluridine with phosphorothioate linkage
  modified_base 22: mod_base = OTHER; note = 2'-fluorouridine with phosphorothioate linkage
  modified_base 23: mod_base = OTHER; note = 2'-O-methyluridine
atggaatggttgcagtaaccttt

SEQ ID NO: 1249 - RNA, 23 nt, synthetic construct
  source 1..23: mol_type = other RNA
  modified_base 1: mod_base = OTHER; note = 5'-(E)-vinylphosphonate 2'-O-methylated guanosine with phosphorothioate linkage
  modified_base 2: mod_base = OTHER; note = 2'-fluorocytidine with phosphorothioate linkage
  modified_base 3: mod_base = OTHER; note = 2'-O-methyluridine
  modified_base 4: mod_base = OTHER; note = 2'-fluoroguanosine
  modified_base 5: mod_base = OTHER; note = 2'-O-methylguanosine
  modified_base 6: mod_base = OTHER; note = 2'-fluoroadenosine
  modified_base 7: mod_base = OTHER; note = 2'-O-methyladenosine
  modified_base 8: mod_base = OTHER; note = 2'-fluorouridine
  modified_base 9: mod_base = OTHER; note = 2'-O-methylguanosine
  modified_base 10: mod_base = OTHER; note = 2'-fluoroguanosine
  modified_base 11: mod_base = OTHER; note = 2'-O-methyluridine
  modified_base 12: mod_base = OTHER; note = 2'-fluorouridine
  modified_base 13: mod_base = OTHER; note = 2'-O-methylguanosine
  modified_base 14: mod_base = OTHER; note = 2'-fluorocytidine
  modified_base 15: mod_base = OTHER; note = 2'-O-methyladenosine
  modified_base 16: mod_base = OTHER; note = 2'-fluoroguanosine
  modified_base 17: mod_base = OTHER; note = 2'-O-methyluridine
  modified_base 18: mod_base = OTHER; note = 2'-fluoroadenosine
  modified_base 19: mod_base = OTHER; note = 2'-O-methyladenosine
  modified_base 20: mod_base = OTHER; note = 2'-fluorocytidine
  modified_base 21: mod_base = OTHER; note = 2'-O-methylcytidine with phosphorothioate linkage
  modified_base 22: mod_base = OTHER; note = 2'-fluorouridine with phosphorothioate linkage
  modified_base 23: mod_base = OTHER; note = 2'-O-methyluridine
gctggaatggttgcagtaacctt

SEQ ID NO: 1250 - RNA, 23 nt, synthetic construct
  source 1..23: mol_type = other RNA
  modified_base 1: mod_base = OTHER; note = 5'-(E)-vinylphosphonate 2'-O-methylated adenosine with phosphorothioate linkage
  modified_base 2: mod_base = OTHER; note = 2'-fluorouridine with phosphorothioate linkage
  modified_base 3: mod_base = OTHER; note = 2'-O-methylguanosine
  modified_base 4: mod_base = OTHER; note = 2'-fluoroguanosine
  modified_base 5: mod_base = OTHER; note = 2'-O-methylcytidine
  modified_base 6: mod_base = OTHER; note = 2'-fluorouridine
  modified_base 7: mod_base = OTHER; note = 2'-O-methylguanosine
  modified_base 8: mod_base = OTHER; note = 2'-fluoroguanosine
  modified_base 9: mod_base = OTHER; note = 2'-O-methyladenosine
  modified_base 10: mod_base = OTHER; note = 2'-fluoroadenosine
  modified_base 11: mod_base = OTHER; note = 2'-O-methyluridine
  modified_base 12: mod_base = OTHER; note = 2'-fluoroguanosine
  modified_base 13: mod_base = OTHER; note = 2'-O-methylguanosine
  modified_base 14: mod_base = OTHER; note = 2'-fluorouridine
  modified_base 15: mod_base = OTHER; note = 2'-O-methyluridine
  modified_base 16: mod_base = OTHER; note = 2'-fluoroguanosine
  modified_base 17: mod_base = OTHER; note = 2'-O-methylcytidine
  modified_base 18: mod_base = OTHER; note = 2'-fluoroadenosine
  modified_base 19: mod_base = OTHER; note = 2'-O-methylguanosine
  modified_base 20: mod_base = OTHER; note = 2'-fluorouridine
  modified_base 21: mod_base = OTHER; note = 2'-O-methyladenosine with phosphorothioate linkage
  modified_base 22: mod_base = OTHER; note = 2'-fluoroadenosine with phosphorothioate linkage
  modified_base 23: mod_base = OTHER; note = 2'-O-methylcytidine
atggctggaatggttgcagtaac

SEQ ID NO: 1251 - RNA, 23 nt, synthetic construct
  source 1..23: mol_type = other RNA
  modified_base 1: mod_base = OTHER; note = 5'-(E)-vinylphosphonate 2'-O-methylated adenosine with phosphorothioate linkage
  modified_base 2: mod_base = OTHER; note = 2'-fluoroguanosine with phosphorothioate linkage
  modified_base 3: mod_base = OTHER; note = 2'-O-methylcytidine
  modified_base 4: mod_base = OTHER; note = 2'-fluoroadenosine
  modified_base 5: mod_base = OTHER; note = 2'-O-methyluridine
  modified_base 6: mod_base = OTHER; note = 2'-fluoroguanosine
  modified_base 7: mod_base = OTHER; note = 2'-O-methyladenosine
  modified_base 8: mod_base = OTHER; note = 2'-fluorocytidine
  modified_base 9: mod_base = OTHER; note = 2'-O-methyluridine
  modified_base 10: mod_base = OTHER; note = 2'-fluorouridine
  modified_base 11: mod_base = OTHER; note = 2'-O-methylguanosine
  modified_base 12: mod_base = OTHER; note = 2'-fluoroguanosine
  modified_base 13: mod_base = OTHER; note = 2'-O-methyladenosine
  modified_base 14: mod_base = OTHER; note = 2'-fluorocytidine
  modified_base 15: mod_base = OTHER; note = 2'-O-methyluridine
  modified_base 16: mod_base = OTHER; note = 2'-fluorouridine
  modified_base 17: mod_base = OTHER; note = 2'-O-methylguanosine
  modified_base 18: mod_base = OTHER; note = 2'-fluoroadenosine
  modified_base 19: mod_base = OTHER; note = 2'-O-methylcytidine
  modified_base 20: mod_base = OTHER; note = 2'-fluorocytidine
  modified_base 21: mod_base = OTHER; note = 2'-O-methylguanosine with phosphorothioate linkage
  modified_base 22: mod_base = OTHER; note = 2'-fluoroguanosine with phosphorothioate linkage
  modified_base 23: mod_base = OTHER; note = 2'-O-methylguanosine
agcatgacttggacttgaccggg

SEQ ID NO: 1252 - RNA, 23 nt, synthetic construct
  source 1..23: mol_type = other RNA
  modified_base 1: mod_base = OTHER; note = 5'-(E)-vinylphosphonate 2'-O-methylated uridine with phosphorothioate linkage
  modified_base 2: mod_base = OTHER; note = 2'-fluorocytidine with phosphorothioate linkage
  modified_base 3: mod_base = OTHER; note = 2'-O-methylguanosine
  modified_base 4: mod_base = OTHER; note = 2'-fluorocytidine
  modified_base 5: mod_base = OTHER; note = 2'-O-methyladenosine
  modified_base 6: mod_base = OTHER; note = 2'-fluorouridine
  modified_base 7: mod_base = OTHER; note = 2'-O-methylguanosine
  modified_base 8: mod_base = OTHER; note = 2'-fluoroadenosine
  modified_base 9: mod_base = OTHER; note = 2'-O-methylcytidine
  modified_base 10: mod_base = OTHER; note = 2'-fluorouridine
  modified_base 11: mod_base = OTHER; note = 2'-O-methyluridine
  modified_base 12: mod_base = OTHER; note = 2'-fluoroguanosine
  modified_base 13: mod_base = OTHER; note = 2'-O-methylguanosine
  modified_base 14: mod_base = OTHER; note = 2'-fluoroadenosine
  modified_base 15: mod_base = OTHER; note = 2'-O-methylcytidine
  modified_base 16: mod_base = OTHER; note = 2'-fluorouridine
  modified_base 17: mod_base = OTHER; note = 2'-O-methyluridine
  modified_base 18: mod_base = OTHER; note = 2'-fluoroguanosine
  modified_base 19: mod_base = OTHER; note = 2'-O-methyladenosine
  modified_base 20: mod_base = OTHER; note = 2'-fluorocytidine
  modified_base 21: mod_base = OTHER; note = 2'-O-methylcytidine with phosphorothioate linkage
  modified_base 22: mod_base = OTHER; note = 2'-fluoroguanosine with phosphorothioate linkage
  modified_base 23: mod_base = OTHER; note = 2'-O-methylguanosine
tcgcatgacttggacttgaccgg

SEQ ID NO: 1253 - RNA, 23 nt, synthetic construct
  source 1..23: mol_type = other RNA
  modified_base 1: mod_base = OTHER; note = 5'-(E)-vinylphosphonate 2'-O-methylated adenosine with phosphorothioate linkage
  modified_base 2: mod_base = OTHER; note = 2'-fluorouridine with phosphorothioate linkage
  modified_base 3: mod_base = OTHER; note = 2'-O-methylcytidine
  modified_base 4: mod_base = OTHER; note = 2'-fluoroguanosine
  modified_base 5: mod_base = OTHER; note = 2'-O-methylcytidine
  modified_base 6: mod_base = OTHER; note = 2'-fluoroadenosine
  modified_base 7: mod_base = OTHER; note = 2'-O-methyluridine
  modified_base 8: mod_base = OTHER; note = 2'-fluoroguanosine
  modified_base 9: mod_base = OTHER; note = 2'-O-methyladenosine
  modified_base 10: mod_base = OTHER; note = 2'-fluorocytidine
  modified_base 11: mod_base = OTHER; note = 2'-O-methyluridine
  modified_base 12: mod_base = OTHER; note = 2'-fluorouridine
  modified_base 13: mod_base = OTHER; note = 2'-O-methylguanosine
  modified_base 14: mod_base = OTHER; note = 2'-fluoroguanosine
  modified_base 15: mod_base = OTHER; note = 2'-O-methyladenosine
  modified_base 16: mod_base = OTHER; note = 2'-fluorocytidine
  modified_base 17: mod_base = OTHER; note = 2'-O-methyluridine
  modified_base 18: mod_base = OTHER; note = 2'-fluorouridine
  modified_base 19: mod_base = OTHER; note = 2'-O-methylguanosine
  modified_base 20: mod_base = OTHER; note = 2'-fluoroadenosine
  modified_base 21: mod_base = OTHER; note = 2'-O-methylcytidine with phosphorothioate linkage
  modified_base 22: mod_base = OTHER; note = 2'-fluorocytidine with phosphorothioate linkage
  modified_base 23: mod_base = OTHER; note = 2'-O-methylguanosine
atcgcatgacttggacttgaccg

SEQ ID NO: 1254 - RNA, 23 nt, synthetic construct
  source 1..23: mol_type = other RNA
  modified_base 1: mod_base = OTHER; note = 5'-(E)-vinylphosphonate 2'-O-methylated adenosine with phosphorothioate linkage
  modified_base 2: mod_base = OTHER; note = 2'-fluorocytidine with phosphorothioate linkage
  modified_base 3: mod_base = OTHER; note = 2'-O-methyluridine
  modified_base 4: mod_base = OTHER; note = 2'-fluorocytidine
  modified_base 5: mod_base = OTHER; note = 2'-O-methylguanosine
  modified_base 6: mod_base = OTHER; note = 2'-fluorocytidine
  modified_base 7: mod_base = OTHER; note = 2'-O-methyladenosine
  modified_base 8: mod_base = OTHER; note = 2'-fluorouridine
  modified_base 9: mod_base = OTHER; note = 2'-O-methylguanosine
  modified_base 10: mod_base = OTHER; note = 2'-fluoroadenosine
  modified_base 11: mod_base = OTHER; note = 2'-O-methylcytidine
  modified_base 12: mod_base = OTHER; note = 2'-fluorouridine
  modified_base 13: mod_base = OTHER; note = 2'-O-methyluridine
  modified_base 14: mod_base = OTHER; note = 2'-fluoroguanosine
  modified_base 15: mod_base = OTHER; note = 2'-O-methylguanosine
  modified_base 16: mod_base = OTHER; note = 2'-fluoroadenosine
  modified_base 17: mod_base = OTHER; note = 2'-O-methylcytidine
  modified_base 18: mod_base = OTHER; note = 2'-fluorouridine
  modified_base 19: mod_base = OTHER; note = 2'-O-methyluridine
  modified_base 20: mod_base = OTHER; note = 2'-fluoroguanosine
  modified_base 21: mod_base = OTHER; note = 2'-O-methyladenosine with phosphorothioate linkage
  modified_base 22: mod_base = OTHER; note = 2'-fluorocytidine with phosphorothioate linkage
  modified_base 23: mod_base = OTHER; note = 2'-O-methylcytidine
actcgcatgacttggacttgacc

SEQ ID NO: 1255 - RNA, 23 nt, synthetic construct
  source 1..23: mol_type = other RNA
  modified_base 1: mod_base = OTHER; note = 5'-(E)-vinylphosphonate 2'-O-methylated adenosine with phosphorothioate linkage
  modified_base 2: mod_base = OTHER; note = 2'-fluoroadenosine with phosphorothioate linkage
  modified_base 3: mod_base = OTHER; note = 2'-O-methylcytidine
  modified_base 4: mod_base = OTHER; note = 2'-fluorouridine
  modified_base 5: mod_base = OTHER; note = 2'-O-methylcytidine
  modified_base 6: mod_base = OTHER; note = 2'-fluoroguanosine
  modified_base 7: mod_base = OTHER; note = 2'-O-methylcytidine
  modified_base 8: mod_base = OTHER; note = 2'-fluoroadenosine
  modified_base 9: mod_base = OTHER; note = 2'-O-methyluridine
  modified_base 10: mod_base = OTHER; note = 2'-fluoroguanosine
  modified_base 11: mod_base = OTHER; note = 2'-O-methyladenosine
  modified_base 12: mod_base = OTHER; note = 2'-fluorocytidine
  modified_base 13: mod_base = OTHER; note = 2'-O-methyluridine
  modified_base 14: mod_base = OTHER; note = 2'-fluorouridine
  modified_base 15: mod_base = OTHER; note = 2'-O-methylguanosine
  modified_base 16: mod_base = OTHER; note = 2'-fluoroguanosine
  modified_base 17: mod_base = OTHER; note = 2'-O-methyladenosine
  modified_base 18: mod_base = OTHER; note = 2'-fluorocytidine
  modified_base 19: mod_base = OTHER; note = 2'-O-methyluridine
  modified_base 20: mod_base = OTHER; note = 2'-fluorouridine
  modified_base 21: mod_base = OTHER; note = 2'-O-methylguanosine with phosphorothioate linkage
  modified_base 22: mod_base = OTHER; note = 2'-fluoroadenosine with phosphorothioate linkage
  modified_base 23: mod_base = OTHER; note = 2'-O-methylcytidine
aactcgcatgacttggacttgac

SEQ ID NO: 1256 - RNA, 23 nt, synthetic construct
  source 1..23: mol_type = other RNA
  modified_base 1: mod_base = OTHER; note = 5'-(E)-vinylphosphonate 2'-O-methylated guanosine with phosphorothioate linkage
  modified_base 2: mod_base = OTHER; note = 2'-fluoroadenosine with phosphorothioate linkage
  modified_base 3: mod_base = OTHER; note = 2'-O-methyladenosine
  modified_base 4: mod_base = OTHER; note = 2'-fluorocytidine
  modified_base 5: mod_base = OTHER; note = 2'-O-methyluridine
  modified_base 6: mod_base = OTHER; note = 2'-fluorocytidine
  modified_base 7: mod_base = OTHER; note = 2'-O-methylguanosine
  modified_base 8: mod_base = OTHER; note = 2'-fluorocytidine
  modified_base 9: mod_base = OTHER; note = 2'-O-methyladenosine
  modified_base 10: mod_base = OTHER; note = 2'-fluorouridine
  modified_base 11: mod_base = OTHER; note = 2'-O-methylguanosine
  modified_base 12: mod_base = OTHER; note = 2'-fluoroadenosine
  modified_base 13: mod_base = OTHER; note = 2'-O-methylcytidine
  modified_base 14: mod_base = OTHER; note = 2'-fluorouridine
  modified_base 15: mod_base = OTHER; note = 2'-O-methyluridine
  modified_base 16: mod_base = OTHER; note = 2'-fluoroguanosine
  modified_base 17: mod_base = OTHER; note = 2'-O-methylguanosine
  modified_base 18: mod_base = OTHER; note = 2'-fluoroadenosine
  modified_base 19: mod_base = OTHER; note = 2'-O-methylcytidine
  modified_base 20: mod_base = OTHER; note = 2'-fluorouridine
  modified_base 21: mod_base = OTHER; note = 2'-O-methyluridine with phosphorothioate linkage
  modified_base 22: mod_base = OTHER; note = 2'-fluoroguanosine with phosphorothioate linkage
  modified_base 23: mod_base = OTHER; note = 2'-O-methyladenosine
gaactcgcatgacttggacttga

SEQ ID NO: 1257 - RNA, 23 nt, synthetic construct
  source 1..23: mol_type = other RNA
  modified_base 1: mod_base = OTHER; note = 5'-(E)-vinylphosphonate 2'-O-methylated adenosine with phosphorothioate linkage
  modified_base 2: mod_base = OTHER; note = 2'-fluoroguanosine with phosphorothioate linkage
  modified_base 3: mod_base = OTHER; note = 2'-O-methyladenosine
  modified_base 4: mod_base = OTHER; note = 2'-fluoroadenosine
  modified_base 5: mod_base = OTHER; note = 2'-O-methylcytidine
  modified_base 6: mod_base = OTHER; note = 2'-fluorouridine
  modified_base 7: mod_base = OTHER; note = 2'-O-methylcytidine
  modified_base 8: mod_base = OTHER; note = 2'-fluoroguanosine
  modified_base 9: mod_base = OTHER; note = 2'-O-methylcytidine
  modified_base 10: mod_base = OTHER; note = 2'-fluoroadenosine
  modified_base 11: mod_base = OTHER; note = 2'-O-methyluridine
  modified_base 12: mod_base = OTHER; note = 2'-fluoroguanosine
  modified_base 13: mod_base = OTHER; note = 2'-O-methyladenosine
  modified_base 14: mod_base = OTHER; note = 2'-fluorocytidine
  modified_base 15: mod_base = OTHER; note = 2'-O-methyluridine
  modified_base 16: mod_base = OTHER; note = 2'-fluorouridine
  modified_base 17: mod_base = OTHER; note = 2'-O-methylguanosine
  modified_base 18: mod_base = OTHER; note = 2'-fluoroguanosine
  modified_base 19: mod_base = OTHER; note = 2'-O-methyladenosine
  modified_base 20: mod_base = OTHER; note = 2'-fluorocytidine
  modified_base 21: mod_base = OTHER; note = 2'-O-methyluridine with phosphorothioate linkage
  modified_base 22: mod_base = OTHER; note = 2'-fluorouridine with phosphorothioate linkage
  modified_base 23: mod_base = OTHER; note = 2'-O-methylguanosine
agaactcgcatgacttggacttg

SEQ ID NO: 1258 - RNA, 23 nt, synthetic construct
  source 1..23: mol_type = other RNA
  modified_base 1: mod_base = OTHER; note = 5'-(E)-vinylphosphonate 2'-O-methylated adenosine with phosphorothioate linkage
  modified_base 2: mod_base = OTHER; note = 2'-fluoroadenosine with phosphorothioate linkage
  modified_base 3: mod_base = OTHER; note = 2'-O-methylguanosine
  modified_base 4: mod_base = OTHER; note = 2'-fluoroadenosine
  modified_base 5: mod_base = OTHER; note = 2'-O-methyladenosine
  modified_base 6: mod_base = OTHER; note = 2'-fluorocytidine
  modified_base 7: mod_base = OTHER; note = 2'-O-methyluridine
  modified_base 8: mod_base = OTHER; note = 2'-fluorocytidine
  modified_base 9: mod_base = OTHER; note = 2'-O-methylguanosine
  modified_base 10: mod_base = OTHER; note = 2'-fluorocytidine
  modified_base 11: mod_base = OTHER; note = 2'-O-methyladenosine
  modified_base 12: mod_base = OTHER; note = 2'-fluorouridine
  modified_base 13: mod_base = OTHER; note = 2'-O-methylguanosine
  modified_base 14: mod_base = OTHER; note = 2'-fluoroadenosine
  modified_base 15: mod_base = OTHER; note = 2'-O-methylcytidine
  modified_base 16: mod_base = OTHER; note = 2'-fluorouridine
  modified_base 17: mod_base = OTHER; note = 2'-O-methyluridine
  modified_base 18: mod_base = OTHER; note = 2'-fluoroguanosine
  modified_base 19: mod_base = OTHER; note = 2'-O-methylguanosine
  modified_base 20: mod_base = OTHER; note = 2'-fluoroadenosine
  modified_base 21: mod_base = OTHER; note = 2'-O-methylcytidine with phosphorothioate linkage
  modified_base 22: mod_base = OTHER; note = 2'-fluorouridine with phosphorothioate linkage
  modified_base 23: mod_base = OTHER; note = 2'-O-methyluridine
aagaactcgcatgacttggactt

SEQ ID NO: 1259 - RNA, 23 nt, synthetic construct
  source 1..23: mol_type = other RNA
  modified_base 1: mod_base = OTHER; note = 5'-(E)-vinylphosphonate 2'-O-methylated guanosine with phosphorothioate linkage
  modified_base 2: mod_base = OTHER; note = 2'-fluorocytidine with phosphorothioate linkage
  modified_base 3: mod_base = OTHER; note = 2'-O-methyladenosine
  modified_base 4: mod_base = OTHER; note = 2'-fluoroguanosine
  modified_base 5: mod_base = OTHER; note = 2'-O-methyladenosine
  modified_base 6: mod_base = OTHER; note = 2'-fluoroadenosine
  modified_base 7: mod_base = OTHER; note = 2'-O-methylcytidine
  modified_base 8: mod_base = OTHER; note = 2'-fluorouridine
  modified_base 9: mod_base = OTHER; note = 2'-O-methylcytidine
  modified_base 10: mod_base = OTHER; note = 2'-fluoroguanosine
  modified_base 11: mod_base = OTHER; note = 2'-O-methylcytidine
  modified_base 12: mod_base = OTHER; note = 2'-fluoroadenosine
  modified_base 13: mod_base = OTHER; note = 2'-O-methyluridine
  modified_base 14: mod_base = OTHER; note = 2'-fluoroguanosine
  modified_base 15: mod_base = OTHER; note = 2'-O-methyladenosine
  modified_base 16: mod_base = OTHER; note = 2'-fluorocytidine
  modified_base 17: mod_base = OTHER; note = 2'-O-methyluridine
  modified_base 18: mod_base = OTHER; note = 2'-fluorouridine
  modified_base 19: mod_base = OTHER; note = 2'-O-methylguanosine
  modified_base 20: mod_base = OTHER; note = 2'-fluoroguanosine
  modified_base 21: mod_base = OTHER; note = 2'-O-methyladenosine with phosphorothioate linkage
  modified_base 22: mod_base = OTHER; note = 2'-fluorocytidine with phosphorothioate linkage
  modified_base 23: mod_base = OTHER; note = 2'-O-methyluridine
gcagaactcgcatgacttggact

SEQ ID NO: 1260 - RNA, 23 nt, synthetic construct
  source 1..23: mol_type = other RNA
  modified_base 1: mod_base = OTHER; note = 5'-(E)-vinylphosphonate 2'-O-methylated adenosine with phosphorothioate linkage
  modified_base 2: mod_base = OTHER; note = 2'-fluoroguanosine with phosphorothioate linkage
  modified_base 3: mod_base = OTHER; note = 2'-O-methylcytidine
  modified_base 4: mod_base = OTHER; note = 2'-fluoroadenosine
  modified_base 5: mod_base = OTHER; note = 2'-O-methylguanosine
  modified_base 6: mod_base = OTHER; note = 2'-fluoroadenosine
  modified_base 7: mod_base = OTHER; note = 2'-O-methyladenosine
  modified_base 8: mod_base = OTHER; note = 2'-fluorocytidine
  modified_base 9: mod_base = OTHER; note = 2'-O-methyluridine
  modified_base 10: mod_base = OTHER; note = 2'-fluorocytidine
  modified_base 11: mod_base = OTHER; note = 2'-O-methylguanosine
  modified_base 12: mod_base = OTHER; note = 2'-fluorocytidine
  modified_base 13: mod_base = OTHER; note = 2'-O-methyladenosine
  modified_base 14: mod_base = OTHER; note = 2'-fluorouridine
  modified_base 15: mod_base = OTHER; note = 2'-O-methylguanosine
  modified_base 16: mod_base = OTHER; note = 2'-fluoroadenosine
  modified_base 17: mod_base = OTHER; note = 2'-O-methylcytidine
  modified_base 18: mod_base = OTHER; note = 2'-fluorouridine
  modified_base 19: mod_base = OTHER; note = 2'-O-methyluridine
  modified_base 20: mod_base = OTHER; note = 2'-fluoroguanosine
  modified_base 21: mod_base = OTHER; note = 2'-O-methylguanosine with phosphorothioate linkage
  modified_base 22: mod_base = OTHER; note = 2'-fluoroadenosine with phosphorothioate linkage
  modified_base 23: mod_base = OTHER; note = 2'-O-methylcytidine
agcagaactcgcatgacttggac

SEQ ID NO: 1261 - RNA, 23 nt, synthetic construct
  source 1..23: mol_type = other RNA
  modified_base 1: mod_base = OTHER; note = 5'-(E)-vinylphosphonate 2'-O-methylated adenosine with phosphorothioate linkage
  modified_base 2: mod_base = OTHER; note = 2'-fluorocytidine with phosphorothioate linkage
  modified_base 3: mod_base = OTHER; note = 2'-O-methylguanosine
  modified_base 4: mod_base = OTHER; note = 2'-fluorocytidine
  modified_base 5: mod_base = OTHER; note = 2'-O-methyladenosine
  modified_base 6: mod_base = OTHER; note = 2'-fluoroguanosine
  modified_base 7: mod_base = OTHER; note = 2'-O-methyladenosine
  modified_base 8: mod_base = OTHER; note = 2'-fluoroadenosine
  modified_base 9: mod_base = OTHER; note = 2'-O-methylcytidine
  modified_base 10: mod_base = OTHER; note = 2'-fluorouridine
  modified_base 11: mod_base = OTHER; note = 2'-O-methylcytidine
  modified_base 12: mod_base = OTHER; note = 2'-fluoroguanosine
  modified_base 13: mod_base = OTHER; note = 2'-O-methylcytidine
  modified_base 14: mod_base = OTHER; note = 2'-fluoroadenosine
  modified_base 15: mod_base = OTHER; note = 2'-O-methyluridine
  modified_base 16: mod_base = OTHER; note = 2'-fluoroguanosine
  modified_base 17: mod_base = OTHER; note = 2'-O-methyladenosine
  modified_base 18: mod_base = OTHER; note = 2'-fluorocytidine
  modified_base 19: mod_base = OTHER; note = 2'-O-methyluridine
  modified_base 20: mod_base = OTHER; note = 2'-fluorouridine
  modified_base 21: mod_base = OTHER; note = 2'-O-methylguanosine with phosphorothioate linkage
  modified_base 22: mod_base = OTHER; note = 2'-fluoroguanosine with phosphorothioate linkage
  modified_base 23: mod_base = OTHER; note = 2'-O-methyladenosine
acgcagaactcgcatgacttgga

SEQ ID NO: 1262 - RNA, 23 nt, synthetic construct
  source 1..23: mol_type = other RNA
  modified_base 1: mod_base = OTHER; note = 5'-(E)-vinylphosphonate 2'-O-methylated uridine with phosphorothioate linkage
  modified_base 2: mod_base = OTHER; note = 2'-fluoroguanosine with phosphorothioate linkage
  modified_base 3: mod_base = OTHER; note = 2'-O-methylcytidine
  modified_base 4: mod_base = OTHER; note = 2'-fluorocytidine
  modified_base 5: mod_base = OTHER; note = 2'-O-methylguanosine
  modified_base 6: mod_base = OTHER; note = 2'-fluorocytidine
  modified_base 7: mod_base = OTHER; note = 2'-O-methyladenosine
  modified_base 8: mod_base = OTHER; note = 2'-fluoroguanosine
  modified_base 9: mod_base = OTHER; note = 2'-O-methyladenosine
  modified_base 10: mod_base = OTHER; note = 2'-fluoroadenosine
  modified_base 11: mod_base = OTHER; note = 2'-O-methylcytidine
  modified_base 12: mod_base = OTHER; note = 2'-fluorouridine
  modified_base 13: mod_base = OTHER; note = 2'-O-methylcytidine
  modified_base 14: mod_base = OTHER; note = 2'-fluoroguanosine
  modified_base 15: mod_base = OTHER; note = 2'-O-methylcytidine
  modified_base 16: mod_base = OTHER; note = 2'-fluoroadenosine
  modified_base 17: mod_base = OTHER; note = 2'-O-methyluridine
  modified_base 18: mod_base = OTHER; note = 2'-fluoroguanosine
  modified_base 19: mod_base = OTHER; note = 2'-O-methyladenosine
  modified_base 20: mod_base = OTHER; note = 2'-fluorocytidine
  modified_base 21: mod_base = OTHER; note = 2'-O-methyluridine with phosphorothioate linkage
  modified_base 22: mod_base = OTHER; note = 2'-fluorouridine with phosphorothioate linkage
  modified_base 23: mod_base = OTHER; note = 2'-O-methylguanosine
tgccgcagaactcgcatgacttg

SEQ ID NO: 1263 - RNA, 23 nt, synthetic construct
  source 1..23: mol_type = other RNA
  modified_base 1: mod_base = OTHER; note = 5'-(E)-vinylphosphonate 2'-O-methylated uridine with phosphorothioate linkage
  modified_base 2: mod_base = OTHER; note = 2'-fluorouridine with phosphorothioate linkage
  modified_base 3: mod_base = OTHER; note = 2'-O-methylguanosine
  modified_base 4: mod_base = OTHER; note = 2'-fluorocytidine
  modified_base 5: mod_base = OTHER; note = 2'-O-methylcytidine
  modified_base 6: mod_base = OTHER; note = 2'-fluoroguanosine
  modified_base 7: mod_base = OTHER; note = 2'-O-methylcytidine
  modified_base 8: mod_base = OTHER; note = 2'-fluoroadenosine
  modified_base 9: mod_base = OTHER; note = 2'-O-methylguanosine
  modified_base 10: mod_base = OTHER; note = 2'-fluoroadenosine
  modified_base 11: mod_base = OTHER; note = 2'-O-methyladenosine
  modified_base 12: mod_base = OTHER; note = 2'-fluorocytidine
  modified_base 13: mod_base = OTHER; note = 2'-O-methyluridine
  modified_base 14: mod_base = OTHER; note = 2'-fluorocytidine
  modified_base 15: mod_base = OTHER; note = 2'-O-methylguanosine
  modified_base 16: mod_base = OTHER; note = 2'-fluorocytidine
  modified_base 17: mod_base = OTHER; note = 2'-O-methyladenosine
  modified_base 18: mod_base = OTHER; note = 2'-fluorouridine
  modified_base 19: mod_base = OTHER; note = 2'-O-methylguanosine
  modified_base 20: mod_base = OTHER; note = 2'-fluoroadenosine
  modified_base 21: mod_base = OTHER; note = 2'-O-methylcytidine with phosphorothioate linkage
  modified_base 22: mod_base = OTHER; note = 2'-fluorouridine with phosphorothioate linkage
  modified_base 23: mod_base = OTHER; note = 2'-O-methyluridine
ttgccgcagaactcgcatgactt

SEQ ID NO: 1264 - RNA, 23 nt, synthetic construct
  source 1..23: mol_type = other RNA
  modified_base 1: mod_base = OTHER; note = 5'-(E)-vinylphosphonate 2'-O-methylated adenosine with phosphorothioate linkage
  modified_base 2: mod_base = OTHER; note = 2'-fluorouridine with phosphorothioate linkage
  modified_base 3: mod_base = OTHER; note = 2'-O-methyluridine
  modified_base 4: mod_base = OTHER; note = 2'-fluoroguanosine
  modified_base 5: mod_base = OTHER; note = 2'-O-methylcytidine
  modified_base 6: mod_base = OTHER; note = 2'-fluorocytidine
  modified_base 7: mod_base = OTHER; note = 2'-O-methylguanosine
  modified_base 8: mod_base = OTHER; note = 2'-fluorocytidine
  modified_base 9: mod_base = OTHER; note = 2'-O-methyladenosine
  modified_base 10: mod_base = OTHER; note = 2'-fluoroguanosine
  modified_base 11: mod_base = OTHER; note = 2'-O-methyladenosine
  modified_base 12: mod_base = OTHER; note = 2'-fluoroadenosine
  modified_base 13: mod_base = OTHER; note = 2'-O-methylcytidine
  modified_base 14: mod_base = OTHER; note = 2'-fluorouridine
  modified_base 15: mod_base = OTHER; note = 2'-O-methylcytidine
  modified_base 16: mod_base = OTHER; note = 2'-fluoroguanosine
  modified_base 17: mod_base = OTHER; note = 2'-O-methylcytidine
  modified_base 18: mod_base = OTHER; note = 2'-fluoroadenosine
  modified_base 19: mod_base = OTHER; note = 2'-O-methyluridine
  modified_base 20: mod_base = OTHER; note = 2'-fluoroguanosine
  modified_base 21: mod_base = OTHER; note = 2'-O-methyladenosine with phosphorothioate linkage
  modified_base 22: mod_base = OTHER; note = 2'-fluorocytidine with phosphorothioate linkage
  modified_base 23: mod_base = OTHER; note = 2'-O-methyluridine
attgccgcagaactcgcatgact

SEQ ID NO: 1265 - RNA, 23 nt, synthetic construct
  source 1..23: mol_type = other RNA
  modified_base 1: mod_base = OTHER; note = 5'-(E)-vinylphosphonate 2'-O-methylated adenosine with phosphorothioate linkage
  modified_base 2: mod_base = OTHER; note = 2'-fluorocytidine with phosphorothioate linkage
  modified_base 3: mod_base = OTHER; note = 2'-O-methylguanosine
  modified_base 4: mod_base = OTHER; note = 2'-fluorouridine
  modified_base 5: mod_base = OTHER; note = 2'-O-methylcytidine
  modified_base 6: mod_base = OTHER; note = 2'-fluorouridine
  modified_base 7: mod_base = OTHER; note = 2'-O-methyluridine
  modified_base 8: mod_base = OTHER; note = 2'-fluoroguanosine
  modified_base 9: mod_base = OTHER; note = 2'-O-methylcytidine
  modified_base 10: mod_base = OTHER; note = 2'-fluorocytidine
  modified_base 11: mod_base = OTHER; note = 2'-O-methylguanosine
  modified_base 12: mod_base = OTHER; note = 2'-fluorocytidine
  modified_base 13: mod_base = OTHER; note = 2'-O-methyladenosine
  modified_base 14: mod_base = OTHER; note = 2'-fluoroguanosine
  modified_base 15: mod_base = OTHER; note = 2'-O-methyladenosine
  modified_base 16: mod_base = OTHER; note = 2'-fluoroadenosine
  modified_base 17: mod_base = OTHER; note = 2'-O-methylcytidine
  modified_base 18: mod_base = OTHER; note = 2'-fluorouridine
  modified_base 19: mod_base = OTHER; note = 2'-O-methylcytidine
  modified_base 20: mod_base = OTHER; note = 2'-fluoroguanosine
  modified_base 21: mod_base = OTHER; note = 2'-O-methylcytidine with phosphorothioate linkage
  modified_base 22: mod_base = OTHER; note = 2'-fluoroadenosine with phosphorothioate linkage
  modified_base 23: mod_base = OTHER; note = 2'-O-methyluridine
acgtcttgccgcagaactcgcat

SEQ ID NO: 1266 - RNA, 23 nt, synthetic construct
  source 1..23: mol_type = other RNA
  modified_base 1: mod_base = OTHER; note = 5'-(E)-vinylphosphonate 2'-O-methylated adenosine with phosphorothioate linkage
  modified_base 2: mod_base = OTHER; note = 2'-fluoroadenosine with phosphorothioate linkage
  modified_base 3: mod_base = OTHER; note = 2'-O-methylcytidine
  modified_base 4: mod_base = OTHER; note = 2'-fluoroguanosine
  modified_base 5: mod_base = OTHER; note = 2'-O-methyluridine
  modified_base 6: mod_base = OTHER; note = 2'-fluorocytidine
  modified_base 7: mod_base = OTHER; note = 2'-O-methyluridine
  modified_base 8: mod_base = OTHER; note = 2'-fluorouridine
  modified_base 9: mod_base = OTHER; note = 2'-O-methylguanosine
  modified_base 10: mod_base = OTHER; note = 2'-fluorocytidine
  modified_base 11: mod_base = OTHER; note = 2'-O-methylcytidine
  modified_base 12: mod_base = OTHER; note = 2'-fluoroguanosine
  modified_base 13: mod_base = OTHER; note = 2'-O-methylcytidine
  modified_base 14: mod_base = OTHER; note = 2'-fluoroadenosine
  modified_base 15: mod_base = OTHER; note = 2'-O-methylguanosine
  modified_base 16: mod_base = OTHER; note = 2'-fluoroadenosine
  modified_base 17: mod_base = OTHER; note = 2'-O-methyladenosine
  modified_base 18: mod_base = OTHER; note = 2'-fluorocytidine
  modified_base 19: mod_base = OTHER; note = 2'-O-methyluridine
  modified_base 20: mod_base = OTHER; note = 2'-fluorocytidine
  modified_base 21: mod_base = OTHER; note = 2'-O-methylguanosine with phosphorothioate linkage
  modified_base 22: mod_base = OTHER; note = 2'-fluorocytidine with phosphorothioate linkage
  modified_base 23: mod_base = OTHER; note = 2'-O-methyladenosine
aacgtcttgccgcagaactcgca

SEQ ID NO: 1267 - RNA, 23 nt, synthetic construct
  source 1..23: mol_type = other RNA
  modified_base 1: mod_base = OTHER; note = 5'-(E)-vinylphosphonate 2'-O-methylated guanosine with phosphorothioate linkage
  modified_base 2: mod_base = OTHER; note = 2'-fluoroadenosine with phosphorothioate linkage
  modified_base 3: mod_base = OTHER; note = 2'-O-methyladenosine
  modified_base 4: mod_base = OTHER; note = 2'-fluorocytidine
  modified_base 5: mod_base = OTHER; note = 2'-O-methylguanosine
  modified_base 6: mod_base = OTHER; note = 2'-fluorouridine
  modified_base 7: mod_base = OTHER; note = 2'-O-methylcytidine
  modified_base 8: mod_base = OTHER; note = 2'-fluorouridine
  modified_base 9: mod_base = OTHER; note = 2'-O-methyluridine
  modified_base 10: mod_base = OTHER; note = 2'-fluoroguanosine
  modified_base 11: mod_base = OTHER; note = 2'-O-methylcytidine
  modified_base 12: mod_base = OTHER; note = 2'-fluorocytidine
  modified_base 13: mod_base = OTHER; note = 2'-O-methylguanosine
  modified_base 14: mod_base = OTHER; note = 2'-fluorocytidine
  modified_base 15: mod_base = OTHER; note = 2'-O-methyladenosine
  modified_base 16: mod_base = OTHER; note = 2'-fluoroguanosine
  modified_base 17: mod_base = OTHER; note = 2'-O-methyladenosine
  modified_base 18: mod_base = OTHER; note = 2'-fluoroadenosine
  modified_base 19: mod_base = OTHER; note = 2'-O-methylcytidine
  modified_base 20: mod_base = OTHER; note = 2'-fluorouridine
  modified_base 21: mod_base = OTHER; note = 2'-O-methylcytidine with phosphorothioate linkage
  modified_base 22: mod_base = OTHER; note = 2'-fluoroguanosine with phosphorothioate linkage
  modified_base 23: mod_base = OTHER; note = 2'-O-methylcytidine
gaacgtcttgccgcagaactcgc

SEQ ID NO: 1268 - RNA, 23 nt, synthetic construct
  source 1..23: mol_type = other RNA
  modified_base 1: mod_base = OTHER; note = 5'-(E)-vinylphosphonate 2'-O-methylated uridine with phosphorothioate linkage
  modified_base 2: mod_base = OTHER; note = 2'-fluoroguanosine with phosphorothioate linkage
  modified_base 3: mod_base = OTHER; note = 2'-O-methyladenosine
  modified_base 4: mod_base = OTHER; note = 2'-fluoroadenosine
  modified_base 5: mod_base = OTHER; note = 2'-O-methylcytidine
  modified_base 6: mod_base = OTHER; note = 2'-fluoroguanosine
  modified_base 7: mod_base = OTHER; note = 2'-O-methyluridine
  modified_base 8: mod_base = OTHER; note = 2'-fluorocytidine
  modified_base 9: mod_base = OTHER; note = 2'-O-methyluridine
  modified_base 10: mod_base = OTHER; note = 2'-fluorouridine
  modified_base 11: mod_base = OTHER; note = 2'-O-methylguanosine
  modified_base 12: mod_base = OTHER; note = 2'-fluorocytidine
  modified_base 13: mod_base = OTHER; note = 2'-O-methylcytidine
  modified_base 14: mod_base = OTHER; note = 2'-fluoroguanosine
  modified_base 15: mod_base = OTHER; note = 2'-O-methylcytidine
  modified_base 16: mod_base = OTHER; note = 2'-fluoroadenosine
  modified_base 17: mod_base = OTHER; note = 2'-O-methylguanosine
  modified_base 18: mod_base = OTHER; note = 2'-fluoroadenosine
  modified_base 19: mod_base = OTHER; note = 2'-O-methyladenosine
  modified_base 20: mod_base = OTHER; note = 2'-fluorocytidine
  modified_base 21: mod_base = OTHER; note = 2'-O-methyluridine with phosphorothioate linkage
  modified_base 22: mod_base = OTHER; note = 2'-fluorocytidine with phosphorothioate linkage
  modified_base 23: mod_base = OTHER; note = 2'-O-methylguanosine
tgaacgtcttgccgcagaactcg

SEQ ID NO: 1269 - RNA, 23 nt, synthetic construct
  source 1..23: mol_type = other RNA
  modified_base 1: mod_base = OTHER; note = 5'-(E)-vinylphosphonate 2'-O-methylated uridine with phosphorothioate linkage
  modified_base 2: mod_base = OTHER; note = 2'-fluorouridine with phosphorothioate linkage
  modified_base 3: mod_base = OTHER; note = 2'-O-methylguanosine
  modified_base 4: mod_base = OTHER; note = 2'-fluoroadenosine
  modified_base 5: mod_base = OTHER; note = 2'-O-methyladenosine
  modified_base 6: mod_base = OTHER; note = 2'-fluorocytidine
  modified_base 7: mod_base = OTHER; note = 2'-O-methylguanosine
  modified_base 8: mod_base = OTHER; note = 2'-fluorouridine
  modified_base 9: mod_base = OTHER; note = 2'-O-methylcytidine
  modified_base 10: mod_base = OTHER; note = 2'-fluorouridine
  modified_base 11: mod_base = OTHER; note = 2'-O-methyluridine
  modified_base 12: mod_base = OTHER; note = 2'-fluoroguanosine
  modified_base 13: mod_base = OTHER; note = 2'-O-methylcytidine
  modified_base 14: mod_base = OTHER; note = 2'-fluorocytidine
  modified_base 15: mod_base = OTHER; note = 2'-O-methylguanosine
  modified_base 16: mod_base = OTHER; note = 2'-fluorocytidine
  modified_base 17: mod_base = OTHER; note = 2'-O-methyladenosine
  modified_base 18: mod_base = OTHER; note = 2'-fluoroguanosine
  modified_base 19: mod_base = OTHER; note = 2'-O-methyladenosine
  modified_base 20: mod_base = OTHER; note = 2'-fluoroadenosine
  modified_base 21: mod_base = OTHER; note = 2'-O-methylcytidine with phosphorothioate linkage
  modified_base 22: mod_base = OTHER; note = 2'-fluorouridine with phosphorothioate linkage
  modified_base 23: mod_base = OTHER; note = 2'-O-methylcytidine
ttgaacgtcttgccgcagaactc

SEQ ID NO: 1270 - RNA, 23 nt, synthetic construct
  source 1..23: mol_type = other RNA
  modified_base 1: mod_base = OTHER; note = 5'-(E)-vinylphosphonate 2'-O-methylated uridine with phosphorothioate linkage
  modified_base 2: mod_base = OTHER; note = 2'-fluorouridine with phosphorothioate linkage
  modified_base 3: mod_base = OTHER; note = 2'-O-methyluridine
  modified_base 4: mod_base = OTHER; note = 2'-fluoroguanosine
  modified_base 5: mod_base = OTHER; note = 2'-O-methyladenosine
  modified_base 6: mod_base = OTHER; note = 2'-fluoroadenosine
  modified_base 7: mod_base = OTHER; note = 2'-O-methylcytidine
  modified_base 8: mod_base = OTHER; note = 2'-fluoroguanosine
  modified_base 9: mod_base = OTHER; note = 2'-O-methyluridine
  modified_base 10: mod_base = OTHER; note = 2'-fluorocytidine
  modified_base 11: mod_base = OTHER; note = 2'-O-methyluridine
  modified_base 12: mod_base = OTHER; note = 2'-fluorouridine
  modified_base 13: mod_base = OTHER; note = 2'-O-methylguanosine
  modified_base 14: mod_base = OTHER; note = 2'-fluorocytidine
  modified_base 15: mod_base = OTHER; note = 2'-O-methylcytidine
  modified_base 16: mod_base = OTHER; note = 2'-fluoroguanosine
  modified_base 17: mod_base = OTHER; note = 2'-O-methylcytidine
  modified_base 18: mod_base = OTHER; note = 2'-fluoroadenosine
  modified_base 19: mod_base = OTHER; note = 2'-O-methylguanosine
  modified_base 20: mod_base = OTHER; note = 2'-fluoroadenosine
  modified_base 21: mod_base = OTHER; note = 2'-O-methyladenosine with phosphorothioate linkage
  modified_base 22: mod_base = OTHER; note = 2'-fluorocytidine with phosphorothioate linkage
  modified_base 23: mod_base = OTHER; note = 2'-O-methyluridine
tttgaacgtcttgccgcagaact

SEQ ID NO: 1271 - RNA, 23 nt, synthetic construct
  source 1..23: mol_type = other RNA
  modified_base 1: mod_base = OTHER; note = 5'-(E)-vinylphosphonate 2'-O-methylated adenosine with phosphorothioate linkage
  modified_base 2: mod_base = OTHER; note = 2'-fluorouridine with phosphorothioate linkage
  modified_base 3: mod_base = OTHER; note = 2'-O-methyluridine
  modified_base 4: mod_base = OTHER; note = 2'-fluorouridine
  modified_base 5: mod_base = OTHER; note = 2'-O-methylguanosine
  modified_base 6: mod_base = OTHER; note = 2'-fluoroadenosine
  modified_base 7: mod_base = OTHER; note = 2'-O-methyladenosine
  modified_base 8: mod_base = OTHER; note = 2'-fluorocytidine
  modified_base 9: mod_base = OTHER; note = 2'-O-methylguanosine
  modified_base 10: mod_base = OTHER; note = 2'-fluorouridine
  modified_base 11: mod_base = OTHER; note = 2'-O-methylcytidine
  modified_base 12: mod_base = OTHER; note = 2'-fluorouridine
  modified_base 13: mod_base = OTHER; note = 2'-O-methyluridine
  modified_base 14: mod_base = OTHER; note = 2'-fluoroguanosine
  modified_base 15: mod_base = OTHER; note = 2'-O-methylcytidine
  modified_base 16: mod_base = OTHER; note = 2'-fluorocytidine
  modified_base 17: mod_base = OTHER; note = 2'-O-methylguanosine
  modified_base 18: mod_base = OTHER; note = 2'-fluorocytidine
  modified_base 19: mod_base = OTHER; note = 2'-O-methyladenosine
  modified_base 20: mod_base = OTHER; note = 2'-fluoroguanosine
  modified_base 21: mod_base = OTHER; note = 2'-O-methyladenosine with phosphorothioate linkage
  modified_base 22: mod_base = OTHER; note = 2'-fluoroadenosine with phosphorothioate linkage
  modified_base 23: mod_base = OTHER; note = 2'-O-methylcytidine
atttgaacgtcttgccgcagaac

SEQ ID NO: 1272 - RNA, 23 nt, synthetic construct
  source 1..23: mol_type = other RNA
  modified_base 1: mod_base = OTHER; note = 5'-(E)-vinylphosphonate 2'-O-methylated adenosine with phosphorothioate linkage
  modified_base 2: mod_base = OTHER; note = 2'-fluoroadenosine with phosphorothioate linkage
  modified_base 3: mod_base = OTHER; note = 2'-O-methyluridine
  modified_base 4: mod_base = OTHER; note = 2'-fluorouridine
  modified_base 5: mod_base = OTHER; note = 2'-O-methyluridine
  modified_base 6: mod_base = OTHER; note = 2'-fluoroguanosine
  modified_base 7: mod_base = OTHER; note = 2'-O-methyladenosine
  modified_base 8: mod_base = OTHER; note = 2'-fluoroadenosine
  modified_base 9: mod_base = OTHER; note = 2'-O-methylcytidine
  modified_base 10: mod_base = OTHER; note = 2'-fluoroguanosine
  modified_base 11: mod_base = OTHER; note = 2'-O-methyluridine
  modified_base 12: mod_base = OTHER; note = 2'-fluorocytidine
  modified_base 13: mod_base = OTHER; note = 2'-O-methyluridine
  modified_base 14: mod_base = OTHER; note = 2'-fluorouridine
  modified_base 15: mod_base = OTHER; note = 2'-O-methylguanosine
  modified_base 16: mod_base = OTHER; note = 2'-fluorocytidine
  modified_base 17: mod_base = OTHER; note = 2'-O-methylcytidine
  modified_base 18: mod_base = OTHER; note = 2'-fluoroguanosine
  modified_base 19: mod_base = OTHER; note = 2'-O-methylcytidine
  modified_base 20: mod_base = OTHER; note = 2'-fluoroadenosine
  modified_base 21: mod_base = OTHER; note = 2'-O-methylguanosine with phosphorothioate linkage
  modified_base 22: mod_base = OTHER; note = 2'-fluoroadenosine with phosphorothioate linkage
  modified_base 23: mod_base = OTHER; note = 2'-O-methyladenosine
aatttgaacgtcttgccgcagaa

SEQ ID NO: 1273 - RNA, 23 nt, synthetic construct
  source 1..23: mol_type = other RNA
  modified_base 1: mod_base = OTHER; note = 5'-(E)-vinylphosphonate 2'-O-methylated adenosine with phosphorothioate linkage
  modified_base 2: mod_base = OTHER; note = 2'-fluoroadenosine with phosphorothioate linkage
  modified_base 3: mod_base = OTHER; note = 2'-O-methyladenosine
  modified_base 4: mod_base = OTHER; note = 2'-fluorouridine
  modified_base 5: mod_base = OTHER; note = 2'-O-methyluridine
  modified_base 6: mod_base = OTHER; note = 2'-fluorouridine
  modified_base 7: mod_base = OTHER; note = 2'-O-methylguanosine
  modified_base 8: mod_base = OTHER; note = 2'-fluoroadenosine
  modified_base 9: mod_base = OTHER; note = 2'-O-methyladenosine
  modified_base 10: mod_base = OTHER; note = 2'-fluorocytidine
  modified_base 11: mod_base = OTHER; note = 2'-O-methylguanosine
  modified_base 12: mod_base = OTHER; note = 2'-fluorouridine
  modified_base 13: mod_base = OTHER; note = 2'-O-methylcytidine
  modified_base 14: mod_base = OTHER; note = 2'-fluorouridine
  modified_base 15: mod_base = OTHER; note = 2'-O-methyluridine
  modified_base 16: mod_base = OTHER; note = 2'-fluoroguanosine
  modified_base 17: mod_base = OTHER; note = 2'-O-methylcytidine
  modified_base 18: mod_base = OTHER; note = 2'-fluorocytidine
  modified_base 19: mod_base = OTHER; note = 2'-O-methylguanosine
  modified_base 20: mod_base = OTHER; note = 2'-fluorocytidine
  modified_base 21: mod_base = OTHER; note = 2'-O-methyladenosine with phosphorothioate linkage
  modified_base 22: mod_base = OTHER; note = 2'-fluoroguanosine with phosphorothioate linkage
  modified_base 23: mod_base = OTHER; note = 2'-O-methyladenosine
aaatttgaacgtcttgccgcaga

SEQ ID NO: 1274 - RNA, 23 nt, synthetic construct
  source 1..23: mol_type = other RNA
  modified_base 1: mod_base = OTHER; note = 5'-(E)-vinylphosphonate 2'-O-methylated guanosine with phosphorothioate linkage
  modified_base 2: mod_base = OTHER; note = 2'-fluoroadenosine with phosphorothioate linkage
  modified_base 3: mod_base = OTHER; note = 2'-O-methyladenosine
  modified_base 4: mod_base = OTHER; note = 2'-fluoroadenosine
  modified_base 5: mod_base = OTHER; note = 2'-O-methyluridine
  modified_base 6: mod_base = OTHER; note = 2'-fluorouridine
  modified_base 7: mod_base = OTHER; note = 2'-O-methyluridine
  modified_base 8: mod_base = OTHER; note = 2'-fluoroguanosine
  modified_base 9: mod_base = OTHER; note = 2'-O-methyladenosine
  modified_base 10: mod_base = OTHER; note = 2'-fluoroadenosine
  modified_base 11: mod_base = OTHER; note = 2'-O-methylcytidine
  modified_base 12: mod_base = OTHER; note = 2'-fluoroguanosine
  modified_base 13: mod_base = OTHER; note = 2'-O-methyluridine
  modified_base 14: mod_base = OTHER; note = 2'-fluorocytidine
  modified_base 15: mod_base = OTHER; note = 2'-O-methyluridine
  modified_base 16: mod_base = OTHER; note = 2'-fluorouridine
  modified_base 17: mod_base = OTHER; note = 2'-O-methylguanosine
  modified_base 18: mod_base = OTHER; note = 2'-fluorocytidine
  modified_base 19: mod_base = OTHER; note = 2'-O-methylcytidine
  modified_base 20: mod_base = OTHER; note = 2'-fluoroguanosine
  modified_base 21: mod_base = OTHER; note = 2'-O-methylcytidine with phosphorothioate linkage
  modified_base 22: mod_base = OTHER; note = 2'-fluoroadenosine with phosphorothioate linkage
  modified_base 23: mod_base = OTHER; note = 2'-O-methylguanosine
gaaatttgaacgtcttgccgcag

SEQ ID NO: 1275 - RNA, 23 nt, synthetic construct
  source 1..23: mol_type = other RNA
  modified_base 1: mod_base = OTHER; note = 5'-(E)-vinylphosphonate 2'-O-methylated uridine with phosphorothioate linkage
  modified_base 2: mod_base = OTHER; note = 2'-fluorocytidine with phosphorothioate linkage
  modified_base 3: mod_base = OTHER; note = 2'-O-methylguanosine
  modified_base 4: mod_base = OTHER; note = 2'-fluorouridine
  modified_base 5: mod_base = OTHER; note = 2'-O-methylcytidine
  modified_base 6: mod_base = OTHER; note = 2'-fluoroguanosine
  modified_base 7: mod_base = OTHER; note = 2'-O-methylguanosine
  modified_base 8: mod_base = OTHER; note = 2'-fluoroadenosine
  modified_base 9: mod_base = OTHER; note = 2'-O-methylcytidine
  modified_base 10: mod_base = OTHER; note = 2'-fluorouridine
  modified_base 11: mod_base = OTHER; note = 2'-O-methyluridine
  modified_base 12: mod_base = OTHER; note = 2'-fluoroguanosine
  modified_base 13: mod_base = OTHER; note = 2'-O-methyladenosine
  modified_base 14: mod_base = OTHER; note = 2'-fluorocytidine
  modified_base 15: mod_base = OTHER; note = 2'-O-methylcytidine
  modified_base 16: mod_base = OTHER; note = 2'-fluoroguanosine
  modified_base 17: mod_base = OTHER; note = 2'-O-methyluridine
  modified_base 18: mod_base = OTHER; note = 2'-fluorocytidine
  modified_base 19: mod_base = OTHER; note = 2'-O-methyladenosine
  modified_base 20: mod_base = OTHER; note = 2'-fluorouridine
  modified_base 21: mod_base = OTHER; note = 2'-O-methylguanosine with phosphorothioate linkage
  modified_base 22: mod_base = OTHER; note = 2'-fluoroguanosine with phosphorothioate linkage
  modified_base 23: mod_base = OTHER; note = 2'-O-methylguanosine
tcgtcggacttgaccgtcatggg

SEQ ID NO: 1276 - RNA, 23 nt, synthetic construct
  source 1..23: mol_type = other RNA
  modified_base 1: mod_base = OTHER; note = 5'-(E)-vinylphosphonate 2'-O-methylated adenosine with phosphorothioate linkage
  modified_base 2: mod_base = OTHER; note = 2'-fluoroadenosine with phosphorothioate linkage
  modified_base 3: mod_base = OTHER; note = 2'-O-methylcytidine
  modified_base 4: mod_base = OTHER; note = 2'-fluorouridine
  modified_base 5: mod_base = OTHER; note = 2'-O-methyluridine
  modified_base 6: mod_base = OTHER; note = 2'-fluoroguanosine
  modified_base 7: mod_base = OTHER; note = 2'-O-methylguanosine
  modified_base 8: mod_base = OTHER; note = 2'-fluorocytidine
  modified_base 9: mod_base = OTHER; note = 2'-O-methylcytidine
  modified_base 10: mod_base = OTHER; note = 2'-fluoroadenosine
  modified_base 11: mod_base = OTHER; note = 2'-O-methylcytidine
  modified_base 12: mod_base = OTHER; note = 2'-fluorocytidine
  modified_base 13: mod_base = OTHER; note = 2'-O-methyladenosine
  modified_base 14: mod_base = OTHER; note = 2'-fluorocytidine
  modified_base 15: mod_base = OTHER; note = 2'-O-methylguanosine
  modified_base 16: mod_base = OTHER; note = 2'-fluoroguanosine
  modified_base 17: mod_base = OTHER; note = 2'-O-methyladenosine
  modified_base 18: mod_base = OTHER; note = 2'-fluorocytidine
  modified_base 19: mod_base = OTHER; note = 2'-O-methyluridine
  modified_base 20: mod_base = OTHER; note = 2'-fluorouridine
  modified_base 21: mod_base = OTHER; note = 2'-O-methylguanosine with phosphorothioate linkage
  modified_base 22: mod_base = OTHER; note = 2'-fluoroadenosine with phosphorothioate linkage
  modified_base 23: mod_base = OTHER; note = 2'-O-methylguanosine
aacttggccaccacggacttgag

SEQ ID NO: 1277 - RNA, 23 nt, synthetic construct
  source 1..23: mol_type = other RNA
  modified_base 1: mod_base = OTHER; note = 5'-(E)-vinylphosphonate 2'-O-methylated guanosine with phosphorothioate linkage
  modified_base 2: mod_base = OTHER; note = 2'-fluoroadenosine with phosphorothioate linkage
  modified_base 3: mod_base = OTHER; note = 2'-O-methyladenosine
  modified_base 4: mod_base = OTHER; note = 2'-fluorocytidine
  modified_base 5: mod_base = OTHER; note = 2'-O-methyluridine
  modified_base 6: mod_base = OTHER; note = 2'-fluorouridine
  modified_base 7: mod_base = OTHER; note = 2'-O-methylguanosine
  modified_base 8: mod_base = OTHER; note = 2'-fluoroguanosine
  modified_base 9: mod_base = OTHER; note = 2'-O-methylcytidine
  modified_base 10: mod_base = OTHER; note = 2'-fluorocytidine
  modified_base 11: mod_base = OTHER; note = 2'-O-methyladenosine
  modified_base 12: mod_base = OTHER; note = 2'-fluorocytidine
  modified_base 13: mod_base = OTHER; note = 2'-O-methylcytidine
  modified_base 14: mod_base = OTHER; note = 2'-fluoroadenosine
  modified_base 15: mod_base = OTHER; note = 2'-O-methylcytidine
  modified_base 16: mod_base = OTHER; note = 2'-fluoroguanosine
  modified_base 17: mod_base = OTHER; note = 2'-O-methylguanosine
  modified_base 18: mod_base = OTHER; note = 2'-fluoroadenosine
  modified_base 19: mod_base = OTHER; note = 2'-O-methylcytidine
  modified_base 20: mod_base = OTHER; note = 2'-fluorouridine
  modified_base 21: mod_base = OTHER; note = 2'-O-methyluridine with phosphorothioate linkage
  modified_base 22: mod_base = OTHER; note = 2'-fluoroguanosine with phosphorothioate linkage
  modified_base 23: mod_base = OTHER; note = 2'-O-methyladenosine
gaacttggccaccacggacttga

SEQ ID NO: 1278 - RNA, 23 nt, synthetic construct
  source 1..23: mol_type = other RNA
  modified_base 1: mod_base = OTHER; note = 5'-(E)-vinylphosphonate 2'-O-methylated adenosine with phosphorothioate linkage
  modified_base 2: mod_base = OTHER; note = 2'-fluorouridine with phosphorothioate linkage
  modified_base 3: mod_base = OTHER; note = 2'-O-methyluridine
  modified_base 4: mod_base = OTHER; note = 2'-fluoroguanosine
  modified_base 5: mod_base = OTHER; note = 2'-O-methyladenosine
  modified_base 6: mod_base = OTHER; note = 2'-fluoroadenosine
  modified_base 7: mod_base = OTHER; note = 2'-O-methylcytidine
  modified_base 8: mod_base = OTHER; note = 2'-fluorouridine
  modified_base 9: mod_base = OTHER; note = 2'-O-methyluridine
  modified_base 10: mod_base = OTHER; note = 2'-fluoroguanosine
  modified_base 11: mod_base = OTHER; note = 2'-O-methylguanosine
  modified_base 12: mod_base = OTHER; note = 2'-fluorocytidine
  modified_base 13: mod_base = OTHER; note = 2'-O-methylcytidine
  modified_base 14: mod_base = OTHER; note = 2'-fluoroadenosine
  modified_base 15: mod_base = OTHER; note = 2'-O-methylcytidine
  modified_base 16: mod_base = OTHER; note = 2'-fluorocytidine
  modified_base 17: mod_base = OTHER; note = 2'-O-methyladenosine
  modified_base 18: mod_base = OTHER; note = 2'-fluorocytidine
  modified_base 19: mod_base = OTHER; note = 2'-O-methylguanosine
  modified_base 20: mod_base = OTHER; note = 2'-fluoroguanosine
  modified_base 21: mod_base = OTHER; note = 2'-O-methyladenosine with phosphorothioate linkage
  modified_base 22: mod_base = OTHER; note = 2'-fluorocytidine with phosphorothioate linkage
  modified_base 23: mod_base = OTHER; note = 2'-O-methyluridine
attgaacttggccaccacggact

SEQ ID NO: 1279 - RNA, 23 nt, synthetic construct
  source 1..23: mol_type = other RNA
  modified_base 1: mod_base = OTHER; note = 5'-(E)-vinylphosphonate 2'-O-methylated uridine with phosphorothioate linkage
  modified_base 2: mod_base = OTHER; note = 2'-fluorocytidine with phosphorothioate linkage
  modified_base 3: mod_base = OTHER; note = 2'-O-methyluridine
  modified_base 4: mod_base = OTHER; note = 2'-fluorouridine
  modified_base 5: mod_base = OTHER; note = 2'-O-methylcytidine
  modified_base 6: mod_base = OTHER; note = 2'-fluorocytidine
  modified_base 7: mod_base = OTHER; note = 2'-O-methyluridine
  modified_base 8: mod_base = OTHER; note = 2'-fluorocytidine
  modified_base 9: mod_base = OTHER; note = 2'-O-methylguanosine
  modified_base 10: mod_base = OTHER; note = 2'-fluorouridine
  modified_base 11: mod_base = OTHER; note = 2'-O-methylcytidine
  modified_base 12: mod_base = OTHER; note = 2'-fluoroguanosine
  modified_base 13: mod_base = OTHER; note = 2'-O-methyluridine
  modified_base 14: mod_base = OTHER; note = 2'-fluorocytidine
  modified_base 15: mod_base = OTHER; note = 2'-O-methylcytidine
  modified_base 16: mod_base = OTHER; note = 2'-fluorouridine
  modified_base 17: mod_base = OTHER; note = 2'-O-methylcytidine
  modified_base 18: mod_base = OTHER; note = 2'-fluorocytidine
  modified_base 19: mod_base = OTHER; note = 2'-O-methyluridine
  modified_base 20: mod_base = OTHER; note = 2'-fluorocytidine
  modified_base 21: mod_base = OTHER; note = 2'-O-methyluridine with phosphorothioate linkage
  modified_base 22: mod_base = OTHER; note = 2'-fluorouridine with phosphorothioate linkage
  modified_base 23: mod_base = OTHER; note = 2'-O-methylcytidine
tcttcctcgtcgtcctcctcttc

SEQ ID NO: 1280 - RNA, 23 nt, synthetic construct
  source 1..23: mol_type = other RNA
  modified_base 1: mod_base = OTHER; note = 5'-(E)-vinylphosphonate 2'-O-methylated adenosine with phosphorothioate linkage
  modified_base 2: mod_base = OTHER; note = 2'-fluorouridine with phosphorothioate linkage
  modified_base 3: mod_base = OTHER; note = 2'-O-methylcytidine
  modified_base 4: mod_base = OTHER; note = 2'-fluorouridine
  modified_base 5: mod_base = OTHER; note = 2'-O-methyluridine
  modified_base 6: mod_base = OTHER; note = 2'-fluorocytidine
  modified_base 7: mod_base = OTHER; note = 2'-O-methylcytidine
  modified_base 8: mod_base = OTHER; note = 2'-fluorouridine
  modified_base 9: mod_base = OTHER; note = 2'-O-methylcytidine
  modified_base 10: mod_base = OTHER; note = 2'-fluoroguanosine
  modified_base 11: mod_base = OTHER; note = 2'-O-methyluridine
  modified_base 12: mod_base = OTHER; note = 2'-fluorocytidine
  modified_base 13: mod_base = OTHER; note = 2'-O-methylguanosine
  modified_base 14: mod_base = OTHER; note = 2'-fluorouridine
  modified_base 15: mod_base = OTHER; note = 2'-O-methylcytidine
  modified_base 16: mod_base = OTHER; note = 2'-fluorocytidine
  modified_base 17: mod_base = OTHER; note = 2'-O-methyluridine
  modified_base 18: mod_base = OTHER; note = 2'-fluorocytidine
  modified_base 19: mod_base = OTHER; note = 2'-O-methylcytidine
  modified_base 20: mod_base = OTHER; note = 2'-fluorouridine
  modified_base 21: mod_base = OTHER; note = 2'-O-methylcytidine with phosphorothioate linkage
  modified_base 22: mod_base = OTHER; note = 2'-fluorouridine with phosphorothioate linkage
  modified_base 23: mod_base = OTHER; note = 2'-O-methyluridine
atcttcctcgtcgtcctcctctt

SEQ ID NO: 1281 - RNA, 23 nt, synthetic construct
  source 1..23: mol_type = other RNA
  modified_base 1: mod_base = OTHER; note = 5'-(E)-vinylphosphonate 2'-O-methylated adenosine with phosphorothioate linkage
  modified_base 2: mod_base = OTHER; note = 2'-fluorouridine with phosphorothioate linkage
  modified_base 3: mod_base = OTHER; note = 2'-O-methylcytidine
  modified_base 4: mod_base = OTHER; note = 2'-fluorouridine
  modified_base 5: mod_base = OTHER; note = 2'-O-methylcytidine
  modified_base 6: mod_base = OTHER; note = 2'-fluoroguanosine
  modified_base 7: mod_base = OTHER; note = 2'-O-methylcytidine
  modified_base 8: mod_base = OTHER; note = 2'-fluorouridine
  modified_base 9: mod_base = OTHER; note = 2'-O-methylcytidine
  modified_base 10: mod_base = OTHER; note = 2'-fluorouridine
  modified_base 11: mod_base = OTHER; note = 2'-O-methylcytidine
  modified_base 12: mod_base = OTHER; note = 2'-fluorocytidine
  modified_base 13: mod_base = OTHER; note = 2'-O-methylguanosine
  modified_base 14: mod_base = OTHER; note = 2'-fluorouridine
  modified_base 15: mod_base = OTHER; note = 2'-O-methylcytidine
  modified_base 16: mod_base = OTHER; note = 2'-fluoroadenosine
  modified_base 17: mod_base = OTHER; note = 2'-O-methylguanosine
  modified_base 18: mod_base = OTHER; note = 2'-fluorocytidine
  modified_base 19: mod_base = OTHER; note = 2'-O-methyluridine
  modified_base 20: mod_base = OTHER; note = 2'-fluorocytidine
  modified_base 21: mod_base = OTHER; note = 2'-O-methylcytidine with phosphorothioate linkage
  modified_base 22: mod_base = OTHER; note = 2'-fluorouridine with phosphorothioate linkage
  modified_base 23: mod_base = OTHER; note = 2'-O-methylcytidine
atctcgctctccgtcagctcctc

SEQ ID NO: 1282 - RNA, 23 nt, synthetic construct
  source 1..23: mol_type = other RNA
  modified_base 1: mod_base = OTHER; note = 5'-(E)-vinylphosphonate 2'-O-methylated adenosine with phosphorothioate linkage
  modified_base 2: mod_base = OTHER; note = 2'-fluorocytidine with phosphorothioate linkage
  modified_base 3: mod_base = OTHER; note = 2'-O-methylcytidine
  modified_base 4: mod_base = OTHER; note = 2'-fluorouridine
  modified_base 5: mod_base = OTHER; note = 2'-O-methylcytidine
  modified_base 6: mod_base = OTHER; note = 2'-fluorouridine
  modified_base 7: mod_base = OTHER; note = 2'-O-methylcytidine
  modified_base 8: mod_base = OTHER; note = 2'-fluoroguanosine
  modified_base 9: mod_base = OTHER; note = 2'-O-methylcytidine
  modified_base 10: mod_base = OTHER; note = 2'-fluorouridine
  modified_base 11: mod_base = OTHER; note = 2'-O-methylcytidine
  modified_base 12: mod_base = OTHER; note = 2'-fluorouridine
  modified_base 13: mod_base = OTHER; note = 2'-O-methylcytidine
  modified_base 14: mod_base = OTHER; note = 2'-fluorocytidine
  modified_base 15: mod_base = OTHER; note = 2'-O-methylguanosine
  modified_base 16: mod_base = OTHER; note = 2'-fluorouridine
  modified_base 17: mod_base = OTHER; note = 2'-O-methylcytidine
  modified_base 18: mod_base = OTHER; note = 2'-fluoroadenosine
  modified_base 19: mod_base = OTHER; note = 2'-O-methylguanosine
  modified_base 20: mod_base = OTHER; note = 2'-fluorocytidine
  modified_base 21: mod_base = OTHER; note = 2'-O-methyluridine with phosphorothioate linkage
  modified_base 22: mod_base = OTHER; note = 2'-fluorocytidine with phosphorothioate linkage
  modified_base 23: mod_base = OTHER; note = 2'-O-methylcytidine
acctctcgctctccgtcagctcc

SEQ ID NO: 1283 - RNA, 23 nt, synthetic construct
  source 1..23: mol_type = other RNA
  modified_base 1: mod_base = OTHER; note = 5'-(E)-vinylphosphonate 2'-O-methylated adenosine with phosphorothioate linkage
  modified_base 2: mod_base = OTHER; note = 2'-fluorocytidine with phosphorothioate linkage
  modified_base 3: mod_base = OTHER; note = 2'-O-methylcytidine
  modified_base 4: mod_base = OTHER; note = 2'-fluorocytidine
  modified_base 5: mod_base = OTHER; note = 2'-O-methyluridine
  modified_base 6: mod_base = OTHER; note = 2'-fluorocytidine
  modified_base 7: mod_base = OTHER; note = 2'-O-methyluridine
  modified_base 8: mod_base = OTHER; note = 2'-fluorocytidine
  modified_base 9: mod_base = OTHER; note = 2'-O-methylguanosine
  modified_base 10: mod_base = OTHER; note = 2'-fluorocytidine
  modified_base 11: mod_base = OTHER; note = 2'-O-methyluridine
  modified_base 12: mod_base = OTHER; note = 2'-fluorocytidine
  modified_base 13: mod_base = OTHER; note = 2'-O-methyluridine
  modified_base 14: mod_base = OTHER; note = 2'-fluorocytidine
  modified_base 15: mod_base = OTHER; note = 2'-O-methylcytidine
  modified_base 16: mod_base = OTHER; note = 2'-fluoroguanosine
  modified_base 17: mod_base = OTHER; note = 2'-O-methyluridine
  modified_base 18: mod_base = OTHER; note = 2'-fluorocytidine
  modified_base 19: mod_base = OTHER; note = 2'-O-methyladenosine
  modified_base 20: mod_base = OTHER; note = 2'-fluoroguanosine
  modified_base 21: mod_base = OTHER; note = 2'-O-methylcytidine with phosphorothioate linkage
  modified_base 22: mod_base = OTHER; note = 2'-fluorouridine with phosphorothioate linkage
  modified_base 23: mod_base = OTHER; note = 2'-O-methylcytidine
accctctcgctctccgtcagctc

SEQ ID NO: 1284 - RNA, 23 nt, synthetic construct
  source 1..23: mol_type = other RNA
  modified_base 1: mod_base = OTHER; note = 5'-(E)-vinylphosphonate 2'-O-methylated adenosine with phosphorothioate linkage
  modified_base 2: mod_base = OTHER; note = 2'-fluoroadenosine with phosphorothioate linkage
  modified_base 3: mod_base = OTHER; note = 2'-O-methylcytidine
  modified_base 4: mod_base = OTHER; note = 2'-fluorocytidine
  modified_base 5: mod_base = OTHER; note = 2'-O-methylcytidine
  modified_base 6: mod_base = OTHER; note = 2'-fluorouridine
  modified_base 7: mod_base = OTHER; note = 2'-O-methylcytidine
  modified_base 8: mod_base = OTHER; note = 2'-fluorouridine
  modified_base 9: mod_base = OTHER; note = 2'-O-methylcytidine
  modified_base 10: mod_base = OTHER; note = 2'-fluoroguanosine
  modified_base 11: mod_base = OTHER; note = 2'-O-methylcytidine
  modified_base 12: mod_base = OTHER; note = 2'-fluorouridine
  modified_base 13: mod_base = OTHER; note = 2'-O-methylcytidine
  modified_base 14: mod_base = OTHER; note = 2'-fluorouridine
  modified_base 15: mod_base = OTHER; note = 2'-O-methylcytidine
  modified_base 16: mod_base = OTHER; note = 2'-fluorocytidine
  modified_base 17: mod_base = OTHER; note = 2'-O-methylguanosine
  modified_base 18: mod_base = OTHER; note = 2'-fluorouridine
  modified_base 19: mod_base = OTHER; note = 2'-O-methylcytidine
  modified_base 20: mod_base = OTHER; note = 2'-fluoroadenosine
  modified_base 21: mod_base = OTHER; note = 2'-O-methylguanosine with phosphorothioate linkage
  modified_base 22: mod_base = OTHER; note = 2'-fluorocytidine with phosphorothioate linkage
  modified_base 23: mod_base = OTHER; note = 2'-O-methyluridine
aaccctctcgctctccgtcagct

SEQ ID NO: 1285 - RNA, 23 nt, synthetic construct
  source 1..23: mol_type = other RNA
  modified_base 1: mod_base = OTHER; note = 5'-(E)-vinylphosphonate 2'-O-methylated guanosine with phosphorothioate linkage
  modified_base 2: mod_base = OTHER; note = 2'-fluorocytidine with phosphorothioate linkage
  modified_base 3: mod_base = OTHER; note = 2'-O-methylcytidine
  modified_base 4: mod_base = OTHER; note = 2'-fluorouridine
  modified_base 5: mod_base = OTHER; note = 2'-O-methylcytidine
  modified_base 6: mod_base = OTHER; note = 2'-fluoroguanosine
  modified_base 7: mod_base = OTHER; note = 2'-O-methylcytidine
  modified_base 8: mod_base = OTHER; note = 2'-fluorouridine
  modified_base 9: mod_base = OTHER; note = 2'-O-methylguanosine
  modified_base 10: mod_base = OTHER; note = 2'-fluoroadenosine
  modified_base 11: mod_base = OTHER; note = 2'-O-methyladenosine
  modified_base 12: mod_base = OTHER; note = 2'-fluoroguanosine
  modified_base 13: mod_base = OTHER; note = 2'-O-methyluridine
  modified_base 14: mod_base = OTHER; note = 2'-fluoroguanosine
  modified_base 15: mod_base = OTHER; note = 2'-O-methylcytidine
  modified_base 16: mod_base = OTHER; note = 2'-fluorouridine
  modified_base 17: mod_base = OTHER; note = 2'-O-methylguanosine
  modified_base 18: mod_base = OTHER; note = 2'-fluorocytidine
  modified_base 19: mod_base = OTHER; note = 2'-O-methyladenosine
  modified_base 20: mod_base = OTHER; note = 2'-fluorouridine
  modified_base 21: mod_base = OTHER; note = 2'-O-methylguanosine with phosphorothioate linkage
  modified_base 22: mod_base = OTHER; note = 2'-fluoroguanosine with phosphorothioate linkage
  modified_base 23: mod_base = OTHER; note = 2'-O-methyladenosine
gcctcgctgaagtgctgcatgga

SEQ ID NO: 1286 - RNA, 23 nt, synthetic construct
  source 1..23: mol_type = other RNA
  modified_base 1: mod_base = OTHER; note = 5'-(E)-vinylphosphonate 2'-O-methylated adenosine with phosphorothioate linkage
  modified_base 2: mod_base = OTHER; note = 2'-fluoroguanosine with phosphorothioate linkage
  modified_base 3: mod_base = OTHER; note = 2'-O-methylguanosine
  modified_base 4: mod_base = OTHER; note = 2'-fluorocytidine
  modified_base 5: mod_base = OTHER; note = 2'-O-methylcytidine
  modified_base 6: mod_base = OTHER; note = 2'-fluorouridine
  modified_base 7: mod_base = OTHER; note = 2'-O-methylcytidine
  modified_base 8: mod_base = OTHER; note = 2'-fluoroguanosine
  modified_base 9: mod_base = OTHER; note = 2'-O-methylcytidine
  modified_base 10: mod_base = OTHER; note = 2'-fluorouridine
  modified_base 11: mod_base = OTHER; note = 2'-O-methylguanosine
  modified_base 12: mod_base = OTHER; note = 2'-fluoroadenosine
  modified_base 13: mod_base = OTHER; note = 2'-O-methyladenosine
  modified_base 14: mod_base = OTHER; note = 2'-fluoroguanosine
  modified_base 15: mod_base = OTHER; note = 2'-O-methyluridine
  modified_base 16: mod_base = OTHER; note = 2'-fluoroguanosine
  modified_base 17: mod_base = OTHER; note = 2'-O-methylcytidine
  modified_base 18: mod_base = OTHER; note = 2'-fluorouridine
  modified_base 19: mod_base = OTHER; note = 2'-O-methylguanosine
  modified_base 20: mod_base = OTHER; note = 2'-fluorocytidine
  modified_base 21: mod_base = OTHER; note = 2'-O-methyladenosine with phosphorothioate linkage
  modified_base 22: mod_base = OTHER; note = 2'-fluorouridine with phosphorothioate linkage
  modified_base 23: mod_base = OTHER; note = 2'-O-methylguanosine
aggcctcgctgaagtgctgcatg

SEQ ID NO: 1287 - RNA, 23 nt, synthetic construct
  source 1..23: mol_type = other RNA
  modified_base 1: mod_base = OTHER; note = 5'-(E)-vinylphosphonate 2'-O-methylated adenosine with phosphorothioate linkage
  modified_base 2: mod_base = OTHER; note = 2'-fluorocytidine with phosphorothioate linkage
  modified_base 3: mod_base = OTHER; note = 2'-O-methyluridine
  modified_base 4: mod_base = OTHER; note = 2'-fluoroguanosine
  modified_base 5: mod_base = OTHER; note = 2'-O-methylguanosine
  modified_base 6: mod_base = OTHER; note = 2'-fluorouridine
  modified_base 7: mod_base = OTHER; note = 2'-O-methylguanosine
  modified_base 8: mod_base = OTHER; note = 2'-fluoroguanosine
  modified_base 9: mod_base = OTHER; note = 2'-O-methyladenosine
  modified_base 10: mod_base = OTHER; note = 2'-fluoroadenosine
  modified_base 11: mod_base = OTHER; note = 2'-O-methylguanosine
  modified_base 12: mod_base = OTHER; note = 2'-fluoroguanosine
  modified_base 13: mod_base = OTHER; note = 2'-O-methylcytidine
  modified_base 14: mod_base = OTHER; note = 2'-fluorocytidine
  modified_base 15: mod_base = OTHER; note = 2'-O-methyluridine
  modified_base 16: mod_base = OTHER; note = 2'-fluorocytidine
  modified_base 17: mod_base = OTHER; note = 2'-O-methylguanosine
  modified_base 18: mod_base = OTHER; note = 2'-fluorocytidine
  modified_base 19: mod_base = OTHER; note = 2'-O-methyluridine
  modified_base 20: mod_base = OTHER; note = 2'-fluoroguanosine
  modified_base 21: mod_base = OTHER; note = 2'-O-methyladenosine with phosphorothioate linkage
  modified_base 22: mod_base = OTHER; note = 2'-fluoroadenosine with phosphorothioate linkage
  modified_base 23: mod_base = OTHER; note = 2'-O-methylguanosine
actggtggaaggcctcgctgaag

SEQ ID NO: 1288 - RNA, 23 nt, synthetic construct
  source 1..23: mol_type = other RNA
  modified_base 1: mod_base = OTHER; note = 5'-(E)-vinylphosphonate 2'-O-methylated adenosine with phosphorothioate linkage
  modified_base 2: mod_base = OTHER; note = 2'-fluoroadenosine with phosphorothioate linkage
  modified_base 3: mod_base = OTHER; note = 2'-O-methylguanosine
  modified_base 4: mod_base = OTHER; note = 2'-fluorouridine
  modified_base 5: mod_base = OTHER; note = 2'-O-methylguanosine
  modified_base 6: mod_base = OTHER; note = 2'-fluorocytidine
  modified_base 7: mod_base = OTHER; note = 2'-O-methylcytidine
  modified_base 8: mod_base = OTHER; note = 2'-fluoroadenosine
  modified_base 9: mod_base = OTHER; note = 2'-O-methyluridine
  modified_base 10: mod_base = OTHER; note = 2'-fluorocytidine
  modified_base 11: mod_base = OTHER; note = 2'-O-methylguanosine
  modified_base 12: mod_base = OTHER; note = 2'-fluorouridine
  modified_base 13: mod_base = OTHER; note = 2'-O-methylcytidine
  modified_base 14: mod_base = OTHER; note = 2'-fluorouridine
  modified_base 15: mod_base = OTHER; note = 2'-O-methyladenosine
  modified_base 16: mod_base = OTHER; note = 2'-fluorouridine
  modified_base 17: mod_base = OTHER; note = 2'-O-methylguanosine
  modified_base 18: mod_base = OTHER; note = 2'-fluorocytidine
  modified_base 19: mod_base = OTHER; note = 2'-O-methylguanosine
  modified_base 20: mod_base = OTHER; note = 2'-fluoroguanosine
  modified_base 21: mod_base = OTHER; note = 2'-O-methyluridine with phosphorothioate linkage
  modified_base 22: mod_base = OTHER; note = 2'-fluorocytidine with phosphorothioate linkage
  modified_base 23: mod_base = OTHER; note = 2'-O-methylcytidine
aagtgccatcgtctatgcggtcc

SEQ ID NO: 1289 - RNA, 23 nt, synthetic construct
  source 1..23: mol_type = other RNA
  modified_base 1: mod_base = OTHER; note = 5'-(E)-vinylphosphonate 2'-O-methylated adenosine with phosphorothioate linkage
  modified_base 2: mod_base = OTHER; note = 2'-fluoroadenosine with phosphorothioate linkage
  modified_base 3: mod_base = OTHER; note = 2'-O-methylcytidine
  modified_base 4: mod_base = OTHER; note = 2'-fluoroadenosine
  modified_base 5: mod_base = OTHER; note = 2'-O-methylguanosine
  modified_base 6: mod_base = OTHER; note = 2'-fluorouridine
  modified_base 7: mod_base = OTHER; note = 2'-O-methylguanosine
  modified_base 8: mod_base = OTHER; note = 2'-fluorocytidine
  modified_base 9: mod_base = OTHER; note = 2'-O-methylcytidine
  modified_base 10: mod_base = OTHER; note = 2'-fluoroadenosine
  modified_base 11: mod_base = OTHER; note = 2'-O-methyluridine
  modified_base 12: mod_base = OTHER; note = 2'-fluorocytidine
  modified_base 13: mod_base = OTHER; note = 2'-O-methylguanosine
  modified_base 14: mod_base = OTHER; note = 2'-fluorouridine
  modified_base 15: mod_base = OTHER; note = 2'-O-methylcytidine
  modified_base 16: mod_base = OTHER; note = 2'-fluorouridine
  modified_base 17: mod_base = OTHER; note = 2'-O-methyladenosine
  modified_base 18: mod_base = OTHER; note = 2'-fluorouridine
  modified_base 19: mod_base = OTHER; note = 2'-O-methylguanosine
  modified_base 20: mod_base = OTHER; note = 2'-fluorocytidine
  modified_base 21: mod_base = OTHER; note = 2'-O-methylguanosine with phosphorothioate linkage
  modified_base 22: mod_base = OTHER; note = 2'-fluoroguanosine with phosphorothioate linkage
  modified_base 23: mod_base = OTHER; note = 2'-O-methyluridine
aacagtgccatcgtctatgcggt

SEQ ID NO: 1290 - RNA, 23 nt, synthetic construct
  source 1..23: mol_type = other RNA
  modified_base 1: mod_base = OTHER; note = 5'-(E)-vinylphosphonate 2'-O-methylated uridine with phosphorothioate linkage
  modified_base 2: mod_base = OTHER; note = 2'-fluorouridine with phosphorothioate linkage
  modified_base 3: mod_base = OTHER; note = 2'-O-methyladenosine
  modified_base 4: mod_base = OTHER; note = 2'-fluoroadenosine
  modified_base 5: mod_base = OTHER; note = 2'-O-methylcytidine
  modified_base 6: mod_base = OTHER; note = 2'-fluoroadenosine
  modified_base 7: mod_base = OTHER; note = 2'-O-methylguanosine
  modified_base 8: mod_base = OTHER; note = 2'-fluorouridine
  modified_base 9: mod_base = OTHER; note = 2'-O-methylguanosine
  modified_base 10: mod_base = OTHER; note = 2'-fluorocytidine
  modified_base 11: mod_base = OTHER; note = 2'-O-methylcytidine
  modified_base 12: mod_base = OTHER; note = 2'-fluoroadenosine
  modified_base 13: mod_base = OTHER; note = 2'-O-methyluridine
  modified_base 14: mod_base = OTHER; note = 2'-fluorocytidine
  modified_base 15: mod_base = OTHER; note = 2'-O-methylguanosine
  modified_base 16: mod_base = OTHER; note = 2'-fluorouridine
  modified_base 17: mod_base = OTHER; note = 2'-O-methylcytidine
  modified_base 18: mod_base = OTHER; note = 2'-fluorouridine
  modified_base 19: mod_base = OTHER; note = 2'-O-methyladenosine
  modified_base 20: mod_base = OTHER; note = 2'-fluorouridine
  modified_base 21: mod_base = OTHER; note = 2'-O-methylguanosine with phosphorothioate linkage
  modified_base 22: mod_base = OTHER; note = 2'-fluorocytidine with phosphorothioate linkage
  modified_base 23: mod_base = OTHER; note = 2'-O-methylguanosine
ttaacagtgccatcgtctatgcg

SEQ ID NO: 1291 - RNA, 23 nt, synthetic construct
  source 1..23: mol_type = other RNA
  modified_base 1: mod_base = OTHER; note = 5'-(E)-vinylphosphonate 2'-O-methylated guanosine with phosphorothioate linkage
  modified_base 2: mod_base = OTHER; note = 2'-fluoroadenosine with phosphorothioate linkage
  modified_base 3: mod_base = OTHER; note = 2'-O-methyladenosine
  modified_base 4: mod_base = OTHER; note = 2'-fluoroguanosine
  modified_base 5: mod_base = OTHER; note = 2'-O-methylguanosine
  modified_base 6: mod_base = OTHER; note = 2'-fluoroguanosine
  modified_base 7: mod_base = OTHER; note = 2'-O-methyladenosine
  modified_base 8: mod_base = OTHER; note = 2'-fluorouridine
  modified_base 9: mod_base = OTHER; note = 2'-O-methylcytidine
  modified_base 10: mod_base = OTHER; note = 2'-fluorouridine
  modified_base 11: mod_base = OTHER; note = 2'-O-methyluridine
  modified_base 12: mod_base = OTHER; note = 2'-fluorouridine
  modified_base 13: mod_base = OTHER; note = 2'-O-methylguanosine
  modified_base 14: mod_base = OTHER; note = 2'-fluoroadenosine
  modified_base 15: mod_base = OTHER; note = 2'-O-methylguanosine
  modified_base 16: mod_base = OTHER; note = 2'-fluorocytidine
  modified_base 17: mod_base = OTHER; note = 2'-O-methyluridine
  modified_base 18: mod_base = OTHER; note = 2'-fluoroguanosine
  modified_base 19: mod_base = OTHER; note = 2'-O-methylcytidine
  modified_base 20: mod_base = OTHER; note = 2'-fluorocytidine
  modified_base 21: mod_base = OTHER; note = 2'-O-methyluridine with phosphorothioate linkage
  modified_base 22: mod_base = OTHER; note = 2'-fluoroguanosine with phosphorothioate linkage
  modified_base 23: mod_base = OTHER; note = 2'-O-methylguanosine
gaagggatctttgagctgcctgg

SEQ ID NO: 1292 - RNA, 23 nt, synthetic construct
  source 1..23: mol_type = other RNA
  modified_base 1: mod_base = OTHER; note = 5'-(E)-vinylphosphonate 2'-O-methylated guanosine with phosphorothioate linkage
  modified_base 2: mod_base = OTHER; note = 2'-fluoroguanosine with phosphorothioate linkage
  modified_base 3: mod_base = OTHER; note = 2'-O-methyladenosine
  modified_base 4: mod_base = OTHER; note = 2'-fluoroadenosine
  modified_base 5: mod_base = OTHER; note = 2'-O-methylguanosine
  modified_base 6: mod_base = OTHER; note = 2'-fluoroguanosine
  modified_base 7: mod_base = OTHER; note = 2'-O-methylguanosine
  modified_base 8: mod_base = OTHER; note = 2'-fluoroadenosine
  modified_base 9: mod_base = OTHER; note = 2'-O-methyluridine
  modified_base 10: mod_base = OTHER; note = 2'-fluorocytidine
  modified_base 11: mod_base = OTHER; note = 2'-O-methyluridine
  modified_base 12: mod_base = OTHER; note = 2'-fluorouridine
  modified_base 13: mod_base = OTHER; note = 2'-O-methyluridine
  modified_base 14: mod_base = OTHER; note = 2'-fluoroguanosine
  modified_base 15: mod_base = OTHER; note = 2'-O-methyladenosine
  modified_base 16: mod_base = OTHER; note = 2'-fluoroguanosine
  modified_base 17: mod_base = OTHER; note = 2'-O-methylcytidine
  modified_base 18: mod_base = OTHER; note = 2'-fluorouridine
  modified_base 19: mod_base = OTHER; note = 2'-O-methylguanosine
  modified_base 20: mod_base = OTHER; note = 2'-fluorocytidine
  modified_base 21: mod_base = OTHER; note = 2'-O-methylcytidine with phosphorothioate linkage
  modified_base 22: mod_base = OTHER; note = 2'-fluorouridine with phosphorothioate linkage
  modified_base 23: mod_base = OTHER; note = 2'-O-methylguanosine
ggaagggatctttgagctgcctg

SEQ ID NO: 1293 - RNA, 23 nt, synthetic construct
  source 1..23: mol_type = other RNA
  modified_base 1: mod_base = OTHER; note = 5'-(E)-vinylphosphonate 2'-O-methylated adenosine with phosphorothioate linkage
  modified_base 2: mod_base = OTHER; note = 2'-fluoroguanosine with phosphorothioate linkage
  modified_base 3: mod_base = OTHER; note = 2'-O-methylguanosine
  modified_base 4: mod_base = OTHER; note = 2'-fluoroadenosine
  modified_base 5: mod_base = OTHER; note = 2'-O-methyladenosine
  modified_base 6: mod_base = OTHER; note = 2'-fluoroguanosine
  modified_base 7: mod_base = OTHER; note = 2'-O-methylguanosine
  modified_base 8: mod_base = OTHER; note = 2'-fluoroguanosine
  modified_base 9: mod_base = OTHER; note = 2'-O-methyladenosine
  modified_base 10: mod_base = OTHER; note = 2'-fluorouridine
  modified_base 11: mod_base = OTHER; note = 2'-O-methylcytidine
  modified_base 12: mod_base = OTHER; note = 2'-fluorouridine
  modified_base 13: mod_base = OTHER; note = 2'-O-methyluridine
  modified_base 14: mod_base = OTHER; note = 2'-fluorouridine
  modified_base 15: mod_base = OTHER; note = 2'-O-methylguanosine
  modified_base 16: mod_base = OTHER; note = 2'-fluoroadenosine
  modified_base 17: mod_base = OTHER; note = 2'-O-methylguanosine
  modified_base 18: mod_base = OTHER; note = 2'-fluorocytidine
  modified_base 19: mod_base = OTHER; note = 2'-O-methyluridine
  modified_base 20: mod_base = OTHER; note = 2'-fluoroguanosine
  modified_base 21: mod_base = OTHER; note = 2'-O-methylcytidine with phosphorothioate linkage
  modified_base 22: mod_base = OTHER; note = 2'-fluorocytidine with phosphorothioate linkage
  modified_base 23: mod_base = OTHER; note = 2'-O-methyluridine
aggaagggatctttgagctgcct

SEQ ID NO: 1294 - RNA, 23 nt, synthetic construct
  source 1..23: mol_type = other RNA
  modified_base 1: mod_base = OTHER; note = 5'-(E)-vinylphosphonate 2'-O-methylated guanosine with phosphorothioate linkage
  modified_base 2: mod_base = OTHER; note = 2'-fluorocytidine with phosphorothioate linkage
  modified_base 3: mod_base = OTHER; note = 2'-O-methylguanosine
  modified_base 4: mod_base = OTHER; note = 2'-fluoroadenosine
  modified_base 5: mod_base = OTHER; note = 2'-O-methyluridine
  modified_base 6: mod_base = OTHER; note = 2'-fluorouridine
  modified_base 7: mod_base = OTHER; note = 2'-O-methylguanosine
  modified_base 8: mod_base = OTHER; note = 2'-fluorouridine
  modified_base 9: mod_base = OTHER; note = 2'-O-methylcytidine
  modified_base 10: mod_base = OTHER; note = 2'-fluorouridine
  modified_base 11: mod_base = OTHER; note = 2'-O-methylguanosine
  modified_base 12: mod_base = OTHER; note = 2'-fluoroguanosine
  modified_base 13: mod_base = OTHER; note = 2'-O-methyladenosine
  modified_base 14: mod_base = OTHER; note = 2'-fluoroguanosine
  modified_base 15: mod_base = OTHER; note = 2'-O-methyluridine
  modified_base 16: mod_base = OTHER; note = 2'-fluorocytidine
  modified_base 17: mod_base = OTHER; note = 2'-O-methyluridine
  modified_base 18: mod_base = OTHER; note = 2'-fluorocytidine
  modified_base 19: mod_base = OTHER; note = 2'-O-methylcytidine
  modified_base 20: mod_base = OTHER; note = 2'-fluoroguanosine
  modified_base 21: mod_base = OTHER; note = 2'-O-methyladenosine with phosphorothioate linkage
  modified_base 22: mod_base = OTHER; note = 2'-fluoroadenosine with phosphorothioate linkage
  modified_base 23: mod_base = OTHER; note = 2'-O-methylguanosine
gcgattgtctggagtctccgaag

SEQ ID NO: 1295 - RNA, 23 nt, synthetic construct
  source 1..23: mol_type = other RNA
  modified_base 1: mod_base = OTHER; note = 5'-(E)-vinylphosphonate 2'-O-methylated guanosine with phosphorothioate linkage
  modified_base 2: mod_base = OTHER; note = 2'-fluoroguanosine with phosphorothioate linkage
  modified_base 3: mod_base = OTHER; note = 2'-O-methylcytidine
  modified_base 4: mod_base = OTHER; note = 2'-fluoroguanosine
  modified_base 5: mod_base = OTHER; note = 2'-O-methyladenosine
  modified_base 6: mod_base = OTHER; note = 2'-fluorouridine
  modified_base 7: mod_base = OTHER; note = 2'-O-methyluridine
  modified_base 8: mod_base = OTHER; note = 2'-fluoroguanosine
  modified_base 9: mod_base = OTHER; note = 2'-O-methyluridine
  modified_base 10: mod_base = OTHER; note = 2'-fluorocytidine
  modified_base 11: mod_base = OTHER; note = 2'-O-methyluridine
  modified_base 12: mod_base = OTHER; note = 2'-fluoroguanosine
  modified_base 13: mod_base = OTHER; note = 2'-O-methylguanosine
  modified_base 14: mod_base = OTHER; note = 2'-fluoroadenosine
  modified_base 15: mod_base = OTHER; note = 2'-O-methylguanosine
  modified_base 16: mod_base = OTHER; note = 2'-fluorouridine
  modified_base 17: mod_base = OTHER; note = 2'-O-methylcytidine
  modified_base 18: mod_base = OTHER; note = 2'-fluorouridine
  modified_base 19: mod_base = OTHER; note = 2'-O-methylcytidine
  modified_base 20: mod_base = OTHER; note = 2'-fluorocytidine
  modified_base 21: mod_base = OTHER; note = 2'-O-methylguanosine with phosphorothioate linkage
  modified_base 22: mod_base = OTHER; note = 2'-fluoroadenosine with phosphorothioate linkage
  modified_base 23: mod_base = OTHER; note = 2'-O-methyladenosine
ggcgattgtctggagtctccgaa

SEQ ID NO: 1296 - RNA, 23 nt, synthetic construct
  source 1..23: mol_type = other RNA
  modified_base 1: mod_base = OTHER; note = 5'-(E)-vinylphosphonate 2'-O-methylated adenosine with phosphorothioate linkage
  modified_base 2: mod_base = OTHER; note = 2'-fluoroguanosine with phosphorothioate linkage
  modified_base 3: mod_base = OTHER; note = 2'-O-methylguanosine
  modified_base 4: mod_base = OTHER; note = 2'-fluorocytidine
  modified_base 5: mod_base = OTHER; note = 2'-O-methylguanosine
  modified_base 6: mod_base = OTHER; note = 2'-fluoroadenosine
  modified_base 7: mod_base = OTHER; note = 2'-O-methyluridine
  modified_base 8: mod_base = OTHER; note = 2'-fluorouridine
  modified_base 9: mod_base = OTHER; note = 2'-O-methylguanosine
  modified_base 10: mod_base = OTHER; note = 2'-fluorouridine
  modified_base 11: mod_base = OTHER; note = 2'-O-methylcytidine
  modified_base 12: mod_base = OTHER; note = 2'-fluorouridine
  modified_base 13: mod_base = OTHER; note = 2'-O-methylguanosine
  modified_base 14: mod_base = OTHER; note = 2'-fluoroguanosine
  modified_base 15: mod_base = OTHER; note = 2'-O-methyladenosine
  modified_base 16: mod_base = OTHER; note = 2'-fluoroguanosine
  modified_base 17: mod_base = OTHER; note = 2'-O-methyluridine
  modified_base 18: mod_base = OTHER; note = 2'-fluorocytidine
  modified_base 19: mod_base = OTHER; note = 2'-O-methyluridine
  modified_base 20: mod_base = OTHER; note = 2'-fluorocytidine
  modified_base 21: mod_base = OTHER; note = 2'-O-methylcytidine with phosphorothioate linkage
  modified_base 22: mod_base = OTHER; note = 2'-fluoroguanosine with phosphorothioate linkage
  modified_base 23: mod_base = OTHER; note = 2'-O-methyladenosine
aggcgattgtctggagtctccga

SEQ ID NO: 1297 - RNA, 23 nt, synthetic construct
  source 1..23: mol_type = other RNA
  modified_base 1: mod_base = OTHER; note = 5'-(E)-vinylphosphonate 2'-O-methylated adenosine with phosphorothioate linkage
  modified_base 2: mod_base = OTHER; note = 2'-fluoroadenosine with phosphorothioate linkage
  modified_base 3: mod_base = OTHER; note = 2'-O-methylguanosine
  modified_base 4: mod_base = OTHER; note = 2'-fluoroguanosine
  modified_base 5: mod_base = OTHER; note = 2'-O-methylcytidine
  modified_base 6: mod_base = OTHER; note = 2'-fluoroguanosine
  modified_base 7: mod_base = OTHER; note = 2'-O-methyladenosine
  modified_base 8: mod_base = OTHER; note = 2'-fluorouridine
  modified_base 9: mod_base = OTHER; note = 2'-O-methyluridine
  modified_base 10: mod_base = OTHER; note = 2'-fluoroguanosine
  modified_base 11: mod_base = OTHER; note = 2'-O-methyluridine
  modified_base 12: mod_base = OTHER; note = 2'-fluorocytidine
  modified_base 13: mod_base = OTHER; note = 2'-O-methyluridine
  modified_base 14: mod_base = OTHER; note = 2'-fluoroguanosine
  modified_base 15: mod_base = OTHER; note = 2'-O-methylguanosine
  modified_base 16: mod_base = OTHER; note = 2'-fluoroadenosine
  modified_base 17: mod_base = OTHER; note = 2'-O-methylguanosine
  modified_base 18: mod_base = OTHER; note = 2'-fluorouridine
  modified_base 19: mod_base = OTHER; note = 2'-O-methylcytidine
  modified_base 20: mod_base = OTHER; note = 2'-fluorouridine
  modified_base 21: mod_base = OTHER; note = 2'-O-methylcytidine with phosphorothioate linkage
  modified_base 22: mod_base = OTHER; note = 2'-fluorocytidine with phosphorothioate linkage
  modified_base 23: mod_base = OTHER; note = 2'-O-methylguanosine
aaggcgattgtctggagtctccg

SEQ ID NO: 1298 - RNA, 23 nt, synthetic construct
  source 1..23: mol_type = other RNA
  modified_base 1: mod_base = OTHER; note = 5'-(E)-vinylphosphonate 2'-O-methylated adenosine with phosphorothioate linkage
  modified_base 2: mod_base = OTHER; note = 2'-fluoroadenosine with phosphorothioate linkage
  modified_base 3: mod_base = OTHER; note = 2'-O-methyladenosine
  modified_base 4: mod_base = OTHER; note = 2'-fluoroguanosine
  modified_base 5: mod_base = OTHER; note = 2'-O-methylguanosine
  modified_base 6: mod_base = OTHER; note = 2'-fluorocytidine
  modified_base 7: mod_base = OTHER; note = 2'-O-methylguanosine
  modified_base 8: mod_base = OTHER; note = 2'-fluoroadenosine
  modified_base 9: mod_base = OTHER; note = 2'-O-methyluridine
  modified_base 10: mod_base = OTHER; note = 2'-fluorouridine
  modified_base 11: mod_base = OTHER; note = 2'-O-methylguanosine
  modified_base 12: mod_base = OTHER; note = 2'-fluorouridine
  modified_base 13: mod_base = OTHER; note = 2'-O-methylcytidine
  modified_base 14: mod_base = OTHER; note = 2'-fluorouridine
  modified_base 15: mod_base = OTHER; note = 2'-O-methylguanosine
  modified_base 16: mod_base = OTHER; note = 2'-fluoroguanosine
  modified_base 17: mod_base = OTHER; note = 2'-O-methyladenosine
  modified_base 18: mod_base = OTHER; note = 2'-fluoroguanosine
  modified_base 19: mod_base = OTHER; note = 2'-O-methyluridine
  modified_base 20: mod_base = OTHER; note = 2'-fluorocytidine
  modified_base 21: mod_base = OTHER; note = 2'-O-methyluridine with phosphorothioate linkage
  modified_base 22: mod_base = OTHER; note = 2'-fluorocytidine with phosphorothioate linkage
  modified_base 23: mod_base = OTHER; note = 2'-O-methylcytidine
aaaggcgattgtctggagtctcc

SEQ ID NO: 1299 - RNA, 23 nt, synthetic construct
  source 1..23: mol_type = other RNA
  modified_base 1: mod_base = OTHER; note = 5'-(E)-vinylphosphonate 2'-O-methylated adenosine with phosphorothioate linkage
  modified_base 2: mod_base = OTHER; note = 2'-fluoroadenosine with phosphorothioate linkage
  modified_base 3: mod_base = OTHER; note = 2'-O-methyladenosine
  modified_base 4: mod_base = OTHER; note = 2'-fluoroadenosine
  modified_base 5: mod_base = OTHER; note = 2'-O-methylguanosine
  modified_base 6: mod_base = OTHER; note = 2'-fluoroguanosine
  modified_base 7: mod_base = OTHER; note = 2'-O-methylcytidine
  modified_base 8: mod_base = OTHER; note = 2'-fluoroguanosine
  modified_base 9: mod_base = OTHER; note = 2'-O-methyladenosine
  modified_base 10: mod_base = OTHER; note = 2'-fluorouridine
  modified_base 11: mod_base = OTHER; note = 2'-O-methyluridine
  modified_base 12: mod_base = OTHER; note = 2'-fluoroguanosine
  modified_base 13: mod_base = OTHER; note = 2'-O-methyluridine
  modified_base 14: mod_base = OTHER; note = 2'-fluorocytidine
  modified_base 15: mod_base = OTHER; note = 2'-O-methyluridine
  modified_base 16: mod_base = OTHER; note = 2'-fluoroguanosine
  modified_base 17: mod_base = OTHER; note = 2'-O-methylguanosine
  modified_base 18: mod_base = OTHER; note = 2'-fluoroadenosine
  modified_base 19: mod_base = OTHER; note = 2'-O-methylguanosine
  modified_base 20: mod_base = OTHER; note = 2'-fluorouridine
  modified_base 21: mod_base = OTHER; note = 2'-O-methylcytidine with phosphorothioate linkage
  modified_base 22: mod_base = OTHER; note = 2'-fluorouridine with phosphorothioate linkage
  modified_base 23: mod_base = OTHER; note = 2'-O-methylcytidine
aaaaggcgattgtctggagtctc

SEQ ID NO: 1300 - RNA, 23 nt, synthetic construct
  source 1..23: mol_type = other RNA
  modified_base 1: mod_base = OTHER; note = 5'-(E)-vinylphosphonate 2'-O-methylated adenosine with phosphorothioate linkage
  modified_base 2: mod_base = OTHER; note = 2'-fluoroadenosine with phosphorothioate linkage
  modified_base 3: mod_base = OTHER; note = 2'-O-methyladenosine
  modified_base 4: mod_base = OTHER; note = 2'-fluoroadenosine
  modified_base 5: mod_base = OTHER; note = 2'-O-methyladenosine
  modified_base 6: mod_base = OTHER; note = 2'-fluoroguanosine
  modified_base 7: mod_base = OTHER; note = 2'-O-methylguanosine
  modified_base 8: mod_base = OTHER; note = 2'-fluorocytidine
  modified_base 9: mod_base = OTHER; note = 2'-O-methylguanosine
  modified_base 10: mod_base = OTHER; note = 2'-fluoroadenosine
  modified_base 11: mod_base = OTHER; note = 2'-O-methyluridine
  modified_base 12: mod_base = OTHER; note = 2'-fluorouridine
  modified_base 13: mod_base = OTHER; note = 2'-O-methylguanosine
  modified_base 14: mod_base = OTHER; note = 2'-fluorouridine
  modified_base 15: mod_base = OTHER; note = 2'-O-methylcytidine
  modified_base 16: mod_base = OTHER; note = 2'-fluorouridine
  modified_base 17: mod_base = OTHER; note = 2'-O-methylguanosine
  modified_base 18: mod_base = OTHER; note = 2'-fluoroguanosine
  modified_base 19: mod_base = OTHER; note = 2'-O-methyladenosine
  modified_base 20: mod_base = OTHER; note = 2'-fluoroguanosine
  modified_base 21: mod_base = OTHER; note = 2'-O-methyluridine with phosphorothioate linkage
  modified_base 22: mod_base = OTHER; note = 2'-fluorocytidine with phosphorothioate linkage
  modified_base 23: mod_base = OTHER; note = 2'-O-methyluridine
aaaaaggcgattgtctggagtct

SEQ ID NO: 1301 - RNA, 23 nt, synthetic construct
  source 1..23: mol_type = other RNA
  modified_base 1: mod_base = OTHER; note = 5'-(E)-vinylphosphonate 2'-O-methylated guanosine with phosphorothioate linkage
  modified_base 2: mod_base = OTHER; note = 2'-fluorocytidine with phosphorothioate linkage
  modified_base 3: mod_base = OTHER; note = 2'-O-methyladenosine
  modified_base 4: mod_base = OTHER; note = 2'-fluoroadenosine
  modified_base 5: mod_base = OTHER; note = 2'-O-methyladenosine
  modified_base 6: mod_base = OTHER; note = 2'-fluoroadenosine
  modified_base 7: mod_base = OTHER; note = 2'-O-methylguanosine
  modified_base 8: mod_base = OTHER; note = 2'-fluoroguanosine
  modified_base 9: mod_base = OTHER; note = 2'-O-methylcytidine
  modified_base 10: mod_base = OTHER; note = 2'-fluoroguanosine
  modified_base 11: mod_base = OTHER; note = 2'-O-methyladenosine
  modified_base 12: mod_base = OTHER; note = 2'-fluorouridine
  modified_base 13: mod_base = OTHER; note = 2'-O-methyluridine
  modified_base 14: mod_base = OTHER; note = 2'-fluoroguanosine
  modified_base 15: mod_base = OTHER; note = 2'-O-methyluridine
  modified_base 16: mod_base = OTHER; note = 2'-fluorocytidine
  modified_base 17: mod_base = OTHER; note = 2'-O-methyluridine
  modified_base 18: mod_base = OTHER; note = 2'-fluoroguanosine
  modified_base 19: mod_base = OTHER; note = 2'-O-methylguanosine
  modified_base 20: mod_base = OTHER; note = 2'-fluoroadenosine
  modified_base 21: mod_base = OTHER; note = 2'-O-methylguanosine with phosphorothioate linkage
  modified_base 22: mod_base = OTHER; note = 2'-fluorouridine with phosphorothioate linkage
  modified_base 23: mod_base = OTHER; note = 2'-O-methylcytidine
gcaaaaggcgattgtctggagtc

SEQ ID NO: 1302 - RNA, 23 nt, synthetic construct
  source 1..23: mol_type = other RNA
  modified_base 1: mod_base = OTHER; note = 5'-(E)-vinylphosphonate 2'-O-methylated adenosine with phosphorothioate linkage
  modified_base 2: mod_base = OTHER; note = 2'-fluoroguanosine with phosphorothioate linkage
  modified_base 3: mod_base = OTHER; note = 2'-O-methylguanosine
  modified_base 4: mod_base = OTHER; note = 2'-fluorocytidine
  modified_base 5: mod_base = OTHER; note = 2'-O-methyladenosine
  modified_base 6: mod_base = OTHER; note = 2'-fluoroadenosine
  modified_base 7: mod_base = OTHER; note = 2'-O-methyladenosine
  modified_base 8: mod_base = OTHER; note = 2'-fluoroadenosine
  modified_base 9: mod_base = OTHER; note = 2'-O-methylguanosine
  modified_base 10: mod_base = OTHER; note = 2'-fluoroguanosine
  modified_base 11: mod_base = OTHER; note = 2'-O-methylcytidine
  modified_base 12: mod_base = OTHER; note = 2'-fluoroguanosine
  modified_base 13: mod_base = OTHER; note = 2'-O-methyladenosine
  modified_base 14: mod_base = OTHER; note = 2'-fluorouridine
  modified_base 15: mod_base = OTHER; note = 2'-O-methyluridine
  modified_base 16: mod_base = OTHER; note = 2'-fluoroguanosine
  modified_base 17: mod_base = OTHER; note = 2'-O-methyluridine
  modified_base 18: mod_base = OTHER; note = 2'-fluorocytidine
  modified_base 19: mod_base = OTHER; note = 2'-O-methyluridine
  modified_base 20: mod_base = OTHER; note = 2'-fluoroguanosine
  modified_base 21: mod_base = OTHER; note = 2'-O-methylguanosine with phosphorothioate linkage
  modified_base 22: mod_base = OTHER; note = 2'-fluoroadenosine with phosphorothioate linkage
  modified_base 23: mod_base = OTHER; note = 2'-O-methylguanosine
aggcaaaaggcgattgtctggag

SEQ ID NO: 1303 - RNA, 23 nt, synthetic construct
  source 1..23: mol_type = other RNA
  modified_base 1: mod_base = OTHER; note = 5'-(E)-vinylphosphonate 2'-O-methylated guanosine with phosphorothioate linkage
  modified_base 2: mod_base = OTHER; note = 2'-fluoroadenosine with phosphorothioate linkage
  modified_base 3: mod_base = OTHER; note = 2'-O-methylguanosine
  modified_base 4: mod_base = OTHER; note = 2'-fluoroguanosine
  modified_base 5: mod_base = OTHER; note = 2'-O-methylcytidine
  modified_base 6: mod_base = OTHER; note = 2'-fluoroadenosine
  modified_base 7: mod_base = OTHER; note = 2'-O-methyladenosine
  modified_base 8: mod_base = OTHER; note = 2'-fluoroadenosine
  modified_base 9: mod_base = OTHER; note = 2'-O-methyladenosine
  modified_base 10: mod_base = OTHER; note = 2'-fluoroguanosine
  modified_base 11: mod_base = OTHER; note = 2'-O-methylguanosine
  modified_base 12: mod_base = OTHER; note = 2'-fluorocytidine
  modified_base 13: mod_base = OTHER; note = 2'-O-methylguanosine
  modified_base 14: mod_base = OTHER; note = 2'-fluoroadenosine
  modified_base 15: mod_base = OTHER; note = 2'-O-methyluridine
  modified_base 16: mod_base = OTHER; note = 2'-fluorouridine
  modified_base 17: mod_base = OTHER; note = 2'-O-methylguanosine
  modified_base 18: mod_base = OTHER; note = 2'-fluorouridine
  modified_base 19: mod_base = OTHER; note = 2'-O-methylcytidine
  modified_base 20: mod_base = OTHER; note = 2'-fluorouridine
  modified_base 21: mod_base = OTHER; note = 2'-O-methylguanosine with phosphorothioate linkage
  modified_base 22: mod_base = OTHER; note = 2'-fluoroguanosine with phosphorothioate linkage
  modified_base 23: mod_base = OTHER; note = 2'-O-methyladenosine
gaggcaaaaggcgattgtctgga

SEQ ID NO: 1304 - RNA, 23 nt, synthetic construct
  source 1..23: mol_type = other RNA
  modified_base 1: mod_base = OTHER; note = 5'-(E)-vinylphosphonate 2'-O-methylated adenosine with phosphorothioate linkage
  modified_base 2: mod_base = OTHER; note = 2'-fluorocytidine with phosphorothioate linkage
  modified_base 3: mod_base = OTHER; note = 2'-O-methyluridine
  modified_base 4: mod_base = OTHER; note = 2'-fluorocytidine
  modified_base 5: mod_base = OTHER; note = 2'-O-methyladenosine
  modified_base 6: mod_base = OTHER; note = 2'-fluorocytidine
  modified_base 7: mod_base = OTHER; note = 2'-O-methyladenosine
  modified_base 8: mod_base = OTHER; note = 2'-fluoroadenosine
  modified_base 9: mod_base = OTHER; note = 2'-O-methylguanosine
  modified_base 10: mod_base = OTHER; note = 2'-fluorouridine
  modified_base 11: mod_base = OTHER; note = 2'-O-methylguanosine
  modified_base 12: mod_base = OTHER; note = 2'-fluorouridine
  modified_base 13: mod_base = OTHER; note = 2'-O-methylcytidine
  modified_base 14: mod_base = OTHER; note = 2'-fluoroguanosine
  modified_base 15: mod_base = OTHER; note = 2'-O-methylcytidine
  modified_base 16: mod_base = OTHER; note = 2'-fluorouridine
  modified_base 17: mod_base = OTHER; note = 2'-O-methylguanosine
  modified_base 18: mod_base = OTHER; note = 2'-fluorocytidine
  modified_base 19: mod_base = OTHER; note = 2'-O-methylguanosine
  modified_base 20: mod_base = OTHER; note = 2'-fluorouridine
  modified_base 21: mod_base = OTHER; note = 2'-O-methylcytidine with phosphorothioate linkage
  modified_base 22: mod_base = OTHER; note = 2'-fluorouridine with phosphorothioate linkage
  modified_base 23: mod_base = OTHER; note = 2'-O-methylguanosine
actcacaagtgtcgctgcgtctg

SEQ ID NO: 1305 - RNA, 23 nt, synthetic construct
  source 1..23: mol_type = other RNA
  modified_base 1: mod_base = OTHER; note = 5'-(E)-vinylphosphonate 2'-O-methylated guanosine with phosphorothioate linkage
  modified_base 2: mod_base = OTHER; note = 2'-fluorouridine with phosphorothioate linkage
  modified_base 3: mod_base = OTHER; note = 2'-O-methyladenosine
  modified_base 4: mod_base = OTHER; note = 2'-fluorocytidine
  modified_base 5: mod_base = OTHER; note = 2'-O-methyluridine
  modified_base 6: mod_base = OTHER; note = 2'-fluorocytidine
  modified_base 7: mod_base = OTHER; note = 2'-O-methyladenosine
  modified_base 8: mod_base = OTHER; note = 2'-fluorocytidine
  modified_base 9: mod_base = OTHER; note = 2'-O-methyladenosine
  modified_base 10: mod_base = OTHER; note = 2'-fluoroadenosine
  modified_base 11: mod_base = OTHER; note = 2'-O-methylguanosine
  modified_base 12: mod_base = OTHER; note = 2'-fluorouridine
  modified_base 13: mod_base = OTHER; note = 2'-O-methylguanosine
  modified_base 14: mod_base = OTHER; note = 2'-fluorouridine
  modified_base 15: mod_base = OTHER; note = 2'-O-methylcytidine
  modified_base 16: mod_base = OTHER; note = 2'-fluoroguanosine
  modified_base 17: mod_base = OTHER; note = 2'-O-methylcytidine
  modified_base 18: mod_base = OTHER; note = 2'-fluorouridine
  modified_base 19: mod_base = OTHER; note = 2'-O-methylguanosine
  modified_base 20: mod_base = OTHER; note = 2'-fluorocytidine
  modified_base 21: mod_base = OTHER; note = 2'-O-methylguanosine with phosphorothioate linkage
  modified_base 22: mod_base = OTHER; note = 2'-fluorouridine with phosphorothioate linkage
  modified_base 23: mod_base = OTHER; note = 2'-O-methylcytidine
gtactcacaagtgtcgctgcgtc

SEQ ID NO: 1306 - RNA, 23 nt, synthetic construct
  source 1..23: mol_type = other RNA
  modified_base 1: mod_base = OTHER; note = 5'-(E)-vinylphosphonate 2'-O-methylated adenosine with phosphorothioate linkage
  modified_base 2: mod_base = OTHER; note = 2'-fluoroguanosine with phosphorothioate linkage
  modified_base 3: mod_base = OTHER; note = 2'-O-methyluridine
  modified_base 4: mod_base = OTHER; note = 2'-fluoroadenosine
  modified_base 5: mod_base = OTHER; note = 2'-O-methylcytidine
  modified_base 6: mod_base = OTHER; note = 2'-fluorouridine
  modified_base 7: mod_base = OTHER; note = 2'-O-methylcytidine
  modified_base 8: mod_base = OTHER; note = 2'-fluoroadenosine
  modified_base 9: mod_base = OTHER; note = 2'-O-methylcytidine
  modified_base 10: mod_base = OTHER; note = 2'-fluoroadenosine
  modified_base 11: mod_base = OTHER; note = 2'-O-methyladenosine
  modified_base 12: mod_base = OTHER; note = 2'-fluoroguanosine
  modified_base 13: mod_base = OTHER; note = 2'-O-methyluridine
  modified_base 14: mod_base = OTHER; note = 2'-fluoroguanosine
  modified_base 15: mod_base = OTHER; note = 2'-O-methyluridine
  modified_base 16: mod_base = OTHER; note = 2'-fluorocytidine
  modified_base 17: mod_base = OTHER; note = 2'-O-methylguanosine
  modified_base 18: mod_base = OTHER; note = 2'-fluorocytidine
  modified_base 19: mod_base = OTHER; note = 2'-O-methyluridine
  modified_base 20: mod_base = OTHER; note = 2'-fluoroguanosine
  modified_base 21: mod_base = OTHER; note = 2'-O-methylcytidine with phosphorothioate linkage
  modified_base 22: mod_base = OTHER; note = 2'-fluoroguanosine with phosphorothioate linkage
  modified_base 23: mod_base = OTHER; note = 2'-O-methyluridine
agtactcacaagtgtcgctgcgt

SEQ ID NO: 1307 - RNA, 23 nt, synthetic construct
  source 1..23: mol_type = other RNA
  modified_base 1: mod_base = OTHER; note = 5'-(E)-vinylphosphonate 2'-O-methylated adenosine with phosphorothioate linkage
  modified_base 2: mod_base = OTHER; note = 2'-fluoroadenosine with phosphorothioate linkage
  modified_base 3: mod_base = OTHER; note = 2'-O-methylguanosine
  modified_base 4: mod_base = OTHER; note = 2'-fluorouridine
  modified_base 5: mod_base = OTHER; note = 2'-O-methyladenosine
  modified_base 6: mod_base = OTHER; note = 2'-fluorocytidine
  modified_base 7: mod_base = OTHER; note = 2'-O-methyluridine
  modified_base 8: mod_base = OTHER; note = 2'-fluorocytidine
  modified_base 9: mod_base = OTHER; note = 2'-O-methyladenosine
  modified_base 10: mod_base = OTHER; note = 2'-fluorocytidine
  modified_base 11: mod_base = OTHER; note = 2'-O-methyladenosine
  modified_base 12: mod_base = OTHER; note = 2'-fluoroadenosine
  modified_base 13: mod_base = OTHER; note = 2'-O-methylguanosine
  modified_base 14: mod_base = OTHER; note = 2'-fluorouridine
  modified_base 15: mod_base = OTHER; note = 2'-O-methylguanosine
  modified_base 16: mod_base = OTHER; note = 2'-fluorouridine
  modified_base 17: mod_base = OTHER; note = 2'-O-methylcytidine
  modified_base 18: mod_base = OTHER; note = 2'-fluoroguanosine
  modified_base 19: mod_base = OTHER; note = 2'-O-methylcytidine
  modified_base 20: mod_base = OTHER; note = 2'-fluorouridine
  modified_base 21: mod_base = OTHER; note = 2'-O-methylguanosine with phosphorothioate linkage
  modified_base 22: mod_base = OTHER; note = 2'-fluorocytidine with phosphorothioate linkage
  modified_base 23: mod_base = OTHER; note = 2'-O-methylguanosine
aagtactcacaagtgtcgctgcg

SEQ ID NO: 1308 - RNA, 23 nt, synthetic construct
  source 1..23: mol_type = other RNA
  modified_base 1: mod_base = OTHER; note = 5'-(E)-vinylphosphonate 2'-O-methylated adenosine with phosphorothioate linkage
  modified_base 2: mod_base = OTHER; note = 2'-fluorocytidine with phosphorothioate linkage
  modified_base 3: mod_base = OTHER; note = 2'-O-methylcytidine
  modified_base 4: mod_base = OTHER; note = 2'-fluoroadenosine
  modified_base 5: mod_base = OTHER; note = 2'-O-methylcytidine
  modified_base 6: mod_base = OTHER; note = 2'-fluoroadenosine
  modified_base 7: mod_base = OTHER; note = 2'-O-methylguanosine
  modified_base 8: mod_base = OTHER; note = 2'-fluorouridine
  modified_base 9: mod_base = OTHER; note = 2'-O-methyladenosine
  modified_base 10: mod_base = OTHER; note = 2'-fluorocytidine
  modified_base 11: mod_base = OTHER; note = 2'-O-methyluridine
  modified_base 12: mod_base = OTHER; note = 2'-fluorocytidine
  modified_base 13: mod_base = OTHER; note = 2'-O-methyladenosine
  modified_base 14: mod_base = OTHER; note = 2'-fluorocytidine
  modified_base 15: mod_base = OTHER; note = 2'-O-methyladenosine
  modified_base 16: mod_base = OTHER; note = 2'-fluoroadenosine
  modified_base 17: mod_base = OTHER; note = 2'-O-methylguanosine
  modified_base 18: mod_base = OTHER; note = 2'-fluorouridine
  modified_base 19: mod_base = OTHER; note = 2'-O-methylguanosine
  modified_base 20: mod_base = OTHER; note = 2'-fluorouridine
  modified_base 21: mod_base = OTHER; note = 2'-O-methylcytidine with phosphorothioate linkage
  modified_base 22: mod_base = OTHER; note = 2'-fluoroguanosine with phosphorothioate linkage
  modified_base 23: mod_base = OTHER; note = 2'-O-methylcytidine
accacagtactcacaagtgtcgc

SEQ ID NO: 1309 - RNA, 23 nt, synthetic construct
  source 1..23: mol_type = other RNA
  modified_base 1: mod_base = OTHER; note = 5'-(E)-vinylphosphonate 2'-O-methylated uridine with phosphorothioate linkage
  modified_base 2: mod_base = OTHER; note = 2'-fluorocytidine with phosphorothioate linkage
  modified_base 3: mod_base = OTHER; note = 2'-O-methylcytidine
  modified_base 4: mod_base = OTHER; note = 2'-fluorocytidine
  modified_base 5: mod_base = OTHER; note = 2'-O-methyladenosine
  modified_base 6: mod_base = OTHER; note = 2'-fluorocytidine
  modified_base 7: mod_base = OTHER; note = 2'-O-methyladenosine
  modified_base 8: mod_base = OTHER; note = 2'-fluoroguanosine
  modified_base 9: mod_base = OTHER; note = 2'-O-methyluridine
  modified_base 10: mod_base = OTHER; note = 2'-fluoroadenosine
  modified_base 11: mod_base = OTHER; note = 2'-O-methylcytidine
  modified_base 12: mod_base = OTHER; note = 2'-fluorouridine
  modified_base 13: mod_base = OTHER; note = 2'-O-methylcytidine
  modified_base 14: mod_base = OTHER; note = 2'-fluoroadenosine
  modified_base 15: mod_base = OTHER; note = 2'-O-methylcytidine
  modified_base 16: mod_base = OTHER; note = 2'-fluoroadenosine
  modified_base 17: mod_base = OTHER; note = 2'-O-methyladenosine
  modified_base 18: mod_base = OTHER; note = 2'-fluoroguanosine
  modified_base 19: mod_base = OTHER; note = 2'-O-methyluridine
  modified_base 20: mod_base = OTHER; note = 2'-fluoroguanosine
  modified_base 21: mod_base = OTHER; note = 2'-O-methyluridine with phosphorothioate linkage
  modified_base 22: mod_base = OTHER; note = 2'-fluorocytidine with phosphorothioate linkage
  modified_base 23: mod_base = OTHER; note = 2'-O-methylguanosine
tcccacagtactcacaagtgtcg

SEQ ID NO: 1310 - RNA, 23 nt, synthetic construct
  source 1..23: mol_type = other RNA
  modified_base 1: mod_base = OTHER; note = 5'-(E)-vinylphosphonate 2'-O-methylated uridine with phosphorothioate linkage
  modified_base 2: mod_base = OTHER; note = 2'-fluorouridine with phosphorothioate linkage
  modified_base 3: mod_base = OTHER; note = 2'-O-methylcytidine
  modified_base 4: mod_base = OTHER; note = 2'-fluorocytidine
  modified_base 5: mod_base = OTHER; note = 2'-O-methylcytidine
  modified_base 6: mod_base = OTHER; note = 2'-fluoroadenosine
  modified_base 7: mod_base = OTHER; note = 2'-O-methylcytidine
  modified_base 8: mod_base = OTHER; note = 2'-fluoroadenosine
  modified_base 9: mod_base = OTHER; note = 2'-O-methylguanosine
  modified_base 10: mod_base = OTHER; note = 2'-fluorouridine
  modified_base 11: mod_base = OTHER; note = 2'-O-methyladenosine
  modified_base 12: mod_base = OTHER; note = 2'-fluorocytidine
  modified_base 13: mod_base = OTHER; note = 2'-O-methyluridine
  modified_base 14: mod_base = OTHER; note = 2'-fluorocytidine
  modified_base 15: mod_base = OTHER; note = 2'-O-methyladenosine
  modified_base 16: mod_base = OTHER; note = 2'-fluorocytidine
  modified_base 17: mod_base = OTHER; note = 2'-O-methyladenosine
  modified_base 18: mod_base = OTHER; note = 2'-fluoroadenosine
  modified_base 19: mod_base = OTHER; note = 2'-O-methylguanosine
  modified_base 20: mod_base = OTHER; note = 2'-fluorouridine
  modified_base 21: mod_base = OTHER; note = 2'-O-methylguanosine with phosphorothioate linkage
  modified_base 22: mod_base = OTHER; note = 2'-fluorouridine with phosphorothioate linkage
  modified_base 23: mod_base = OTHER; note = 2'-O-methylcytidine
ttcccacagtactcacaagtgtc

SEQ ID NO: 1311 - RNA, 23 nt, synthetic construct
  source 1..23: mol_type = other RNA
  modified_base 1: mod_base = OTHER; note = 5'-(E)-vinylphosphonate 2'-O-methylated uridine with phosphorothioate linkage
  modified_base 2: mod_base = OTHER; note = 2'-fluorouridine with phosphorothioate linkage
  modified_base 3: mod_base = OTHER; note = 2'-O-methyluridine
  modified_base 4: mod_base = OTHER; note = 2'-fluorocytidine
  modified_base 5: mod_base = OTHER; note = 2'-O-methylcytidine
  modified_base 6: mod_base = OTHER; note = 2'-fluorocytidine
  modified_base 7: mod_base = OTHER; note = 2'-O-methyladenosine
  modified_base 8: mod_base = OTHER; note = 2'-fluorocytidine
  modified_base 9: mod_base = OTHER; note = 2'-O-methyladenosine
  modified_base 10: mod_base = OTHER; note = 2'-fluoroguanosine
  modified_base 11: mod_base = OTHER; note = 2'-O-methyluridine
  modified_base 12: mod_base = OTHER; note = 2'-fluoroadenosine
  modified_base 13: mod_base = OTHER; note = 2'-O-methylcytidine
  modified_base 14: mod_base = OTHER; note = 2'-fluorouridine
  modified_base 15: mod_base = OTHER; note = 2'-O-methylcytidine
  modified_base 16: mod_base = OTHER; note = 2'-fluoroadenosine
  modified_base 17: mod_base = OTHER; note = 2'-O-methylcytidine
  modified_base 18: mod_base = OTHER; note = 2'-fluoroadenosine
  modified_base 19: mod_base = OTHER; note = 2'-O-methyladenosine
  modified_base 20: mod_base = OTHER; note = 2'-fluoroguanosine
  modified_base 21: mod_base = OTHER; note = 2'-O-methyluridine with phosphorothioate linkage
  modified_base 22: mod_base = OTHER; note = 2'-fluoroguanosine with phosphorothioate linkage
  modified_base 23: mod_base = OTHER; note = 2'-O-methyluridine
tttcccacagtactcacaagtgt

SEQ ID NO: 1312 - RNA, 23 nt, synthetic construct
  source 1..23: mol_type = other RNA
  modified_base 1: mod_base = OTHER; note = 5'-(E)-vinylphosphonate 2'-O-methylated adenosine with phosphorothioate linkage
  modified_base 2: mod_base = OTHER; note = 2'-fluorouridine with phosphorothioate linkage
  modified_base 3: mod_base = OTHER; note = 2'-O-methyluridine
  modified_base 4: mod_base = OTHER; note = 2'-fluorouridine
  modified_base 5: mod_base = OTHER; note = 2'-O-methylcytidine
  modified_base 6: mod_base = OTHER; note = 2'-fluorocytidine
  modified_base 7: mod_base = OTHER; note = 2'-O-methylcytidine
  modified_base 8: mod_base = OTHER; note = 2'-fluoroadenosine
  modified_base 9: mod_base = OTHER; note = 2'-O-methylcytidine
  modified_base 10: mod_base = OTHER; note = 2'-fluoroadenosine
  modified_base 11: mod_base = OTHER; note = 2'-O-methylguanosine
  modified_base 12: mod_base = OTHER; note = 2'-fluorouridine
  modified_base 13: mod_base = OTHER; note = 2'-O-methyladenosine
  modified_base 14: mod_base = OTHER; note = 2'-fluorocytidine
  modified_base 15: mod_base = OTHER; note = 2'-O-methyluridine
  modified_base 16: mod_base = OTHER; note = 2'-fluorocytidine
  modified_base 17: mod_base = OTHER; note = 2'-O-methyladenosine
  modified_base 18: mod_base = OTHER; note = 2'-fluorocytidine
  modified_base 19: mod_base = OTHER; note = 2'-O-methyladenosine
  modified_base 20: mod_base = OTHER; note = 2'-fluoroadenosine
  modified_base 21: mod_base = OTHER; note = 2'-O-methylguanosine with phosphorothioate linkage
  modified_base 22: mod_base = OTHER; note = 2'-fluorouridine with phosphorothioate linkage
  modified_base 23: mod_base = OTHER; note = 2'-O-methylguanosine
atttcccacagtactcacaagtg

SEQ ID NO: 1313 - RNA, 23 nt, synthetic construct
  source 1..23: mol_type = other RNA
  modified_base 1: mod_base = OTHER; note = 5'-(E)-vinylphosphonate 2'-O-methylated adenosine with phosphorothioate linkage
  modified_base 2: mod_base = OTHER; note = 2'-fluorocytidine with phosphorothioate linkage
  modified_base 3: mod_base = OTHER; note = 2'-O-methyluridine
  modified_base 4: mod_base = OTHER; note = 2'-fluorouridine
  modified_base 5: mod_base = OTHER; note = 2'-O-methyluridine
  modified_base 6: mod_base = OTHER; note = 2'-fluorocytidine
  modified_base 7: mod_base = OTHER; note = 2'-O-methylcytidine
  modified_base 8: mod_base = OTHER; note = 2'-fluorocytidine
  modified_base 9: mod_base = OTHER; note = 2'-O-methyladenosine
  modified_base 10: mod_base = OTHER; note = 2'-fluorocytidine
  modified_base 11: mod_base = OTHER; note = 2'-O-methyladenosine
  modified_base 12: mod_base = OTHER; note = 2'-fluoroguanosine
  modified_base 13: mod_base = OTHER; note = 2'-O-methyluridine
  modified_base 14: mod_base = OTHER; note = 2'-fluoroadenosine
  modified_base 15: mod_base = OTHER; note = 2'-O-methylcytidine
  modified_base 16: mod_base = OTHER; note = 2'-fluorouridine
  modified_base 17: mod_base = OTHER; note = 2'-O-methylcytidine
  modified_base 18: mod_base = OTHER; note = 2'-fluoroadenosine
  modified_base 19: mod_base = OTHER; note = 2'-O-methylcytidine
  modified_base 20: mod_base = OTHER; note = 2'-fluoroadenosine
  modified_base 21: mod_base = OTHER; note = 2'-O-methyladenosine with phosphorothioate linkage
  modified_base 22: mod_base = OTHER; note = 2'-fluoroguanosine with phosphorothioate linkage
  modified_base 23: mod_base = OTHER; note = 2'-O-methyluridine
actttcccacagtactcacaagt

SEQ ID NO: 1314 - RNA, 23 nt, synthetic construct
  source 1..23: mol_type = other RNA
  modified_base 1: mod_base = OTHER; note = 5'-(E)-vinylphosphonate 2'-O-methylated guanosine with phosphorothioate linkage
  modified_base 2: mod_base = OTHER; note = 2'-fluoroadenosine with phosphorothioate linkage
  modified_base 3: mod_base = OTHER; note = 2'-O-methylcytidine
  modified_base 4: mod_base = OTHER; note = 2'-fluorouridine
  modified_base 5: mod_base = OTHER; note = 2'-O-methyluridine
  modified_base 6: mod_base = OTHER; note = 2'-fluorouridine
  modified_base 7: mod_base = OTHER; note = 2'-O-methylcytidine
  modified_base 8: mod_base = OTHER; note = 2'-fluorocytidine
  modified_base 9: mod_base = OTHER; note = 2'-O-methylcytidine
  modified_base 10: mod_base = OTHER; note = 2'-fluoroadenosine
  modified_base 11: mod_base = OTHER; note = 2'-O-methylcytidine
  modified_base 12: mod_base = OTHER; note = 2'-fluoroadenosine
  modified_base 13: mod_base = OTHER; note = 2'-O-methylguanosine
  modified_base 14: mod_base = OTHER; note = 2'-fluorouridine
  modified_base 15: mod_base = OTHER; note = 2'-O-methyladenosine
  modified_base 16: mod_base = OTHER; note = 2'-fluorocytidine
  modified_base 17: mod_base = OTHER; note = 2'-O-methyluridine
  modified_base 18: mod_base = OTHER; note = 2'-fluorocytidine
  modified_base 19: mod_base = OTHER; note = 2'-O-methyladenosine
  modified_base 20: mod_base = OTHER; note = 2'-fluorocytidine
  modified_base 21: mod_base = OTHER; note = 2'-O-methyladenosine with phosphorothioate linkage
  modified_base 22: mod_base = OTHER; note = 2'-fluoroadenosine with phosphorothioate linkage
  modified_base 23: mod_base = OTHER; note = 2'-O-methylguanosine
gactttcccacagtactcacaag

SEQ ID NO: 1315 - RNA, 23 nt, synthetic construct
  source 1..23: mol_type = other RNA
  modified_base 1: mod_base = OTHER; note = 5'-(E)-vinylphosphonate 2'-O-methylated adenosine with phosphorothioate linkage
  modified_base 2: mod_base = OTHER; note = 2'-fluoroguanosine with phosphorothioate linkage
  modified_base 3: mod_base = OTHER; note = 2'-O-methyladenosine
  modified_base 4: mod_base = OTHER; note = 2'-fluorocytidine
  modified_base 5: mod_base = OTHER; note = 2'-O-methyluridine
  modified_base 6: mod_base = OTHER; note = 2'-fluorouridine
  modified_base 7: mod_base = OTHER; note = 2'-O-methyluridine
  modified_base 8: mod_base = OTHER; note = 2'-fluorocytidine
  modified_base 9: mod_base = OTHER; note = 2'-O-methylcytidine
  modified_base 10: mod_base = OTHER; note = 2'-fluorocytidine
  modified_base 11: mod_base = OTHER; note = 2'-O-methyladenosine
  modified_base 12: mod_base = OTHER; note = 2'-fluorocytidine
  modified_base 13: mod_base = OTHER; note = 2'-O-methyladenosine
  modified_base 14: mod_base = OTHER; note = 2'-fluoroguanosine
  modified_base 15: mod_base = OTHER; note = 2'-O-methyluridine
  modified_base 16: mod_base = OTHER; note = 2'-fluoroadenosine
  modified_base 17: mod_base = OTHER; note = 2'-O-methylcytidine
  modified_base 18: mod_base = OTHER; note = 2'-fluorouridine
  modified_base 19: mod_base = OTHER; note = 2'-O-methylcytidine
  modified_base 20: mod_base = OTHER; note = 2'-fluoroadenosine
  modified_base 21: mod_base = OTHER; note = 2'-O-methylcytidine with phosphorothioate linkage
  modified_base 22: mod_base = OTHER; note = 2'-fluoroadenosine with phosphorothioate linkage
  modified_base 23: mod_base = OTHER; note = 2'-O-methyladenosine
agactttcccacagtactcacaa

SEQ ID NO: 1316 - RNA, 23 nt, synthetic construct
  source 1..23: mol_type = other RNA
  modified_base 1: mod_base = OTHER; note = 5'-(E)-vinylphosphonate 2'-O-methylated adenosine with phosphorothioate linkage
  modified_base 2: mod_base = OTHER; note = 2'-fluorouridine with phosphorothioate linkage
  modified_base 3: mod_base = OTHER; note = 2'-O-methyluridine
  modified_base 4: mod_base = OTHER; note = 2'-fluoroguanosine
  modified_base 5: mod_base = OTHER; note = 2'-O-methylcytidine
  modified_base 6: mod_base = OTHER; note = 2'-fluorouridine
  modified_base 7: mod_base = OTHER; note = 2'-O-methyladenosine
  modified_base 8: mod_base = OTHER; note = 2'-fluorocytidine
  modified_base 9: mod_base = OTHER; note = 2'-O-methyladenosine
  modified_base 10: mod_base = OTHER; note = 2'-fluoroguanosine
  modified_base 11: mod_base = OTHER; note = 2'-O-methyluridine
  modified_base 12: mod_base = OTHER; note = 2'-fluorouridine
  modified_base 13: mod_base = OTHER; note = 2'-O-methylcytidine
  modified_base 14: mod_base = OTHER; note = 2'-fluorouridine
  modified_base 15: mod_base = OTHER; note = 2'-O-methyluridine
  modified_base 16: mod_base = OTHER; note = 2'-fluoroguanosine
  modified_base 17: mod_base = OTHER; note = 2'-O-methyladenosine
  modified_base 18: mod_base = OTHER; note = 2'-fluoroadenosine
  modified_base 19: mod_base = OTHER; note = 2'-O-methylguanosine
  modified_base 20: mod_base = OTHER; note = 2'-fluoroadenosine
  modified_base 21: mod_base = OTHER; note = 2'-O-methylcytidine with phosphorothioate linkage
  modified_base 22: mod_base = OTHER; note = 2'-fluorouridine with phosphorothioate linkage
  modified_base 23: mod_base = OTHER; note = 2'-O-methyluridine
attgctacagttcttgaagactt

SEQ ID NO: 1317 - RNA, 23 nt, synthetic construct
  source 1..23: mol_type = other RNA
  modified_base 1: mod_base = OTHER; note = 5'-(E)-vinylphosphonate 2'-O-methylated guanosine with phosphorothioate linkage
  modified_base 2: mod_base = OTHER; note = 2'-fluoroadenosine with phosphorothioate linkage
  modified_base 3: mod_base = OTHER; note = 2'-O-methyluridine
  modified_base 4: mod_base = OTHER; note = 2'-fluorouridine
  modified_base 5: mod_base = OTHER; note = 2'-O-methylguanosine
  modified_base 6: mod_base = OTHER; note = 2'-fluorocytidine
  modified_base 7: mod_base = OTHER; note = 2'-O-methyluridine
  modified_base 8: mod_base = OTHER; note = 2'-fluoroadenosine
  modified_base 9: mod_base = OTHER; note = 2'-O-methylcytidine
  modified_base 10: mod_base = OTHER; note = 2'-fluoroadenosine
  modified_base 11: mod_base = OTHER; note = 2'-O-methylguanosine
  modified_base 12: mod_base = OTHER; note = 2'-fluorouridine
  modified_base 13: mod_base = OTHER; note = 2'-O-methyluridine
  modified_base 14: mod_base = OTHER; note = 2'-fluorocytidine
  modified_base 15: mod_base = OTHER; note = 2'-O-methyluridine
  modified_base 16: mod_base = OTHER; note = 2'-fluorouridine
  modified_base 17: mod_base = OTHER; note = 2'-O-methylguanosine
  modified_base 18: mod_base = OTHER; note = 2'-fluoroadenosine
  modified_base 19: mod_base = OTHER; note = 2'-O-methyladenosine
  modified_base 20: mod_base = OTHER; note = 2'-fluoroguanosine
  modified_base 21: mod_base = OTHER; note = 2'-O-methyladenosine with phosphorothioate linkage
  modified_base 22: mod_base = OTHER; note = 2'-fluorocytidine with phosphorothioate linkage
  modified_base 23: mod_base = OTHER; note = 2'-O-methyluridine
gattgctacagttcttgaagact

SEQ ID NO: 1318 - RNA, 23 nt, synthetic construct
  source 1..23: mol_type = other RNA
  modified_base 1: mod_base = OTHER; note = 5'-(E)-vinylphosphonate 2'-O-methylated adenosine with phosphorothioate linkage
  modified_base 2: mod_base = OTHER; note = 2'-fluoroguanosine with phosphorothioate linkage
  modified_base 3: mod_base = OTHER; note = 2'-O-methyladenosine
  modified_base 4: mod_base = OTHER; note = 2'-fluorouridine
  modified_base 5: mod_base = OTHER; note = 2'-O-methyluridine
  modified_base 6: mod_base = OTHER; note = 2'-fluoroguanosine
  modified_base 7: mod_base = OTHER; note = 2'-O-methylcytidine
  modified_base 8: mod_base = OTHER; note = 2'-fluorouridine
  modified_base 9: mod_base = OTHER; note = 2'-O-methyladenosine
  modified_base 10: mod_base = OTHER; note = 2'-fluorocytidine
  modified_base 11: mod_base = OTHER; note = 2'-O-methyladenosine
  modified_base 12: mod_base = OTHER; note = 2'-fluoroguanosine
  modified_base 13: mod_base = OTHER; note = 2'-O-methyluridine
  modified_base 14: mod_base = OTHER; note = 2'-fluorouridine
  modified_base 15: mod_base = OTHER; note = 2'-O-methylcytidine
  modified_base 16: mod_base = OTHER; note = 2'-fluorouridine
  modified_base 17: mod_base = OTHER; note = 2'-O-methyluridine
  modified_base 18: mod_base = OTHER; note = 2'-fluoroguanosine
  modified_base 19: mod_base = OTHER; note = 2'-O-methyladenosine
  modified_base 20: mod_base = OTHER; note = 2'-fluoroadenosine
  modified_base 21: mod_base = OTHER; note = 2'-O-methylguanosine with phosphorothioate linkage
  modified_base 22: mod_base = OTHER; note = 2'-fluoroadenosine with phosphorothioate linkage
  modified_base 23: mod_base = OTHER; note = 2'-O-methylcytidine
agattgctacagttcttgaagac

SEQ ID NO: 1319 - RNA, 23 nt, synthetic construct
  source 1..23: mol_type = other RNA
  modified_base 1: mod_base = OTHER; note = 5'-(E)-vinylphosphonate 2'-O-methylated guanosine with phosphorothioate linkage
  modified_base 2: mod_base = OTHER; note = 2'-fluoroadenosine with phosphorothioate linkage
  modified_base 3: mod_base = OTHER; note = 2'-O-methylguanosine
  modified_base 4: mod_base = OTHER; note = 2'-fluoroadenosine
  modified_base 5: mod_base = OTHER; note = 2'-O-methyluridine
  modified_base 6: mod_base = OTHER; note = 2'-fluorouridine
  modified_base 7: mod_base = OTHER; note = 2'-O-methylguanosine
  modified_base 8: mod_base = OTHER; note = 2'-fluorocytidine
  modified_base 9: mod_base = OTHER; note = 2'-O-methyluridine
  modified_base 10: mod_base = OTHER; note = 2'-fluoroadenosine
  modified_base 11: mod_base = OTHER; note = 2'-O-methylcytidine
  modified_base 12: mod_base = OTHER; note = 2'-fluoroadenosine
  modified_base 13: mod_base = OTHER; note = 2'-O-methylguanosine
  modified_base 14: mod_base = OTHER; note = 2'-fluorouridine
  modified_base 15: mod_base = OTHER; note = 2'-O-methyluridine
  modified_base 16: mod_base = OTHER; note = 2'-fluorocytidine
  modified_base 17: mod_base = OTHER; note = 2'-O-methyluridine
  modified_base 18: mod_base = OTHER; note = 2'-fluorouridine
  modified_base 19: mod_base = OTHER; note = 2'-O-methylguanosine
  modified_base 20: mod_base = OTHER; note = 2'-fluoroadenosine
  modified_base 21: mod_base = OTHER; note = 2'-O-methyladenosine with phosphorothioate linkage
  modified_base 22: mod_base = OTHER; note = 2'-fluoroguanosine with phosphorothioate linkage
  modified_base 23: mod_base = OTHER; note = 2'-O-methyladenosine
gagattgctacagttcttgaaga

SEQ ID NO: 1320 - RNA, 23 nt, synthetic construct
  source 1..23: mol_type = other RNA
  modified_base 1: mod_base = OTHER; note = 5'-(E)-vinylphosphonate 2'-O-methylated uridine with phosphorothioate linkage
  modified_base 2: mod_base = OTHER; note = 2'-fluoroguanosine with phosphorothioate linkage
  modified_base 3: mod_base = OTHER; note = 2'-O-methyladenosine
  modified_base 4: mod_base = OTHER; note = 2'-fluoroguanosine
  modified_base 5: mod_base = OTHER; note = 2'-O-methyladenosine
  modified_base 6: mod_base = OTHER; note = 2'-fluorouridine
  modified_base 7: mod_base = OTHER; note = 2'-O-methyluridine
  modified_base 8: mod_base = OTHER; note = 2'-fluoroguanosine
  modified_base 9: mod_base = OTHER; note = 2'-O-methylcytidine
  modified_base 10: mod_base = OTHER; note = 2'-fluorouridine
  modified_base 11: mod_base = OTHER; note = 2'-O-methyladenosine
  modified_base 12: mod_base = OTHER; note = 2'-fluorocytidine
  modified_base 13: mod_base = OTHER; note = 2'-O-methyladenosine
  modified_base 14: mod_base = OTHER; note = 2'-fluoroguanosine
  modified_base 15: mod_base = OTHER; note = 2'-O-methyluridine
  modified_base 16: mod_base = OTHER; note = 2'-fluorouridine
  modified_base 17: mod_base = OTHER; note = 2'-O-methylcytidine
  modified_base 18: mod_base = OTHER; note = 2'-fluorouridine
  modified_base 19: mod_base = OTHER; note = 2'-O-methyluridine
  modified_base 20: mod_base = OTHER; note = 2'-fluoroguanosine
  modified_base 21: mod_base = OTHER; note = 2'-O-methyladenosine with phosphorothioate linkage
  modified_base 22: mod_base = OTHER; note = 2'-fluoroadenosine with phosphorothioate linkage
  modified_base 23: mod_base = OTHER; note = 2'-O-methylguanosine
tgagattgctacagttcttgaag

SEQ ID NO: 1321 - RNA, 23 nt, synthetic construct
  source 1..23: mol_type = other RNA
  modified_base 1: mod_base = OTHER; note = 5'-(E)-vinylphosphonate 2'-O-methylated guanosine with phosphorothioate linkage
  modified_base 2: mod_base = OTHER; note = 2'-fluorouridine with phosphorothioate linkage
  modified_base 3: mod_base = OTHER; note = 2'-O-methylguanosine
  modified_base 4: mod_base = OTHER; note = 2'-fluoroadenosine
  modified_base 5: mod_base = OTHER; note = 2'-O-methylguanosine
  modified_base 6: mod_base = OTHER; note = 2'-fluoroadenosine
  modified_base 7: mod_base = OTHER; note = 2'-O-methyluridine
  modified_base 8: mod_base = OTHER; note = 2'-fluorouridine
  modified_base 9: mod_base = OTHER; note = 2'-O-methylguanosine
  modified_base 10: mod_base = OTHER; note = 2'-fluorocytidine
  modified_base 11: mod_base = OTHER; note = 2'-O-methyluridine
  modified_base 12: mod_base = OTHER; note = 2'-fluoroadenosine
  modified_base 13: mod_base = OTHER; note = 2'-O-methylcytidine
  modified_base 14: mod_base = OTHER; note = 2'-fluoroadenosine
  modified_base 15: mod_base = OTHER; note = 2'-O-methylguanosine
  modified_base 16: mod_base = OTHER; note = 2'-fluorouridine
  modified_base 17: mod_base = OTHER; note = 2'-O-methyluridine
  modified_base 18: mod_base = OTHER; note = 2'-fluorocytidine
  modified_base 19: mod_base = OTHER; note = 2'-O-methyluridine
  modified_base 20: mod_base = OTHER; note = 2'-fluorouridine
  modified_base 21: mod_base = OTHER; note = 2'-O-methylguanosine with phosphorothioate linkage
  modified_base 22: mod_base = OTHER; note = 2'-fluoroadenosine with phosphorothioate linkage
  modified_base 23: mod_base = OTHER; note = 2'-O-methyladenosine
gtgagattgctacagttcttgaa

SEQ ID NO: 1322 - RNA, 23 nt, synthetic construct
  source 1..23: mol_type = other RNA
  modified_base 1: mod_base = OTHER; note = 5'-(E)-vinylphosphonate 2'-O-methylated adenosine with phosphorothioate linkage
  modified_base 2: mod_base = OTHER; note = 2'-fluoroguanosine with phosphorothioate linkage
  modified_base 3: mod_base = OTHER; note = 2'-O-methyluridine
  modified_base 4: mod_base = OTHER; note = 2'-fluoroguanosine
  modified_base 5: mod_base = OTHER; note = 2'-O-methyladenosine
  modified_base 6: mod_base = OTHER; note = 2'-fluoroguanosine
  modified_base 7: mod_base = OTHER; note = 2'-O-methyladenosine
  modified_base 8: mod_base = OTHER; note = 2'-fluorouridine
  modified_base 9: mod_base = OTHER; note = 2'-O-methyluridine
  modified_base 10: mod_base = OTHER; note = 2'-fluoroguanosine
  modified_base 11: mod_base = OTHER; note = 2'-O-methylcytidine
  modified_base 12: mod_base = OTHER; note = 2'-fluorouridine
  modified_base 13: mod_base = OTHER; note = 2'-O-methyladenosine
  modified_base 14: mod_base = OTHER; note = 2'-fluorocytidine
  modified_base 15: mod_base = OTHER; note = 2'-O-methyladenosine
  modified_base 16: mod_base = OTHER; note = 2'-fluoroguanosine
  modified_base 17: mod_base = OTHER; note = 2'-O-methyluridine
  modified_base 18: mod_base = OTHER; note = 2'-fluorouridine
  modified_base 19: mod_base = OTHER; note = 2'-O-methylcytidine
  modified_base 20: mod_base = OTHER; note = 2'-fluorouridine
  modified_base 21: mod_base = OTHER; note = 2'-O-methyluridine with phosphorothioate linkage
  modified_base 22: mod_base = OTHER; note = 2'-fluoroguanosine with phosphorothioate linkage
  modified_base 23: mod_base = OTHER; note = 2'-O-methyladenosine
agtgagattgctacagttcttga

SEQ ID NO: 1323 - RNA, 23 nt, synthetic construct
  source 1..23: mol_type = other RNA
  modified_base 1: mod_base = OTHER; note = 5'-(E)-vinylphosphonate 2'-O-methylated adenosine with phosphorothioate linkage
  modified_base 2: mod_base = OTHER; note = 2'-fluorouridine with phosphorothioate linkage
  modified_base 3: mod_base = OTHER; note = 2'-O-methyluridine
  modified_base 4: mod_base = OTHER; note = 2'-fluorouridine
  modified_base 5: mod_base = OTHER; note = 2'-O-methylcytidine
  modified_base 6: mod_base = OTHER; note = 2'-fluoroguanosine
  modified_base 7: mod_base = OTHER; note = 2'-O-methylcytidine
  modified_base 8: mod_base = OTHER; note = 2'-fluorocytidine
  modified_base 9: mod_base = OTHER; note = 2'-O-methylcytidine
  modified_base 10: mod_base = OTHER; note = 2'-fluoroguanosine
  modified_base 11: mod_base = OTHER; note = 2'-O-methyluridine
  modified_base 12: mod_base = OTHER; note = 2'-fluoroguanosine
  modified_base 13: mod_base = OTHER; note = 2'-O-methyluridine
  modified_base 14: mod_base = OTHER; note = 2'-fluoroguanosine
  modified_base 15: mod_base = OTHER; note = 2'-O-methylguanosine
  modified_base 16: mod_base = OTHER; note = 2'-fluorocytidine
  modified_base 17: mod_base = OTHER; note = 2'-O-methyluridine
  modified_base 18: mod_base = OTHER; note = 2'-fluorouridine
  modified_base 19: mod_base = OTHER; note = 2'-O-methylcytidine
  modified_base 20: mod_base = OTHER; note = 2'-fluorouridine
  modified_base 21: mod_base = OTHER; note = 2'-O-methylcytidine with phosphorothioate linkage
  modified_base 22: mod_base = OTHER; note = 2'-fluorocytidine with phosphorothioate linkage
  modified_base 23: mod_base = OTHER; note = 2'-O-methyluridine
atttcgcccgtgtggcttctcct

SEQ ID NO: 1324 - RNA, 23 nt, synthetic construct
  source 1..23: mol_type = other RNA
  modified_base 1: mod_base = OTHER; note = 5'-(E)-vinylphosphonate 2'-O-methylated adenosine with phosphorothioate linkage
  modified_base 2: mod_base = OTHER; note = 2'-fluoroguanosine with phosphorothioate linkage
  modified_base 3: mod_base = OTHER; note = 2'-O-methylguanosine
  modified_base 4: mod_base = OTHER; note = 2'-fluorocytidine
  modified_base 5: mod_base = OTHER; note = 2'-O-methylcytidine
  modified_base 6: mod_base = OTHER; note = 2'-fluorouridine
  modified_base 7: mod_base = OTHER; note = 2'-O-methyluridine
  modified_base 8: mod_base = OTHER; note = 2'-fluorouridine
  modified_base 9: mod_base = OTHER; note = 2'-O-methylcytidine
  modified_base 10: mod_base = OTHER; note = 2'-fluoroguanosine
  modified_base 11: mod_base = OTHER; note = 2'-O-methylcytidine
  modified_base 12: mod_base = OTHER; note = 2'-fluorocytidine
  modified_base 13: mod_base = OTHER; note = 2'-O-methylcytidine
  modified_base 14: mod_base = OTHER; note = 2'-fluoroguanosine
  modified_base 15: mod_base = OTHER; note = 2'-O-methyluridine
  modified_base 16: mod_base = OTHER; note = 2'-fluoroguanosine
  modified_base 17: mod_base = OTHER; note = 2'-O-methyluridine
  modified_base 18: mod_base = OTHER; note = 2'-fluoroguanosine
  modified_base 19: mod_base = OTHER; note = 2'-O-methylguanosine
  modified_base 20: mod_base = OTHER; note = 2'-fluorocytidine
  modified_base 21: mod_base = OTHER; note = 2'-O-methyluridine with phosphorothioate linkage
  modified_base 22: mod_base = OTHER; note = 2'-fluorouridine with phosphorothioate linkage
  modified_base 23: mod_base = OTHER; note = 2'-O-methylcytidine
aggcctttcgcccgtgtggcttc

SEQ ID NO: 1325 - RNA, 23 nt, synthetic construct
  source 1..23: mol_type = other RNA
  modified_base 1: mod_base = OTHER; note = 5'-(E)-vinylphosphonate 2'-O-methylated adenosine with phosphorothioate linkage
  modified_base 2: mod_base = OTHER; note = 2'-fluoroadenosine with phosphorothioate linkage
  modified_base 3: mod_base = OTHER; note = 2'-O-methylguanosine
  modified_base 4: mod_base = OTHER; note = 2'-fluoroguanosine
  modified_base 5: mod_base = OTHER; note = 2'-O-methylcytidine
  modified_base 6: mod_base = OTHER; note = 2'-fluorocytidine
  modified_base 7: mod_base = OTHER; note = 2'-O-methyluridine
  modified_base 8: mod_base = OTHER; note = 2'-fluorouridine
  modified_base 9: mod_base = OTHER; note = 2'-O-methyluridine
  modified_base 10: mod_base = OTHER; note = 2'-fluorocytidine
  modified_base 11: mod_base = OTHER; note = 2'-O-methylguanosine
  modified_base 12: mod_base = OTHER; note = 2'-fluorocytidine
  modified_base 13: mod_base = OTHER; note = 2'-O-methylcytidine
  modified_base 14: mod_base = OTHER; note = 2'-fluorocytidine
  modified_base 15: mod_base = OTHER; note = 2'-O-methylguanosine
  modified_base 16: mod_base = OTHER; note = 2'-fluorouridine
  modified_base 17: mod_base = OTHER; note = 2'-O-methylguanosine
  modified_base 18: mod_base = OTHER; note = 2'-fluorouridine
  modified_base 19: mod_base = OTHER; note = 2'-O-methylguanosine
  modified_base 20: mod_base = OTHER; note = 2'-fluoroguanosine
  modified_base 21: mod_base = OTHER; note = 2'-O-methylcytidine with phosphorothioate linkage
  modified_base 22: mod_base = OTHER; note = 2'-fluorouridine with phosphorothioate linkage
  modified_base 23: mod_base = OTHER; note = 2'-O-methyluridine
aaggcctttcgcccgtgtggctt

SEQ ID NO: 1326 - RNA, 23 nt, synthetic construct
  source 1..23: mol_type = other RNA
  modified_base 1: mod_base = OTHER; note = 5'-(E)-vinylphosphonate 2'-O-methylated uridine with phosphorothioate linkage
  modified_base 2: mod_base = OTHER; note = 2'-fluoroadenosine with phosphorothioate linkage
  modified_base 3: mod_base = OTHER; note = 2'-O-methyluridine
  modified_base 4: mod_base = OTHER; note = 2'-fluoroadenosine
  modified_base 5: mod_base = OTHER; note = 2'-O-methyladenosine
  modified_base 6: mod_base = OTHER; note = 2'-fluoroguanosine
  modified_base 7: mod_base = OTHER; note = 2'-O-methylguanosine
  modified_base 8: mod_base = OTHER; note = 2'-fluorocytidine
  modified_base 9: mod_base = OTHER; note = 2'-O-methylcytidine
  modified_base 10: mod_base = OTHER; note = 2'-fluorouridine
  modified_base 11: mod_base = OTHER; note = 2'-O-methyluridine
  modified_base 12: mod_base = OTHER; note = 2'-fluorouridine
  modified_base 13: mod_base = OTHER; note = 2'-O-methylcytidine
  modified_base 14: mod_base = OTHER; note = 2'-fluoroguanosine
  modified_base 15: mod_base = OTHER; note = 2'-O-methylcytidine
  modified_base 16: mod_base = OTHER; note = 2'-fluorocytidine
  modified_base 17: mod_base = OTHER; note = 2'-O-methylcytidine
  modified_base 18: mod_base = OTHER; note = 2'-fluoroguanosine
  modified_base 19: mod_base = OTHER; note = 2'-O-methyluridine
  modified_base 20: mod_base = OTHER; note = 2'-fluoroguanosine
  modified_base 21: mod_base = OTHER; note = 2'-O-methyluridine with phosphorothioate linkage
  modified_base 22: mod_base = OTHER; note = 2'-fluoroguanosine with phosphorothioate linkage
  modified_base 23: mod_base = OTHER; note = 2'-O-methylguanosine
tataaggcctttcgcccgtgtgg

SEQ ID NO: 1327 - RNA, 23 nt, synthetic construct
  source 1..23: mol_type = other RNA
  modified_base 1: mod_base = OTHER; note = 5'-(E)-vinylphosphonate 2'-O-methylated uridine with phosphorothioate linkage
  modified_base 2: mod_base = OTHER; note = 2'-fluorouridine with phosphorothioate linkage
  modified_base 3: mod_base = OTHER; note = 2'-O-methyladenosine
  modified_base 4: mod_base = OTHER; note = 2'-fluorouridine
  modified_base 5: mod_base = OTHER; note = 2'-O-methyladenosine
  modified_base 6: mod_base = OTHER; note = 2'-fluoroadenosine
  modified_base 7: mod_base = OTHER; note = 2'-O-methylguanosine
  modified_base 8: mod_base = OTHER; note = 2'-fluoroguanosine
  modified_base 9: mod_base = OTHER; note = 2'-O-methylcytidine
  modified_base 10: mod_base = OTHER; note = 2'-fluorocytidine
  modified_base 11: mod_base = OTHER; note = 2'-O-methyluridine
  modified_base 12: mod_base = OTHER; note = 2'-fluorouridine
  modified_base 13: mod_base = OTHER; note = 2'-O-methyluridine
  modified_base 14: mod_base = OTHER; note = 2'-fluorocytidine
  modified_base 15: mod_base = OTHER; note = 2'-O-methylguanosine
  modified_base 16: mod_base = OTHER; note = 2'-fluorocytidine
  modified_base 17: mod_base = OTHER; note = 2'-O-methylcytidine
  modified_base 18: mod_base = OTHER; note = 2'-fluorocytidine
  modified_base 19: mod_base = OTHER; note = 2'-O-methylguanosine
  modified_base 20: mod_base = OTHER; note = 2'-fluorouridine
  modified_base 21: mod_base = OTHER; note = 2'-O-methylguanosine with phosphorothioate linkage
  modified_base 22: mod_base = OTHER; note = 2'-fluorouridine with phosphorothioate linkage
  modified_base 23: mod_base = OTHER; note = 2'-O-methylguanosine
ttataaggcctttcgcccgtgtg

SEQ ID NO: 1328 - RNA, 23 nt, synthetic construct
  source 1..23: mol_type = other RNA
  modified_base 1: mod_base = OTHER; note = 5'-(E)-vinylphosphonate 2'-O-methylated uridine with phosphorothioate linkage
  modified_base 2: mod_base = OTHER; note = 2'-fluorouridine with phosphorothioate linkage
  modified_base 3: mod_base = OTHER; note = 2'-O-methyluridine
  modified_base 4: mod_base = OTHER; note = 2'-fluoroadenosine
  modified_base 5: mod_base = OTHER; note = 2'-O-methyluridine
  modified_base 6: mod_base = OTHER; note = 2'-fluoroadenosine
  modified_base 7: mod_base = OTHER; note = 2'-O-methyladenosine
  modified_base 8: mod_base = OTHER; note = 2'-fluoroguanosine
  modified_base 9: mod_base = OTHER; note = 2'-O-methylguanosine
  modified_base 10: mod_base = OTHER; note = 2'-fluorocytidine
  modified_base 11: mod_base = OTHER; note = 2'-O-methylcytidine
  modified_base 12: mod_base = OTHER; note = 2'-fluorouridine
  modified_base 13: mod_base = OTHER; note = 2'-O-methyluridine
  modified_base 14: mod_base = OTHER; note = 2'-fluorouridine
  modified_base 15: mod_base = OTHER; note = 2'-O-methylcytidine
  modified_base 16: mod_base = OTHER; note = 2'-fluoroguanosine
  modified_base 17: mod_base = OTHER; note = 2'-O-methylcytidine
  modified_base 18: mod_base = OTHER; note = 2'-fluorocytidine
  modified_base 19: mod_base = OTHER; note = 2'-O-methylcytidine
  modified_base 20: mod_base = OTHER; note = 2'-fluoroguanosine
  modified_base 21: mod_base = OTHER; note = 2'-O-methyluridine with phosphorothioate linkage
  modified_base 22: mod_base = OTHER; note = 2'-fluoroguanosine with phosphorothioate linkage
  modified_base 23: mod_base = OTHER; note = 2'-O-methyluridine
tttataaggcctttcgcccgtgt

SEQ ID NO: 1329 - RNA, 23 nt, synthetic construct
  source 1..23: mol_type = other RNA
  modified_base 1: mod_base = OTHER; note = 5'-(E)-vinylphosphonate 2'-O-methylated adenosine with phosphorothioate linkage
  modified_base 2: mod_base = OTHER; note = 2'-fluorouridine with phosphorothioate linkage
  modified_base 3: mod_base = OTHER; note = 2'-O-methyluridine
  modified_base 4: mod_base = OTHER; note = 2'-fluorouridine
  modified_base 5: mod_base = OTHER; note = 2'-O-methyladenosine
  modified_base 6: mod_base = OTHER; note = 2'-fluorouridine
  modified_base 7: mod_base = OTHER; note = 2'-O-methyladenosine
  modified_base 8: mod_base = OTHER; note = 2'-fluoroadenosine
  modified_base 9: mod_base = OTHER; note = 2'-O-methylguanosine
  modified_base 10: mod_base = OTHER; note = 2'-fluoroguanosine
  modified_base 11: mod_base = OTHER; note = 2'-O-methylcytidine
  modified_base 12: mod_base = OTHER; note = 2'-fluorocytidine
  modified_base 13: mod_base = OTHER; note = 2'-O-methyluridine
  modified_base 14: mod_base = OTHER; note = 2'-fluorouridine
  modified_base 15: mod_base = OTHER; note = 2'-O-methyluridine
  modified_base 16: mod_base = OTHER; note = 2'-fluorocytidine
  modified_base 17: mod_base = OTHER; note = 2'-O-methylguanosine
  modified_base 18: mod_base = OTHER; note = 2'-fluorocytidine
  modified_base 19: mod_base = OTHER; note = 2'-O-methylcytidine
  modified_base 20: mod_base = OTHER; note = 2'-fluorocytidine
  modified_base 21: mod_base = OTHER; note = 2'-O-methylguanosine with phosphorothioate linkage
  modified_base 22: mod_base = OTHER; note = 2'-fluorouridine with phosphorothioate linkage
  modified_base 23: mod_base = OTHER; note = 2'-O-methylguanosine
atttataaggcctttcgcccgtg

SEQ ID NO: 1330 - RNA, 23 nt, synthetic construct
  source 1..23: mol_type = other RNA
  modified_base 1: mod_base = OTHER; note = 5'-(E)-vinylphosphonate 2'-O-methylated adenosine with phosphorothioate linkage
  modified_base 2: mod_base = OTHER; note = 2'-fluoroadenosine with phosphorothioate linkage
  modified_base 3: mod_base = OTHER; note = 2'-O-methyluridine
  modified_base 4: mod_base = OTHER; note = 2'-fluorouridine
  modified_base 5: mod_base = OTHER; note = 2'-O-methyluridine
  modified_base 6: mod_base = OTHER; note = 2'-fluoroadenosine
  modified_base 7: mod_base = OTHER; note = 2'-O-methyluridine
  modified_base 8: mod_base = OTHER; note = 2'-fluoroadenosine
  modified_base 9: mod_base = OTHER; note = 2'-O-methyladenosine
  modified_base 10: mod_base = OTHER; note = 2'-fluoroguanosine
  modified_base 11: mod_base = OTHER; note = 2'-O-methylguanosine
  modified_base 12: mod_base = OTHER; note = 2'-fluorocytidine
  modified_base 13: mod_base = OTHER; note = 2'-O-methylcytidine
  modified_base 14: mod_base = OTHER; note = 2'-fluorouridine
  modified_base 15: mod_base = OTHER; note = 2'-O-methyluridine
  modified_base 16: mod_base = OTHER; note = 2'-fluorouridine
  modified_base 17: mod_base = OTHER; note = 2'-O-methylcytidine
  modified_base 18: mod_base = OTHER; note = 2'-fluoroguanosine
  modified_base 19: mod_base = OTHER; note = 2'-O-methylcytidine
  modified_base 20: mod_base = OTHER; note = 2'-fluorocytidine
  modified_base 21: mod_base = OTHER; note = 2'-O-methylcytidine with phosphorothioate linkage
  modified_base 22: mod_base = OTHER; note = 2'-fluoroguanosine with phosphorothioate linkage
  modified_base 23: mod_base = OTHER; note = 2'-O-methyluridine
aatttataaggcctttcgcccgt

SEQ ID NO: 1331 - RNA, 23 nt, synthetic construct
  source 1..23: mol_type = other RNA
  modified_base 1: mod_base = OTHER; note = 5'-(E)-vinylphosphonate 2'-O-methylated guanosine with phosphorothioate linkage
  modified_base 2: mod_base = OTHER; note = 2'-fluorocytidine with phosphorothioate linkage
  modified_base 3: mod_base = OTHER; note = 2'-O-methyladenosine
  modified_base 4: mod_base = OTHER; note = 2'-fluorouridine
  modified_base 5: mod_base = OTHER; note = 2'-O-methyluridine
  modified_base 6: mod_base = OTHER; note = 2'-fluorouridine
  modified_base 7: mod_base = OTHER; note = 2'-O-methyladenosine
  modified_base 8: mod_base = OTHER; note = 2'-fluorouridine
  modified_base 9: mod_base = OTHER; note = 2'-O-methyladenosine
  modified_base 10: mod_base = OTHER; note = 2'-fluoroadenosine
  modified_base 11: mod_base = OTHER; note = 2'-O-methylguanosine
  modified_base 12: mod_base = OTHER; note = 2'-fluoroguanosine
  modified_base 13: mod_base = OTHER; note = 2'-O-methylcytidine
  modified_base 14: mod_base = OTHER; note = 2'-fluorocytidine
  modified_base 15: mod_base = OTHER; note = 2'-O-methyluridine
  modified_base 16: mod_base = OTHER; note = 2'-fluorouridine
  modified_base 17: mod_base = OTHER; note = 2'-O-methyluridine
  modified_base 18: mod_base = OTHER; note = 2'-fluorocytidine
  modified_base 19: mod_base = OTHER; note = 2'-O-methylguanosine
  modified_base 20: mod_base = OTHER; note = 2'-fluorocytidine
  modified_base 21: mod_base = OTHER; note = 2'-O-methylcytidine with phosphorothioate linkage
  modified_base 22: mod_base = OTHER; note = 2'-fluorocytidine with phosphorothioate linkage
  modified_base 23: mod_base = OTHER; note = 2'-O-methylguanosine
gcatttataaggcctttcgcccg

SEQ ID NO: 1332 - RNA, 23 nt, synthetic construct
  source 1..23: mol_type = other RNA
  modified_base 1: mod_base = OTHER; note = 5'-(E)-vinylphosphonate 2'-O-methylated adenosine with phosphorothioate linkage
  modified_base 2: mod_base = OTHER; note = 2'-fluoroguanosine with phosphorothioate linkage
  modified_base 3: mod_base = OTHER; note = 2'-O-methylcytidine
  modified_base 4: mod_base = OTHER; note = 2'-fluoroadenosine
  modified_base 5: mod_base = OTHER; note = 2'-O-methyluridine
  modified_base 6: mod_base = OTHER; note = 2'-fluorouridine
  modified_base 7: mod_base = OTHER; note = 2'-O-methyluridine
  modified_base 8: mod_base = OTHER; note = 2'-fluoroadenosine
  modified_base 9: mod_base = OTHER; note = 2'-O-methyluridine
  modified_base 10: mod_base = OTHER; note = 2'-fluoroadenosine
  modified_base 11: mod_base = OTHER; note = 2'-O-methyladenosine
  modified_base 12: mod_base = OTHER; note = 2'-fluoroguanosine
  modified_base 13: mod_base = OTHER; note = 2'-O-methylguanosine
  modified_base 14: mod_base = OTHER; note = 2'-fluorocytidine
  modified_base 15: mod_base = OTHER; note = 2'-O-methylcytidine
  modified_base 16: mod_base = OTHER; note = 2'-fluorouridine
  modified_base 17: mod_base = OTHER; note = 2'-O-methyluridine
  modified_base 18: mod_base = OTHER; note = 2'-fluorouridine
  modified_base 19: mod_base = OTHER; note = 2'-O-methylcytidine
  modified_base 20: mod_base = OTHER; note = 2'-fluoroguanosine
  modified_base 21: mod_base = OTHER; note = 2'-O-methylcytidine with phosphorothioate linkage
  modified_base 22: mod_base = OTHER; note = 2'-fluorocytidine with phosphorothioate linkage
  modified_base 23: mod_base = OTHER; note = 2'-O-methylcytidine
agcatttataaggcctttcgccc

SEQ ID NO: 1333 - RNA, 23 nt, synthetic construct
  source 1..23: mol_type = other RNA
  modified_base 1: mod_base = OTHER; note = 5'-(E)-vinylphosphonate 2'-O-methylated adenosine with phosphorothioate linkage
  modified_base 2: mod_base = OTHER; note = 2'-fluorouridine with phosphorothioate linkage
  modified_base 3: mod_base = OTHER; note = 2'-O-methylcytidine
  modified_base 4: mod_base = OTHER; note = 2'-fluoroguanosine
  modified_base 5: mod_base = OTHER; note = 2'-O-methylcytidine
  modified_base 6: mod_base = OTHER; note = 2'-fluoroadenosine
  modified_base 7: mod_base = OTHER; note = 2'-O-methyluridine
  modified_base 8: mod_base = OTHER; note = 2'-fluorouridine
  modified_base 9: mod_base = OTHER; note = 2'-O-methyluridine
  modified_base 10: mod_base = OTHER; note = 2'-fluoroadenosine
  modified_base 11: mod_base = OTHER; note = 2'-O-methyluridine
  modified_base 12: mod_base = OTHER; note = 2'-fluoroadenosine
  modified_base 13: mod_base = OTHER; note = 2'-O-methyladenosine
  modified_base 14: mod_base = OTHER; note = 2'-fluoroguanosine
  modified_base 15: mod_base = OTHER; note = 2'-O-methylguanosine
  modified_base 16: mod_base = OTHER; note = 2'-fluorocytidine
  modified_base 17: mod_base = OTHER; note = 2'-O-methylcytidine
  modified_base 18: mod_base = OTHER; note = 2'-fluorouridine
  modified_base 19: mod_base = OTHER; note = 2'-O-methyluridine
  modified_base 20: mod_base = OTHER; note = 2'-fluorouridine
  modified_base 21: mod_base = OTHER; note = 2'-O-methylcytidine with phosphorothioate linkage
  modified_base 22: mod_base = OTHER; note = 2'-fluoroguanosine with phosphorothioate linkage
  modified_base 23: mod_base = OTHER; note = 2'-O-methylcytidine
atcgcatttataaggcctttcgc

SEQ ID NO: 1334 - RNA, 23 nt, synthetic construct
  source 1..23: mol_type = other RNA
  modified_base 1: mod_base = OTHER; note = 5'-(E)-vinylphosphonate 2'-O-methylated guanosine with phosphorothioate linkage
  modified_base 2: mod_base = OTHER; note = 2'-fluorocytidine with phosphorothioate linkage
  modified_base 3: mod_base = OTHER; note = 2'-O-methyluridine
  modified_base 4: mod_base = OTHER; note = 2'-fluorocytidine
  modified_base 5: mod_base = OTHER; note = 2'-O-methylguanosine
  modified_base 6: mod_base = OTHER; note = 2'-fluorocytidine
  modified_base 7: mod_base = OTHER; note = 2'-O-methyladenosine
  modified_base 8: mod_base = OTHER; note = 2'-fluorouridine
  modified_base 9: mod_base = OTHER; note = 2'-O-methyluridine
  modified_base 10: mod_base = OTHER; note = 2'-fluorouridine
  modified_base 11: mod_base = OTHER; note = 2'-O-methyladenosine
  modified_base 12: mod_base = OTHER; note = 2'-fluorouridine
  modified_base 13: mod_base = OTHER; note = 2'-O-methyladenosine
  modified_base 14: mod_base = OTHER; note = 2'-fluoroadenosine
  modified_base 15: mod_base = OTHER; note = 2'-O-methylguanosine
  modified_base 16: mod_base = OTHER; note = 2'-fluoroguanosine
  modified_base 17: mod_base = OTHER; note = 2'-O-methylcytidine
  modified_base 18: mod_base = OTHER; note = 2'-fluorocytidine
  modified_base 19: mod_base = OTHER; note = 2'-O-methyluridine
  modified_base 20: mod_base = OTHER; note = 2'-fluorouridine
  modified_base 21: mod_base = OTHER; note = 2'-O-methyluridine with phosphorothioate linkage
  modified_base 22: mod_base = OTHER; note = 2'-fluorocytidine with phosphorothioate linkage
  modified_base 23: mod_base = OTHER; note = 2'-O-methylguanosine
gctcgcatttataaggcctttcg

SEQ ID NO: 1335 - RNA, 23 nt, synthetic construct
  source 1..23: mol_type = other RNA
  modified_base 1: mod_base = OTHER; note = 5'-(E)-vinylphosphonate 2'-O-methylated adenosine with phosphorothioate linkage
  modified_base 2: mod_base = OTHER; note = 2'-fluoroguanosine with phosphorothioate linkage
  modified_base 3: mod_base = OTHER; note = 2'-O-methylcytidine
  modified_base 4: mod_base = OTHER; note = 2'-fluorouridine
  modified_base 5: mod_base = OTHER; note = 2'-O-methylcytidine
  modified_base 6: mod_base = OTHER; note = 2'-fluoroguanosine
  modified_base 7: mod_base = OTHER; note = 2'-O-methylcytidine
  modified_base 8: mod_base = OTHER; note = 2'-fluoroadenosine
  modified_base 9: mod_base = OTHER; note = 2'-O-methyluridine
  modified_base 10: mod_base = OTHER; note = 2'-fluorouridine
  modified_base 11: mod_base = OTHER; note = 2'-O-methyluridine
  modified_base 12: mod_base = OTHER; note = 2'-fluoroadenosine
  modified_base 13: mod_base = OTHER; note = 2'-O-methyluridine
  modified_base 14: mod_base = OTHER; note = 2'-fluoroadenosine
  modified_base 15: mod_base = OTHER; note = 2'-O-methyladenosine
  modified_base 16: mod_base = OTHER; note = 2'-fluoroguanosine
  modified_base 17: mod_base = OTHER; note = 2'-O-methylguanosine
  modified_base 18: mod_base = OTHER; note = 2'-fluorocytidine
  modified_base 19: mod_base = OTHER; note = 2'-O-methylcytidine
  modified_base 20: mod_base = OTHER; note = 2'-fluorouridine
  modified_base 21: mod_base = OTHER; note = 2'-O-methyluridine with phosphorothioate linkage
  modified_base 22: mod_base = OTHER; note = 2'-fluorouridine with phosphorothioate linkage
  modified_base 23: mod_base = OTHER; note = 2'-O-methylcytidine
agctcgcatttataaggcctttc

SEQ ID NO: 1336 - RNA, 23 nt, synthetic construct
  source 1..23: mol_type = other RNA
  modified_base 1: mod_base = OTHER; note = 5'-(E)-vinylphosphonate 2'-O-methylated adenosine with phosphorothioate linkage
  modified_base 2: mod_base = OTHER; note = 2'-fluoroadenosine with phosphorothioate linkage
  modified_base 3: mod_base = OTHER; note = 2'-O-methylguanosine
  modified_base 4: mod_base = OTHER; note = 2'-fluorocytidine
  modified_base 5: mod_base = OTHER; note = 2'-O-methyluridine
  modified_base 6: mod_base = OTHER; note = 2'-fluorocytidine
  modified_base 7: mod_base = OTHER; note = 2'-O-methylguanosine
  modified_base 8: mod_base = OTHER; note = 2'-fluorocytidine
  modified_base 9: mod_base = OTHER; note = 2'-O-methyladenosine
  modified_base 10: mod_base = OTHER; note = 2'-fluorouridine
  modified_base 11: mod_base = OTHER; note = 2'-O-methyluridine
  modified_base 12: mod_base = OTHER; note = 2'-fluorouridine
  modified_base 13: mod_base = OTHER; note = 2'-O-methyladenosine
  modified_base 14: mod_base = OTHER; note = 2'-fluorouridine
  modified_base 15: mod_base = OTHER; note = 2'-O-methyladenosine
  modified_base 16: mod_base = OTHER; note = 2'-fluoroadenosine
  modified_base 17: mod_base = OTHER; note = 2'-O-methylguanosine
  modified_base 18: mod_base = OTHER; note = 2'-fluoroguanosine
  modified_base 19: mod_base = OTHER; note = 2'-O-methylcytidine
  modified_base 20: mod_base = OTHER; note = 2'-fluorocytidine
  modified_base 21: mod_base = OTHER; note = 2'-O-methyluridine with phosphorothioate linkage
  modified_base 22: mod_base = OTHER; note = 2'-fluorouridine with phosphorothioate linkage
  modified_base 23: mod_base = OTHER; note = 2'-O-methyluridine
aagctcgcatttataaggccttt

SEQ ID NO: 1337 - RNA, 23 nt, synthetic construct
  source 1..23: mol_type = other RNA
  modified_base 1: mod_base = OTHER; note = 5'-(E)-vinylphosphonate 2'-O-methylated adenosine with phosphorothioate linkage
  modified_base 2: mod_base = OTHER; note = 2'-fluorocytidine with phosphorothioate linkage
  modified_base 3: mod_base = OTHER; note = 2'-O-methyladenosine
  modified_base 4: mod_base = OTHER; note = 2'-fluoroguanosine
  modified_base 5: mod_base = OTHER; note = 2'-O-methylcytidine
  modified_base 6: mod_base = OTHER; note = 2'-fluorouridine
  modified_base 7: mod_base = OTHER; note = 2'-O-methylcytidine
  modified_base 8: mod_base = OTHER; note = 2'-fluoroguanosine
  modified_base 9: mod_base = OTHER; note = 2'-O-methylcytidine
  modified_base 10: mod_base = OTHER; note = 2'-fluoroadenosine
  modified_base 11: mod_base = OTHER; note = 2'-O-methyluridine
  modified_base 12: mod_base = OTHER; note = 2'-fluorouridine
  modified_base 13: mod_base = OTHER; note = 2'-O-methyluridine
  modified_base 14: mod_base = OTHER; note = 2'-fluoroadenosine
  modified_base 15: mod_base = OTHER; note = 2'-O-methyluridine
  modified_base 16: mod_base = OTHER; note = 2'-fluoroadenosine
  modified_base 17: mod_base = OTHER; note = 2'-O-methyladenosine
  modified_base 18: mod_base = OTHER; note = 2'-fluoroguanosine
  modified_base 19: mod_base = OTHER; note = 2'-O-methylguanosine
  modified_base 20: mod_base = OTHER; note = 2'-fluorocytidine
  modified_base 21: mod_base = OTHER; note = 2'-O-methylcytidine with phosphorothioate linkage
  modified_base 22: mod_base = OTHER; note = 2'-fluorouridine with phosphorothioate linkage
  modified_base 23: mod_base = OTHER; note = 2'-O-methyluridine
acagctcgcatttataaggcctt

SEQ ID NO: 1338 - RNA, 23 nt, synthetic construct
  source 1..23: mol_type = other RNA
  modified_base 1: mod_base = OTHER; note = 5'-(E)-vinylphosphonate 2'-O-methylated adenosine with phosphorothioate linkage
  modified_base 2: mod_base = OTHER; note = 2'-fluoroadenosine with phosphorothioate linkage
  modified_base 3: mod_base = OTHER; note = 2'-O-methylcytidine
  modified_base 4: mod_base = OTHER; note = 2'-fluoroadenosine
  modified_base 5: mod_base = OTHER; note = 2'-O-methylguanosine
  modified_base 6: mod_base = OTHER; note = 2'-fluorocytidine
  modified_base 7: mod_base = OTHER; note = 2'-O-methyluridine
  modified_base 8: mod_base = OTHER; note = 2'-fluorocytidine
  modified_base 9: mod_base = OTHER; note = 2'-O-methylguanosine
  modified_base 10: mod_base = OTHER; note = 2'-fluorocytidine
  modified_base 11: mod_base = OTHER; note = 2'-O-methyladenosine
  modified_base 12: mod_base = OTHER; note = 2'-fluorouridine
  modified_base 13: mod_base = OTHER; note = 2'-O-methyluridine
  modified_base 14: mod_base = OTHER; note = 2'-fluorouridine
  modified_base 15: mod_base = OTHER; note = 2'-O-methyladenosine
  modified_base 16: mod_base = OTHER; note = 2'-fluorouridine
  modified_base 17: mod_base = OTHER; note = 2'-O-methyladenosine
  modified_base 18: mod_base = OTHER; note = 2'-fluoroadenosine
  modified_base 19: mod_base = OTHER; note = 2'-O-methylguanosine
  modified_base 20: mod_base = OTHER; note = 2'-fluoroguanosine
  modified_base 21: mod_base = OTHER; note = 2'-O-methylcytidine with phosphorothioate linkage
  modified_base 22: mod_base = OTHER; note = 2'-fluorocytidine with phosphorothioate linkage
  modified_base 23: mod_base = OTHER; note = 2'-O-methyluridine
aacagctcgcatttataaggcct

SEQ ID NO: 1339 - RNA, 23 nt, synthetic construct
  source 1..23: mol_type = other RNA
  modified_base 1: mod_base = OTHER; note = 5'-(E)-vinylphosphonate 2'-O-methylated guanosine with phosphorothioate linkage
  modified_base 2: mod_base = OTHER; note = 2'-fluorocytidine with phosphorothioate linkage
  modified_base 3: mod_base = OTHER; note = 2'-O-methyladenosine
  modified_base 4: mod_base = OTHER; note = 2'-fluorocytidine
  modified_base 5: mod_base = OTHER; note = 2'-O-methyladenosine
  modified_base 6: mod_base = OTHER; note = 2'-fluoroguanosine
  modified_base 7: mod_base = OTHER; note = 2'-O-methylcytidine
  modified_base 8: mod_base = OTHER; note = 2'-fluorouridine
  modified_base 9: mod_base = OTHER; note = 2'-O-methylcytidine
  modified_base 10: mod_base = OTHER; note = 2'-fluoroguanosine
  modified_base 11: mod_base = OTHER; note = 2'-O-methylcytidine
  modified_base 12: mod_base = OTHER; note = 2'-fluoroadenosine
  modified_base 13: mod_base = OTHER; note = 2'-O-methyluridine
  modified_base 14: mod_base = OTHER; note = 2'-fluorouridine
  modified_base 15: mod_base = OTHER; note = 2'-O-methyluridine
  modified_base 16: mod_base = OTHER; note = 2'-fluoroadenosine
  modified_base 17: mod_base = OTHER; note = 2'-O-methyluridine
  modified_base 18: mod_base = OTHER; note = 2'-fluoroadenosine
  modified_base 19: mod_base = OTHER; note = 2'-O-methyladenosine
  modified_base 20: mod_base = OTHER; note = 2'-fluoroguanosine
  modified_base 21: mod_base = OTHER; note = 2'-O-methylguanosine with phosphorothioate linkage
  modified_base 22: mod_base = OTHER; note = 2'-fluorocytidine with phosphorothioate linkage
  modified_base 23: mod_base = OTHER; note = 2'-O-methylcytidine
gcacagctcgcatttataaggcc

SEQ ID NO: 1340 - RNA, 23 nt, synthetic construct
  source 1..23: mol_type = other RNA
  modified_base 1: mod_base = OTHER; note = 5'-(E)-vinylphosphonate 2'-O-methylated uridine with phosphorothioate linkage
  modified_base 2: mod_base = OTHER; note = 2'-fluoroguanosine with phosphorothioate linkage
  modified_base 3: mod_base = OTHER; note = 2'-O-methylcytidine
  modified_base 4: mod_base = OTHER; note = 2'-fluoroadenosine
  modified_base 5: mod_base = OTHER; note = 2'-O-methylcytidine
  modified_base 6: mod_base = OTHER; note = 2'-fluoroadenosine
  modified_base 7: mod_base = OTHER; note = 2'-O-methylguanosine
  modified_base 8: mod_base = OTHER; note = 2'-fluorocytidine
  modified_base 9: mod_base = OTHER; note = 2'-O-methyluridine
  modified_base 10: mod_base = OTHER; note = 2'-fluorocytidine
  modified_base 11: mod_base = OTHER; note = 2'-O-methylguanosine
  modified_base 12: mod_base = OTHER; note = 2'-fluorocytidine
  modified_base 13: mod_base = OTHER; note = 2'-O-methyladenosine
  modified_base 14: mod_base = OTHER; note = 2'-fluorouridine
  modified_base 15: mod_base = OTHER; note = 2'-O-methyluridine
  modified_base 16: mod_base = OTHER; note = 2'-fluorouridine
  modified_base 17: mod_base = OTHER; note = 2'-O-methyladenosine
  modified_base 18: mod_base = OTHER; note = 2'-fluorouridine
  modified_base 19: mod_base = OTHER; note = 2'-O-methyladenosine
  modified_base 20: mod_base = OTHER; note = 2'-fluoroadenosine
  modified_base 21: mod_base = OTHER; note = 2'-O-methylguanosine with phosphorothioate linkage
  modified_base 22: mod_base = OTHER; note = 2'-fluoroguanosine with phosphorothioate linkage
  modified_base 23: mod_base = OTHER; note = 2'-O-methylcytidine
tgcacagctcgcatttataaggc

SEQ ID NO: 1341 - RNA, 23 nt, synthetic construct
  source 1..23: mol_type = other RNA
  modified_base 1: mod_base = OTHER; note = 5'-(E)-vinylphosphonate 2'-O-methylated uridine with phosphorothioate linkage
  modified_base 2: mod_base = OTHER; note = 2'-fluorouridine with phosphorothioate linkage
  modified_base 3: mod_base = OTHER; note = 2'-O-methylguanosine
  modified_base 4: mod_base = OTHER; note = 2'-fluorocytidine
  modified_base 5: mod_base = OTHER; note = 2'-O-methyladenosine
  modified_base 6: mod_base = OTHER; note = 2'-fluorocytidine
  modified_base 7: mod_base = OTHER; note = 2'-O-methyladenosine
  modified_base 8: mod_base = OTHER; note = 2'-fluoroguanosine
  modified_base 9: mod_base = OTHER; note = 2'-O-methylcytidine
  modified_base 10: mod_base = OTHER; note = 2'-fluorouridine
  modified_base 11: mod_base = OTHER; note = 2'-O-methylcytidine
  modified_base 12: mod_base = OTHER; note = 2'-fluoroguanosine
  modified_base 13: mod_base = OTHER; note = 2'-O-methylcytidine
  modified_base 14: mod_base = OTHER; note = 2'-fluoroadenosine
  modified_base 15: mod_base = OTHER; note = 2'-O-methyluridine
  modified_base 16: mod_base = OTHER; note = 2'-fluorouridine
  modified_base 17: mod_base = OTHER; note = 2'-O-methyluridine
  modified_base 18: mod_base = OTHER; note = 2'-fluoroadenosine
  modified_base 19: mod_base = OTHER; note = 2'-O-methyluridine
  modified_base 20: mod_base = OTHER; note = 2'-fluoroadenosine
  modified_base 21: mod_base = OTHER; note = 2'-O-methyladenosine with phosphorothioate linkage
  modified_base 22: mod_base = OTHER; note = 2'-fluoroguanosine with phosphorothioate linkage
  modified_base 23: mod_base = OTHER; note = 2'-O-methylguanosine
ttgcacagctcgcatttataagg

SEQ ID NO: 1342 - RNA, 23 nt, synthetic construct
  source 1..23: mol_type = other RNA
  modified_base 1: mod_base = OTHER; note = 5'-(E)-vinylphosphonate 2'-O-methylated guanosine with phosphorothioate linkage
  modified_base 2: mod_base = OTHER; note = 2'-fluorouridine with phosphorothioate linkage
  modified_base 3: mod_base = OTHER; note = 2'-O-methyluridine
  modified_base 4: mod_base = OTHER; note = 2'-fluoroguanosine
  modified_base 5: mod_base = OTHER; note = 2'-O-methylcytidine
  modified_base 6: mod_base = OTHER; note = 2'-fluoroadenosine
  modified_base 7: mod_base = OTHER; note = 2'-O-methylcytidine
  modified_base 8: mod_base = OTHER; note = 2'-fluoroadenosine
  modified_base 9: mod_base = OTHER; note = 2'-O-methylguanosine
  modified_base 10: mod_base = OTHER; note = 2'-fluorocytidine
  modified_base 11: mod_base = OTHER; note = 2'-O-methyluridine
  modified_base 12: mod_base = OTHER; note = 2'-fluorocytidine
  modified_base 13: mod_base = OTHER; note = 2'-O-methylguanosine
  modified_base 14: mod_base = OTHER; note = 2'-fluorocytidine
  modified_base 15: mod_base = OTHER; note = 2'-O-methyladenosine
  modified_base 16: mod_base = OTHER; note = 2'-fluorouridine
  modified_base 17: mod_base = OTHER; note = 2'-O-methyluridine
  modified_base 18: mod_base = OTHER; note = 2'-fluorouridine
  modified_base 19: mod_base = OTHER; note = 2'-O-methyladenosine
  modified_base 20: mod_base = OTHER; note = 2'-fluorouridine
  modified_base 21: mod_base = OTHER; note = 2'-O-methyladenosine with phosphorothioate linkage
  modified_base 22: mod_base = OTHER; note = 2'-fluoroadenosine with phosphorothioate linkage
  modified_base 23: mod_base = OTHER; note = 2'-O-methylguanosine
gttgcacagctcgcatttataag

SEQ ID NO: 1343 - RNA, 23 nt, synthetic construct
  source 1..23: mol_type = other RNA
  modified_base 1: mod_base = OTHER; note = 5'-(E)-vinylphosphonate 2'-O-methylated adenosine with phosphorothioate linkage
  modified_base 2: mod_base = OTHER; note = 2'-fluoroguanosine with phosphorothioate linkage
  modified_base 3: mod_base = OTHER; note = 2'-O-methyluridine
  modified_base 4: mod_base = OTHER; note = 2'-fluorouridine
  modified_base 5: mod_base = OTHER; note = 2'-O-methylguanosine
  modified_base 6: mod_base = OTHER; note = 2'-fluorocytidine
  modified_base 7: mod_base = OTHER; note = 2'-O-methyladenosine
  modified_base 8: mod_base = OTHER; note = 2'-fluorocytidine
  modified_base 9: mod_base = OTHER; note = 2'-O-methyladenosine
  modified_base 10: mod_base = OTHER; note = 2'-fluoroguanosine
  modified_base 11: mod_base = OTHER; note = 2'-O-methylcytidine
  modified_base 12: mod_base = OTHER; note = 2'-fluorouridine
  modified_base 13: mod_base = OTHER; note = 2'-O-methylcytidine
  modified_base 14: mod_base = OTHER; note = 2'-fluoroguanosine
  modified_base 15: mod_base = OTHER; note = 2'-O-methylcytidine
  modified_base 16: mod_base = OTHER; note = 2'-fluoroadenosine
  modified_base 17: mod_base = OTHER; note = 2'-O-methyluridine
  modified_base 18: mod_base = OTHER; note = 2'-fluorouridine
  modified_base 19: mod_base = OTHER; note = 2'-O-methyluridine
  modified_base 20: mod_base = OTHER; note = 2'-fluoroadenosine
  modified_base 21: mod_base = OTHER; note = 2'-O-methyluridine with phosphorothioate linkage
  modified_base 22: mod_base = OTHER; note = 2'-fluoroadenosine with phosphorothioate linkage
  modified_base 23: mod_base = OTHER; note = 2'-O-methyladenosine
agttgcacagctcgcatttataa

SEQ ID NO: 1344 - RNA, 23 nt, synthetic construct
  source 1..23: mol_type = other RNA
  modified_base 1: mod_base = OTHER; note = 5'-(E)-vinylphosphonate 2'-O-methylated uridine with phosphorothioate linkage
  modified_base 2: mod_base = OTHER; note = 2'-fluoroadenosine with phosphorothioate linkage
  modified_base 3: mod_base = OTHER; note = 2'-O-methylguanosine
  modified_base 4: mod_base = OTHER; note = 2'-fluorouridine
  modified_base 5: mod_base = OTHER; note = 2'-O-methyluridine
  modified_base 6: mod_base = OTHER; note = 2'-fluoroguanosine
  modified_base 7: mod_base = OTHER; note = 2'-O-methylcytidine
  modified_base 8: mod_base = OTHER; note = 2'-fluoroadenosine
  modified_base 9: mod_base = OTHER; note = 2'-O-methylcytidine
  modified_base 10: mod_base = OTHER; note = 2'-fluoroadenosine
  modified_base 11: mod_base = OTHER; note = 2'-O-methylguanosine
  modified_base 12: mod_base = OTHER; note = 2'-fluorocytidine
  modified_base 13: mod_base = OTHER; note = 2'-O-methyluridine
  modified_base 14: mod_base = OTHER; note = 2'-fluorocytidine
  modified_base 15: mod_base = OTHER; note = 2'-O-methylguanosine
  modified_base 16: mod_base = OTHER; note = 2'-fluorocytidine
  modified_base 17: mod_base = OTHER; note = 2'-O-methyladenosine
  modified_base 18: mod_base = OTHER; note = 2'-fluorouridine
  modified_base 19: mod_base = OTHER; note = 2'-O-methyluridine
  modified_base 20: mod_base = OTHER; note = 2'-fluorouridine
  modified_base 21: mod_base = OTHER; note = 2'-O-methyladenosine with phosphorothioate linkage
  modified_base 22: mod_base = OTHER; note = 2'-fluorouridine with phosphorothioate linkage
  modified_base 23: mod_base = OTHER; note = 2'-O-methyladenosine
tagttgcacagctcgcatttata

SEQ ID NO: 1345 - RNA, 23 nt, synthetic construct
  source 1..23: mol_type = other RNA
  modified_base 1: mod_base = OTHER; note = 5'-(E)-vinylphosphonate 2'-O-methylated adenosine with phosphorothioate linkage
  modified_base 2: mod_base = OTHER; note = 2'-fluorouridine with phosphorothioate linkage
  modified_base 3: mod_base = OTHER; note = 2'-O-methyladenosine
  modified_base 4: mod_base = OTHER; note = 2'-fluoroguanosine
  modified_base 5: mod_base = OTHER; note = 2'-O-methyluridine
  modified_base 6: mod_base = OTHER; note = 2'-fluorouridine
  modified_base 7: mod_base = OTHER; note = 2'-O-methylguanosine
  modified_base 8: mod_base = OTHER; note = 2'-fluorocytidine
  modified_base 9: mod_base = OTHER; note = 2'-O-methyladenosine
  modified_base 10: mod_base = OTHER; note = 2'-fluorocytidine
  modified_base 11: mod_base = OTHER; note = 2'-O-methyladenosine
  modified_base 12: mod_base = OTHER; note = 2'-fluoroguanosine
  modified_base 13: mod_base = OTHER; note = 2'-O-methylcytidine
  modified_base 14: mod_base = OTHER; note = 2'-fluorouridine
  modified_base 15: mod_base = OTHER; note = 2'-O-methylcytidine
  modified_base 16: mod_base = OTHER; note = 2'-fluoroguanosine
  modified_base 17: mod_base = OTHER; note = 2'-O-methylcytidine
  modified_base 18: mod_base = OTHER; note = 2'-fluoroadenosine
  modified_base 19: mod_base = OTHER; note = 2'-O-methyluridine
  modified_base 20: mod_base = OTHER; note = 2'-fluorouridine
  modified_base 21: mod_base = OTHER; note = 2'-O-methyluridine with phosphorothioate linkage
  modified_base 22: mod_base = OTHER; note = 2'-fluoroadenosine with phosphorothioate linkage
  modified_base 23: mod_base = OTHER; note = 2'-O-methyluridine
atagttgcacagctcgcatttat

SEQ ID NO: 1346 - RNA, 23 nt, synthetic construct
  source 1..23: mol_type = other RNA
  modified_base 1: mod_base = OTHER; note = 5'-(E)-vinylphosphonate 2'-O-methylated adenosine with phosphorothioate linkage
  modified_base 2: mod_base = OTHER; note = 2'-fluoroadenosine with phosphorothioate linkage
  modified_base 3: mod_base = OTHER; note = 2'-O-methyluridine
  modified_base 4: mod_base = OTHER; note = 2'-fluoroadenosine
  modified_base 5: mod_base = OTHER; note = 2'-O-methylguanosine
  modified_base 6: mod_base = OTHER; note = 2'-fluorouridine
  modified_base 7: mod_base = OTHER; note = 2'-O-methyluridine
  modified_base 8: mod_base = OTHER; note = 2'-fluoroguanosine
  modified_base 9: mod_base = OTHER; note = 2'-O-methylcytidine
  modified_base 10: mod_base = OTHER; note = 2'-fluoroadenosine
  modified_base 11: mod_base = OTHER; note = 2'-O-methylcytidine
  modified_base 12: mod_base = OTHER; note = 2'-fluoroadenosine
  modified_base 13: mod_base = OTHER; note = 2'-O-methylguanosine
  modified_base 14: mod_base = OTHER; note = 2'-fluorocytidine
  modified_base 15: mod_base = OTHER; note = 2'-O-methyluridine
  modified_base 16: mod_base = OTHER; note = 2'-fluorocytidine
  modified_base 17: mod_base = OTHER; note = 2'-O-methylguanosine
  modified_base 18: mod_base = OTHER; note = 2'-fluorocytidine
  modified_base 19: mod_base = OTHER; note = 2'-O-methyladenosine
  modified_base 20: mod_base = OTHER; note = 2'-fluorouridine
  modified_base 21: mod_base = OTHER; note = 2'-O-methyluridine with phosphorothioate linkage
  modified_base 22: mod_base = OTHER; note = 2'-fluorouridine with phosphorothioate linkage
  modified_base 23: mod_base = OTHER; note = 2'-O-methyladenosine
aatagttgcacagctcgcattta

SEQ ID NO: 1347 - RNA, 23 nt, synthetic construct
  source 1..23: mol_type = other RNA
  modified_base 1: mod_base = OTHER; note = 5'-(E)-vinylphosphonate 2'-O-methylated guanosine with phosphorothioate linkage
  modified_base 2: mod_base = OTHER; note = 2'-fluorocytidine with phosphorothioate linkage
  modified_base 3: mod_base = OTHER; note = 2'-O-methyladenosine
  modified_base 4: mod_base = OTHER; note = 2'-fluorouridine
  modified_base 5: mod_base = OTHER; note = 2'-O-methyladenosine
  modified_base 6: mod_base = OTHER; note = 2'-fluoroguanosine
  modified_base 7: mod_base = OTHER; note = 2'-O-methyluridine
  modified_base 8: mod_base = OTHER; note = 2'-fluorouridine
  modified_base 9: mod_base = OTHER; note = 2'-O-methylguanosine
  modified_base 10: mod_base = OTHER; note = 2'-fluorocytidine
  modified_base 11: mod_base = OTHER; note = 2'-O-methyladenosine
  modified_base 12: mod_base = OTHER; note = 2'-fluorocytidine
  modified_base 13: mod_base = OTHER; note = 2'-O-methyladenosine
  modified_base 14: mod_base = OTHER; note = 2'-fluoroguanosine
  modified_base 15: mod_base = OTHER; note = 2'-O-methylcytidine
  modified_base 16: mod_base = OTHER; note = 2'-fluorouridine
  modified_base 17: mod_base = OTHER; note = 2'-O-methylcytidine
  modified_base 18: mod_base = OTHER; note = 2'-fluoroguanosine
  modified_base 19: mod_base = OTHER; note = 2'-O-methylcytidine
  modified_base 20: mod_base = OTHER; note = 2'-fluoroadenosine
  modified_base 21: mod_base = OTHER; note = 2'-O-methyluridine with phosphorothioate linkage
  modified_base 22: mod_base = OTHER; note = 2'-fluorouridine with phosphorothioate linkage
  modified_base 23: mod_base = OTHER; note = 2'-O-methyluridine
gcatagttgcacagctcgcattt

SEQ ID NO: 1348 - RNA, 23 nt, synthetic construct
  source 1..23: mol_type = other RNA
  modified_base 1: mod_base = OTHER; note = 5'-(E)-vinylphosphonate 2'-O-methylated adenosine with phosphorothioate linkage
  modified_base 2: mod_base = OTHER; note = 2'-fluoroguanosine with phosphorothioate linkage
  modified_base 3: mod_base = OTHER; note = 2'-O-methylguanosine
  modified_base 4: mod_base = OTHER; note = 2'-fluorocytidine
  modified_base 5: mod_base = OTHER; note = 2'-O-methyladenosine
  modified_base 6: mod_base = OTHER; note = 2'-fluorouridine
  modified_base 7: mod_base = OTHER; note = 2'-O-methyladenosine
  modified_base 8: mod_base = OTHER; note = 2'-fluoroguanosine
  modified_base 9: mod_base = OTHER; note = 2'-O-methyluridine
  modified_base 10: mod_base = OTHER; note = 2'-fluorouridine
  modified_base 11: mod_base = OTHER; note = 2'-O-methylguanosine
  modified_base 12: mod_base = OTHER; note = 2'-fluorocytidine
  modified_base 13: mod_base = OTHER; note = 2'-O-methyladenosine
  modified_base 14: mod_base = OTHER; note = 2'-fluorocytidine
  modified_base 15: mod_base = OTHER; note = 2'-O-methyladenosine
  modified_base 16: mod_base = OTHER; note = 2'-fluoroguanosine
  modified_base 17: mod_base = OTHER; note = 2'-O-methylcytidine
  modified_base 18: mod_base = OTHER; note = 2'-fluorouridine
  modified_base 19: mod_base = OTHER; note = 2'-O-methylcytidine
  modified_base 20: mod_base = OTHER; note = 2'-fluoroguanosine
  modified_base 21: mod_base = OTHER; note = 2'-O-methylcytidine with phosphorothioate linkage
  modified_base 22: mod_base = OTHER; note = 2'-fluoroadenosine with phosphorothioate linkage
  modified_base 23: mod_base = OTHER; note = 2'-O-methyluridine
aggcatagttgcacagctcgcat

SEQ ID NO: 1349 - RNA, 23 nt, synthetic construct
  source 1..23: mol_type = other RNA
  modified_base 1: mod_base = OTHER; note = 5'-(E)-vinylphosphonate 2'-O-methylated adenosine with phosphorothioate linkage
  modified_base 2: mod_base = OTHER; note = 2'-fluorocytidine with phosphorothioate linkage
  modified_base 3: mod_base = OTHER; note = 2'-O-methyladenosine
  modified_base 4: mod_base = OTHER; note = 2'-fluoroguanosine
  modified_base 5: mod_base = OTHER; note = 2'-O-methylguanosine
  modified_base 6: mod_base = OTHER; note = 2'-fluorocytidine
  modified_base 7: mod_base = OTHER; note = 2'-O-methyladenosine
  modified_base 8: mod_base = OTHER; note = 2'-fluorouridine
  modified_base 9: mod_base = OTHER; note = 2'-O-methyladenosine
  modified_base 10: mod_base = OTHER; note = 2'-fluoroguanosine
  modified_base 11: mod_base = OTHER; note = 2'-O-methyluridine
  modified_base 12: mod_base = OTHER; note = 2'-fluorouridine
  modified_base 13: mod_base = OTHER; note = 2'-O-methylguanosine
  modified_base 14: mod_base = OTHER; note = 2'-fluorocytidine
  modified_base 15: mod_base = OTHER; note = 2'-O-methyladenosine
  modified_base 16: mod_base = OTHER; note = 2'-fluorocytidine
  modified_base 17: mod_base = OTHER; note = 2'-O-methyladenosine
  modified_base 18: mod_base = OTHER; note = 2'-fluoroguanosine
  modified_base 19: mod_base = OTHER; note = 2'-O-methylcytidine
  modified_base 20: mod_base = OTHER; note = 2'-fluorouridine
  modified_base 21: mod_base = OTHER; note = 2'-O-methylcytidine with phosphorothioate linkage
  modified_base 22: mod_base = OTHER; note = 2'-fluoroguanosine with phosphorothioate linkage
  modified_base 23: mod_base = OTHER; note = 2'-O-methylcytidine
acaggcatagttgcacagctcgc

SEQ ID NO: 1350 - RNA, 23 nt, synthetic construct
  source 1..23: mol_type = other RNA
  modified_base 1: mod_base = OTHER; note = 5'-(E)-vinylphosphonate 2'-O-methylated guanosine with phosphorothioate linkage
  modified_base 2: mod_base = OTHER; note = 2'-fluorocytidine with phosphorothioate linkage
  modified_base 3: mod_base = OTHER; note = 2'-O-methyladenosine
  modified_base 4: mod_base = OTHER; note = 2'-fluorocytidine
  modified_base 5: mod_base = OTHER; note = 2'-O-methyladenosine
  modified_base 6: mod_base = OTHER; note = 2'-fluoroguanosine
  modified_base 7: mod_base = OTHER; note = 2'-O-methylguanosine
  modified_base 8: mod_base = OTHER; note = 2'-fluorocytidine
  modified_base 9: mod_base = OTHER; note = 2'-O-methyladenosine
  modified_base 10: mod_base = OTHER; note = 2'-fluorouridine
  modified_base 11: mod_base = OTHER; note = 2'-O-methyladenosine
  modified_base 12: mod_base = OTHER; note = 2'-fluoroguanosine
  modified_base 13: mod_base = OTHER; note = 2'-O-methyluridine
  modified_base 14: mod_base = OTHER; note = 2'-fluorouridine
  modified_base 15: mod_base = OTHER; note = 2'-O-methylguanosine
  modified_base 16: mod_base = OTHER; note = 2'-fluorocytidine
  modified_base 17: mod_base = OTHER; note = 2'-O-methyladenosine
  modified_base 18: mod_base = OTHER; note = 2'-fluorocytidine
  modified_base 19: mod_base = OTHER; note = 2'-O-methyladenosine
  modified_base 20: mod_base = OTHER; note = 2'-fluoroguanosine
  modified_base 21: mod_base = OTHER; note = 2'-O-methylcytidine with phosphorothioate linkage
  modified_base 22: mod_base = OTHER; note = 2'-fluorouridine with phosphorothioate linkage
  modified_base 23: mod_base = OTHER; note = 2'-O-methylcytidine
gcacaggcatagttgcacagctc

SEQ ID NO: 1351 - RNA, 23 nt, synthetic construct
  source 1..23: mol_type = other RNA
  modified_base 1: mod_base = OTHER; note = 5'-(E)-vinylphosphonate 2'-O-methylated adenosine with phosphorothioate linkage
  modified_base 2: mod_base = OTHER; note = 2'-fluorocytidine with phosphorothioate linkage
  modified_base 3: mod_base = OTHER; note = 2'-O-methyladenosine
  modified_base 4: mod_base = OTHER; note = 2'-fluorouridine
  modified_base 5: mod_base = OTHER; note = 2'-O-methyluridine
  modified_base 6: mod_base = OTHER; note = 2'-fluorouridine
  modified_base 7: mod_base = OTHER; note = 2'-O-methylguanosine
  modified_base 8: mod_base = OTHER; note = 2'-fluorouridine
  modified_base 9: mod_base = OTHER; note = 2'-O-methyladenosine
  modified_base 10: mod_base = OTHER; note = 2'-fluoroadenosine
  modified_base 11: mod_base = OTHER; note = 2'-O-methyladenosine
  modified_base 12: mod_base = OTHER; note = 2'-fluorocytidine
  modified_base 13: mod_base = OTHER; note = 2'-O-methylguanosine
  modified_base 14: mod_base = OTHER; note = 2'-fluorouridine
  modified_base 15: mod_base = OTHER; note = 2'-O-methylcytidine
  modified_base 16: mod_base = OTHER; note = 2'-fluorocytidine
  modified_base 17: mod_base = OTHER; note = 2'-O-methyluridine
  modified_base 18: mod_base = OTHER; note = 2'-fluorouridine
  modified_base 19: mod_base = OTHER; note = 2'-O-methylcytidine
  modified_base 20: mod_base = OTHER; note = 2'-fluorocytidine
  modified_base 21: mod_base = OTHER; note = 2'-O-methylcytidine with phosphorothioate linkage
  modified_base 22: mod_base = OTHER; note = 2'-fluorocytidine with phosphorothioate linkage
  modified_base 23: mod_base = OTHER; note = 2'-O-methyladenosine
acatttgtaaacgtccttcccca

SEQ ID NO: 1352 - RNA, 23 nt, synthetic construct
  source 1..23: mol_type = other RNA
  modified_base 1: mod_base = OTHER; note = 5'-(E)-vinylphosphonate 2'-O-methylated adenosine with phosphorothioate linkage
  modified_base 2: mod_base = OTHER; note = 2'-fluoroadenosine with phosphorothioate linkage
  modified_base 3: mod_base = OTHER; note = 2'-O-methylcytidine
  modified_base 4: mod_base = OTHER; note = 2'-fluoroadenosine
  modified_base 5: mod_base = OTHER; note = 2'-O-methyluridine
  modified_base 6: mod_base = OTHER; note = 2'-fluorouridine
  modified_base 7: mod_base = OTHER; note = 2'-O-methyluridine
  modified_base 8: mod_base = OTHER; note = 2'-fluoroguanosine
  modified_base 9: mod_base = OTHER; note = 2'-O-methyluridine
  modified_base 10: mod_base = OTHER; note = 2'-fluoroadenosine
  modified_base 11: mod_base = OTHER; note = 2'-O-methyladenosine
  modified_base 12: mod_base = OTHER; note = 2'-fluoroadenosine
  modified_base 13: mod_base = OTHER; note = 2'-O-methylcytidine
  modified_base 14: mod_base = OTHER; note = 2'-fluoroguanosine
  modified_base 15: mod_base = OTHER; note = 2'-O-methyluridine
  modified_base 16: mod_base = OTHER; note = 2'-fluorocytidine
  modified_base 17: mod_base = OTHER; note = 2'-O-methylcytidine
  modified_base 18: mod_base = OTHER; note = 2'-fluorouridine
  modified_base 19: mod_base = OTHER; note = 2'-O-methyluridine
  modified_base 20: mod_base = OTHER; note = 2'-fluorocytidine
  modified_base 21: mod_base = OTHER; note = 2'-O-methylcytidine with phosphorothioate linkage
  modified_base 22: mod_base = OTHER; note = 2'-fluorocytidine with phosphorothioate linkage
  modified_base 23: mod_base = OTHER; note = 2'-O-methylcytidine
aacatttgtaaacgtccttcccc

SEQ ID NO: 1353 - RNA, 23 nt, synthetic construct
  source 1..23: mol_type = other RNA
  modified_base 1: mod_base = OTHER; note = 5'-(E)-vinylphosphonate 2'-O-methylated adenosine with phosphorothioate linkage
  modified_base 2: mod_base = OTHER; note = 2'-fluorocytidine with phosphorothioate linkage
  modified_base 3: mod_base = OTHER; note = 2'-O-methylguanosine
  modified_base 4: mod_base = OTHER; note = 2'-fluorocytidine
  modified_base 5: mod_base = OTHER; note = 2'-O-methyluridine
  modified_base 6: mod_base = OTHER; note = 2'-fluoroadenosine
  modified_base 7: mod_base = OTHER; note = 2'-O-methyladenosine
  modified_base 8: mod_base = OTHER; note = 2'-fluoroadenosine
  modified_base 9: mod_base = OTHER; note = 2'-O-methyladenosine
  modified_base 10: mod_base = OTHER; note = 2'-fluoroguanosine
  modified_base 11: mod_base = OTHER; note = 2'-O-methylguanosine
  modified_base 12: mod_base = OTHER; note = 2'-fluorocytidine
  modified_base 13: mod_base = OTHER; note = 2'-O-methyladenosine
  modified_base 14: mod_base = OTHER; note = 2'-fluorouridine
  modified_base 15: mod_base = OTHER; note = 2'-O-methylcytidine
  modified_base 16: mod_base = OTHER; note = 2'-fluorouridine
  modified_base 17: mod_base = OTHER; note = 2'-O-methyluridine
  modified_base 18: mod_base = OTHER; note = 2'-fluoroadenosine
  modified_base 19: mod_base = OTHER; note = 2'-O-methylcytidine
  modified_base 20: mod_base = OTHER; note = 2'-fluoroadenosine
  modified_base 21: mod_base = OTHER; note = 2'-O-methyladenosine with phosphorothioate linkage
  modified_base 22: mod_base = OTHER; note = 2'-fluoroadenosine with phosphorothioate linkage
  modified_base 23: mod_base = OTHER; note = 2'-O-methyluridine
acgctaaaaggcatcttacaaat

SEQ ID NO: 1354 - RNA, 23 nt, synthetic construct
  source 1..23: mol_type = other RNA
  modified_base 1: mod_base = OTHER; note = 5'-(E)-vinylphosphonate 2'-O-methylated adenosine with phosphorothioate linkage
  modified_base 2: mod_base = OTHER; note = 2'-fluoroadenosine with phosphorothioate linkage
  modified_base 3: mod_base = OTHER; note = 2'-O-methylcytidine
  modified_base 4: mod_base = OTHER; note = 2'-fluoroguanosine
  modified_base 5: mod_base = OTHER; note = 2'-O-methylcytidine
  modified_base 6: mod_base = OTHER; note = 2'-fluorouridine
  modified_base 7: mod_base = OTHER; note = 2'-O-methyladenosine
  modified_base 8: mod_base = OTHER; note = 2'-fluoroadenosine
  modified_base 9: mod_base = OTHER; note = 2'-O-methyladenosine
  modified_base 10: mod_base = OTHER; note = 2'-fluoroadenosine
  modified_base 11: mod_base = OTHER; note = 2'-O-methylguanosine
  modified_base 12: mod_base = OTHER; note = 2'-fluoroguanosine
  modified_base 13: mod_base = OTHER; note = 2'-O-methylcytidine
  modified_base 14: mod_base = OTHER; note = 2'-fluoroadenosine
  modified_base 15: mod_base = OTHER; note = 2'-O-methyluridine
  modified_base 16: mod_base = OTHER; note = 2'-fluorocytidine
  modified_base 17: mod_base = OTHER; note = 2'-O-methyluridine
  modified_base 18: mod_base = OTHER; note = 2'-fluorouridine
  modified_base 19: mod_base = OTHER; note = 2'-O-methyladenosine
  modified_base 20: mod_base = OTHER; note = 2'-fluorocytidine
  modified_base 21: mod_base = OTHER; note = 2'-O-methyladenosine with phosphorothioate linkage
  modified_base 22: mod_base = OTHER; note = 2'-fluoroadenosine with phosphorothioate linkage
  modified_base 23: mod_base = OTHER; note = 2'-O-methyladenosine
aacgctaaaaggcatcttacaaa

SEQ ID NO: 1355 - RNA, 23 nt, synthetic construct
  source 1..23: mol_type = other RNA
  modified_base 1: mod_base = OTHER; note = 5'-(E)-vinylphosphonate 2'-O-methylated adenosine with phosphorothioate linkage
  modified_base 2: mod_base = OTHER; note = 2'-fluorocytidine with phosphorothioate linkage
  modified_base 3: mod_base = OTHER; note = 2'-O-methyladenosine
  modified_base 4: mod_base = OTHER; note = 2'-fluorocytidine
  modified_base 5: mod_base = OTHER; note = 2'-O-methylguanosine
  modified_base 6: mod_base = OTHER; note = 2'-fluorocytidine
  modified_base 7: mod_base = OTHER; note = 2'-O-methyluridine
  modified_base 8: mod_base = OTHER; note = 2'-fluoroadenosine
  modified_base 9: mod_base = OTHER; note = 2'-O-methyladenosine
  modified_base 10: mod_base = OTHER; note = 2'-fluoroadenosine
  modified_base 11: mod_base = OTHER; note = 2'-O-methyladenosine
  modified_base 12: mod_base = OTHER; note = 2'-fluoroguanosine
  modified_base 13: mod_base = OTHER; note = 2'-O-methylguanosine
  modified_base 14: mod_base = OTHER; note = 2'-fluorocytidine
  modified_base 15: mod_base = OTHER; note = 2'-O-methyladenosine
  modified_base 16: mod_base = OTHER; note = 2'-fluorouridine
  modified_base 17: mod_base = OTHER; note = 2'-O-methylcytidine
  modified_base 18: mod_base = OTHER; note = 2'-fluorouridine
  modified_base 19: mod_base = OTHER; note = 2'-O-methyluridine
  modified_base 20: mod_base = OTHER; note = 2'-fluoroadenosine
  modified_base 21: mod_base = OTHER; note = 2'-O-methylcytidine with phosphorothioate linkage
  modified_base 22: mod_base = OTHER; note = 2'-fluoroadenosine with phosphorothioate linkage
  modified_base 23: mod_base = OTHER; note = 2'-O-methyladenosine
acacgctaaaaggcatcttacaa

SEQ ID NO: 1356 - RNA, 23 nt, synthetic construct
  source 1..23: mol_type = other RNA
  modified_base 1: mod_base = OTHER; note = 5'-(E)-vinylphosphonate 2'-O-methylated uridine with phosphorothioate linkage
  modified_base 2: mod_base = OTHER; note = 2'-fluoroadenosine with phosphorothioate linkage
  modified_base 3: mod_base = OTHER; note = 2'-O-methylcytidine
  modified_base 4: mod_base = OTHER; note = 2'-fluoroadenosine
  modified_base 5: mod_base = OTHER; note = 2'-O-methylcytidine
  modified_base 6: mod_base = OTHER; note = 2'-fluoroguanosine
  modified_base 7: mod_base = OTHER; note = 2'-O-methylcytidine
  modified_base 8: mod_base = OTHER; note = 2'-fluorouridine
  modified_base 9: mod_base = OTHER; note = 2'-O-methyladenosine
  modified_base 10: mod_base = OTHER; note = 2'-fluoroadenosine
  modified_base 11: mod_base = OTHER; note = 2'-O-methyladenosine
  modified_base 12: mod_base = OTHER; note = 2'-fluoroadenosine
  modified_base 13: mod_base = OTHER; note = 2'-O-methylguanosine
  modified_base 14: mod_base = OTHER; note = 2'-fluoroguanosine
  modified_base 15: mod_base = OTHER; note = 2'-O-methylcytidine
  modified_base 16: mod_base = OTHER; note = 2'-fluoroadenosine
  modified_base 17: mod_base = OTHER; note = 2'-O-methyluridine
  modified_base 18: mod_base = OTHER; note = 2'-fluorocytidine
  modified_base 19: mod_base = OTHER; note = 2'-O-methyluridine
  modified_base 20: mod_base = OTHER; note = 2'-fluorouridine
  modified_base 21: mod_base = OTHER; note = 2'-O-methyladenosine with phosphorothioate linkage
  modified_base 22: mod_base = OTHER; note = 2'-fluorocytidine with phosphorothioate linkage
  modified_base 23: mod_base = OTHER; note = 2'-O-methyladenosine
tacacgctaaaaggcatcttaca

SEQ ID NO: 1357 - RNA, 23 nt, synthetic construct
  source 1..23: mol_type = other RNA
  modified_base 1: mod_base = OTHER; note = 5'-(E)-vinylphosphonate 2'-O-methylated guanosine with phosphorothioate linkage
  modified_base 2: mod_base = OTHER; note = 2'-fluorouridine with phosphorothioate linkage
  modified_base 3: mod_base = OTHER; note = 2'-O-methyladenosine
  modified_base 4: mod_base = OTHER; note = 2'-fluorocytidine
  modified_base 5: mod_base = OTHER; note = 2'-O-methyladenosine
  modified_base 6: mod_base = OTHER; note = 2'-fluorocytidine
  modified_base 7: mod_base = OTHER; note = 2'-O-methylguanosine
  modified_base 8: mod_base = OTHER; note = 2'-fluorocytidine
  modified_base 9: mod_base = OTHER; note = 2'-O-methyluridine
  modified_base 10: mod_base = OTHER; note = 2'-fluoroadenosine
  modified_base 11: mod_base = OTHER; note = 2'-O-methyladenosine
  modified_base 12: mod_base = OTHER; note = 2'-fluoroadenosine
  modified_base 13: mod_base = OTHER; note = 2'-O-methyladenosine
  modified_base 14: mod_base = OTHER; note = 2'-fluoroguanosine
  modified_base 15: mod_base = OTHER; note = 2'-O-methylguanosine
  modified_base 16: mod_base = OTHER; note = 2'-fluorocytidine
  modified_base 17: mod_base = OTHER; note = 2'-O-methyladenosine
  modified_base 18: mod_base = OTHER; note = 2'-fluorouridine
  modified_base 19: mod_base = OTHER; note = 2'-O-methylcytidine
  modified_base 20: mod_base = OTHER; note = 2'-fluorouridine
  modified_base 21: mod_base = OTHER; note = 2'-O-methyluridine with phosphorothioate linkage
  modified_base 22: mod_base = OTHER; note = 2'-fluoroadenosine with phosphorothioate linkage
  modified_base 23: mod_base = OTHER; note = 2'-O-methylcytidine
gtacacgctaaaaggcatcttac

SEQ ID NO: 1358 - RNA, 23 nt, synthetic construct
  source 1..23: mol_type = other RNA
  modified_base 1: mod_base = OTHER; note = 5'-(E)-vinylphosphonate 2'-O-methylated uridine with phosphorothioate linkage
  modified_base 2: mod_base = OTHER; note = 2'-fluoroguanosine with phosphorothioate linkage
  modified_base 3: mod_base = OTHER; note = 2'-O-methyluridine
  modified_base 4: mod_base = OTHER; note = 2'-fluoroadenosine
  modified_base 5: mod_base = OTHER; note = 2'-O-methylcytidine
  modified_base 6: mod_base = OTHER; note = 2'-fluoroadenosine
  modified_base 7: mod_base = OTHER; note = 2'-O-methylcytidine
  modified_base 8: mod_base = OTHER; note = 2'-fluoroguanosine
  modified_base 9: mod_base = OTHER; note = 2'-O-methylcytidine
  modified_base 10: mod_base = OTHER; note = 2'-fluorouridine
  modified_base 11: mod_base = OTHER; note = 2'-O-methyladenosine
  modified_base 12: mod_base = OTHER; note = 2'-fluoroadenosine
  modified_base 13: mod_base = OTHER; note = 2'-O-methyladenosine
  modified_base 14: mod_base = OTHER; note = 2'-fluoroadenosine
  modified_base 15: mod_base = OTHER; note = 2'-O-methylguanosine
  modified_base 16: mod_base = OTHER; note = 2'-fluoroguanosine
  modified_base 17: mod_base = OTHER; note = 2'-O-methylcytidine
  modified_base 18: mod_base = OTHER; note = 2'-fluoroadenosine
  modified_base 19: mod_base = OTHER; note = 2'-O-methyluridine
  modified_base 20: mod_base = OTHER; note = 2'-fluorocytidine
  modified_base 21: mod_base = OTHER; note = 2'-O-methyluridine with phosphorothioate linkage
  modified_base 22: mod_base = OTHER; note = 2'-fluorouridine with phosphorothioate linkage
  modified_base 23: mod_base = OTHER; note = 2'-O-methyladenosine
tgtacacgctaaaaggcatctta

SEQ ID NO: 1359 - RNA, 23 nt, synthetic construct
  source 1..23: mol_type = other RNA
  modified_base 1: mod_base = OTHER; note = 5'-(E)-vinylphosphonate 2'-O-methylated adenosine with phosphorothioate linkage
  modified_base 2: mod_base = OTHER; note = 2'-fluorocytidine with phosphorothioate linkage
  modified_base 3: mod_base = OTHER; note = 2'-O-methyluridine
  modified_base 4: mod_base = OTHER; note = 2'-fluoroguanosine
  modified_base 5: mod_base = OTHER; note = 2'-O-methyluridine
  modified_base 6: mod_base = OTHER; note = 2'-fluoroadenosine
  modified_base 7: mod_base = OTHER; note = 2'-O-methylcytidine
  modified_base 8: mod_base = OTHER; note = 2'-fluoroadenosine
  modified_base 9: mod_base = OTHER; note = 2'-O-methylcytidine
  modified_base 10: mod_base = OTHER; note = 2'-fluoroguanosine
  modified_base 11: mod_base = OTHER; note = 2'-O-methylcytidine
  modified_base 12: mod_base = OTHER; note = 2'-fluorouridine
  modified_base 13: mod_base = OTHER; note = 2'-O-methyladenosine
  modified_base 14: mod_base = OTHER; note = 2'-fluoroadenosine
  modified_base 15: mod_base = OTHER; note = 2'-O-methyladenosine
  modified_base 16: mod_base = OTHER; note = 2'-fluoroadenosine
  modified_base 17: mod_base = OTHER; note = 2'-O-methylguanosine
  modified_base 18: mod_base = OTHER; note = 2'-fluoroguanosine
  modified_base 19: mod_base = OTHER; note = 2'-O-methylcytidine
  modified_base 20: mod_base = OTHER; note = 2'-fluoroadenosine
  modified_base 21: mod_base = OTHER; note = 2'-O-methyluridine with phosphorothioate linkage
  modified_base 22: mod_base = OTHER; note = 2'-fluorocytidine with phosphorothioate linkage
  modified_base 23: mod_base = OTHER; note = 2'-O-methyluridine
actgtacacgctaaaaggcatct

SEQ ID NO: 1360 - RNA, 23 nt, synthetic construct
  source 1..23: mol_type = other RNA
  modified_base 1: mod_base = OTHER; note = 5'-(E)-vinylphosphonate 2'-O-methylated uridine with phosphorothioate linkage
  modified_base 2: mod_base = OTHER; note = 2'-fluoroadenosine with phosphorothioate linkage
  modified_base 3: mod_base = OTHER; note = 2'-O-methylcytidine
  modified_base 4: mod_base = OTHER; note = 2'-fluorouridine
  modified_base 5: mod_base = OTHER; note = 2'-O-methylguanosine
  modified_base 6: mod_base = OTHER; note = 2'-fluorouridine
  modified_base 7: mod_base = OTHER; note = 2'-O-methyladenosine
  modified_base 8: mod_base = OTHER; note = 2'-fluorocytidine
  modified_base 9: mod_base = OTHER; note = 2'-O-methyladenosine
  modified_base 10: mod_base = OTHER; note = 2'-fluorocytidine
  modified_base 11: mod_base = OTHER; note = 2'-O-methylguanosine
  modified_base 12: mod_base = OTHER; note = 2'-fluorocytidine
  modified_base 13: mod_base = OTHER; note = 2'-O-methyluridine
  modified_base 14: mod_base = OTHER; note = 2'-fluoroadenosine
  modified_base 15: mod_base = OTHER; note = 2'-O-methyladenosine
  modified_base 16: mod_base = OTHER; note = 2'-fluoroadenosine
  modified_base 17: mod_base = OTHER; note = 2'-O-methyladenosine
  modified_base 18: mod_base = OTHER; note = 2'-fluoroguanosine
  modified_base 19: mod_base = OTHER; note = 2'-O-methylguanosine
  modified_base 20: mod_base = OTHER; note = 2'-fluorocytidine
  modified_base 21: mod_base = OTHER; note = 2'-O-methyladenosine with phosphorothioate linkage
  modified_base 22: mod_base = OTHER; note = 2'-fluorouridine with phosphorothioate linkage
  modified_base 23: mod_base = OTHER; note = 2'-O-methylcytidine
tactgtacacgctaaaaggcatc

SEQ ID NO: 1361 - RNA, 23 nt, synthetic construct
  source 1..23: mol_type = other RNA
  modified_base 1: mod_base = OTHER; note = 5'-(E)-vinylphosphonate 2'-O-methylated guanosine with phosphorothioate linkage
  modified_base 2: mod_base = OTHER; note = 2'-fluorouridine with phosphorothioate linkage
  modified_base 3: mod_base = OTHER; note = 2'-O-methyladenosine
  modified_base 4: mod_base = OTHER; note = 2'-fluorocytidine
  modified_base 5: mod_base = OTHER; note = 2'-O-methyluridine
  modified_base 6: mod_base = OTHER; note = 2'-fluoroguanosine
  modified_base 7: mod_base = OTHER; note = 2'-O-methyluridine
  modified_base 8: mod_base = OTHER; note = 2'-fluoroadenosine
  modified_base 9: mod_base = OTHER; note = 2'-O-methylcytidine
  modified_base 10: mod_base = OTHER; note = 2'-fluoroadenosine
  modified_base 11: mod_base = OTHER; note = 2'-O-methylcytidine
  modified_base 12: mod_base = OTHER; note = 2'-fluoroguanosine
  modified_base 13: mod_base = OTHER; note = 2'-O-methylcytidine
  modified_base 14: mod_base = OTHER; note = 2'-fluorouridine
  modified_base 15: mod_base = OTHER; note = 2'-O-methyladenosine
  modified_base 16: mod_base = OTHER; note = 2'-fluoroadenosine
  modified_base 17: mod_base = OTHER; note = 2'-O-methyladenosine
  modified_base 18: mod_base = OTHER; note = 2'-fluoroadenosine
  modified_base 19: mod_base = OTHER; note = 2'-O-methylguanosine
  modified_base 20: mod_base = OTHER; note = 2'-fluoroguanosine
  modified_base 21: mod_base = OTHER; note = 2'-O-methylcytidine with phosphorothioate linkage
  modified_base 22: mod_base = OTHER; note = 2'-fluoroadenosine with phosphorothioate linkage
  modified_base 23: mod_base = OTHER; note = 2'-O-methyluridine
gtactgtacacgctaaaaggcat

SEQ ID NO: 1362 - RNA, 23 nt, synthetic construct
  source 1..23: mol_type = other RNA
  modified_base 1: mod_base = OTHER; note = 5'-(E)-vinylphosphonate 2'-O-methylated guanosine with phosphorothioate linkage
  modified_base 2: mod_base = OTHER; note = 2'-fluoroguanosine with phosphorothioate linkage
  modified_base 3: mod_base = OTHER; note = 2'-O-methyluridine
  modified_base 4: mod_base = OTHER; note = 2'-fluoroadenosine
  modified_base 5: mod_base = OTHER; note = 2'-O-methylcytidine
  modified_base 6: mod_base = OTHER; note = 2'-fluorouridine
  modified_base 7: mod_base = OTHER; note = 2'-O-methylguanosine
  modified_base 8: mod_base = OTHER; note = 2'-fluorouridine
  modified_base 9: mod_base = OTHER; note = 2'-O-methyladenosine
  modified_base 10: mod_base = OTHER; note = 2'-fluorocytidine
  modified_base 11: mod_base = OTHER; note = 2'-O-methyladenosine
  modified_base 12: mod_base = OTHER; note = 2'-fluorocytidine
  modified_base 13: mod_base = OTHER; note = 2'-O-methylguanosine
  modified_base 14: mod_base = OTHER; note = 2'-fluorocytidine
  modified_base 15: mod_base = OTHER; note = 2'-O-methyluridine
  modified_base 16: mod_base = OTHER; note = 2'-fluoroadenosine
  modified_base 17: mod_base = OTHER; note = 2'-O-methyladenosine
  modified_base 18: mod_base = OTHER; note = 2'-fluoroadenosine
  modified_base 19: mod_base = OTHER; note = 2'-O-methyladenosine
  modified_base 20: mod_base = OTHER; note = 2'-fluoroguanosine
  modified_base 21: mod_base = OTHER; note = 2'-O-methylguanosine with phosphorothioate linkage
  modified_base 22: mod_base = OTHER; note = 2'-fluorocytidine with phosphorothioate linkage
  modified_base 23: mod_base = OTHER; note = 2'-O-methyladenosine
ggtactgtacacgctaaaaggca

SEQ ID NO: 1363 - RNA, 23 nt, synthetic construct
  source 1..23: mol_type = other RNA
  modified_base 1: mod_base = OTHER; note = 5'-(E)-vinylphosphonate 2'-O-methylated guanosine with phosphorothioate linkage
  modified_base 2: mod_base = OTHER; note = 2'-fluoroguanosine with phosphorothioate linkage
  modified_base 3: mod_base = OTHER; note = 2'-O-methylguanosine
  modified_base 4: mod_base = OTHER; note = 2'-fluorouridine
  modified_base 5: mod_base = OTHER; note = 2'-O-methyladenosine
  modified_base 6: mod_base = OTHER; note = 2'-fluorocytidine
  modified_base 7: mod_base = OTHER; note = 2'-O-methyluridine
  modified_base 8: mod_base = OTHER; note = 2'-fluoroguanosine
  modified_base 9: mod_base = OTHER; note = 2'-O-methyluridine
  modified_base 10: mod_base = OTHER; note = 2'-fluoroadenosine
  modified_base 11: mod_base = OTHER; note = 2'-O-methylcytidine
  modified_base 12: mod_base = OTHER; note = 2'-fluoroadenosine
  modified_base 13: mod_base = OTHER; note = 2'-O-methylcytidine
  modified_base 14: mod_base = OTHER; note = 2'-fluoroguanosine
  modified_base 15: mod_base = OTHER; note = 2'-O-methylcytidine
  modified_base 16: mod_base = OTHER; note = 2'-fluorouridine
  modified_base 17: mod_base = OTHER; note = 2'-O-methyladenosine
  modified_base 18: mod_base = OTHER; note = 2'-fluoroadenosine
  modified_base 19: mod_base = OTHER; note = 2'-O-methyladenosine
  modified_base 20: mod_base = OTHER; note = 2'-fluoroadenosine
  modified_base 21: mod_base = OTHER; note = 2'-O-methylguanosine with phosphorothioate linkage
  modified_base 22: mod_base = OTHER; note = 2'-fluoroguanosine with phosphorothioate linkage
  modified_base 23: mod_base = OTHER; note = 2'-O-methylcytidine
gggtactgtacacgctaaaaggc

SEQ ID NO: 1364 - RNA, 23 nt, synthetic construct
  source 1..23: mol_type = other RNA
  modified_base 1: mod_base = OTHER; note = 5'-(E)-vinylphosphonate 2'-O-methylated adenosine with phosphorothioate linkage
  modified_base 2: mod_base = OTHER; note = 2'-fluoroguanosine with phosphorothioate linkage
  modified_base 3: mod_base = OTHER; note = 2'-O-methylguanosine
  modified_base 4: mod_base = OTHER; note = 2'-fluoroguanosine
  modified_base 5: mod_base = OTHER; note = 2'-O-methyluridine
  modified_base 6: mod_base = OTHER; note = 2'-fluoroadenosine
  modified_base 7: mod_base = OTHER; note = 2'-O-methylcytidine
  modified_base 8: mod_base = OTHER; note = 2'-fluorouridine
  modified_base 9: mod_base = OTHER; note = 2'-O-methylguanosine
  modified_base 10: mod_base = OTHER; note = 2'-fluorouridine
  modified_base 11: mod_base = OTHER; note = 2'-O-methyladenosine
  modified_base 12: mod_base = OTHER; note = 2'-fluorocytidine
  modified_base 13: mod_base = OTHER; note = 2'-O-methyladenosine
  modified_base 14: mod_base = OTHER; note = 2'-fluorocytidine
  modified_base 15: mod_base = OTHER; note = 2'-O-methylguanosine
  modified_base 16: mod_base = OTHER; note = 2'-fluorocytidine
  modified_base 17: mod_base = OTHER; note = 2'-O-methyluridine
  modified_base 18: mod_base = OTHER; note = 2'-fluoroadenosine
  modified_base 19: mod_base = OTHER; note = 2'-O-methyladenosine
  modified_base 20: mod_base = OTHER; note = 2'-fluoroadenosine
  modified_base 21: mod_base = OTHER; note = 2'-O-methyladenosine with phosphorothioate linkage
  modified_base 22: mod_base = OTHER; note = 2'-fluoroguanosine with phosphorothioate linkage
  modified_base 23: mod_base = OTHER; note = 2'-O-methylguanosine
agggtactgtacacgctaaaagg

SEQ ID NO: 1365 - RNA, 23 nt, synthetic construct
  source 1..23: mol_type = other RNA
  modified_base 1: mod_base = OTHER; note = 5'-(E)-vinylphosphonate 2'-O-methylated adenosine with phosphorothioate linkage
  modified_base 2: mod_base = OTHER; note = 2'-fluoroadenosine with phosphorothioate linkage
  modified_base 3: mod_base = OTHER; note = 2'-O-methylguanosine
  modified_base 4: mod_base = OTHER; note = 2'-fluoroguanosine
  modified_base 5: mod_base = OTHER; note = 2'-O-methylguanosine
  modified_base 6: mod_base = OTHER; note = 2'-fluorouridine
  modified_base 7: mod_base = OTHER; note = 2'-O-methyladenosine
  modified_base 8: mod_base = OTHER; note = 2'-fluorocytidine
  modified_base 9: mod_base = OTHER; note = 2'-O-methyluridine
  modified_base 10: mod_base = OTHER; note = 2'-fluoroguanosine
  modified_base 11: mod_base = OTHER; note = 2'-O-methyluridine
  modified_base 12: mod_base = OTHER; note = 2'-fluoroadenosine
  modified_base 13: mod_base = OTHER; note = 2'-O-methylcytidine
  modified_base 14: mod_base = OTHER; note = 2'-fluoroadenosine
  modified_base 15: mod_base = OTHER; note = 2'-O-methylcytidine
  modified_base 16: mod_base = OTHER; note = 2'-fluoroguanosine
  modified_base 17: mod_base = OTHER; note = 2'-O-methylcytidine
  modified_base 18: mod_base = OTHER; note = 2'-fluorouridine
  modified_base 19: mod_base = OTHER; note = 2'-O-methyladenosine
  modified_base 20: mod_base = OTHER; note = 2'-fluoroadenosine
  modified_base 21: mod_base = OTHER; note = 2'-O-methyladenosine with phosphorothioate linkage
  modified_base 22: mod_base = OTHER; note = 2'-fluoroadenosine with phosphorothioate linkage
  modified_base 23: mod_base = OTHER; note = 2'-O-methylguanosine
aagggtactgtacacgctaaaag

SEQ ID NO: 1366 - RNA, 23 nt, synthetic construct
  source 1..23: mol_type = other RNA
  modified_base 1: mod_base = OTHER; note = 5'-(E)-vinylphosphonate 2'-O-methylated adenosine with phosphorothioate linkage
  modified_base 2: mod_base = OTHER; note = 2'-fluorocytidine with phosphorothioate linkage
  modified_base 3: mod_base = OTHER; note = 2'-O-methyladenosine
  modified_base 4: mod_base = OTHER; note = 2'-fluoroguanosine
  modified_base 5: mod_base = OTHER; note = 2'-O-methylguanosine
  modified_base 6: mod_base = OTHER; note = 2'-fluoroguanosine
  modified_base 7: mod_base = OTHER; note = 2'-O-methyluridine
  modified_base 8: mod_base = OTHER; note = 2'-fluoroadenosine
  modified_base 9: mod_base = OTHER; note = 2'-O-methylcytidine
  modified_base 10: mod_base = OTHER; note = 2'-fluorouridine
  modified_base 11: mod_base = OTHER; note = 2'-O-methylguanosine
  modified_base 12: mod_base = OTHER; note = 2'-fluorouridine
  modified_base 13: mod_base = OTHER; note = 2'-O-methyladenosine
  modified_base 14: mod_base = OTHER; note = 2'-fluorocytidine
  modified_base 15: mod_base = OTHER; note = 2'-O-methyladenosine
  modified_base 16: mod_base = OTHER; note = 2'-fluorocytidine
  modified_base 17: mod_base = OTHER; note = 2'-O-methylguanosine
  modified_base 18: mod_base = OTHER; note = 2'-fluorocytidine
  modified_base 19: mod_base = OTHER; note = 2'-O-methyluridine
  modified_base 20: mod_base = OTHER; note = 2'-fluoroadenosine
  modified_base 21: mod_base = OTHER; note = 2'-O-methyladenosine with phosphorothioate linkage
  modified_base 22: mod_base = OTHER; note = 2'-fluoroadenosine with phosphorothioate linkage
  modified_base 23: mod_base = OTHER; note = 2'-O-methyladenosine
acagggtactgtacacgctaaaa

SEQ ID NO: 1367 - RNA, 23 nt, synthetic construct
  source 1..23: mol_type = other RNA
  modified_base 1: mod_base = OTHER; note = 5'-(E)-vinylphosphonate 2'-O-methylated uridine with phosphorothioate linkage
  modified_base 2: mod_base = OTHER; note = 2'-fluorocytidine with phosphorothioate linkage
  modified_base 3: mod_base = OTHER; note = 2'-O-methylcytidine
  modified_base 4: mod_base = OTHER; note = 2'-fluoroadenosine
  modified_base 5: mod_base = OTHER; note = 2'-O-methylguanosine
  modified_base 6: mod_base = OTHER; note = 2'-fluoroguanosine
  modified_base 7: mod_base = OTHER; note = 2'-O-methylguanosine
  modified_base 8: mod_base = OTHER; note = 2'-fluorouridine
  modified_base 9: mod_base = OTHER; note = 2'-O-methyladenosine
  modified_base 10: mod_base = OTHER; note = 2'-fluorocytidine
  modified_base 11: mod_base = OTHER; note = 2'-O-methyluridine
  modified_base 12: mod_base = OTHER; note = 2'-fluoroguanosine
  modified_base 13: mod_base = OTHER; note = 2'-O-methyluridine
  modified_base 14: mod_base = OTHER; note = 2'-fluoroadenosine
  modified_base 15: mod_base = OTHER; note = 2'-O-methylcytidine
  modified_base 16: mod_base = OTHER; note = 2'-fluoroadenosine
  modified_base 17: mod_base = OTHER; note = 2'-O-methylcytidine
  modified_base 18: mod_base = OTHER; note = 2'-fluoroguanosine
  modified_base 19: mod_base = OTHER; note = 2'-O-methylcytidine
  modified_base 20: mod_base = OTHER; note = 2'-fluorouridine
  modified_base 21: mod_base = OTHER; note = 2'-O-methyladenosine with phosphorothioate linkage
  modified_base 22: mod_base = OTHER; note = 2'-fluoroadenosine with phosphorothioate linkage
  modified_base 23: mod_base = OTHER; note = 2'-O-methyladenosine
tccagggtactgtacacgctaaa

SEQ ID NO: 1368 - RNA, 23 nt, synthetic construct
  source 1..23: mol_type = other RNA
  modified_base 1: mod_base = OTHER; note = 5'-(E)-vinylphosphonate 2'-O-methylated adenosine with phosphorothioate linkage
  modified_base 2: mod_base = OTHER; note = 2'-fluorouridine with phosphorothioate linkage
  modified_base 3: mod_base = OTHER; note = 2'-O-methylcytidine
  modified_base 4: mod_base = OTHER; note = 2'-fluorocytidine
  modified_base 5: mod_base = OTHER; note = 2'-O-methyladenosine
  modified_base 6: mod_base = OTHER; note = 2'-fluoroguanosine
  modified_base 7: mod_base = OTHER; note = 2'-O-methylguanosine
  modified_base 8: mod_base = OTHER; note = 2'-fluoroguanosine
  modified_base 9: mod_base = OTHER; note = 2'-O-methyluridine
  modified_base 10: mod_base = OTHER; note = 2'-fluoroadenosine
  modified_base 11: mod_base = OTHER; note = 2'-O-methylcytidine
  modified_base 12: mod_base = OTHER; note = 2'-fluorouridine
  modified_base 13: mod_base = OTHER; note = 2'-O-methylguanosine
  modified_base 14: mod_base = OTHER; note = 2'-fluorouridine
  modified_base 15: mod_base = OTHER; note = 2'-O-methyladenosine
  modified_base 16: mod_base = OTHER; note = 2'-fluorocytidine
  modified_base 17: mod_base = OTHER; note = 2'-O-methyladenosine
  modified_base 18: mod_base = OTHER; note = 2'-fluorocytidine
  modified_base 19: mod_base = OTHER; note = 2'-O-methylguanosine
  modified_base 20: mod_base = OTHER; note = 2'-fluorocytidine
  modified_base 21: mod_base = OTHER; note = 2'-O-methyluridine with phosphorothioate linkage
  modified_base 22: mod_base = OTHER; note = 2'-fluoroadenosine with phosphorothioate linkage
  modified_base 23: mod_base = OTHER; note = 2'-O-methyladenosine
atccagggtactgtacacgctaa

SEQ ID NO: 1369 - RNA, 23 nt, synthetic construct
  source 1..23: mol_type = other RNA
  modified_base 1: mod_base = OTHER; note = 5'-(E)-vinylphosphonate 2'-O-methylated uridine with phosphorothioate linkage
  modified_base 2: mod_base = OTHER; note = 2'-fluorouridine with phosphorothioate linkage
  modified_base 3: mod_base = OTHER; note = 2'-O-methyluridine
  modified_base 4: mod_base = OTHER; note = 2'-fluorocytidine
  modified_base 5: mod_base = OTHER; note = 2'-O-methyluridine
  modified_base 6: mod_base = OTHER; note = 2'-fluorocytidine
  modified_base 7: mod_base = OTHER; note = 2'-O-methylcytidine
  modified_base 8: mod_base = OTHER; note = 2'-fluoroadenosine
  modified_base 9: mod_base = OTHER; note = 2'-O-methylguanosine
  modified_base 10: mod_base = OTHER; note = 2'-fluoroguanosine
  modified_base 11: mod_base = OTHER; note = 2'-O-methylguanosine
  modified_base 12: mod_base = OTHER; note = 2'-fluorouridine
  modified_base 13: mod_base = OTHER; note = 2'-O-methyladenosine
  modified_base 14: mod_base = OTHER; note = 2'-fluorocytidine
  modified_base 15: mod_base = OTHER; note = 2'-O-methyluridine
  modified_base 16: mod_base = OTHER; note = 2'-fluoroguanosine
  modified_base 17: mod_base = OTHER; note = 2'-O-methyluridine
  modified_base 18: mod_base = OTHER; note = 2'-fluoroadenosine
  modified_base 19: mod_base = OTHER; note = 2'-O-methylcytidine
  modified_base 20: mod_base = OTHER; note = 2'-fluoroadenosine
  modified_base 21: mod_base = OTHER; note = 2'-O-methylcytidine with phosphorothioate linkage
  modified_base 22: mod_base = OTHER; note = 2'-fluoroguanosine with phosphorothioate linkage
  modified_base 23: mod_base = OTHER; note = 2'-O-methylcytidine
tttctccagggtactgtacacgc

SEQ ID NO: 1370 - RNA, 23 nt, synthetic construct
  source 1..23: mol_type = other RNA
  modified_base 1: mod_base = OTHER; note = 5'-(E)-vinylphosphonate 2'-O-methylated guanosine with phosphorothioate linkage
  modified_base 2: mod_base = OTHER; note = 2'-fluorouridine with phosphorothioate linkage
  modified_base 3: mod_base = OTHER; note = 2'-O-methyluridine
  modified_base 4: mod_base = OTHER; note = 2'-fluorouridine
  modified_base 5: mod_base = OTHER; note = 2'-O-methylcytidine
  modified_base 6: mod_base = OTHER; note = 2'-fluorouridine
  modified_base 7: mod_base = OTHER; note = 2'-O-methylcytidine
  modified_base 8: mod_base = OTHER; note = 2'-fluorocytidine
  modified_base 9: mod_base = OTHER; note = 2'-O-methyladenosine
  modified_base 10: mod_base = OTHER; note = 2'-fluoroguanosine
  modified_base 11: mod_base = OTHER; note = 2'-O-methylguanosine
  modified_base 12: mod_base = OTHER; note = 2'-fluoroguanosine
  modified_base 13: mod_base = OTHER; note = 2'-O-methyluridine
  modified_base 14: mod_base = OTHER; note = 2'-fluoroadenosine
  modified_base 15: mod_base = OTHER; note = 2'-O-methylcytidine
  modified_base 16: mod_base = OTHER; note = 2'-fluorouridine
  modified_base 17: mod_base = OTHER; note = 2'-O-methylguanosine
  modified_base 18: mod_base = OTHER; note = 2'-fluorouridine
  modified_base 19: mod_base = OTHER; note = 2'-O-methyladenosine
  modified_base 20: mod_base = OTHER; note = 2'-fluorocytidine
  modified_base 21: mod_base = OTHER; note = 2'-O-methyladenosine with phosphorothioate linkage
  modified_base 22: mod_base = OTHER; note = 2'-fluorocytidine with phosphorothioate linkage
  modified_base 23: mod_base = OTHER; note = 2'-O-methylguanosine
gtttctccagggtactgtacacg

SEQ ID NO: 1371 - RNA, 23 nt, synthetic construct
  source 1..23: mol_type = other RNA
  modified_base 1: mod_base = OTHER; note = 5'-(E)-vinylphosphonate 2'-O-methylated adenosine with phosphorothioate linkage
  modified_base 2: mod_base = OTHER; note = 2'-fluoroadenosine with phosphorothioate linkage
  modified_base 3: mod_base = OTHER; note = 2'-O-methylcytidine
  modified_base 4: mod_base = OTHER; note = 2'-fluoroadenosine
  modified_base 5: mod_base = OTHER; note = 2'-O-methylcytidine
  modified_base 6: mod_base = OTHER; note = 2'-fluorouridine
  modified_base 7: mod_base = OTHER; note = 2'-O-methylcytidine
  modified_base 8: mod_base = OTHER; note = 2'-fluoroguanosine
  modified_base 9: mod_base = OTHER; note = 2'-O-methyladenosine
  modified_base 10: mod_base = OTHER; note = 2'-fluorouridine
  modified_base 11: mod_base = OTHER; note = 2'-O-methylcytidine
  modified_base 12: mod_base = OTHER; note = 2'-fluoroadenosine
  modified_base 13: mod_base = OTHER; note = 2'-O-methylcytidine
  modified_base 14: mod_base = OTHER; note = 2'-fluorouridine
  modified_base 15: mod_base = OTHER; note = 2'-O-methylguanosine
  modified_base 16: mod_base = OTHER; note = 2'-fluorouridine
  modified_base 17: mod_base = OTHER; note = 2'-O-methylguanosine
  modified_base 18: mod_base = OTHER; note = 2'-fluorocytidine
  modified_base 19: mod_base = OTHER; note = 2'-O-methylcytidine
  modified_base 20: mod_base = OTHER; note = 2'-fluoroadenosine
  modified_base 21: mod_base = OTHER; note = 2'-O-methyluridine with phosphorothioate linkage
  modified_base 22: mod_base = OTHER; note = 2'-fluorouridine with phosphorothioate linkage
  modified_base 23: mod_base = OTHER; note = 2'-O-methyluridine
aacactcgatcactgtgccattt

SEQ ID NO: 1372 - RNA, 23 nt, synthetic construct
  source 1..23: mol_type = other RNA
  modified_base 1: mod_base = OTHER; note = 5'-(E)-vinylphosphonate 2'-O-methylated adenosine with phosphorothioate linkage
  modified_base 2: mod_base = OTHER; note = 2'-fluoroadenosine with phosphorothioate linkage
  modified_base 3: mod_base = OTHER; note = 2'-O-methyladenosine
  modified_base 4: mod_base = OTHER; note = 2'-fluorocytidine
  modified_base 5: mod_base = OTHER; note = 2'-O-methyladenosine
  modified_base 6: mod_base = OTHER; note = 2'-fluorocytidine
  modified_base 7: mod_base = OTHER; note = 2'-O-methyluridine
  modified_base 8: mod_base = OTHER; note = 2'-fluorocytidine
  modified_base 9: mod_base = OTHER; note = 2'-O-methylguanosine
  modified_base 10: mod_base = OTHER; note = 2'-fluoroadenosine
  modified_base 11: mod_base = OTHER; note = 2'-O-methyluridine
  modified_base 12: mod_base = OTHER; note = 2'-fluorocytidine
  modified_base 13: mod_base = OTHER; note = 2'-O-methyladenosine
  modified_base 14: mod_base = OTHER; note = 2'-fluorocytidine
  modified_base 15: mod_base = OTHER; note = 2'-O-methyluridine
  modified_base 16: mod_base = OTHER; note = 2'-fluoroguanosine
  modified_base 17: mod_base = OTHER; note = 2'-O-methyluridine
  modified_base 18: mod_base = OTHER; note = 2'-fluoroguanosine
  modified_base 19: mod_base = OTHER; note = 2'-O-methylcytidine
  modified_base 20: mod_base = OTHER; note = 2'-fluorocytidine
  modified_base 21: mod_base = OTHER; note = 2'-O-methyladenosine with phosphorothioate linkage
  modified_base 22: mod_base = OTHER; note = 2'-fluorouridine with phosphorothioate linkage
  modified_base 23: mod_base = OTHER; note = 2'-O-methyluridine
aaacactcgatcactgtgccatt

SEQ ID NO: 1373 - RNA, 23 nt, synthetic construct
  source 1..23: mol_type = other RNA
  modified_base 1: mod_base = OTHER; note = 5'-(E)-vinylphosphonate 2'-O-methylated adenosine with phosphorothioate linkage
  modified_base 2: mod_base = OTHER; note = 2'-fluorouridine with phosphorothioate linkage
  modified_base 3: mod_base = OTHER; note = 2'-O-methyluridine
  modified_base 4: mod_base = OTHER; note = 2'-fluorocytidine
  modified_base 5: mod_base = OTHER; note = 2'-O-methyladenosine
  modified_base 6: mod_base = OTHER; note = 2'-fluoroadenosine
  modified_base 7: mod_base = OTHER; note = 2'-O-methylcytidine
  modified_base 8: mod_base = OTHER; note = 2'-fluoroadenosine
  modified_base 9: mod_base = OTHER; note = 2'-O-methylcytidine
  modified_base 10: mod_base = OTHER; note = 2'-fluorouridine
  modified_base 11: mod_base = OTHER; note = 2'-O-methylcytidine
  modified_base 12: mod_base = OTHER; note = 2'-fluoroguanosine
  modified_base 13: mod_base = OTHER; note = 2'-O-methyladenosine
  modified_base 14: mod_base = OTHER; note = 2'-fluorouridine
  modified_base 15: mod_base = OTHER; note = 2'-O-methylcytidine
  modified_base 16: mod_base = OTHER; note = 2'-fluoroadenosine
  modified_base 17: mod_base = OTHER; note = 2'-O-methylcytidine
  modified_base 18: mod_base = OTHER; note = 2'-fluorouridine
  modified_base 19: mod_base = OTHER; note = 2'-O-methylguanosine
  modified_base 20: mod_base = OTHER; note = 2'-fluorouridine
  modified_base 21: mod_base = OTHER; note = 2'-O-methylguanosine with phosphorothioate linkage
  modified_base 22: mod_base = OTHER; note = 2'-fluorocytidine with phosphorothioate linkage
  modified_base 23: mod_base = OTHER; note = 2'-O-methylcytidine
attcaacactcgatcactgtgcc

SEQ ID NO: 1374 - RNA, 23 nt, synthetic construct
  source 1..23: mol_type = other RNA
  modified_base 1: mod_base = OTHER; note = 5'-(E)-vinylphosphonate 2'-O-methylated uridine with phosphorothioate linkage
  modified_base 2: mod_base = OTHER; note = 2'-fluoroadenosine with phosphorothioate linkage
  modified_base 3: mod_base = OTHER; note = 2'-O-methyluridine
  modified_base 4: mod_base = OTHER; note = 2'-fluorouridine
  modified_base 5: mod_base = OTHER; note = 2'-O-methylcytidine
  modified_base 6: mod_base = OTHER; note = 2'-fluoroadenosine
  modified_base 7: mod_base = OTHER; note = 2'-O-methyladenosine
  modified_base 8: mod_base = OTHER; note = 2'-fluorocytidine
  modified_base 9: mod_base = OTHER; note = 2'-O-methyladenosine
  modified_base 10: mod_base = OTHER; note = 2'-fluorocytidine
  modified_base 11: mod_base = OTHER; note = 2'-O-methyluridine
  modified_base 12: mod_base = OTHER; note = 2'-fluorocytidine
  modified_base 13: mod_base = OTHER; note = 2'-O-methylguanosine
  modified_base 14: mod_base = OTHER; note = 2'-fluoroadenosine
  modified_base 15: mod_base = OTHER; note = 2'-O-methyluridine
  modified_base 16: mod_base = OTHER; note = 2'-fluorocytidine
  modified_base 17: mod_base = OTHER; note = 2'-O-methyladenosine
  modified_base 18: mod_base = OTHER; note = 2'-fluorocytidine
  modified_base 19: mod_base = OTHER; note = 2'-O-methyluridine
  modified_base 20: mod_base = OTHER; note = 2'-fluoroguanosine
  modified_base 21: mod_base = OTHER; note = 2'-O-methyluridine with phosphorothioate linkage
  modified_base 22: mod_base = OTHER; note = 2'-fluoroguanosine with phosphorothioate linkage
  modified_base 23: mod_base = OTHER; note = 2'-O-methylcytidine
tattcaacactcgatcactgtgc

SEQ ID NO: 1375 - RNA, 23 nt, synthetic construct
  source 1..23: mol_type = other RNA
  modified_base 1: mod_base = OTHER; note = 5'-(E)-vinylphosphonate 2'-O-methylated uridine with phosphorothioate linkage
  modified_base 2: mod_base = OTHER; note = 2'-fluorouridine with phosphorothioate linkage
  modified_base 3: mod_base = OTHER; note = 2'-O-methyladenosine
  modified_base 4: mod_base = OTHER; note = 2'-fluorouridine
  modified_base 5: mod_base = OTHER; note = 2'-O-methyluridine
  modified_base 6: mod_base = OTHER; note = 2'-fluorocytidine
  modified_base 7: mod_base = OTHER; note = 2'-O-methyladenosine
  modified_base 8: mod_base = OTHER; note = 2'-fluoroadenosine
  modified_base 9: mod_base = OTHER; note = 2'-O-methylcytidine
  modified_base 10: mod_base = OTHER; note = 2'-fluoroadenosine
  modified_base 11: mod_base = OTHER; note = 2'-O-methylcytidine
  modified_base 12: mod_base = OTHER; note = 2'-fluorouridine
  modified_base 13: mod_base = OTHER; note = 2'-O-methylcytidine
  modified_base 14: mod_base = OTHER; note = 2'-fluoroguanosine
  modified_base 15: mod_base = OTHER; note = 2'-O-methyladenosine
  modified_base 16: mod_base = OTHER; note = 2'-fluorouridine
  modified_base 17: mod_base = OTHER; note = 2'-O-methylcytidine
  modified_base 18: mod_base = OTHER; note = 2'-fluoroadenosine
  modified_base 19: mod_base = OTHER; note = 2'-O-methylcytidine
  modified_base 20: mod_base = OTHER; note = 2'-fluorouridine
  modified_base 21: mod_base = OTHER; note = 2'-O-methylguanosine with phosphorothioate linkage
  modified_base 22: mod_base = OTHER; note = 2'-fluorouridine with phosphorothioate linkage
  modified_base 23: mod_base = OTHER; note = 2'-O-methylguanosine
ttattcaacactcgatcactgtg

SEQ ID NO: 1376 - RNA, 23 nt, synthetic construct
  source 1..23: mol_type = other RNA
  modified_base 1: mod_base = OTHER; note = 5'-(E)-vinylphosphonate 2'-O-methylated adenosine with phosphorothioate linkage
  modified_base 2: mod_base = OTHER; note = 2'-fluorouridine with phosphorothioate linkage
  modified_base 3: mod_base = OTHER; note = 2'-O-methyluridine
  modified_base 4: mod_base = OTHER; note = 2'-fluoroadenosine
  modified_base 5: mod_base = OTHER; note = 2'-O-methyluridine
  modified_base 6: mod_base = OTHER; note = 2'-fluorouridine
  modified_base 7: mod_base = OTHER; note = 2'-O-methylcytidine
  modified_base 8: mod_base = OTHER; note = 2'-fluoroadenosine
  modified_base 9: mod_base = OTHER; note = 2'-O-methyladenosine
  modified_base 10: mod_base = OTHER; note = 2'-fluorocytidine
  modified_base 11: mod_base = OTHER; note = 2'-O-methyladenosine
  modified_base 12: mod_base = OTHER; note = 2'-fluorocytidine
  modified_base 13: mod_base = OTHER; note = 2'-O-methyluridine
  modified_base 14: mod_base = OTHER; note = 2'-fluorocytidine
  modified_base 15: mod_base = OTHER; note = 2'-O-methylguanosine
  modified_base 16: mod_base = OTHER; note = 2'-fluoroadenosine
  modified_base 17: mod_base = OTHER; note = 2'-O-methyluridine
  modified_base 18: mod_base = OTHER; note = 2'-fluorocytidine
  modified_base 19: mod_base = OTHER; note = 2'-O-methyladenosine
  modified_base 20: mod_base = OTHER; note = 2'-fluorocytidine
  modified_base 21: mod_base = OTHER; note = 2'-O-methyluridine with phosphorothioate linkage
  modified_base 22: mod_base = OTHER; note = 2'-fluoroguanosine with phosphorothioate linkage
  modified_base 23: mod_base = OTHER; note = 2'-O-methyluridine
attattcaacactcgatcactgt

SEQ ID NO: 1377 - RNA, 23 nt, synthetic construct
  source 1..23: mol_type = other RNA
  modified_base 1: mod_base = OTHER; note = 5'-(E)-vinylphosphonate 2'-O-methylated adenosine with phosphorothioate linkage
  modified_base 2: mod_base = OTHER; note = 2'-fluoroadenosine with phosphorothioate linkage
  modified_base 3: mod_base = OTHER; note = 2'-O-methyluridine
  modified_base 4: mod_base = OTHER; note = 2'-fluorouridine
  modified_base 5: mod_base = OTHER; note = 2'-O-methyladenosine
  modified_base 6: mod_base = OTHER; note = 2'-fluorouridine
  modified_base 7: mod_base = OTHER; note = 2'-O-methyluridine
  modified_base 8: mod_base = OTHER; note = 2'-fluorocytidine
  modified_base 9: mod_base = OTHER; note = 2'-O-methyladenosine
  modified_base 10: mod_base = OTHER; note = 2'-fluoroadenosine
  modified_base 11: mod_base = OTHER; note = 2'-O-methylcytidine
  modified_base 12: mod_base = OTHER; note = 2'-fluoroadenosine
  modified_base 13: mod_base = OTHER; note = 2'-O-methylcytidine
  modified_base 14: mod_base = OTHER; note = 2'-fluorouridine
  modified_base 15: mod_base = OTHER; note = 2'-O-methylcytidine
  modified_base 16: mod_base = OTHER; note = 2'-fluoroguanosine
  modified_base 17: mod_base = OTHER; note = 2'-O-methyladenosine
  modified_base 18: mod_base = OTHER; note = 2'-fluorouridine
  modified_base 19: mod_base = OTHER; note = 2'-O-methylcytidine
  modified_base 20: mod_base = OTHER; note = 2'-fluoroadenosine
  modified_base 21: mod_base = OTHER; note = 2'-O-methylcytidine with phosphorothioate linkage
  modified_base 22: mod_base = OTHER; note = 2'-fluorouridine with phosphorothioate linkage
  modified_base 23: mod_base = OTHER; note = 2'-O-methylguanosine
aattattcaacactcgatcactg

SEQ ID NO: 1378 - RNA, 23 nt, synthetic construct
  source 1..23: mol_type = other RNA
  modified_base 1: mod_base = OTHER; note = 5'-(E)-vinylphosphonate 2'-O-methylated uridine with phosphorothioate linkage
  modified_base 2: mod_base = OTHER; note = 2'-fluoroguanosine with phosphorothioate linkage
  modified_base 3: mod_base = OTHER; note = 2'-O-methylguanosine
  modified_base 4: mod_base = OTHER; note = 2'-fluoroguanosine
  modified_base 5: mod_base = OTHER; note = 2'-O-methylcytidine
  modified_base 6: mod_base = OTHER; note = 2'-fluorouridine
  modified_base 7: mod_base = OTHER; note = 2'-O-methyladenosine
  modified_base 8: mod_base = OTHER; note = 2'-fluoroguanosine
  modified_base 9: mod_base = OTHER; note = 2'-O-methyladenosine
  modified_base 10: mod_base = OTHER; note = 2'-fluorocytidine
  modified_base 11: mod_base = OTHER; note = 2'-O-methylguanosine
  modified_base 12: mod_base = OTHER; note = 2'-fluorouridine
  modified_base 13: mod_base = OTHER; note = 2'-O-methylguanosine
  modified_base 14: mod_base = OTHER; note = 2'-fluorouridine
  modified_base 15: mod_base = OTHER; note = 2'-O-methyluridine
  modified_base 16: mod_base = OTHER; note = 2'-fluorocytidine
  modified_base 17: mod_base = OTHER; note = 2'-O-methylcytidine
  modified_base 18: mod_base = OTHER; note = 2'-fluorocytidine
  modified_base 19: mod_base = OTHER; note = 2'-O-methyluridine
  modified_base 20: mod_base = OTHER; note = 2'-fluoroguanosine
  modified_base 21: mod_base = OTHER; note = 2'-O-methylcytidine with phosphorothioate linkage
  modified_base 22: mod_base = OTHER; note = 2'-fluorocytidine with phosphorothioate linkage
  modified_base 23: mod_base = OTHER; note = 2'-O-methyladenosine
tgggctagacgtgttccctgcca

SEQ ID NO: 1379 - RNA, 23 nt, synthetic construct
  source 1..23: mol_type = other RNA
  modified_base 1: mod_base = OTHER; note = 5'-(E)-vinylphosphonate 2'-O-methylated guanosine with phosphorothioate linkage
  modified_base 2: mod_base = OTHER; note = 2'-fluorocytidine with phosphorothioate linkage
  modified_base 3: mod_base = OTHER; note = 2'-O-methyladenosine
  modified_base 4: mod_base = OTHER; note = 2'-fluorocytidine
  modified_base 5: mod_base = OTHER; note = 2'-O-methylcytidine
  modified_base 6: mod_base = OTHER; note = 2'-fluoroadenosine
  modified_base 7: mod_base = OTHER; note = 2'-O-methylcytidine
  modified_base 8: mod_base = OTHER; note = 2'-fluorocytidine
  modified_base 9: mod_base = OTHER; note = 2'-O-methyladenosine
  modified_base 10: mod_base = OTHER; note = 2'-fluoroguanosine
  modified_base 11: mod_base = OTHER; note = 2'-O-methylguanosine
  modified_base 12: mod_base = OTHER; note = 2'-fluorouridine
  modified_base 13: mod_base = OTHER; note = 2'-O-methyluridine
  modified_base 14: mod_base = OTHER; note = 2'-fluoroguanosine
  modified_base 15: mod_base = OTHER; note = 2'-O-methylcytidine
  modified_base 16: mod_base = OTHER; note = 2'-fluorouridine
  modified_base 17: mod_base = OTHER; note = 2'-O-methylcytidine
  modified_base 18: mod_base = OTHER; note = 2'-fluorouridine
  modified_base 19: mod_base = OTHER; note = 2'-O-methylguanosine
  modified_base 20: mod_base = OTHER; note = 2'-fluoroadenosine
  modified_base 21: mod_base = OTHER; note = 2'-O-methyladenosine with phosphorothioate linkage
  modified_base 22: mod_base = OTHER; note = 2'-fluoroadenosine with phosphorothioate linkage
  modified_base 23: mod_base = OTHER; note = 2'-O-methyluridine
gcaccaccaggttgctctgaaat

SEQ ID NO: 1380 - RNA, 23 nt, synthetic construct
  source 1..23: mol_type = other RNA
  modified_base 1: mod_base = OTHER; note = 5'-(E)-vinylphosphonate 2'-O-methylated guanosine with phosphorothioate linkage
  modified_base 2: mod_base = OTHER; note = 2'-fluorouridine with phosphorothioate linkage
  modified_base 3: mod_base = OTHER; note = 2'-O-methylcytidine
  modified_base 4: mod_base = OTHER; note = 2'-fluoroguanosine
  modified_base 5: mod_base = OTHER; note = 2'-O-methyluridine
  modified_base 6: mod_base = OTHER; note = 2'-fluorocytidine
  modified_base 7: mod_base = OTHER; note = 2'-O-methylguanosine
  modified_base 8: mod_base = OTHER; note = 2'-fluoroguanosine
  modified_base 9: mod_base = OTHER; note = 2'-O-methyladenosine
  modified_base 10: mod_base = OTHER; note = 2'-fluorocytidine
  modified_base 11: mod_base = OTHER; note = 2'-O-methyluridine
  modified_base 12: mod_base = OTHER; note = 2'-fluorouridine
  modified_base 13: mod_base = OTHER; note = 2'-O-methylguanosine
  modified_base 14: mod_base = OTHER; note = 2'-fluoroadenosine
  modified_base 15: mod_base = OTHER; note = 2'-O-methylcytidine
  modified_base 16: mod_base = OTHER; note = 2'-fluorocytidine
  modified_base 17: mod_base = OTHER; note = 2'-O-methylguanosine
  modified_base 18: mod_base = OTHER; note = 2'-fluorouridine
  modified_base 19: mod_base = OTHER; note = 2'-O-methylcytidine
  modified_base 20: mod_base = OTHER; note = 2'-fluoroadenosine
  modified_base 21: mod_base = OTHER; note = 2'-O-methyluridine with phosphorothioate linkage
  modified_base 22: mod_base = OTHER; note = 2'-fluoroguanosine with phosphorothioate linkage
  modified_base 23: mod_base = OTHER; note = 2'-O-methylguanosine
gtcgtcggacttgaccgtcatgg

SEQ ID NO: 1381 - RNA, 23 nt, synthetic construct
  source 1..23: mol_type = other RNA
  modified_base 1: mod_base = OTHER; note = 5'-(E)-vinylphosphonate 2'-O-methylated adenosine with phosphorothioate linkage
  modified_base 2: mod_base = OTHER; note = 2'-fluoroguanosine with phosphorothioate linkage
  modified_base 3: mod_base = OTHER; note = 2'-O-methyluridine
  modified_base 4: mod_base = OTHER; note = 2'-fluorocytidine
  modified_base 5: mod_base = OTHER; note = 2'-O-methylguanosine
  modified_base 6: mod_base = OTHER; note = 2'-fluorouridine
  modified_base 7: mod_base = OTHER; note = 2'-O-methylcytidine
  modified_base 8: mod_base = OTHER; note = 2'-fluoroguanosine
  modified_base 9: mod_base = OTHER; note = 2'-O-methylguanosine
  modified_base 10: mod_base = OTHER; note = 2'-fluoroadenosine
  modified_base 11: mod_base = OTHER; note = 2'-O-methylcytidine
  modified_base 12: mod_base = OTHER; note = 2'-fluorouridine
  modified_base 13: mod_base = OTHER; note = 2'-O-methyluridine
  modified_base 14: mod_base = OTHER; note = 2'-fluoroguanosine
  modified_base 15: mod_base = OTHER; note = 2'-O-methyladenosine
  modified_base 16: mod_base = OTHER; note = 2'-fluorocytidine
  modified_base 17: mod_base = OTHER; note = 2'-O-methylcytidine
  modified_base 18: mod_base = OTHER; note = 2'-fluoroguanosine
  modified_base 19: mod_base = OTHER; note = 2'-O-methyluridine
  modified_base 20: mod_base = OTHER; note = 2'-fluorocytidine
  modified_base 21: mod_base = OTHER; note = 2'-O-methyladenosine with phosphorothioate linkage
  modified_base 22: mod_base = OTHER; note = 2'-fluorouridine with phosphorothioate linkage
  modified_base 23: mod_base = OTHER; note = 2'-O-methylguanosine
agtcgtcggacttgaccgtcatg

SEQ ID NO: 1382 - RNA, 23 nt, synthetic construct
  source 1..23: mol_type = other RNA
  modified_base 1: mod_base = OTHER; note = 5'-(E)-vinylphosphonate 2'-O-methylated adenosine with phosphorothioate linkage
  modified_base 2: mod_base = OTHER; note = 2'-fluorocytidine with phosphorothioate linkage
  modified_base 3: mod_base = OTHER; note = 2'-O-methylcytidine
  modified_base 4: mod_base = OTHER; note = 2'-fluoroguanosine
  modified_base 5: mod_base = OTHER; note = 2'-O-methyluridine
  modified_base 6: mod_base = OTHER; note = 2'-fluorocytidine
  modified_base 7: mod_base = OTHER; note = 2'-O-methylguanosine
  modified_base 8: mod_base = OTHER; note = 2'-fluorouridine
  modified_base 9: mod_base = OTHER; note = 2'-O-methylcytidine
  modified_base 10: mod_base = OTHER; note = 2'-fluoroguanosine
  modified_base 11: mod_base = OTHER; note = 2'-O-methylguanosine
  modified_base 12: mod_base = OTHER; note = 2'-fluoroadenosine
  modified_base 13: mod_base = OTHER; note = 2'-O-methylcytidine
  modified_base 14: mod_base = OTHER; note = 2'-fluorouridine
  modified_base 15: mod_base = OTHER; note = 2'-O-methyluridine
  modified_base 16: mod_base = OTHER; note = 2'-fluoroguanosine
  modified_base 17: mod_base = OTHER; note = 2'-O-methyladenosine
  modified_base 18: mod_base = OTHER; note = 2'-fluorocytidine
  modified_base 19: mod_base = OTHER; note = 2'-O-methylcytidine
  modified_base 20: mod_base = OTHER; note = 2'-fluoroguanosine
  modified_base 21: mod_base = OTHER; note = 2'-O-methyluridine with phosphorothioate linkage
  modified_base 22: mod_base = OTHER; note = 2'-fluorocytidine with phosphorothioate linkage
  modified_base 23: mod_base = OTHER; note = 2'-O-methyladenosine
accgtcgtcggacttgaccgtca

SEQ ID NO: 1383 - RNA, 23 nt, synthetic construct
  source 1..23: mol_type = other RNA
  modified_base 1: mod_base = OTHER; note = 5'-(E)-vinylphosphonate 2'-O-methylated guanosine with phosphorothioate linkage
  modified_base 2: mod_base = OTHER; note = 2'-fluoroadenosine with phosphorothioate linkage
  modified_base 3: mod_base = OTHER; note = 2'-O-methylguanosine
  modified_base 4: mod_base = OTHER; note = 2'-fluoroadenosine
  modified_base 5: mod_base = OTHER; note = 2'-O-methylguanosine
  modified_base 6: mod_base = OTHER; note = 2'-fluoroadenosine
  modified_base 7: mod_base = OTHER; note = 2'-O-methylcytidine
  modified_base 8: mod_base = OTHER; note = 2'-fluorocytidine
  modified_base 9: mod_base = OTHER; note = 2'-O-methylguanosine
  modified_base 10: mod_base = OTHER; note = 2'-fluorouridine
  modified_base 11: mod_base = OTHER; note = 2'-O-methylcytidine
  modified_base 12: mod_base = OTHER; note = 2'-fluoroguanosine
  modified_base 13: mod_base = OTHER; note = 2'-O-methyluridine
  modified_base 14: mod_base = OTHER; note = 2'-fluorocytidine
  modified_base 15: mod_base = OTHER; note = 2'-O-methylguanosine
  modified_base 16: mod_base = OTHER; note = 2'-fluoroguanosine
  modified_base 17: mod_base = OTHER; note = 2'-O-methyladenosine
  modified_base 18: mod_base = OTHER; note = 2'-fluorocytidine
  modified_base 19: mod_base = OTHER; note = 2'-O-methyluridine
  modified_base 20: mod_base = OTHER; note = 2'-fluorouridine
  modified_base 21: mod_base = OTHER; note = 2'-O-methylguanosine with phosphorothioate linkage
  modified_base 22: mod_base = OTHER; note = 2'-fluoroadenosine with phosphorothioate linkage
  modified_base 23: mod_base = OTHER; note = 2'-O-methylcytidine
gagagaccgtcgtcggacttgac

SEQ ID NO: 1384 - RNA, 23 nt, synthetic construct
  source 1..23: mol_type = other RNA
  modified_base 1: mod_base = OTHER; note = 5'-(E)-vinylphosphonate 2'-O-methylated uridine with phosphorothioate linkage
  modified_base 2: mod_base = OTHER; note = 2'-fluoroguanosine with phosphorothioate linkage
  modified_base 3: mod_base = OTHER; note = 2'-O-methylguanosine
  modified_base 4: mod_base = OTHER; note = 2'-fluorocytidine
  modified_base 5: mod_base = OTHER; note = 2'-O-methylcytidine
  modified_base 6: mod_base = OTHER; note = 2'-fluoroadenosine
  modified_base 7: mod_base = OTHER; note = 2'-O-methylcytidine
  modified_base 8: mod_base = OTHER; note = 2'-fluorocytidine
  modified_base 9: mod_base = OTHER; note = 2'-O-methyladenosine
  modified_base 10: mod_base = OTHER; note = 2'-fluorocytidine
  modified_base 11: mod_base = OTHER; note = 2'-O-methylguanosine
  modified_base 12: mod_base = OTHER; note = 2'-fluoroguanosine
  modified_base 13: mod_base = OTHER; note = 2'-O-methyladenosine
  modified_base 14: mod_base = OTHER; note = 2'-fluorocytidine
  modified_base 15: mod_base = OTHER; note = 2'-O-methyluridine
  modified_base 16: mod_base = OTHER; note = 2'-fluorouridine
  modified_base 17: mod_base = OTHER; note = 2'-O-methylguanosine
  modified_base 18: mod_base = OTHER; note = 2'-fluoroadenosine
  modified_base 19: mod_base = OTHER; note = 2'-O-methylguanosine
  modified_base 20: mod_base = OTHER; note = 2'-fluorocytidine
  modified_base 21: mod_base = OTHER; note = 2'-O-methylguanosine with phosphorothioate linkage
  modified_base 22: mod_base = OTHER; note = 2'-fluorocytidine with phosphorothioate linkage
  modified_base 23: mod_base = OTHER; note = 2'-O-methylguanosine
tggccaccacggacttgagcgcg

SEQ ID NO: 1385 - RNA, 23 nt, synthetic construct
  source 1..23: mol_type = other RNA
  modified_base 1: mod_base = OTHER; note = 5'-(E)-vinylphosphonate 2'-O-methylated adenosine with phosphorothioate linkage
  modified_base 2: mod_base = OTHER; note = 2'-fluorocytidine with phosphorothioate linkage
  modified_base 3: mod_base = OTHER; note = 2'-O-methyluridine
  modified_base 4: mod_base = OTHER; note = 2'-fluorouridine
  modified_base 5: mod_base = OTHER; note = 2'-O-methylguanosine
  modified_base 6: mod_base = OTHER; note = 2'-fluoroguanosine
  modified_base 7: mod_base = OTHER; note = 2'-O-methylcytidine
  modified_base 8: mod_base = OTHER; note = 2'-fluorocytidine
  modified_base 9: mod_base = OTHER; note = 2'-O-methyladenosine
  modified_base 10: mod_base = OTHER; note = 2'-fluorocytidine
  modified_base 11: mod_base = OTHER; note = 2'-O-methylcytidine
  modified_base 12: mod_base = OTHER; note = 2'-fluoroadenosine
  modified_base 13: mod_base = OTHER; note = 2'-O-methylcytidine
  modified_base 14: mod_base = OTHER; note = 2'-fluoroguanosine
  modified_base 15: mod_base = OTHER; note = 2'-O-methylguanosine
  modified_base 16: mod_base = OTHER; note = 2'-fluoroadenosine
  modified_base 17: mod_base = OTHER; note = 2'-O-methylcytidine
  modified_base 18: mod_base = OTHER; note = 2'-fluorouridine
  modified_base 19: mod_base = OTHER; note = 2'-O-methyluridine
  modified_base 20: mod_base = OTHER; note = 2'-fluoroguanosine
  modified_base 21: mod_base = OTHER; note = 2'-O-methyladenosine with phosphorothioate linkage
  modified_base 22: mod_base = OTHER; note = 2'-fluoroguanosine with phosphorothioate linkage
  modified_base 23: mod_base = OTHER; note = 2'-O-methylcytidine
acttggccaccacggacttgagc

SEQ ID NO: 1386 - RNA, 23 nt, synthetic construct
  source 1..23: mol_type = other RNA
  modified_base 1: mod_base = OTHER; note = 5'-(E)-vinylphosphonate 2'-O-methylated adenosine with phosphorothioate linkage
  modified_base 2: mod_base = OTHER; note = 2'-fluoroguanosine with phosphorothioate linkage
  modified_base 3: mod_base = OTHER; note = 2'-O-methylcytidine
  modified_base 4: mod_base = OTHER; note = 2'-fluorouridine
  modified_base 5: mod_base = OTHER; note = 2'-O-methylcytidine
  modified_base 6: mod_base = OTHER; note = 2'-fluorouridine
  modified_base 7: mod_base = OTHER; note = 2'-O-methyluridine
  modified_base 8: mod_base = OTHER; note = 2'-fluoroguanosine
  modified_base 9: mod_base = OTHER; note = 2'-O-methyladenosine
  modified_base 10: mod_base = OTHER; note = 2'-fluoroadenosine
  modified_base 11: mod_base = OTHER; note = 2'-O-methylcytidine
  modified_base 12: mod_base = OTHER; note = 2'-fluorouridine
  modified_base 13: mod_base = OTHER; note = 2'-O-methyluridine
  modified_base 14: mod_base = OTHER; note = 2'-fluoroguanosine
  modified_base 15: mod_base = OTHER; note = 2'-O-methylguanosine
  modified_base 16: mod_base = OTHER; note = 2'-fluorocytidine
  modified_base 17: mod_base = OTHER; note = 2'-O-methylcytidine
  modified_base 18: mod_base = OTHER; note = 2'-fluoroadenosine
  modified_base 19: mod_base = OTHER; note = 2'-O-methylcytidine
  modified_base 20: mod_base = OTHER; note = 2'-fluorocytidine
  modified_base 21: mod_base = OTHER; note = 2'-O-methyladenosine with phosphorothioate linkage
  modified_base 22: mod_base = OTHER; note = 2'-fluorocytidine with phosphorothioate linkage
  modified_base 23: mod_base = OTHER; note = 2'-O-methylguanosine
agctcttgaacttggccaccacg

SEQ ID NO: 1387 - RNA, 23 nt, synthetic construct
  source 1..23: mol_type = other RNA
  modified_base 1: mod_base = OTHER; note = 5'-(E)-vinylphosphonate 2'-O-methylated uridine with phosphorothioate linkage
  modified_base 2: mod_base = OTHER; note = 2'-fluorocytidine with phosphorothioate linkage
  modified_base 3: mod_base = OTHER; note = 2'-O-methylguanosine
  modified_base 4: mod_base = OTHER; note = 2'-fluorocytidine
  modified_base 5: mod_base = OTHER; note = 2'-O-methyluridine
  modified_base 6: mod_base = OTHER; note = 2'-fluorocytidine
  modified_base 7: mod_base = OTHER; note = 2'-O-methyluridine
  modified_base 8: mod_base = OTHER; note = 2'-fluorouridine
  modified_base 9: mod_base = OTHER; note = 2'-O-methylguanosine
  modified_base 10: mod_base = OTHER; note = 2'-fluoroadenosine
  modified_base 11: mod_base = OTHER; note = 2'-O-methyladenosine
  modified_base 12: mod_base = OTHER; note = 2'-fluorocytidine
  modified_base 13: mod_base = OTHER; note = 2'-O-methyluridine
  modified_base 14: mod_base = OTHER; note = 2'-fluorouridine
  modified_base 15: mod_base = OTHER; note = 2'-O-methylguanosine
  modified_base 16: mod_base = OTHER; note = 2'-fluoroguanosine
  modified_base 17: mod_base = OTHER; note = 2'-O-methylcytidine
  modified_base 18: mod_base = OTHER; note = 2'-fluorocytidine
  modified_base 19: mod_base = OTHER; note = 2'-O-methyladenosine
  modified_base 20: mod_base = OTHER; note = 2'-fluorocytidine
  modified_base 21: mod_base = OTHER; note = 2'-O-methylcytidine with phosphorothioate linkage
  modified_base 22: mod_base = OTHER; note = 2'-fluoroadenosine with phosphorothioate linkage
  modified_base 23: mod_base = OTHER; note = 2'-O-methylcytidine
tcgctcttgaacttggccaccac

SEQ ID NO: 1388 - RNA, 23 nt, synthetic construct
  source 1..23: mol_type = other RNA
  modified_base 1: mod_base = OTHER; note = 5'-(E)-vinylphosphonate 2'-O-methylated adenosine with phosphorothioate linkage
  modified_base 2: mod_base = OTHER; note = 2'-fluorocytidine with phosphorothioate linkage
  modified_base 3: mod_base = OTHER; note = 2'-O-methyluridine
  modified_base 4: mod_base = OTHER; note = 2'-fluorocytidine
  modified_base 5: mod_base = OTHER; note = 2'-O-methyluridine
  modified_base 6: mod_base = OTHER; note = 2'-fluorouridine
  modified_base 7: mod_base = OTHER; note = 2'-O-methylcytidine
  modified_base 8: mod_base = OTHER; note = 2'-fluorocytidine
  modified_base 9: mod_base = OTHER; note = 2'-O-methyluridine
  modified_base 10: mod_base = OTHER; note = 2'-fluorocytidine
  modified_base 11: mod_base = OTHER; note = 2'-O-methylguanosine
  modified_base 12: mod_base = OTHER; note = 2'-fluorouridine
  modified_base 13: mod_base = OTHER; note = 2'-O-methylcytidine
  modified_base 14: mod_base = OTHER; note = 2'-fluoroguanosine
  modified_base 15: mod_base = OTHER; note = 2'-O-methyluridine
  modified_base 16: mod_base = OTHER; note = 2'-fluorocytidine
  modified_base 17: mod_base = OTHER; note = 2'-O-methylcytidine
  modified_base 18: mod_base = OTHER; note = 2'-fluorouridine
  modified_base 19: mod_base = OTHER; note = 2'-O-methylcytidine
  modified_base 20: mod_base = OTHER; note = 2'-fluorocytidine
  modified_base 21: mod_base = OTHER; note = 2'-O-methyluridine with phosphorothioate linkage
  modified_base 22: mod_base = OTHER; note = 2'-fluorocytidine with phosphorothioate linkage
  modified_base 23: mod_base = OTHER; note = 2'-O-methyluridine
actcttcctcgtcgtcctcctct

SEQ ID NO: 1389 - RNA, 23 nt, synthetic construct
  source 1..23: mol_type = other RNA
  modified_base 1: mod_base = OTHER; note = 5'-(E)-vinylphosphonate 2'-O-methylated uridine with phosphorothioate linkage
  modified_base 2: mod_base = OTHER; note = 2'-fluorouridine with phosphorothioate linkage
  modified_base 3: mod_base = OTHER; note = 2'-O-methylcytidine
  modified_base 4: mod_base = OTHER; note = 2'-fluorocytidine
  modified_base 5: mod_base = OTHER; note = 2'-O-methyluridine
  modified_base 6: mod_base = OTHER; note = 2'-fluorocytidine
  modified_base 7: mod_base = OTHER; note = 2'-O-methyluridine
  modified_base 8: mod_base = OTHER; note = 2'-fluorouridine
  modified_base 9: mod_base = OTHER; note = 2'-O-methylcytidine
  modified_base 10: mod_base = OTHER; note = 2'-fluorocytidine
  modified_base 11: mod_base = OTHER; note = 2'-O-methyluridine
  modified_base 12: mod_base = OTHER; note = 2'-fluorocytidine
  modified_base 13: mod_base = OTHER; note = 2'-O-methylguanosine
  modified_base 14: mod_base = OTHER; note = 2'-fluorouridine
  modified_base 15: mod_base = OTHER; note = 2'-O-methylcytidine
  modified_base 16: mod_base = OTHER; note = 2'-fluoroguanosine
  modified_base 17: mod_base = OTHER; note = 2'-O-methyluridine
  modified_base 18: mod_base = OTHER; note = 2'-fluorocytidine
  modified_base 19: mod_base = OTHER; note = 2'-O-methylcytidine
  modified_base 20: mod_base = OTHER; note = 2'-fluorouridine
  modified_base 21: mod_base = OTHER; note = 2'-O-methylcytidine with phosphorothioate linkage
  modified_base 22: mod_base = OTHER; note = 2'-fluorocytidine with phosphorothioate linkage
  modified_base 23: mod_base = OTHER; note = 2'-O-methyluridine
ttcctcttcctcgtcgtcctcct

SEQ ID NO: 1390 - RNA, 23 nt, synthetic construct
  source 1..23: mol_type = other RNA
  modified_base 1: mod_base = OTHER; note = 5'-(E)-vinylphosphonate 2'-O-methylated adenosine with phosphorothioate linkage
  modified_base 2: mod_base = OTHER; note = 2'-fluoroadenosine with phosphorothioate linkage
  modified_base 3: mod_base = OTHER; note = 2'-O-methylcytidine
  modified_base 4: mod_base = OTHER; note = 2'-fluorouridine
  modified_base 5: mod_base = OTHER; note = 2'-O-methylcytidine
  modified_base 6: mod_base = OTHER; note = 2'-fluorocytidine
  modified_base 7: mod_base = OTHER; note = 2'-O-methyluridine
  modified_base 8: mod_base = OTHER; note = 2'-fluorouridine
  modified_base 9: mod_base = OTHER; note = 2'-O-methylcytidine
  modified_base 10: mod_base = OTHER; note = 2'-fluorouridine
  modified_base 11: mod_base = OTHER; note = 2'-O-methylcytidine
  modified_base 12: mod_base = OTHER; note = 2'-fluoroguanosine
  modified_base 13: mod_base = OTHER; note = 2'-O-methyladenosine
  modified_base 14: mod_base = OTHER; note = 2'-fluoroguanosine
  modified_base 15: mod_base = OTHER; note = 2'-O-methylcytidine
  modified_base 16: mod_base = OTHER; note = 2'-fluorouridine
  modified_base 17: mod_base = OTHER; note = 2'-O-methyluridine
  modified_base 18: mod_base = OTHER; note = 2'-fluoroguanosine
  modified_base 19: mod_base = OTHER; note = 2'-O-methyladenosine
  modified_base 20: mod_base = OTHER; note = 2'-fluorouridine
  modified_base 21: mod_base = OTHER; note = 2'-O-methylguanosine with phosphorothioate linkage
  modified_base 22: mod_base = OTHER; note = 2'-fluorocytidine with phosphorothioate linkage
  modified_base 23: mod_base = OTHER; note = 2'-O-methylguanosine
aactccttctcgagcttgatgcg

SEQ ID NO: 1391 - RNA, 23 nt, synthetic construct
  source 1..23: mol_type = other RNA
  modified_base 1: mod_base = OTHER; note = 5'-(E)-vinylphosphonate 2'-O-methylated guanosine with phosphorothioate linkage
  modified_base 2: mod_base = OTHER; note = 2'-fluoroadenosine with phosphorothioate linkage
  modified_base 3: mod_base = OTHER; note = 2'-O-methyladenosine
  modified_base 4: mod_base = OTHER; note = 2'-fluorocytidine
  modified_base 5: mod_base = OTHER; note = 2'-O-methyluridine
  modified_base 6: mod_base = OTHER; note = 2'-fluorocytidine
  modified_base 7: mod_base = OTHER; note = 2'-O-methylcytidine
  modified_base 8: mod_base = OTHER; note = 2'-fluorouridine
  modified_base 9: mod_base = OTHER; note = 2'-O-methyluridine
  modified_base 10: mod_base = OTHER; note = 2'-fluorocytidine
  modified_base 11: mod_base = OTHER; note = 2'-O-methyluridine
  modified_base 12: mod_base = OTHER; note = 2'-fluorocytidine
  modified_base 13: mod_base = OTHER; note = 2'-O-methylguanosine
  modified_base 14: mod_base = OTHER; note = 2'-fluoroadenosine
  modified_base 15: mod_base = OTHER; note = 2'-O-methylguanosine
  modified_base 16: mod_base = OTHER; note = 2'-fluorocytidine
  modified_base 17: mod_base = OTHER; note = 2'-O-methyluridine
  modified_base 18: mod_base = OTHER; note = 2'-fluorouridine
  modified_base 19: mod_base = OTHER; note = 2'-O-methylguanosine
  modified_base 20: mod_base = OTHER; note = 2'-fluoroadenosine
  modified_base 21: mod_base = OTHER; note = 2'-O-methyluridine with phosphorothioate linkage
  modified_base 22: mod_base = OTHER; note = 2'-fluoroguanosine with phosphorothioate linkage
  modified_base 23: mod_base = OTHER; note = 2'-O-methylcytidine
gaactccttctcgagcttgatgc

SEQ ID NO: 1392 - RNA, 23 nt, synthetic construct
  source 1..23: mol_type = other RNA
  modified_base 1: mod_base = OTHER; note = 5'-(E)-vinylphosphonate 2'-O-methylated uridine with phosphorothioate linkage
  modified_base 2: mod_base = OTHER; note = 2'-fluorocytidine with phosphorothioate linkage
  modified_base 3: mod_base = OTHER; note = 2'-O-methylguanosine
  modified_base 4: mod_base = OTHER; note = 2'-fluoroadenosine
  modified_base 5: mod_base = OTHER; note = 2'-O-methyladenosine
  modified_base 6: mod_base = OTHER; note = 2'-fluorocytidine
  modified_base 7: mod_base = OTHER; note = 2'-O-methyluridine
  modified_base 8: mod_base = OTHER; note = 2'-fluorocytidine
  modified_base 9: mod_base = OTHER; note = 2'-O-methylcytidine
  modified_base 10: mod_base = OTHER; note = 2'-fluorouridine
  modified_base 11: mod_base = OTHER; note = 2'-O-methyluridine
  modified_base 12: mod_base = OTHER; note = 2'-fluorocytidine
  modified_base 13: mod_base = OTHER; note = 2'-O-methyluridine
  modified_base 14: mod_base = OTHER; note = 2'-fluorocytidine
  modified_base 15: mod_base = OTHER; note = 2'-O-methylguanosine
  modified_base 16: mod_base = OTHER; note = 2'-fluoroadenosine
  modified_base 17: mod_base = OTHER; note = 2'-O-methylguanosine
  modified_base 18: mod_base = OTHER; note = 2'-fluorocytidine
  modified_base 19: mod_base = OTHER; note = 2'-O-methyluridine
  modified_base 20: mod_base = OTHER; note = 2'-fluorouridine
  modified_base 21: mod_base = OTHER; note = 2'-O-methylguanosine with phosphorothioate linkage
  modified_base 22: mod_base = OTHER; note = 2'-fluoroadenosine with phosphorothioate linkage
  modified_base 23: mod_base = OTHER; note = 2'-O-methyluridine
tcgaactccttctcgagcttgat

SEQ ID NO: 1393 - RNA, 23 nt, synthetic construct
  source 1..23: mol_type = other RNA
  modified_base 1: mod_base = OTHER; note = 5'-(E)-vinylphosphonate 2'-O-methylated uridine with phosphorothioate linkage
  modified_base 2: mod_base = OTHER; note = 2'-fluoroguanosine with phosphorothioate linkage
  modified_base 3: mod_base = OTHER; note = 2'-O-methylguanosine
  modified_base 4: mod_base = OTHER; note = 2'-fluoroadenosine
  modified_base 5: mod_base = OTHER; note = 2'-O-methylguanosine
  modified_base 6: mod_base = OTHER; note = 2'-fluorouridine
  modified_base 7: mod_base = OTHER; note = 2'-O-methylcytidine
  modified_base 8: mod_base = OTHER; note = 2'-fluorouridine
  modified_base 9: mod_base = OTHER; note = 2'-O-methylcytidine
  modified_base 10: mod_base = OTHER; note = 2'-fluorocytidine
  modified_base 11: mod_base = OTHER; note = 2'-O-methylguanosine
  modified_base 12: mod_base = OTHER; note = 2'-fluoroadenosine
  modified_base 13: mod_base = OTHER; note = 2'-O-methyladenosine
  modified_base 14: mod_base = OTHER; note = 2'-fluoroguanosine
  modified_base 15: mod_base = OTHER; note = 2'-O-methylcytidine
  modified_base 16: mod_base = OTHER; note = 2'-fluorouridine
  modified_base 17: mod_base = OTHER; note = 2'-O-methyladenosine
  modified_base 18: mod_base = OTHER; note = 2'-fluoroadenosine
  modified_base 19: mod_base = OTHER; note = 2'-O-methylguanosine
  modified_base 20: mod_base = OTHER; note = 2'-fluoroguanosine
  modified_base 21: mod_base = OTHER; note = 2'-O-methyladenosine with phosphorothioate linkage
  modified_base 22: mod_base = OTHER; note = 2'-fluoroadenosine with phosphorothioate linkage
  modified_base 23: mod_base = OTHER; note = 2'-O-methylguanosine
tggagtctccgaagctaaggaag

SEQ ID NO: 1394 - RNA, 23 nt, synthetic construct
  source 1..23: mol_type = other RNA
  modified_base 1: mod_base = OTHER; note = 5'-(E)-vinylphosphonate 2'-O-methylated adenosine with phosphorothioate linkage
  modified_base 2: mod_base = OTHER; note = 2'-fluorouridine with phosphorothioate linkage
  modified_base 3: mod_base = OTHER; note = 2'-O-methylguanosine
  modified_base 4: mod_base = OTHER; note = 2'-fluoroguanosine
  modified_base 5: mod_base = OTHER; note = 2'-O-methyladenosine
  modified_base 6: mod_base = OTHER; note = 2'-fluoroguanosine
  modified_base 7: mod_base = OTHER; note = 2'-O-methyluridine
  modified_base 8: mod_base = OTHER; note = 2'-fluorocytidine
  modified_base 9: mod_base = OTHER; note = 2'-O-methyluridine
  modified_base 10: mod_base = OTHER; note = 2'-fluorocytidine
  modified_base 11: mod_base = OTHER; note = 2'-O-methylcytidine
  modified_base 12: mod_base = OTHER; note = 2'-fluoroguanosine
  modified_base 13: mod_base = OTHER; note = 2'-O-methyladenosine
  modified_base 14: mod_base = OTHER; note = 2'-fluoroadenosine
  modified_base 15: mod_base = OTHER; note = 2'-O-methylguanosine
  modified_base 16: mod_base = OTHER; note = 2'-fluorocytidine
  modified_base 17: mod_base = OTHER; note = 2'-O-methyluridine
  modified_base 18: mod_base = OTHER; note = 2'-fluoroadenosine
  modified_base 19: mod_base = OTHER; note = 2'-O-methyladenosine
  modified_base 20: mod_base = OTHER; note = 2'-fluoroguanosine
  modified_base 21: mod_base = OTHER; note = 2'-O-methylguanosine with phosphorothioate linkage
  modified_base 22: mod_base = OTHER; note = 2'-fluoroadenosine with phosphorothioate linkage
  modified_base 23: mod_base = OTHER; note = 2'-O-methyladenosine
atggagtctccgaagctaaggaa

SEQ ID NO: 1395 - RNA, 23 nt, synthetic construct
  source 1..23: mol_type = other RNA
  modified_base 1: mod_base = OTHER; note = 5'-(E)-vinylphosphonate 2'-O-methylated uridine with phosphorothioate linkage
  modified_base 2: mod_base = OTHER; note = 2'-fluoroguanosine with phosphorothioate linkage
  modified_base 3: mod_base = OTHER; note = 2'-O-methyluridine
  modified_base 4: mod_base = OTHER; note = 2'-fluorocytidine
  modified_base 5: mod_base = OTHER; note = 2'-O-methyluridine
  modified_base 6: mod_base = OTHER; note = 2'-fluoroguanosine
  modified_base 7: mod_base = OTHER; note = 2'-O-methylguanosine
  modified_base 8: mod_base = OTHER; note = 2'-fluoroadenosine
  modified_base 9: mod_base = OTHER; note = 2'-O-methylguanosine
  modified_base 10: mod_base = OTHER; note = 2'-fluorouridine
  modified_base 11: mod_base = OTHER; note = 2'-O-methylcytidine
  modified_base 12: mod_base = OTHER; note = 2'-fluorouridine
  modified_base 13: mod_base = OTHER; note = 2'-O-methylcytidine
  modified_base 14: mod_base = OTHER; note = 2'-fluorocytidine
  modified_base 15: mod_base = OTHER; note = 2'-O-methylguanosine
  modified_base 16: mod_base = OTHER; note = 2'-fluoroadenosine
  modified_base 17: mod_base = OTHER; note = 2'-O-methyladenosine
  modified_base 18: mod_base = OTHER; note = 2'-fluoroguanosine
  modified_base 19: mod_base = OTHER; note = 2'-O-methylcytidine
  modified_base 20: mod_base = OTHER; note = 2'-fluorouridine
  modified_base 21: mod_base = OTHER; note = 2'-O-methyladenosine with phosphorothioate linkage
  modified_base 22: mod_base = OTHER; note = 2'-fluoroadenosine with phosphorothioate linkage
  modified_base 23: mod_base = OTHER; note = 2'-O-methylguanosine
tgtctggagtctccgaagctaag

SEQ ID NO: 1396 - RNA, 23 nt, synthetic construct
  source 1..23: mol_type = other RNA
  modified_base 1: mod_base = OTHER; note = 5'-(E)-vinylphosphonate 2'-O-methylated uridine with phosphorothioate linkage
  modified_base 2: mod_base = OTHER; note = 2'-fluorouridine with phosphorothioate linkage
  modified_base 3: mod_base = OTHER; note = 2'-O-methylguanosine
  modified_base 4: mod_base = OTHER; note = 2'-fluorouridine
  modified_base 5: mod_base = OTHER; note = 2'-O-methylcytidine
  modified_base 6: mod_base = OTHER; note = 2'-fluorouridine
  modified_base 7: mod_base = OTHER; note = 2'-O-methylguanosine
  modified_base 8: mod_base = OTHER; note = 2'-fluoroguanosine
  modified_base 9: mod_base = OTHER; note = 2'-O-methyladenosine
  modified_base 10: mod_base = OTHER; note = 2'-fluoroguanosine
  modified_base 11: mod_base = OTHER; note = 2'-O-methyluridine
  modified_base 12: mod_base = OTHER; note = 2'-fluorocytidine
  modified_base 13: mod_base = OTHER; note = 2'-O-methyluridine
  modified_base 14: mod_base = OTHER; note = 2'-fluorocytidine
  modified_base 15: mod_base = OTHER; note = 2'-O-methylcytidine
  modified_base 16: mod_base = OTHER; note = 2'-fluoroguanosine
  modified_base 17: mod_base = OTHER; note = 2'-O-methyladenosine
  modified_base 18: mod_base = OTHER; note = 2'-fluoroadenosine
  modified_base 19: mod_base = OTHER; note = 2'-O-methylguanosine
  modified_base 20: mod_base = OTHER; note = 2'-fluorocytidine
  modified_base 21: mod_base = OTHER; note = 2'-O-methyluridine with phosphorothioate linkage
  modified_base 22: mod_base = OTHER; note = 2'-fluoroadenosine with phosphorothioate linkage
  modified_base 23: mod_base = OTHER; note = 2'-O-methyladenosine
ttgtctggagtctccgaagctaa

SEQ ID NO: 1397 - RNA, 23 nt, synthetic construct
  source 1..23: mol_type = other RNA
  modified_base 1: mod_base = OTHER; note = 5'-(E)-vinylphosphonate 2'-O-methylated adenosine with phosphorothioate linkage
  modified_base 2: mod_base = OTHER; note = 2'-fluorouridine with phosphorothioate linkage
  modified_base 3: mod_base = OTHER; note = 2'-O-methyluridine
  modified_base 4: mod_base = OTHER; note = 2'-fluoroguanosine
  modified_base 5: mod_base = OTHER; note = 2'-O-methyluridine
  modified_base 6: mod_base = OTHER; note = 2'-fluorocytidine
  modified_base 7: mod_base = OTHER; note = 2'-O-methyluridine
  modified_base 8: mod_base = OTHER; note = 2'-fluoroguanosine
  modified_base 9: mod_base = OTHER; note = 2'-O-methylguanosine
  modified_base 10: mod_base = OTHER; note = 2'-fluoroadenosine
  modified_base 11: mod_base = OTHER; note = 2'-O-methylguanosine
  modified_base 12: mod_base = OTHER; note = 2'-fluorouridine
  modified_base 13: mod_base = OTHER; note = 2'-O-methylcytidine
  modified_base 14: mod_base = OTHER; note = 2'-fluorouridine
  modified_base 15: mod_base = OTHER; note = 2'-O-methylcytidine
  modified_base 16: mod_base = OTHER; note = 2'-fluorocytidine
  modified_base 17: mod_base = OTHER; note = 2'-O-methylguanosine
  modified_base 18: mod_base = OTHER; note = 2'-fluoroadenosine
  modified_base 19: mod_base = OTHER; note = 2'-O-methyladenosine
  modified_base 20: mod_base = OTHER; note = 2'-fluoroguanosine
  modified_base 21: mod_base = OTHER; note = 2'-O-methylcytidine with phosphorothioate linkage
  modified_base 22: mod_base = OTHER; note = 2'-fluorouridine with phosphorothioate linkage
  modified_base 23: mod_base = OTHER; note = 2'-O-methyladenosine
attgtctggagtctccgaagcta

SEQ ID NO: 1398 - RNA, 23 nt, synthetic construct
  source 1..23: mol_type = other RNA
  modified_base 1: mod_base = OTHER; note = 5'-(E)-vinylphosphonate 2'-O-methylated guanosine with phosphorothioate linkage
  modified_base 2: mod_base = OTHER; note = 2'-fluoroadenosine with phosphorothioate linkage
  modified_base 3: mod_base = OTHER; note = 2'-O-methyluridine
  modified_base 4: mod_base = OTHER; note = 2'-fluorouridine
  modified_base 5: mod_base = OTHER; note = 2'-O-methylguanosine
  modified_base 6: mod_base = OTHER; note = 2'-fluorouridine
  modified_base 7: mod_base = OTHER; note = 2'-O-methylcytidine
  modified_base 8: mod_base = OTHER; note = 2'-fluorouridine
  modified_base 9: mod_base = OTHER; note = 2'-O-methylguanosine
  modified_base 10: mod_base = OTHER; note = 2'-fluoroguanosine
  modified_base 11: mod_base = OTHER; note = 2'-O-methyladenosine
  modified_base 12: mod_base = OTHER; note = 2'-fluoroguanosine
  modified_base 13: mod_base = OTHER; note = 2'-O-methyluridine
  modified_base 14: mod_base = OTHER; note = 2'-fluorocytidine
  modified_base 15: mod_base = OTHER; note = 2'-O-methyluridine
  modified_base 16: mod_base = OTHER; note = 2'-fluorocytidine
  modified_base 17: mod_base = OTHER; note = 2'-O-methylcytidine
  modified_base 18: mod_base = OTHER; note = 2'-fluoroguanosine
  modified_base 19: mod_base = OTHER; note = 2'-O-methyladenosine
  modified_base 20: mod_base = OTHER; note = 2'-fluoroadenosine
  modified_base 21: mod_base = OTHER; note = 2'-O-methylguanosine with phosphorothioate linkage
  modified_base 22: mod_base = OTHER; note = 2'-fluorocytidine with phosphorothioate linkage
  modified_base 23: mod_base = OTHER; note = 2'-O-methyluridine
gattgtctggagtctccgaagct

SEQ ID NO: 1399 - RNA, 23 nt, synthetic construct
  source 1..23: mol_type = other RNA
  modified_base 1: mod_base = OTHER; note = 5'-(E)-vinylphosphonate 2'-O-methylated adenosine with phosphorothioate linkage
  modified_base 2: mod_base = OTHER; note = 2'-fluoroguanosine with phosphorothioate linkage
  modified_base 3: mod_base = OTHER; note = 2'-O-methyluridine
  modified_base 4: mod_base = OTHER; note = 2'-fluoroguanosine
  modified_base 5: mod_base = OTHER; note = 2'-O-methylcytidine
  modified_base 6: mod_base = OTHER; note = 2'-fluorouridine
  modified_base 7: mod_base = OTHER; note = 2'-O-methylcytidine
  modified_base 8: mod_base = OTHER; note = 2'-fluorocytidine
  modified_base 9: mod_base = OTHER; note = 2'-O-methylguanosine
  modified_base 10: mod_base = OTHER; note = 2'-fluoroadenosine
  modified_base 11: mod_base = OTHER; note = 2'-O-methylcytidine
  modified_base 12: mod_base = OTHER; note = 2'-fluoroguanosine
  modified_base 13: mod_base = OTHER; note = 2'-O-methyladenosine
  modified_base 14: mod_base = OTHER; note = 2'-fluoroguanosine
  modified_base 15: mod_base = OTHER; note = 2'-O-methylguanosine
  modified_base 16: mod_base = OTHER; note = 2'-fluoroadenosine
  modified_base 17: mod_base = OTHER; note = 2'-O-methylguanosine
  modified_base 18: mod_base = OTHER; note = 2'-fluoroguanosine
  modified_base 19: mod_base = OTHER; note = 2'-O-methylcytidine
  modified_base 20: mod_base = OTHER; note = 2'-fluoroadenosine
  modified_base 21: mod_base = OTHER; note = 2'-O-methyladenosine with phosphorothioate linkage
  modified_base 22: mod_base = OTHER; note = 2'-fluoroadenosine with phosphorothioate linkage
  modified_base 23: mod_base = OTHER; note = 2'-O-methyladenosine
agtgctccgacgaggaggcaaaa

SEQ ID NO: 1400 - RNA, 23 nt, synthetic construct
  source 1..23: mol_type = other RNA
  modified_base 1: mod_base = OTHER; note = 5'-(E)-vinylphosphonate 2'-O-methylated guanosine with phosphorothioate linkage
  modified_base 2: mod_base = OTHER; note = 2'-fluoroadenosine with phosphorothioate linkage
  modified_base 3: mod_base = OTHER; note = 2'-O-methylguanosine
  modified_base 4: mod_base = OTHER; note = 2'-fluorouridine
  modified_base 5: mod_base = OTHER; note = 2'-O-methylguanosine
  modified_base 6: mod_base = OTHER; note = 2'-fluorocytidine
  modified_base 7: mod_base = OTHER; note = 2'-O-methyluridine
  modified_base 8: mod_base = OTHER; note = 2'-fluorocytidine
  modified_base 9: mod_base = OTHER; note = 2'-O-methylcytidine
  modified_base 10: mod_base = OTHER; note = 2'-fluoroguanosine
  modified_base 11: mod_base = OTHER; note = 2'-O-methyladenosine
  modified_base 12: mod_base = OTHER; note = 2'-fluorocytidine
  modified_base 13: mod_base = OTHER; note = 2'-O-methylguanosine
  modified_base 14: mod_base = OTHER; note = 2'-fluoroadenosine
  modified_base 15: mod_base = OTHER; note = 2'-O-methylguanosine
  modified_base 16: mod_base = OTHER; note = 2'-fluoroguanosine
  modified_base 17: mod_base = OTHER; note = 2'-O-methyladenosine
  modified_base 18: mod_base = OTHER; note = 2'-fluoroguanosine
  modified_base 19: mod_base = OTHER; note = 2'-O-methylguanosine
  modified_base 20: mod_base = OTHER; note = 2'-fluorocytidine
  modified_base 21: mod_base = OTHER; note = 2'-O-methyladenosine with phosphorothioate linkage
  modified_base 22: mod_base = OTHER; note = 2'-fluoroadenosine with phosphorothioate linkage
  modified_base 23: mod_base = OTHER; note = 2'-O-methyladenosine
gagtgctccgacgaggaggcaaa

SEQ ID NO: 1401 - RNA, 23 nt, synthetic construct
  source 1..23: mol_type = other RNA
  modified_base 1: mod_base = OTHER; note = 5'-(E)-vinylphosphonate 2'-O-methylated uridine with phosphorothioate linkage
  modified_base 2: mod_base = OTHER; note = 2'-fluorocytidine with phosphorothioate linkage
  modified_base 3: mod_base = OTHER; note = 2'-O-methyladenosine
  modified_base 4: mod_base = OTHER; note = 2'-O-methyladenosine
  modified_base 5: mod_base = OTHER; note = 2'-O-methylcytidine
  modified_base 6: mod_base = OTHER; note = 2'-fluoroguanosine
  modified_base 7: mod_base = OTHER; note = 2'-O-methylguanosine
  modified_base 8: mod_base = OTHER; note = 2'-O-methylguanosine
  modified_base 9: mod_base = OTHER; note = 2'-O-methylcytidine
  modified_base 10: mod_base = OTHER; note = 2'-O-methylcytidine
  modified_base 11: mod_base = OTHER; note = 2'-O-methylguanosine
  modified_base 12: mod_base = OTHER; note = 2'-O-methyluridine
  modified_base 13: mod_base = OTHER; note = 2'-O-methylguanosine
  modified_base 14: mod_base = OTHER; note = 2'-fluoroguanosine
  modified_base 15: mod_base = OTHER; note = 2'-O-methyluridine
  modified_base 16: mod_base = OTHER; note = 2'-fluorocytidine
  modified_base 17: mod_base = OTHER; note = 2'-O-methyluridine
  modified_base 18: mod_base = OTHER; note = 2'-O-methylguanosine
  modified_base 19: mod_base = OTHER; note = 2'-O-methylguanosine
  modified_base 20: mod_base = OTHER; note = 2'-O-methyluridine
  modified_base 21: mod_base = OTHER; note = 2'-O-methyluridine with phosphorothioate linkage
  modified_base 22: mod_base = OTHER; note = 2'-O-methylcytidine with phosphorothioate linkage
  modified_base 23: mod_base = OTHER; note = 2'-O-methyladenosine
tcaacgggccgtggtctggttca

SEQ ID NO: 1402 - RNA, 23 nt, synthetic construct
  source 1..23: mol_type = other RNA
  modified_base 1: mod_base = OTHER; note = 5'-(E)-vinylphosphonate 2'-O-methylated uridine with phosphorothioate linkage
  modified_base 2: mod_base = OTHER; note = 2'-fluorocytidine with phosphorothioate linkage
  modified_base 3: mod_base = OTHER; note = 2'-O-methylcytidine
  modified_base 4: mod_base = OTHER; note = 2'-O-methyladenosine
  modified_base 5: mod_base = OTHER; note = 2'-O-methyladenosine
  modified_base 6: mod_base = OTHER; note = 2'-fluorocytidine
  modified_base 7: mod_base = OTHER; note = 2'-O-methylguanosine
  modified_base 8: mod_base = OTHER; note = 2'-O-methylguanosine
  modified_base 9: mod_base = OTHER; note = 2'-O-methylguanosine
  modified_base 10: mod_base = OTHER; note = 2'-O-methylcytidine
  modified_base 11: mod_base = OTHER; note = 2'-O-methylcytidine
  modified_base 12: mod_base = OTHER; note = 2'-O-methylguanosine
  modified_base 13: mod_base = OTHER; note = 2'-O-methyluridine
  modified_base 14: mod_base = OTHER; note = 2'-fluoroguanosine
  modified_base 15: mod_base = OTHER; note = 2'-O-methylguanosine
  modified_base 16: mod_base = OTHER; note = 2'-fluorouridine
  modified_base 17: mod_base = OTHER; note = 2'-O-methylcytidine
  modified_base 18: mod_base = OTHER; note = 2'-O-methyluridine
  modified_base 19: mod_base = OTHER; note = 2'-O-methylguanosine
  modified_base 20: mod_base = OTHER; note = 2'-O-methylguanosine
  modified_base 21: mod_base = OTHER; note = 2'-O-methyluridine with phosphorothioate linkage
  modified_base 22: mod_base = OTHER; note = 2'-O-methyluridine with phosphorothioate linkage
  modified_base 23: mod_base = OTHER; note = 2'-O-methylcytidine
tccaacgggccgtggtctggttc

SEQ ID NO: 1403 - RNA, 23 nt, synthetic construct
  source 1..23: mol_type = other RNA
  modified_base 1: mod_base = OTHER; note = 5'-(E)-vinylphosphonate 2'-O-methylated uridine with phosphorothioate linkage
  modified_base 2: mod_base = OTHER; note = 2'-fluorocytidine with phosphorothioate linkage
  modified_base 3: mod_base = OTHER; note = 2'-O-methylguanosine
  modified_base 4: mod_base = OTHER; note = 2'-O-methyladenosine
  modified_base 5: mod_base = OTHER; note = 2'-O-methyluridine
  modified_base 6: mod_base = OTHER; note = 2'-fluoroadenosine
  modified_base 7: mod_base = OTHER; note = 2'-O-methyladenosine
  modified_base 8: mod_base = OTHER; note = 2'-O-methyladenosine
  modified_base 9: mod_base = OTHER; note = 2'-O-methyladenosine
  modified_base 10: mod_base = OTHER; note = 2'-O-methyladenosine
  modified_base 11: mod_base = OTHER; note = 2'-O-methyluridine
  modified_base 12: mod_base = OTHER; note = 2'-O-methyladenosine
  modified_base 13: mod_base = OTHER; note = 2'-O-methyladenosine
  modified_base 14: mod_base = OTHER; note = 2'-fluoroguanosine
  modified_base 15: mod_base = OTHER; note = 2'-O-methyladenosine
  modified_base 16: mod_base = OTHER; note = 2'-fluoroadenosine
  modified_base 17: mod_base = OTHER; note = 2'-O-methyluridine
  modified_base 18: mod_base = OTHER; note = 2'-O-methylguanosine
  modified_base 19: mod_base = OTHER; note = 2'-O-methyluridine
  modified_base 20: mod_base = OTHER; note = 2'-O-methylcytidine
  modified_base 21: mod_base = OTHER; note = 2'-O-methylcytidine with phosphorothioate linkage
  modified_base 22: mod_base = OTHER; note = 2'-O-methylcytidine with phosphorothioate linkage
  modified_base 23: mod_base = OTHER; note = 2'-O-methylcytidine
tcgataaaaataagaatgtcccc

SEQ ID NO: 1404 - RNA, 23 nt, synthetic construct
  source 1..23: mol_type = other RNA
  modified_base 1: mod_base = OTHER; note = 5'-(E)-vinylphosphonate 2'-O-methylated uridine with phosphorothioate linkage
  modified_base 2: mod_base = OTHER; note = 2'-fluorouridine with phosphorothioate linkage
  modified_base 3: mod_base = OTHER; note = 2'-O-methylcytidine
  modified_base 4: mod_base = OTHER; note = 2'-O-methylguanosine
  modified_base 5: mod_base = OTHER; note = 2'-O-methyladenosine
  modified_base 6: mod_base = OTHER; note = 2'-fluorouridine
  modified_base 7: mod_base = OTHER; note = 2'-O-methyladenosine
  modified_base 8: mod_base = OTHER; note = 2'-O-methyladenosine
  modified_base 9: mod_base = OTHER; note = 2'-O-methyladenosine
  modified_base 10: mod_base = OTHER; note = 2'-O-methyladenosine
  modified_base 11: mod_base = OTHER; note = 2'-O-methyladenosine
  modified_base 12: mod_base = OTHER; note = 2'-O-methyluridine
  modified_base 13: mod_base = OTHER; note = 2'-O-methyladenosine
  modified_base 14: mod_base = OTHER; note = 2'-fluoroadenosine
  modified_base 15: mod_base = OTHER; note = 2'-O-methylguanosine
  modified_base 16: mod_base = OTHER; note = 2'-fluoroadenosine
  modified_base 17: mod_base = OTHER; note = 2'-O-methyladenosine
  modified_base 18: mod_base = OTHER; note = 2'-O-methyluridine
  modified_base 19: mod_base = OTHER; note = 2'-O-methylguanosine
  modified_base 20: mod_base = OTHER; note = 2'-O-methyluridine
  modified_base 21: mod_base = OTHER; note = 2'-O-methylcytidine with phosphorothioate linkage
  modified_base 22: mod_base = OTHER; note = 2'-O-methylcytidine with phosphorothioate linkage
  modified_base 23: mod_base = OTHER; note = 2'-O-methylcytidine
ttcgataaaaataagaatgtccc

SEQ ID NO: 1405 - RNA, 23 nt, synthetic construct
  source 1..23: mol_type = other RNA
  modified_base 1: mod_base = OTHER; note = 5'-(E)-vinylphosphonate 2'-O-methylated uridine with phosphorothioate linkage
  modified_base 2: mod_base = OTHER; note = 2'-fluoroguanosine with phosphorothioate linkage
  modified_base 3: mod_base = OTHER; note = 2'-O-methylcytidine
  modified_base 4: mod_base = OTHER; note = 2'-O-methyluridine
  modified_base 5: mod_base = OTHER; note = 2'-O-methylcytidine
  modified_base 6: mod_base = OTHER; note = 2'-fluoroguanosine
  modified_base 7: mod_base = OTHER; note = 2'-O-methyladenosine
  modified_base 8: mod_base = OTHER; note = 2'-O-methyluridine
  modified_base 9: mod_base = OTHER; note = 2'-O-methyladenosine
  modified_base 10: mod_base = OTHER; note = 2'-O-methyladenosine
  modified_base 11: mod_base = OTHER; note = 2'-O-methyladenosine
  modified_base 12: mod_base = OTHER; note = 2'-O-methyladenosine
  modified_base 13: mod_base = OTHER; note = 2'-O-methyladenosine
  modified_base 14: mod_base = OTHER; note = 2'-fluorouridine
  modified_base 15: mod_base = OTHER; note = 2'-O-methyladenosine
  modified_base 16: mod_base = OTHER; note = 2'-fluoroadenosine
  modified_base 17: mod_base = OTHER; note = 2'-O-methylguanosine
  modified_base 18: mod_base = OTHER; note = 2'-O-methyladenosine
  modified_base 19: mod_base = OTHER; note = 2'-O-methyladenosine
  modified_base 20: mod_base = OTHER; note = 2'-O-methyluridine
  modified_base 21: mod_base = OTHER; note = 2'-O-methylguanosine with phosphorothioate linkage
  modified_base 22: mod_base = OTHER; note = 2'-O-methyluridine with phosphorothioate linkage
  modified_base 23: mod_base = OTHER; note = 2'-O-methylcytidine
tgctcgataaaaataagaatgtc

SEQ ID NO: 1406 - RNA, 23 nt, synthetic construct
  source 1..23: mol_type = other RNA
  modified_base 1: mod_base = OTHER; note = 5'-(E)-vinylphosphonate 2'-O-methylated uridine with phosphorothioate linkage
  modified_base 2: mod_base = OTHER; note = 2'-fluoroguanosine with phosphorothioate linkage
  modified_base 3: mod_base = OTHER; note = 2'-O-methyluridine
  modified_base 4: mod_base = OTHER; note = 2'-O-methylguanosine
  modified_base 5: mod_base = OTHER; note = 2'-O-methylcytidine
  modified_base 6: mod_base = OTHER; note = 2'-fluorouridine
  modified_base 7: mod_base = OTHER; note = 2'-O-methylcytidine
  modified_base 8: mod_base = OTHER; note = 2'-O-methylguanosine
  modified_base 9: mod_base = OTHER; note = 2'-O-methyladenosine
  modified_base 10: mod_base = OTHER; note = 2'-O-methyluridine
  modified_base 11: mod_base = OTHER; note = 2'-O-methyladenosine
  modified_base 12: mod_base = OTHER; note = 2'-O-methyladenosine
  modified_base 13: mod_base = OTHER; note = 2'-O-methyladenosine
  modified_base 14: mod_base = OTHER; note = 2'-fluoroadenosine
  modified_base 15: mod_base = OTHER; note = 2'-O-methyladenosine
  modified_base 16: mod_base = OTHER; note = 2'-fluorouridine
  modified_base 17: mod_base = OTHER; note = 2'-O-methyladenosine
  modified_base 18: mod_base = OTHER; note = 2'-O-methyladenosine
  modified_base 19: mod_base = OTHER; note = 2'-O-methylguanosine
  modified_base 20: mod_base = OTHER; note = 2'-O-methyladenosine
  modified_base 21: mod_base = OTHER; note = 2'-O-methyladenosine with phosphorothioate linkage
  modified_base 22: mod_base = OTHER; note = 2'-O-methyluridine with phosphorothioate linkage
  modified_base 23: mod_base = OTHER; note = 2'-O-methylguanosine
tgtgctcgataaaaataagaatg

SEQ ID NO: 1407 - RNA, 23 nt, synthetic construct
  source 1..23: mol_type = other RNA
  modified_base 1: mod_base = OTHER; note = 5'-(E)-vinylphosphonate 2'-O-methylated uridine with phosphorothioate linkage
  modified_base 2: mod_base = OTHER; note = 2'-fluorouridine with phosphorothioate linkage
  modified_base 3: mod_base = OTHER; note = 2'-O-methylguanosine
  modified_base 4: mod_base = OTHER; note = 2'-O-methyluridine
  modified_base 5: mod_base = OTHER; note = 2'-O-methylguanosine
  modified_base 6: mod_base = OTHER; note = 2'-fluorocytidine
  modified_base 7: mod_base = OTHER; note = 2'-O-methyluridine
  modified_base 8: mod_base = OTHER; note = 2'-O-methylcytidine
  modified_base 9: mod_base = OTHER; note = 2'-O-methylguanosine
  modified_base 10: mod_base = OTHER; note = 2'-O-methyladenosine
  modified_base 11: mod_base = OTHER; note = 2'-O-methyluridine
  modified_base 12: mod_base = OTHER; note = 2'-O-methyladenosine
  modified_base 13: mod_base = OTHER; note = 2'-O-methyladenosine
  modified_base 14: mod_base = OTHER; note = 2'-fluoroadenosine
  modified_base 15: mod_base = OTHER; note = 2'-O-methyladenosine
  modified_base 16: mod_base = OTHER; note = 2'-fluoroadenosine
  modified_base 17: mod_base = OTHER; note = 2'-O-methyluridine
  modified_base 18: mod_base = OTHER; note = 2'-O-methyladenosine
  modified_base 19: mod_base = OTHER; note = 2'-O-methyladenosine
  modified_base 20: mod_base = OTHER; note = 2'-O-methylguanosine
  modified_base 21: mod_base = OTHER; note = 2'-O-methyladenosine with phosphorothioate linkage
  modified_base 22: mod_base = OTHER; note = 2'-O-methyladenosine with phosphorothioate linkage
  modified_base 23: mod_base = OTHER; note = 2'-O-methyluridine
ttgtgctcgataaaaataagaat

SEQ ID NO: 1408 - RNA, 23 nt, synthetic construct
  source 1..23: mol_type = other RNA
  modified_base 1: mod_base = OTHER; note = 5'-(E)-vinylphosphonate 2'-O-methylated uridine with phosphorothioate linkage
  modified_base 2: mod_base = OTHER; note = 2'-fluorouridine with phosphorothioate linkage
  modified_base 3: mod_base = OTHER; note = 2'-O-methyluridine
  modified_base 4: mod_base = OTHER; note = 2'-O-methylguanosine
  modified_base 5: mod_base = OTHER; note = 2'-O-methyluridine
  modified_base 6: mod_base = OTHER; note = 2'-fluoroguanosine
  modified_base 7: mod_base = OTHER; note = 2'-O-methylcytidine
  modified_base 8: mod_base = OTHER; note = 2'-O-methyluridine
  modified_base 9: mod_base = OTHER; note = 2'-O-methylcytidine
  modified_base 10: mod_base = OTHER; note = 2'-O-methylguanosine
  modified_base 11: mod_base = OTHER; note = 2'-O-methyladenosine
  modified_base 12: mod_base = OTHER; note = 2'-O-methyluridine
  modified_base 13: mod_base = OTHER; note = 2'-O-methyladenosine
  modified_base 14: mod_base = OTHER; note = 2'-fluoroadenosine
  modified_base 15: mod_base = OTHER; note = 2'-O-methyladenosine
  modified_base 16: mod_base = OTHER; note = 2'-fluoroadenosine
  modified_base 17: mod_base = OTHER; note = 2'-O-methyladenosine
  modified_base 18: mod_base = OTHER; note = 2'-O-methyluridine
  modified_base 19: mod_base = OTHER; note = 2'-O-methyladenosine
  modified_base 20: mod_base = OTHER; note = 2'-O-methyladenosine
  modified_base 21: mod_base = OTHER; note = 2'-O-methylguanosine with phosphorothioate linkage
  modified_base 22: mod_base = OTHER; note = 2'-O-methyladenosine with phosphorothioate linkage
  modified_base 23: mod_base = OTHER; note = 2'-O-methyladenosine
tttgtgctcgataaaaataagaa

SEQ ID NO: 1409 - RNA, 23 nt, synthetic construct
  source 1..23: mol_type = other RNA
  modified_base 1: mod_base = OTHER; note = 5'-(E)-vinylphosphonate 2'-O-methylated uridine with phosphorothioate linkage
  modified_base 2: mod_base = OTHER; note = 2'-fluorouridine with phosphorothioate linkage
  modified_base 3: mod_base = OTHER; note = 2'-O-methyluridine
  modified_base 4: mod_base = OTHER; note = 2'-O-methyluridine
  modified_base 5: mod_base = OTHER; note = 2'-O-methylguanosine
  modified_base 6: mod_base = OTHER; note = 2'-fluorouridine
  modified_base 7: mod_base = OTHER; note = 2'-O-methylguanosine
  modified_base 8: mod_base = OTHER; note = 2'-O-methylcytidine
  modified_base 9: mod_base = OTHER; note = 2'-O-methyluridine
  modified_base 10: mod_base = OTHER; note = 2'-O-methylcytidine
  modified_base 11: mod_base = OTHER; note = 2'-O-methylguanosine
  modified_base 12: mod_base = OTHER; note = 2'-O-methyladenosine
  modified_base 13: mod_base = OTHER; note = 2'-O-methyluridine
  modified_base 14: mod_base = OTHER; note = 2'-fluoroadenosine
  modified_base 15: mod_base = OTHER; note = 2'-O-methyladenosine
  modified_base 16: mod_base = OTHER; note = 2'-fluoroadenosine
  modified_base 17: mod_base = OTHER; note = 2'-O-methyladenosine
  modified_base 18: mod_base = OTHER; note = 2'-O-methyladenosine
  modified_base 19: mod_base = OTHER; note = 2'-O-methyluridine
  modified_base 20: mod_base = OTHER; note = 2'-O-methyladenosine
  modified_base 21: mod_base = OTHER; note = 2'-O-methyladenosine with phosphorothioate linkage
  modified_base 22: mod_base = OTHER; note = 2'-O-methylguanosine with phosphorothioate linkage
  modified_base 23: mod_base = OTHER; note = 2'-O-methyladenosine
ttttgtgctcgataaaaataaga

SEQ ID NO: 1410 - RNA, 23 nt, synthetic construct
  source 1..23: mol_type = other RNA
  modified_base 1: mod_base = OTHER; note = 5'-(E)-vinylphosphonate 2'-O-methylated uridine with phosphorothioate linkage
  modified_base 2: mod_base = OTHER; note = 2'-fluoroguanosine with phosphorothioate linkage
  modified_base 3: mod_base = OTHER; note = 2'-O-methyluridine
  modified_base 4: mod_base = OTHER; note = 2'-O-methyluridine
  modified_base 5: mod_base = OTHER; note = 2'-O-methyluridine
  modified_base 6: mod_base = OTHER; note = 2'-fluoroguanosine
  modified_base 7: mod_base = OTHER; note = 2'-O-methyluridine
  modified_base 8: mod_base = OTHER; note = 2'-O-methylguanosine
  modified_base 9: mod_base = OTHER; note = 2'-O-methylcytidine
  modified_base 10: mod_base = OTHER; note = 2'-O-methyluridine
  modified_base 11: mod_base = OTHER; note = 2'-O-methylcytidine
  modified_base 12: mod_base = OTHER; note = 2'-O-methylguanosine
  modified_base 13: mod_base = OTHER; note = 2'-O-methyladenosine
  modified_base 14: mod_base = OTHER; note = 2'-fluorouridine
  modified_base 15: mod_base = OTHER; note = 2'-O-methyladenosine
  modified_base 16: mod_base = OTHER; note = 2'-fluoroadenosine
  modified_base 17: mod_base = OTHER; note = 2'-O-methyladenosine
  modified_base 18: mod_base = OTHER; note = 2'-O-methyladenosine
  modified_base 19: mod_base = OTHER; note = 2'-O-methyladenosine
  modified_base 20: mod_base = OTHER; note = 2'-O-methyluridine
  modified_base 21: mod_base = OTHER; note = 2'-O-methyladenosine with phosphorothioate linkage
  modified_base 22: mod_base = OTHER; note = 2'-O-methyladenosine with phosphorothioate linkage
  modified_base 23: mod_base = OTHER; note = 2'-O-methylguanosine
tgtttgtgctcgataaaaataag

SEQ ID NO: 1411 - RNA, 23 nt, synthetic construct
  source 1..23: mol_type = other RNA
  modified_base 1: mod_base = OTHER; note = 5'-(E)-vinylphosphonate 2'-O-methylated uridine with phosphorothioate linkage
  modified_base 2: mod_base = OTHER; note = 2'-fluorocytidine with phosphorothioate linkage
  modified_base 3: mod_base = OTHER; note = 2'-O-methylguanosine
  modified_base 4: mod_base = OTHER; note = 2'-O-methyluridine
  modified_base 5: mod_base = OTHER; note = 2'-O-methyluridine
  modified_base 6: mod_base = OTHER; note = 2'-fluorouridine
  modified_base 7: mod_base = OTHER; note = 2'-O-methylguanosine
  modified_base 8: mod_base = OTHER; note = 2'-O-methyluridine
  modified_base 9: mod_base = OTHER; note = 2'-O-methylguanosine
  modified_base 10: mod_base = OTHER; note = 2'-O-methylcytidine
  modified_base 11: mod_base = OTHER; note = 2'-O-methyluridine
  modified_base 12: mod_base = OTHER; note = 2'-O-methylcytidine
  modified_base 13: mod_base = OTHER; note = 2'-O-methylguanosine
  modified_base 14: mod_base = OTHER; note = 2'-fluoroadenosine
  modified_base 15: mod_base = OTHER; note = 2'-O-methyluridine
  modified_base 16: mod_base = OTHER; note = 2'-fluoroadenosine
  modified_base 17: mod_base = OTHER; note = 2'-O-methyladenosine
  modified_base 18: mod_base = OTHER; note = 2'-O-methyladenosine
  modified_base 19: mod_base = OTHER; note = 2'-O-methyladenosine
  modified_base 20: mod_base = OTHER; note = 2'-O-methyladenosine
  modified_base 21: mod_base = OTHER; note = 2'-O-methyluridine with phosphorothioate linkage
  modified_base 22: mod_base = OTHER; note = 2'-O-methyladenosine with phosphorothioate linkage
  modified_base 23: mod_base = OTHER; note = 2'-O-methyladenosine
tcgtttgtgctcgataaaaataa

SEQ ID NO: 1412 - RNA, 23 nt, synthetic construct
  source 1..23: mol_type = other RNA
  modified_base 1: mod_base = OTHER; note = 5'-(E)-vinylphosphonate 2'-O-methylated uridine with phosphorothioate linkage
  modified_base 2: mod_base = OTHER; note = 2'-fluorocytidine with phosphorothioate linkage
  modified_base 3: mod_base = OTHER; note = 2'-O-methylcytidine
  modified_base 4: mod_base = OTHER; note = 2'-O-methylguanosine
  modified_base 5: mod_base = OTHER; note = 2'-O-methyluridine
  modified_base 6: mod_base = OTHER; note = 2'-fluorouridine
  modified_base 7: mod_base = OTHER; note = 2'-O-methyluridine
  modified_base 8: mod_base = OTHER; note = 2'-O-methylguanosine
  modified_base 9: mod_base = OTHER; note = 2'-O-methyluridine
  modified_base 10: mod_base = OTHER; note = 2'-O-methylguanosine
  modified_base 11: mod_base = OTHER; note = 2'-O-methylcytidine
  modified_base 12: mod_base = OTHER; note = 2'-O-methyluridine
  modified_base 13: mod_base = OTHER; note = 2'-O-methylcytidine
  modified_base 14: mod_base = OTHER; note = 2'-fluoroguanosine
  modified_base 15: mod_base = OTHER; note = 2'-O-methyladenosine
  modified_base 16: mod_base = OTHER; note = 2'-fluorouridine
  modified_base 17: mod_base = OTHER; note = 2'-O-methyladenosine
  modified_base 18: mod_base = OTHER; note = 2'-O-methyladenosine
  modified_base 19: mod_base = OTHER; note = 2'-O-methyladenosine
  modified_base 20: mod_base = OTHER; note = 2'-O-methyladenosine
  modified_base 21: mod_base = OTHER; note = 2'-O-methyladenosine with phosphorothioate linkage
  modified_base 22: mod_base = OTHER; note = 2'-O-methyluridine with phosphorothioate linkage
  modified_base 23: mod_base = OTHER; note = 2'-O-methyladenosine
tccgtttgtgctcgataaaaata

SEQ ID NO: 1413 - RNA, 23 nt, synthetic construct
  source 1..23: mol_type = other RNA
  modified_base 1: mod_base = OTHER; note = 5'-(E)-vinylphosphonate 2'-O-methylated uridine with phosphorothioate linkage
  modified_base 2: mod_base = OTHER; note = 2'-fluorouridine with phosphorothioate linkage
  modified_base 3: mod_base = OTHER; note = 2'-O-methylcytidine
  modified_base 4: mod_base = OTHER; note = 2'-O-methylcytidine
  modified_base 5: mod_base = OTHER; note = 2'-O-methylguanosine
  modified_base 6: mod_base = OTHER; note = 2'-fluorouridine
  modified_base 7: mod_base = OTHER; note = 2'-O-methyluridine
  modified_base 8: mod_base = OTHER; note = 2'-O-methyluridine
  modified_base 9: mod_base = OTHER; note = 2'-O-methylguanosine
  modified_base 10: mod_base = OTHER; note = 2'-O-methyluridine
  modified_base 11: mod_base = OTHER; note = 2'-O-methylguanosine
  modified_base 12: mod_base = OTHER; note = 2'-O-methylcytidine
  modified_base 13: mod_base = OTHER; note = 2'-O-methyluridine
  modified_base 14: mod_base = OTHER; note = 2'-fluorocytidine
  modified_base 15: mod_base = OTHER; note = 2'-O-methylguanosine
  modified_base 16: mod_base = OTHER; note = 2'-fluoroadenosine
  modified_base 17: mod_base = OTHER; note = 2'-O-methyluridine
  modified_base 18: mod_base = OTHER; note = 2'-O-methyladenosine
  modified_base 19: mod_base = OTHER; note = 2'-O-methyladenosine
  modified_base 20: mod_base = OTHER; note = 2'-O-methyladenosine
  modified_base 21: mod_base = OTHER; note = 2'-O-methyladenosine with phosphorothioate linkage
  modified_base 22: mod_base = OTHER; note = 2'-O-methyladenosine with phosphorothioate linkage
  modified_base 23: mod_base = OTHER; note = 2'-O-methyluridine
ttccgtttgtgctcgataaaaat

SEQ ID NO: 1414 - RNA, 23 nt, synthetic construct
  source 1..23: mol_type = other RNA
  modified_base 1: mod_base = OTHER; note = 5'-(E)-vinylphosphonate 2'-O-methylated uridine with phosphorothioate linkage
  modified_base 2: mod_base = OTHER; note = 2'-fluorouridine with phosphorothioate linkage
  modified_base 3: mod_base = OTHER; note = 2'-O-methyluridine
  modified_base 4: mod_base = OTHER; note = 2'-O-methylcytidine
  modified_base 5: mod_base = OTHER; note = 2'-O-methylcytidine
  modified_base 6: mod_base = OTHER; note = 2'-fluoroguanosine
  modified_base 7: mod_base = OTHER; note = 2'-O-methyluridine
  modified_base 8: mod_base = OTHER; note = 2'-O-methyluridine
  modified_base 9: mod_base = OTHER; note = 2'-O-methyluridine
  modified_base 10: mod_base = OTHER; note = 2'-O-methylguanosine
  modified_base 11: mod_base = OTHER; note = 2'-O-methyluridine
  modified_base 12: mod_base = OTHER; note = 2'-O-methylguanosine
  modified_base 13: mod_base = OTHER; note = 2'-O-methylcytidine
  modified_base 14: mod_base = OTHER; note = 2'-fluorouridine
  modified_base 15: mod_base = OTHER; note = 2'-O-methylcytidine
  modified_base 16: mod_base = OTHER; note = 2'-fluoroguanosine
  modified_base 17: mod_base = OTHER; note = 2'-O-methyladenosine
  modified_base 18: mod_base = OTHER; note = 2'-O-methyluridine
  modified_base 19: mod_base = OTHER; note = 2'-O-methyladenosine
  modified_base 20: mod_base = OTHER; note = 2'-O-methyladenosine
  modified_base 21: mod_base = OTHER; note = 2'-O-methyladenosine with phosphorothioate linkage
  modified_base 22: mod_base = OTHER; note = 2'-O-methyladenosine with phosphorothioate linkage
  modified_base 23: mod_base = OTHER; note = 2'-O-methyladenosine
tttccgtttgtgctcgataaaaa

SEQ ID NO: 1415 - RNA, 23 nt, synthetic construct
  source 1..23: mol_type = other RNA
  modified_base 1: mod_base = OTHER; note = 5'-(E)-vinylphosphonate 2'-O-methylated uridine with phosphorothioate linkage
  modified_base 2: mod_base = OTHER; note = 2'-fluorouridine with phosphorothioate linkage
  modified_base 3: mod_base = OTHER; note = 2'-O-methyluridine
  modified_base 4: mod_base = OTHER; note = 2'-O-methyluridine
  modified_base 5: mod_base = OTHER; note = 2'-O-methylcytidine
  modified_base 6: mod_base = OTHER; note = 2'-fluorocytidine
  modified_base 7: mod_base = OTHER; note = 2'-O-methylguanosine
  modified_base 8: mod_base = OTHER; note = 2'-O-methyluridine
  modified_base 9: mod_base = OTHER; note = 2'-O-methyluridine
  modified_base 10: mod_base = OTHER; note = 2'-O-methyluridine
  modified_base 11: mod_base = OTHER; note = 2'-O-methylguanosine
  modified_base 12: mod_base = OTHER; note = 2'-O-methyluridine
  modified_base 13: mod_base = OTHER; note = 2'-O-methylguanosine
  modified_base 14: mod_base = OTHER; note = 2'-fluorocytidine
  modified_base 15: mod_base = OTHER; note = 2'-O-methyluridine
  modified_base 16: mod_base = OTHER; note = 2'-fluorocytidine
  modified_base 17: mod_base = OTHER; note = 2'-O-methylguanosine
  modified_base 18: mod_base = OTHER; note = 2'-O-methyladenosine
  modified_base 19: mod_base = OTHER; note = 2'-O-methyluridine
  modified_base 20: mod_base = OTHER; note = 2'-O-methyladenosine
  modified_base 21: mod_base = OTHER; note = 2'-O-methyladenosine with phosphorothioate linkage
  modified_base 22: mod_base = OTHER; note = 2'-O-methyladenosine with phosphorothioate linkage
  modified_base 23: mod_base = OTHER; note = 2'-O-methyladenosine
ttttccgtttgtgctcgataaaa

SEQ ID NO: 1416 - RNA, 23 nt, synthetic construct
  source 1..23: mol_type = other RNA
  modified_base 1: mod_base = OTHER; note = 5'-(E)-vinylphosphonate 2'-O-methylated uridine with phosphorothioate linkage
  modified_base 2: mod_base = OTHER; note = 2'-fluorouridine with phosphorothioate linkage
  modified_base 3: mod_base = OTHER; note = 2'-O-methylcytidine
  modified_base 4: mod_base = OTHER; note = 2'-O-methylguanosine
  modified_base 5: mod_base = OTHER; note = 2'-O-methyladenosine
  modified_base 6: mod_base = OTHER; note = 2'-fluorouridine
  modified_base 7: mod_base = OTHER; note = 2'-O-methyluridine
  modified_base 8: mod_base = OTHER; note = 2'-O-methylguanosine
  modified_base 9: mod_base = OTHER; note = 2'-O-methylguanosine
  modified_base 10: mod_base = OTHER; note = 2'-O-methyluridine
  modified_base 11: mod_base = OTHER; note = 2'-O-methylguanosine
  modified_base 12: mod_base = OTHER; note = 2'-O-methyladenosine
  modified_base 13: mod_base = OTHER; note = 2'-O-methyladenosine
  modified_base 14: mod_base = OTHER; note = 2'-fluoroguanosine
  modified_base 15: mod_base = OTHER; note = 2'-O-methylguanosine
  modified_base 16: mod_base = OTHER; note = 2'-fluoroguanosine
  modified_base 17: mod_base = OTHER; note = 2'-O-methylguanosine
  modified_base 18: mod_base = OTHER; note = 2'-O-methyladenosine
  modified_base 19: mod_base = OTHER; note = 2'-O-methyladenosine
  modified_base 20: mod_base = OTHER; note = 2'-O-methylguanosine
  modified_base 21: mod_base = OTHER; note = 2'-O-methylguanosine with phosphorothioate linkage
  modified_base 22: mod_base = OTHER; note = 2'-O-methyluridine with phosphorothioate linkage
  modified_base 23: mod_base = OTHER; note = 2'-O-methylguanosine
ttcgattggtgaaggggaaggtg

SEQ ID NO: 1417 - RNA, 23 nt, synthetic construct
  source 1..23: mol_type = other RNA
  modified_base 1: mod_base = OTHER; note = 5'-(E)-vinylphosphonate 2'-O-methylated uridine with phosphorothioate linkage
  modified_base 2: mod_base = OTHER; note = 2'-fluorouridine with phosphorothioate linkage
  modified_base 3: mod_base = OTHER; note = 2'-O-methyluridine
  modified_base 4: mod_base = OTHER; note = 2'-O-methyluridine
  modified_base 5: mod_base = OTHER; note = 2'-O-methylcytidine
  modified_base 6: mod_base = OTHER; note = 2'-fluoroadenosine
  modified_base 7: mod_base = OTHER; note = 2'-O-methyluridine
  modified_base 8: mod_base = OTHER; note = 2'-O-methylcytidine
  modified_base 9: mod_base = OTHER; note = 2'-O-methyluridine
  modified_base 10: mod_base = OTHER; note = 2'-O-methylcytidine
  modified_base 11: mod_base = OTHER; note = 2'-O-methylguanosine
  modified_base 12: mod_base = OTHER; note = 2'-O-methyladenosine
  modified_base 13: mod_base = OTHER; note = 2'-O-methyluridine
  modified_base 14: mod_base = OTHER; note = 2'-fluorouridine
  modified_base 15: mod_base = OTHER; note = 2'-O-methylguanosine
  modified_base 16: mod_base = OTHER; note = 2'-fluoroguanosine
  modified_base 17: mod_base = OTHER; note = 2'-O-methyluridine
  modified_base 18: mod_base = OTHER; note = 2'-O-methylguanosine
  modified_base 19: mod_base = OTHER; note = 2'-O-methyladenosine
  modified_base 20: mod_base = OTHER; note = 2'-O-methyladenosine
  modified_base 21: mod_base = OTHER; note = 2'-O-methylguanosine with phosphorothioate linkage
  modified_base 22: mod_base = OTHER; note = 2'-O-methylguanosine with phosphorothioate linkage
  modified_base 23: mod_base = OTHER; note = 2'-O-methylguanosine
ttttcatctcgattggtgaaggg

SEQ ID NO: 1418 - RNA, 23 nt, synthetic construct
  source 1..23: mol_type = other RNA
  modified_base 1: mod_base = OTHER; note = 5'-(E)-vinylphosphonate 2'-O-methylated uridine with phosphorothioate linkage
  modified_base 2: mod_base = OTHER; note = 2'-fluorouridine with phosphorothioate linkage
  modified_base 3: mod_base = OTHER; note = 2'-O-methylcytidine
  modified_base 4: mod_base = OTHER; note = 2'-O-methylcytidine
  modified_base 5: mod_base = OTHER; note = 2'-O-methyladenosine
  modified_base 6: mod_base = OTHER; note = 2'-fluorocytidine
  modified_base 7: mod_base = OTHER; note = 2'-O-methylguanosine
  modified_base 8: mod_base = OTHER; note = 2'-O-methylguanosine
  modified_base 9: mod_base = OTHER; note = 2'-O-methylguanosine
  modified_base 10: mod_base = OTHER; note = 2'-O-methyladenosine
  modified_base 11: mod_base = OTHER; note = 2'-O-methyluridine
  modified_base 12: mod_base = OTHER; note = 2'-O-methyluridine
  modified_base 13: mod_base = OTHER; note = 2'-O-methylguanosine
  modified_base 14: mod_base = OTHER; note = 2'-fluoroguanosine
  modified_base 15: mod_base = OTHER; note = 2'-O-methyladenosine
  modified_base 16: mod_base = OTHER; note = 2'-fluorouridine
  modified_base 17: mod_base = OTHER; note = 2'-O-methylguanosine
  modified_base 18: mod_base = OTHER; note = 2'-O-methylcytidine
  modified_base 19: mod_base = OTHER; note = 2'-O-methyluridine
  modified_base 20: mod_base = OTHER; note = 2'-O-methyluridine
  modified_base 21: mod_base = OTHER; note = 2'-O-methyluridine with phosphorothioate linkage
  modified_base 22: mod_base = OTHER; note = 2'-O-methyluridine with phosphorothioate linkage
  modified_base 23: mod_base = OTHER; note = 2'-O-methyluridine
ttccacgggattggatgcttttt

SEQ ID NO: 1419 - RNA, 23 nt, synthetic construct
  source 1..23: mol_type = other RNA
  modified_base 1: mod_base = OTHER; note = 5'-(E)-vinylphosphonate 2'-O-methylated uridine with phosphorothioate linkage
  modified_base 2: mod_base = OTHER; note = 2'-fluoroadenosine with phosphorothioate linkage
  modified_base 3: mod_base = OTHER; note = 2'-O-methylcytidine
  modified_base 4: mod_base = OTHER; note = 2'-O-methylcytidine
  modified_base 5: mod_base = OTHER; note = 2'-O-methyluridine
  modified_base 6: mod_base = OTHER; note = 2'-fluorocytidine
  modified_base 7: mod_base = OTHER; note = 2'-O-methylcytidine
  modified_base 8: mod_base = OTHER; note = 2'-O-methyladenosine
  modified_base 9: mod_base = OTHER; note = 2'-O-methylcytidine
  modified_base 10: mod_base = OTHER; note = 2'-O-methylguanosine
  modified_base 11: mod_base = OTHER; note = 2'-O-methylguanosine
  modified_base 12: mod_base = OTHER; note = 2'-O-methylguanosine
  modified_base 13: mod_base = OTHER; note = 2'-O-methyladenosine
  modified_base 14: mod_base = OTHER; note = 2'-fluorouridine
  modified_base 15: mod_base = OTHER; note = 2'-O-methyluridine
  modified_base 16: mod_base = OTHER; note = 2'-fluoroguanosine
  modified_base 17: mod_base = OTHER; note = 2'-O-methylguanosine
  modified_base 18: mod_base = OTHER; note = 2'-O-methyladenosine
  modified_base 19: mod_base = OTHER; note = 2'-O-methyluridine
  modified_base 20: mod_base = OTHER; note = 2'-O-methylguanosine
  modified_base 21: mod_base = OTHER; note = 2'-O-methylcytidine with phosphorothioate linkage
  modified_base 22: mod_base = OTHER; note = 2'-O-methyluridine with phosphorothioate linkage
  modified_base 23: mod_base = OTHER; note = 2'-O-methyluridine
tacctccacgggattggatgctt

SEQ ID NO: 1420 - RNA, 23 nt, synthetic construct
  source 1..23: mol_type = other RNA
  modified_base 1: mod_base = OTHER; note = 5'-(E)-vinylphosphonate 2'-O-methylated uridine with phosphorothioate linkage
  modified_base 2: mod_base = OTHER; note = 2'-fluoroadenosine with phosphorothioate linkage
  modified_base 3: mod_base = OTHER; note = 2'-O-methyluridine
  modified_base 4: mod_base = OTHER; note = 2'-O-methylcytidine
  modified_base 5: mod_base = OTHER; note = 2'-O-methylguanosine
  modified_base 6: mod_base = OTHER; note = 2'-fluorouridine
  modified_base 7: mod_base = OTHER; note = 2'-O-methylcytidine
  modified_base 8: mod_base = OTHER; note = 2'-O-methyladenosine
  modified_base 9: mod_base = OTHER; note = 2'-O-methyluridine
  modified_base 10: mod_base = OTHER; note = 2'-O-methylcytidine
  modified_base 11: mod_base = OTHER; note = 2'-O-methylcytidine
  modified_base 12: mod_base = OTHER; note = 2'-O-methyluridine
  modified_base 13: mod_base = OTHER; note = 2'-O-methylcytidine
  modified_base 14: mod_base = OTHER; note = 2'-fluorouridine
  modified_base 15: mod_base = OTHER; note = 2'-O-methylguanosine
  modified_base 16: mod_base = OTHER; note = 2'-fluoroguanosine
  modified_base 17: mod_base = OTHER; note = 2'-O-methylcytidine
  modified_base 18: mod_base = OTHER; note = 2'-O-methylguanosine
  modified_base 19: mod_base = OTHER; note = 2'-O-methyluridine
  modified_base 20: mod_base = OTHER; note = 2'-O-methylguanosine
  modified_base 21: mod_base = OTHER; note = 2'-O-methyladenosine with phosphorothioate linkage
  modified_base 22: mod_base = OTHER; note = 2'-O-methylcytidine with phosphorothioate linkage
  modified_base 23: mod_base = OTHER; note = 2'-O-methylcytidine
tatcgtcatcctctggcgtgacc

SEQ ID NO: 1421 - RNA, 23 nt, synthetic construct
  source 1..23: mol_type = other RNA
  modified_base 1: mod_base = OTHER; note = 5'-(E)-vinylphosphonate 2'-O-methylated uridine with phosphorothioate linkage
  modified_base 2: mod_base = OTHER; note = 2'-fluorocytidine with phosphorothioate linkage
  modified_base 3: mod_base = OTHER; note = 2'-O-methylguanosine
  modified_base 4: mod_base = OTHER; note = 2'-O-methyluridine
  modified_base 5: mod_base = OTHER; note = 2'-O-methyluridine
  modified_base 6: mod_base = OTHER; note = 2'-fluoroguanosine
  modified_base 7: mod_base = OTHER; note = 2'-O-methyladenosine
  modified_base 8: mod_base = OTHER; note = 2'-O-methyluridine
  modified_base 9: mod_base = OTHER; note = 2'-O-methyladenosine
  modified_base 10: mod_base = OTHER; note = 2'-O-methyladenosine
  modified_base 11: mod_base = OTHER; note = 2'-O-methyladenosine
  modified_base 12: mod_base = OTHER; note = 2'-O-methylcytidine
  modified_base 13: mod_base = OTHER; note = 2'-O-methyladenosine
  modified_base 14: mod_base = OTHER; note = 2'-fluoroadenosine
  modified_base 15: mod_base = OTHER; note = 2'-O-methyluridine
  modified_base 16: mod_base = OTHER; note = 2'-fluorocytidine
  modified_base 17: mod_base = OTHER; note = 2'-O-methylguanosine
  modified_base 18: mod_base = OTHER; note = 2'-O-methyluridine
  modified_base 19: mod_base = OTHER; note = 2'-O-methylcytidine
  modified_base 20: mod_base = OTHER; note = 2'-O-methyladenosine
  modified_base 21: mod_base = OTHER; note = 2'-O-methyluridine with phosphorothioate linkage
  modified_base 22: mod_base = OTHER; note = 2'-O-methylcytidine with phosphorothioate linkage
  modified_base 23: mod_base = OTHER; note = 2'-O-methylcytidine
tcgttgataaacaatcgtcatcc

SEQ ID NO: 1422 - RNA, 23 nt, synthetic construct
  source 1..23: mol_type = other RNA
  modified_base 1: mod_base = OTHER; note = 5'-(E)-vinylphosphonate 2'-O-methylated uridine with phosphorothioate linkage
  modified_base 2: mod_base = OTHER; note = 2'-fluoroadenosine with phosphorothioate linkage
  modified_base 3: mod_base = OTHER; note = 2'-O-methylcytidine
  modified_base 4: mod_base = OTHER; note = 2'-O-methylguanosine
  modified_base 5: mod_base = OTHER; note = 2'-O-methyluridine
  modified_base 6: mod_base = OTHER; note = 2'-fluorouridine
  modified_base 7: mod_base = OTHER; note = 2'-O-methylguanosine
  modified_base 8: mod_base = OTHER; note = 2'-O-methyladenosine
  modified_base 9: mod_base = OTHER; note = 2'-O-methyluridine
  modified_base 10: mod_base = OTHER; note = 2'-O-methyladenosine
  modified_base 11: mod_base = OTHER; note = 2'-O-methyladenosine
  modified_base 12: mod_base = OTHER; note = 2'-O-methyladenosine
  modified_base 13: mod_base = OTHER; note = 2'-O-methylcytidine
  modified_base 14: mod_base = OTHER; note = 2'-fluoroadenosine
  modified_base 15: mod_base = OTHER; note = 2'-O-methyladenosine
  modified_base 16: mod_base = OTHER; note = 2'-fluorouridine
  modified_base 17: mod_base = OTHER; note = 2'-O-methylcytidine
  modified_base 18: mod_base = OTHER; note = 2'-O-methylguanosine
  modified_base 19: mod_base = OTHER; note = 2'-O-methyluridine
  modified_base 20: mod_base = OTHER; note = 2'-O-methylcytidine
  modified_base 21: mod_base = OTHER; note = 2'-O-methyladenosine with phosphorothioate linkage
  modified_base 22: mod_base = OTHER; note = 2'-O-methyluridine with phosphorothioate linkage
  modified_base 23: mod_base = OTHER; note = 2'-O-methylcytidine
tacgttgataaacaatcgtcatc

SEQ ID NO: 1423 - RNA, 23 nt, synthetic construct
  source 1..23: mol_type = other RNA
  modified_base 1: mod_base = OTHER; note = 5'-(E)-vinylphosphonate 2'-O-methylated uridine with phosphorothioate linkage
  modified_base 2: mod_base = OTHER; note = 2'-fluorouridine with phosphorothioate linkage
  modified_base 3: mod_base = OTHER; note = 2'-O-methyladenosine
  modified_base 4: mod_base = OTHER; note = 2'-O-methylguanosine
  modified_base 5: mod_base = OTHER; note = 2'-O-methyladenosine
  modified_base 6: mod_base = OTHER; note = 2'-fluorouridine
  modified_base 7: mod_base = OTHER; note = 2'-O-methylguanosine
  modified_base 8: mod_base = OTHER; note = 2'-O-methyladenosine
  modified_base 9: mod_base = OTHER; note = 2'-O-methylcytidine
  modified_base 10: mod_base = OTHER; note = 2'-O-methylguanosine
  modified_base 11: mod_base = OTHER; note = 2'-O-methyluridine
  modified_base 12: mod_base = OTHER; note = 2'-O-methyluridine
  modified_base 13: mod_base = OTHER; note = 2'-O-methylguanosine
  modified_base 14: mod_base = OTHER; note = 2'-fluoroadenosine
  modified_base 15: mod_base = OTHER; note = 2'-O-methyluridine
  modified_base 16: mod_base = OTHER; note = 2'-fluoroadenosine
  modified_base 17: mod_base = OTHER; note = 2'-O-methyladenosine
  modified_base 18: mod_base = OTHER; note = 2'-O-methyladenosine
  modified_base 19: mod_base = OTHER; note = 2'-O-methylcytidine
  modified_base 20: mod_base = OTHER; note = 2'-O-methyladenosine
  modified_base 21: mod_base = OTHER; note = 2'-O-methyladenosine with phosphorothioate linkage
  modified_base 22: mod_base = OTHER; note = 2'-O-methyluridine with phosphorothioate linkage
  modified_base 23: mod_base = OTHER; note = 2'-O-methylcytidine
ttagatgacgttgataaacaatc

SEQ ID NO: 1424 - RNA, 23 nt, synthetic construct
  source 1..23: mol_type = other RNA
  modified_base 1: mod_base = OTHER; note = 5'-(E)-vinylphosphonate 2'-O-methylated uridine with phosphorothioate linkage
  modified_base 2: mod_base = OTHER; note = 2'-fluorocytidine with phosphorothioate linkage
  modified_base 3: mod_base = OTHER; note = 2'-O-methyladenosine
  modified_base 4: mod_base = OTHER; note = 2'-O-methyladenosine
  modified_base 5: mod_base = OTHER; note = 2'-O-methyladenosine
  modified_base 6: mod_base = OTHER; note = 2'-fluorouridine
  modified_base 7: mod_base = OTHER; note = 2'-O-methyladenosine
  modified_base 8: mod_base = OTHER; note = 2'-O-methylcytidine
  modified_base 9: mod_base = OTHER; note = 2'-O-methylcytidine
  modified_base 10: mod_base = OTHER; note = 2'-O-methylcytidine
  modified_base 11: mod_base = OTHER; note = 2'-O-methyluridine
  modified_base 12: mod_base = OTHER; note = 2'-O-methylguanosine
  modified_base 13: mod_base = OTHER; note = 2'-O-methylcytidine
  modified_base 14: mod_base = OTHER; note = 2'-fluoroguanosine
  modified_base 15: mod_base = OTHER; note = 2'-O-methylguanosine
  modified_base 16: mod_base = OTHER; note = 2'-fluoroguanosine
  modified_base 17: mod_base = OTHER; note = 2'-O-methylguanosine
  modified_base 18: mod_base = OTHER; note = 2'-O-methylcytidine
  modified_base 19: mod_base = OTHER; note = 2'-O-methyladenosine
  modified_base 20: mod_base = OTHER; note = 2'-O-methyluridine
  modified_base 21: mod_base = OTHER; note = 2'-O-methyladenosine with phosphorothioate linkage
  modified_base 22: mod_base = OTHER; note = 2'-O-methyluridine with phosphorothioate linkage
  modified_base 23: mod_base = OTHER; note = 2'-O-methyluridine
tcaaataccctgcggggcatatt

SEQ ID NO: 1425 - RNA, 23 nt, synthetic construct
  source 1..23: mol_type = other RNA
  modified_base 1: mod_base = OTHER; note = 5'-(E)-vinylphosphonate 2'-O-methylated uridine with phosphorothioate linkage
  modified_base 2: mod_base = OTHER; note = 2'-fluoroadenosine with phosphorothioate linkage
  modified_base 3: mod_base = OTHER; note = 2'-O-methyluridine
  modified_base 4: mod_base = OTHER; note = 2'-O-methylcytidine
  modified_base 5: mod_base = OTHER; note = 2'-O-methyluridine
  modified_base 6: mod_base = OTHER; note = 2'-fluorouridine
  modified_base 7: mod_base = OTHER; note = 2'-O-methyluridine
  modified_base 8: mod_base = OTHER; note = 2'-O-methyladenosine
  modified_base 9: mod_base = OTHER; note = 2'-O-methylcytidine
  modified_base 10: mod_base = OTHER; note = 2'-O-methyladenosine
  modified_base 11: mod_base = OTHER; note = 2'-O-methyladenosine
  modified_base 12: mod_base = OTHER; note = 2'-O-methyladenosine
  modified_base 13: mod_base = OTHER; note = 2'-O-methyluridine
  modified_base 14: mod_base = OTHER; note = 2'-fluoroadenosine
  modified_base 15: mod_base = OTHER; note = 2'-O-methylcytidine
  modified_base 16: mod_base = OTHER; note = 2'-fluorocytidine
  modified_base 17: mod_base = OTHER; note = 2'-O-methylcytidine
  modified_base 18: mod_base = OTHER; note = 2'-O-methyluridine
  modified_base 19: mod_base = OTHER; note = 2'-O-methylguanosine
  modified_base 20: mod_base = OTHER; note = 2'-O-methylcytidine
  modified_base 21: mod_base = OTHER; note = 2'-O-methylguanosine with phosphorothioate linkage
  modified_base 22: mod_base = OTHER; note = 2'-O-methylguanosine with phosphorothioate linkage
  modified_base 23: mod_base = OTHER; note = 2'-O-methylguanosine
tatctttacaaataccctgcggg

SEQ ID NO: 1426 - RNA, 23 nt, synthetic construct
  source 1..23: mol_type = other RNA
  modified_base 1: mod_base = OTHER; note = 5'-(E)-vinylphosphonate 2'-O-methylated uridine with phosphorothioate linkage
  modified_base 2: mod_base = OTHER; note = 2'-fluorocytidine with phosphorothioate linkage
  modified_base 3: mod_base = OTHER; note = 2'-O-methyladenosine
  modified_base 4: mod_base = OTHER; note = 2'-O-methyluridine
  modified_base 5: mod_base = OTHER; note = 2'-O-methylcytidine
  modified_base 6: mod_base = OTHER; note = 2'-fluorouridine
  modified_base 7: mod_base = OTHER; note = 2'-O-methyluridine
  modified_base 8: mod_base = OTHER; note = 2'-O-methyluridine
  modified_base 9: mod_base = OTHER; note = 2'-O-methyladenosine
  modified_base 10: mod_base = OTHER; note = 2'-O-methylcytidine
  modified_base 11: mod_base = OTHER; note = 2'-O-methyladenosine
  modified_base 12: mod_base = OTHER; note = 2'-O-methyladenosine
  modified_base 13: mod_base = OTHER; note = 2'-O-methyladenosine
  modified_base 14: mod_base = OTHER; note = 2'-fluorouridine
  modified_base 15: mod_base = OTHER; note = 2'-O-methyladenosine
  modified_base 16: mod_base = OTHER; note = 2'-fluorocytidine
  modified_base 17: mod_base = OTHER; note = 2'-O-methylcytidine
  modified_base 18: mod_base = OTHER; note = 2'-O-methylcytidine
  modified_base 19: mod_base = OTHER; note = 2'-O-methyluridine
  modified_base 20: mod_base = OTHER; note = 2'-O-methylguanosine
  modified_base 21: mod_base = OTHER; note = 2'-O-methylcytidine with phosphorothioate linkage
  modified_base 22: mod_base = OTHER; note = 2'-O-methylguanosine with phosphorothioate linkage
  modified_base 23: mod_base = OTHER; note = 2'-O-methylguanosine
tcatctttacaaataccctgcgg

SEQ ID NO: 1427 - RNA, 23 nt, synthetic construct
  source 1..23: mol_type = other RNA
  modified_base 1: mod_base = OTHER; note = 5'-(E)-vinylphosphonate 2'-O-methylated uridine with phosphorothioate linkage
  modified_base 2: mod_base = OTHER; note = 2'-fluorouridine with phosphorothioate linkage
  modified_base 3: mod_base = OTHER; note = 2'-O-methylcytidine
  modified_base 4: mod_base = OTHER; note = 2'-O-methyladenosine
  modified_base 5: mod_base = OTHER; note = 2'-O-methyluridine
  modified_base 6: mod_base = OTHER; note = 2'-fluorocytidine
  modified_base 7: mod_base = OTHER; note = 2'-O-methyluridine
  modified_base 8: mod_base = OTHER; note = 2'-O-methyluridine
  modified_base 9: mod_base = OTHER; note = 2'-O-methyluridine
  modified_base 10: mod_base = OTHER; note = 2'-O-methyladenosine
  modified_base 11: mod_base = OTHER; note = 2'-O-methylcytidine
  modified_base 12: mod_base = OTHER; note = 2'-O-methyladenosine
  modified_base 13: mod_base = OTHER; note = 2'-O-methyladenosine
  modified_base 14: mod_base = OTHER; note = 2'-fluoroadenosine
  modified_base 15: mod_base = OTHER; note = 2'-O-methyluridine
  modified_base 16: mod_base = OTHER; note = 2'-fluoroadenosine
  modified_base 17: mod_base = OTHER; note = 2'-O-methylcytidine
  modified_base 18: mod_base = OTHER; note = 2'-O-methylcytidine
  modified_base 19: mod_base = OTHER; note = 2'-O-methylcytidine
  modified_base 20: mod_base = OTHER; note = 2'-O-methyluridine
  modified_base 21: mod_base = OTHER; note = 2'-O-methylguanosine with phosphorothioate linkage
  modified_base 22: mod_base = OTHER; note = 2'-O-methylcytidine with phosphorothioate linkage
  modified_base 23: mod_base = OTHER; note = 2'-O-methylguanosine
ttcatctttacaaataccctgcg

SEQ ID NO: 1428 - RNA, 23 nt, synthetic construct
  source 1..23: mol_type = other RNA
  modified_base 1: mod_base = OTHER; note = 5'-(E)-vinylphosphonate 2'-O-methylated uridine with phosphorothioate linkage
  modified_base 2: mod_base = OTHER; note = 2'-fluorocytidine with phosphorothioate linkage
  modified_base 3: mod_base = OTHER; note = 2'-O-methyluridine
  modified_base 4: mod_base = OTHER; note = 2'-O-methylcytidine
  modified_base 5: mod_base = OTHER; note = 2'-O-methyladenosine
  modified_base 6: mod_base = OTHER; note = 2'-fluorouridine
  modified_base 7: mod_base = OTHER; note = 2'-O-methylcytidine
  modified_base 8: mod_base = OTHER; note = 2'-O-methyluridine
  modified_base 9: mod_base = OTHER; note = 2'-O-methyluridine
  modified_base 10: mod_base = OTHER; note = 2'-O-methyluridine
  modified_base 11: mod_base = OTHER; note = 2'-O-methyladenosine
  modified_base 12: mod_base = OTHER; note = 2'-O-methylcytidine
  modified_base 13: mod_base = OTHER; note = 2'-O-methyladenosine
  modified_base 14: mod_base = OTHER; note = 2'-fluoroadenosine
  modified_base 15: mod_base = OTHER; note = 2'-O-methyladenosine
  modified_base 16: mod_base = OTHER; note = 2'-fluorouridine
  modified_base 17: mod_base = OTHER; note = 2'-O-methyladenosine
  modified_base 18: mod_base = OTHER; note = 2'-O-methylcytidine
  modified_base 19: mod_base = OTHER; note = 2'-O-methylcytidine
  modified_base 20: mod_base = OTHER; note = 2'-O-methylcytidine
  modified_base 21: mod_base = OTHER; note = 2'-O-methyluridine with phosphorothioate linkage
  modified_base 22: mod_base = OTHER; note = 2'-O-methylguanosine with phosphorothioate linkage
  modified_base 23: mod_base = OTHER; note = 2'-O-methylcytidine
tctcatctttacaaataccctgc

SEQ ID NO: 1429 - RNA, 23 nt, synthetic construct
  source 1..23: mol_type = other RNA
  modified_base 1: mod_base = OTHER; note = 5'-(E)-vinylphosphonate 2'-O-methylated uridine with phosphorothioate linkage
  modified_base 2: mod_base = OTHER; note = 2'-fluoroguanosine with phosphorothioate linkage
  modified_base 3: mod_base = OTHER; note = 2'-O-methylguanosine
  modified_base 4: mod_base = OTHER; note = 2'-O-methylcytidine
  modified_base 5: mod_base = OTHER; note = 2'-O-methyluridine
  modified_base 6: mod_base = OTHER; note = 2'-fluorocytidine
  modified_base 7: mod_base = OTHER; note = 2'-O-methyladenosine
  modified_base 8: mod_base = OTHER; note = 2'-O-methyluridine
  modified_base 9: mod_base = OTHER; note = 2'-O-methylcytidine
  modified_base 10: mod_base = OTHER; note = 2'-O-methyluridine
  modified_base 11: mod_base = OTHER; note = 2'-O-methyluridine
  modified_base 12: mod_base = OTHER; note = 2'-O-methyluridine
  modified_base 13: mod_base = OTHER; note = 2'-O-methyladenosine
  modified_base 14: mod_base = OTHER; note = 2'-fluorocytidine
  modified_base 15: mod_base = OTHER; note = 2'-O-methyladenosine
  modified_base 16: mod_base = OTHER; note = 2'-fluoroadenosine
  modified_base 17: mod_base = OTHER; note = 2'-O-methyladenosine
  modified_base 18: mod_base = OTHER; note = 2'-O-methyluridine
  modified_base 19: mod_base = OTHER; note = 2'-O-methyladenosine
  modified_base 20: mod_base = OTHER; note = 2'-O-methylcytidine
  modified_base 21: mod_base = OTHER; note = 2'-O-methylcytidine with phosphorothioate linkage
  modified_base 22: mod_base = OTHER; note = 2'-O-methyluridine with phosphorothioate linkage
  modified_base 23: mod_base = OTHER; note = 2'-O-methylguanosine
tggctcatctttacaaatacctg

SEQ ID NO: 1430 - RNA, 23 nt, synthetic construct
  source 1..23: mol_type = other RNA
  modified_base 1: mod_base = OTHER; note = 5'-(E)-vinylphosphonate 2'-O-methylated uridine with phosphorothioate linkage
  modified_base 2: mod_base = OTHER; note = 2'-fluoroguanosine with phosphorothioate linkage
  modified_base 3: mod_base = OTHER; note = 2'-O-methylguanosine
  modified_base 4: mod_base = OTHER; note = 2'-O-methylguanosine
  modified_base 5: mod_base = OTHER; note = 2'-O-methylcytidine
  modified_base 6: mod_base = OTHER; note = 2'-fluorouridine
  modified_base 7: mod_base = OTHER; note = 2'-O-methylcytidine
  modified_base 8: mod_base = OTHER; note = 2'-O-methyladenosine
  modified_base 9: mod_base = OTHER; note = 2'-O-methyluridine
  modified_base 10: mod_base = OTHER; note = 2'-O-methylcytidine
  modified_base 11: mod_base = OTHER; note = 2'-O-methyluridine
  modified_base 12: mod_base = OTHER; note = 2'-O-methyluridine
  modified_base 13: mod_base = OTHER; note = 2'-O-methyluridine
  modified_base 14: mod_base = OTHER; note = 2'-fluoroadenosine
  modified_base 15: mod_base = OTHER; note = 2'-O-methylcytidine
  modified_base 16: mod_base = OTHER; note = 2'-fluoroadenosine
  modified_base 17: mod_base = OTHER; note = 2'-O-methyladenosine
  modified_base 18: mod_base = OTHER; note = 2'-O-methyladenosine
  modified_base 19: mod_base = OTHER; note = 2'-O-methyluridine
  modified_base 20: mod_base = OTHER; note = 2'-O-methyladenosine
  modified_base 21: mod_base = OTHER; note = 2'-O-methylcytidine with phosphorothioate linkage
  modified_base 22: mod_base = OTHER; note = 2'-O-methylcytidine with phosphorothioate linkage
  modified_base 23: mod_base = OTHER; note = 2'-O-methyluridine
tgggctcatctttacaaatacct

SEQ ID NO: 1431 - RNA, 23 nt, synthetic construct
  source 1..23: mol_type = other RNA
  modified_base 1: mod_base = OTHER; note = 5'-(E)-vinylphosphonate 2'-O-methylated uridine with phosphorothioate linkage
  modified_base 2: mod_base = OTHER; note = 2'-fluorouridine with phosphorothioate linkage
  modified_base 3: mod_base = OTHER; note = 2'-O-methylguanosine
  modified_base 4: mod_base = OTHER; note = 2'-O-methylguanosine
  modified_base 5: mod_base = OTHER; note = 2'-O-methylguanosine
  modified_base 6: mod_base = OTHER; note = 2'-fluorocytidine
  modified_base 7: mod_base = OTHER; note = 2'-O-methyluridine
  modified_base 8: mod_base = OTHER; note = 2'-O-methylcytidine
  modified_base 9: mod_base = OTHER; note = 2'-O-methyladenosine
  modified_base 10: mod_base = OTHER; note = 2'-O-methyluridine
  modified_base 11: mod_base = OTHER; note = 2'-O-methylcytidine
  modified_base 12: mod_base = OTHER; note = 2'-O-methyluridine
  modified_base 13: mod_base = OTHER; note = 2'-O-methyluridine
  modified_base 14: mod_base = OTHER; note = 2'-fluorouridine
  modified_base 15: mod_base = OTHER; note = 2'-O-methyladenosine
  modified_base 16: mod_base = OTHER; note = 2'-fluorocytidine
  modified_base 17: mod_base = OTHER; note = 2'-O-methyladenosine
  modified_base 18: mod_base = OTHER; note = 2'-O-methyladenosine
  modified_base 19: mod_base = OTHER; note = 2'-O-methyladenosine
  modified_base 20: mod_base = OTHER; note = 2'-O-methyluridine
  modified_base 21: mod_base = OTHER; note = 2'-O-methyladenosine with phosphorothioate linkage
  modified_base 22: mod_base = OTHER; note = 2'-O-methylcytidine with phosphorothioate linkage
  modified_base 23: mod_base = OTHER; note = 2'-O-methylcytidine
ttgggctcatctttacaaatacc

SEQ ID NO: 1432 - RNA, 23 nt, synthetic construct
  source 1..23: mol_type = other RNA
  modified_base 1: mod_base = OTHER; note = 5'-(E)-vinylphosphonate 2'-O-methylated uridine with phosphorothioate linkage
  modified_base 2: mod_base = OTHER; note = 2'-fluorocytidine with phosphorothioate linkage
  modified_base 3: mod_base = OTHER; note = 2'-O-methyluridine
  modified_base 4: mod_base = OTHER; note = 2'-O-methylguanosine
  modified_base 5: mod_base = OTHER; note = 2'-O-methylguanosine
  modified_base 6: mod_base = OTHER; note = 2'-fluoroguanosine
  modified_base 7: mod_base = OTHER; note = 2'-O-methylcytidine
  modified_base 8: mod_base = OTHER; note = 2'-O-methyluridine
  modified_base 9: mod_base = OTHER; note = 2'-O-methylcytidine
  modified_base 10: mod_base = OTHER; note = 2'-O-methyladenosine
  modified_base 11: mod_base = OTHER; note = 2'-O-methyluridine
  modified_base 12: mod_base = OTHER; note = 2'-O-methylcytidine
  modified_base 13: mod_base = OTHER; note = 2'-O-methyluridine
  modified_base 14: mod_base = OTHER; note = 2'-fluorouridine
  modified_base 15: mod_base = OTHER; note = 2'-O-methyluridine
  modified_base 16: mod_base = OTHER; note = 2'-fluoroadenosine
  modified_base 17: mod_base = OTHER; note = 2'-O-methylcytidine
  modified_base 18: mod_base = OTHER; note = 2'-O-methyladenosine
  modified_base 19: mod_base = OTHER; note = 2'-O-methyladenosine
  modified_base 20: mod_base = OTHER; note = 2'-O-methyladenosine
  modified_base 21: mod_base = OTHER; note = 2'-O-methyluridine with phosphorothioate linkage
  modified_base 22: mod_base = OTHER; note = 2'-O-methyladenosine with phosphorothioate linkage
  modified_base 23: mod_base = OTHER; note = 2'-O-methylcytidine
tctgggctcatctttacaaatac

SEQ ID NO: 1433 - RNA, 23 nt, synthetic construct
  source 1..23: mol_type = other RNA
  modified_base 1: mod_base = OTHER; note = 5'-(E)-vinylphosphonate 2'-O-methylated uridine with phosphorothioate linkage
  modified_base 2: mod_base = OTHER; note = 2'-fluoroguanosine with phosphorothioate linkage
  modified_base 3: mod_base = OTHER; note = 2'-O-methylcytidine
  modified_base 4: mod_base = OTHER; note = 2'-O-methyluridine
  modified_base 5: mod_base = OTHER; note = 2'-O-methylguanosine
  modified_base 6: mod_base = OTHER; note = 2'-fluoroguanosine
  modified_base 7: mod_base = OTHER; note = 2'-O-methylguanosine
  modified_base 8: mod_base = OTHER; note = 2'-O-methylcytidine
  modified_base 9: mod_base = OTHER; note = 2'-O-methyluridine
  modified_base 10: mod_base = OTHER; note = 2'-O-methylcytidine
  modified_base 11: mod_base = OTHER; note = 2'-O-methyladenosine
  modified_base 12: mod_base = OTHER; note = 2'-O-methyluridine
  modified_base 13: mod_base = OTHER; note = 2'-O-methylcytidine
  modified_base 14: mod_base = OTHER; note = 2'-fluorouridine
  modified_base 15: mod_base = OTHER; note = 2'-O-methyluridine
  modified_base 16: mod_base = OTHER; note = 2'-fluorouridine
  modified_base 17: mod_base = OTHER; note = 2'-O-methyladenosine
  modified_base 18: mod_base = OTHER; note = 2'-O-methylcytidine
  modified_base 19: mod_base = OTHER; note = 2'-O-methyladenosine
  modified_base 20: mod_base = OTHER; note = 2'-O-methyladenosine
  modified_base 21: mod_base = OTHER; note = 2'-O-methyladenosine with phosphorothioate linkage
  modified_base 22: mod_base = OTHER; note = 2'-O-methyluridine with phosphorothioate linkage
  modified_base 23: mod_base = OTHER; note = 2'-O-methyladenosine
tgctgggctcatctttacaaata

SEQ ID NO: 1434 - RNA, 23 nt, synthetic construct
  source 1..23: mol_type = other RNA
  modified_base 1: mod_base = OTHER; note = 5'-(E)-vinylphosphonate 2'-O-methylated uridine with phosphorothioate linkage
  modified_base 2: mod_base = OTHER; note = 2'-fluorouridine with phosphorothioate linkage
  modified_base 3: mod_base = OTHER; note = 2'-O-methylguanosine
  modified_base 4: mod_base = OTHER; note = 2'-O-methylcytidine
  modified_base 5: mod_base = OTHER; note = 2'-O-methyluridine
  modified_base 6: mod_base = OTHER; note = 2'-fluoroguanosine
  modified_base 7: mod_base = OTHER; note = 2'-O-methylguanosine
  modified_base 8: mod_base = OTHER; note = 2'-O-methylguanosine
  modified_base 9: mod_base = OTHER; note = 2'-O-methylcytidine
  modified_base 10: mod_base = OTHER; note = 2'-O-methyluridine
  modified_base 11: mod_base = OTHER; note = 2'-O-methylcytidine
  modified_base 12: mod_base = OTHER; note = 2'-O-methyladenosine
  modified_base 13: mod_base = OTHER; note = 2'-O-methyluridine
  modified_base 14: mod_base = OTHER; note = 2'-fluorocytidine
  modified_base 15: mod_base = OTHER; note = 2'-O-methyluridine
  modified_base 16: mod_base = OTHER; note = 2'-fluorouridine
  modified_base 17: mod_base = OTHER; note = 2'-O-methyluridine
  modified_base 18: mod_base = OTHER; note = 2'-O-methyladenosine
  modified_base 19: mod_base = OTHER; note = 2'-O-methylcytidine
  modified_base 20: mod_base = OTHER; note = 2'-O-methyladenosine
  modified_base 21: mod_base = OTHER; note = 2'-O-methyladenosine with phosphorothioate linkage
  modified_base 22: mod_base = OTHER; note = 2'-O-methyladenosine with phosphorothioate linkage
  modified_base 23: mod_base = OTHER; note = 2'-O-methyluridine
ttgctgggctcatctttacaaat

SEQ ID NO: 1435 - RNA, 23 nt, synthetic construct
  source 1..23: mol_type = other RNA
  modified_base 1: mod_base = OTHER; note = 5'-(E)-vinylphosphonate 2'-O-methylated uridine with phosphorothioate linkage
  modified_base 2: mod_base = OTHER; note = 2'-fluorocytidine with phosphorothioate linkage
  modified_base 3: mod_base = OTHER; note = 2'-O-methyluridine
  modified_base 4: mod_base = OTHER; note = 2'-O-methylguanosine
  modified_base 5: mod_base = OTHER; note = 2'-O-methylcytidine
  modified_base 6: mod_base = OTHER; note = 2'-fluorouridine
  modified_base 7: mod_base = OTHER; note = 2'-O-methylguanosine
  modified_base 8: mod_base = OTHER; note = 2'-O-methylguanosine
  modified_base 9: mod_base = OTHER; note = 2'-O-methylguanosine
  modified_base 10: mod_base = OTHER; note = 2'-O-methylcytidine
  modified_base 11: mod_base = OTHER; note = 2'-O-methyluridine
  modified_base 12: mod_base = OTHER; note = 2'-O-methylcytidine
  modified_base 13: mod_base = OTHER; note = 2'-O-methyladenosine
  modified_base 14: mod_base = OTHER; note = 2'-fluorouridine
  modified_base 15: mod_base = OTHER; note = 2'-O-methylcytidine
  modified_base 16: mod_base = OTHER; note = 2'-fluorouridine
  modified_base 17: mod_base = OTHER; note = 2'-O-methyluridine
  modified_base 18: mod_base = OTHER; note = 2'-O-methyluridine
  modified_base 19: mod_base = OTHER; note = 2'-O-methyladenosine
  modified_base 20: mod_base = OTHER; note = 2'-O-methylcytidine
  modified_base 21: mod_base = OTHER; note = 2'-O-methyladenosine with phosphorothioate linkage
  modified_base 22: mod_base = OTHER; note = 2'-O-methyladenosine with phosphorothioate linkage
  modified_base 23: mod_base = OTHER; note = 2'-O-methyladenosine
tctgctgggctcatctttacaaa

SEQ ID NO: 1436 - RNA, 23 nt, synthetic construct
  source 1..23: mol_type = other RNA
  modified_base 1: mod_base = OTHER; note = 5'-(E)-vinylphosphonate 2'-O-methylated uridine with phosphorothioate linkage
  modified_base 2: mod_base = OTHER; note = 2'-fluoroguanosine with phosphorothioate linkage
  modified_base 3: mod_base = OTHER; note = 2'-O-methylcytidine
  modified_base 4: mod_base = OTHER; note = 2'-O-methyluridine
  modified_base 5: mod_base = OTHER; note = 2'-O-methylguanosine
  modified_base 6: mod_base = OTHER; note = 2'-fluorocytidine
  modified_base 7: mod_base = OTHER; note = 2'-O-methyluridine
  modified_base 8: mod_base = OTHER; note = 2'-O-methylguanosine
  modified_base 9: mod_base = OTHER; note = 2'-O-methylguanosine
  modified_base 10: mod_base = OTHER; note = 2'-O-methylguanosine
  modified_base 11: mod_base = OTHER; note = 2'-O-methylcytidine
  modified_base 12: mod_base = OTHER; note = 2'-O-methyluridine
  modified_base 13: mod_base = OTHER; note = 2'-O-methylcytidine
  modified_base 14: mod_base = OTHER; note = 2'-fluoroadenosine
  modified_base 15: mod_base = OTHER; note = 2'-O-methyluridine
  modified_base 16: mod_base = OTHER; note = 2'-fluorocytidine
  modified_base 17: mod_base = OTHER; note = 2'-O-methyluridine
  modified_base 18: mod_base = OTHER; note = 2'-O-methyluridine
  modified_base 19: mod_base = OTHER; note = 2'-O-methyluridine
  modified_base 20: mod_base = OTHER; note = 2'-O-methyladenosine
  modified_base 21: mod_base = OTHER; note = 2'-O-methylcytidine with phosphorothioate linkage
  modified_base 22: mod_base = OTHER; note = 2'-O-methyladenosine with phosphorothioate linkage
  modified_base 23: mod_base = OTHER; note = 2'-O-methyladenosine
tgctgctgggctcatctttacaa

SEQ ID NO: 1437 - RNA, 23 nt, synthetic construct
  source 1..23: mol_type = other RNA
  modified_base 1: mod_base = OTHER; note = 5'-(E)-vinylphosphonate 2'-O-methylated uridine with phosphorothioate linkage
  modified_base 2: mod_base = OTHER; note = 2'-fluoroadenosine with phosphorothioate linkage
  modified_base 3: mod_base = OTHER; note = 2'-O-methylguanosine
  modified_base 4: mod_base = OTHER; note = 2'-O-methylcytidine
  modified_base 5: mod_base = OTHER; note = 2'-O-methyluridine
  modified_base 6: mod_base = OTHER; note = 2'-fluoroguanosine
  modified_base 7: mod_base = OTHER; note = 2'-O-methylcytidine
  modified_base 8: mod_base = OTHER; note = 2'-O-methyluridine
  modified_base 9: mod_base = OTHER; note = 2'-O-methylguanosine
  modified_base 10: mod_base = OTHER; note = 2'-O-methylguanosine
  modified_base 11: mod_base = OTHER; note = 2'-O-methylguanosine
  modified_base 12: mod_base = OTHER; note = 2'-O-methylcytidine
  modified_base 13: mod_base = OTHER; note = 2'-O-methyluridine
  modified_base 14: mod_base = OTHER; note = 2'-fluorocytidine
  modified_base 15: mod_base = OTHER; note = 2'-O-methyladenosine
  modified_base 16: mod_base = OTHER; note = 2'-fluorouridine
  modified_base 17: mod_base = OTHER; note = 2'-O-methylcytidine
  modified_base 18: mod_base = OTHER; note = 2'-O-methyluridine
  modified_base 19: mod_base = OTHER; note = 2'-O-methyluridine
  modified_base 20: mod_base = OTHER; note = 2'-O-methyluridine
  modified_base 21: mod_base = OTHER; note = 2'-O-methyladenosine with phosphorothioate linkage
  modified_base 22: mod_base = OTHER; note = 2'-O-methylcytidine with phosphorothioate linkage
  modified_base 23: mod_base = OTHER; note = 2'-O-methyladenosine
tagctgctgggctcatctttaca

SEQ ID NO: 1438 - RNA, 23 nt, synthetic construct
  source 1..23: mol_type = other RNA
  modified_base 1: mod_base = OTHER; note = 5'-(E)-vinylphosphonate 2'-O-methylated uridine with phosphorothioate linkage
  modified_base 2: mod_base = OTHER; note = 2'-fluoroguanosine with phosphorothioate linkage
  modified_base 3: mod_base = OTHER; note = 2'-O-methyluridine
  modified_base 4: mod_base = OTHER; note = 2'-O-methyladenosine
  modified_base 5: mod_base = OTHER; note = 2'-O-methylguanosine
  modified_base 6: mod_base = OTHER; note = 2'-fluorocytidine
  modified_base 7: mod_base = OTHER; note = 2'-O-methyluridine
  modified_base 8: mod_base = OTHER; note = 2'-O-methylguanosine
  modified_base 9: mod_base = OTHER; note = 2'-O-methylcytidine
  modified_base 10: mod_base = OTHER; note = 2'-O-methyluridine
  modified_base 11: mod_base = OTHER; note = 2'-O-methylguanosine
  modified_base 12: mod_base = OTHER; note = 2'-O-methylguanosine
  modified_base 13: mod_base = OTHER; note = 2'-O-methylguanosine
  modified_base 14: mod_base = OTHER; note = 2'-fluorocytidine
  modified_base 15: mod_base = OTHER; note = 2'-O-methyluridine
  modified_base 16: mod_base = OTHER; note = 2'-fluorocytidine
  modified_base 17: mod_base = OTHER; note = 2'-O-methyladenosine
  modified_base 18: mod_base = OTHER; note = 2'-O-methyluridine
  modified_base 19: mod_base = OTHER; note = 2'-O-methylcytidine
  modified_base 20: mod_base = OTHER; note = 2'-O-methyluridine
  modified_base 21: mod_base = OTHER; note = 2'-O-methyluridine with phosphorothioate linkage
  modified_base 22: mod_base = OTHER; note = 2'-O-methyluridine with phosphorothioate linkage
  modified_base 23: mod_base = OTHER; note = 2'-O-methyladenosine
tgtagctgctgggctcatcttta

SEQ ID NO: 1439 - RNA, 23 nt, synthetic construct
  source 1..23: mol_type = other RNA
  modified_base 1: mod_base = OTHER; note = 5'-(E)-vinylphosphonate 2'-O-methylated uridine with phosphorothioate linkage
  modified_base 2: mod_base = OTHER; note = 2'-fluorouridine with phosphorothioate linkage
  modified_base 3: mod_base = OTHER; note = 2'-O-methylguanosine
  modified_base 4: mod_base = OTHER; note = 2'-O-methyluridine
  modified_base 5: mod_base = OTHER; note = 2'-O-methyladenosine
  modified_base 6: mod_base = OTHER; note = 2'-fluoroguanosine
  modified_base 7: mod_base = OTHER; note = 2'-O-methylcytidine
  modified_base 8: mod_base = OTHER; note = 2'-O-methyluridine
  modified_base 9: mod_base = OTHER; note = 2'-O-methylguanosine
  modified_base 10: mod_base = OTHER; note = 2'-O-methylcytidine
  modified_base 11: mod_base = OTHER; note = 2'-O-methyluridine
  modified_base 12: mod_base = OTHER; note = 2'-O-methylguanosine
  modified_base 13: mod_base = OTHER; note = 2'-O-methylguanosine
  modified_base 14: mod_base = OTHER; note = 2'-fluoroguanosine
  modified_base 15: mod_base = OTHER; note = 2'-O-methylcytidine
  modified_base 16: mod_base = OTHER; note = 2'-fluorouridine
  modified_base 17: mod_base = OTHER; note = 2'-O-methylcytidine
  modified_base 18: mod_base = OTHER; note = 2'-O-methyladenosine
  modified_base 19: mod_base = OTHER; note = 2'-O-methyluridine
  modified_base 20: mod_base = OTHER; note = 2'-O-methylcytidine
  modified_base 21: mod_base = OTHER; note = 2'-O-methyluridine with phosphorothioate linkage
  modified_base 22: mod_base = OTHER; note = 2'-O-methyluridine with phosphorothioate linkage
  modified_base 23: mod_base = OTHER; note = 2'-O-methyluridine
ttgtagctgctgggctcatcttt

SEQ ID NO: 1440 - RNA, 23 nt, synthetic construct
  source 1..23: mol_type = other RNA
  modified_base 1: mod_base = OTHER; note = 5'-(E)-vinylphosphonate 2'-O-methylated uridine with phosphorothioate linkage
  modified_base 2: mod_base = OTHER; note = 2'-fluoroguanosine with phosphorothioate linkage
  modified_base 3: mod_base = OTHER; note = 2'-O-methyluridine
  modified_base 4: mod_base = OTHER; note = 2'-O-methylguanosine
  modified_base 5: mod_base = OTHER; note = 2'-O-methyluridine
  modified_base 6: mod_base = OTHER; note = 2'-fluoroadenosine
  modified_base 7: mod_base = OTHER; note = 2'-O-methylguanosine
  modified_base 8: mod_base = OTHER; note = 2'-O-methylcytidine
  modified_base 9: mod_base = OTHER; note = 2'-O-methyluridine
  modified_base 10: mod_base = OTHER; note = 2'-O-methylguanosine
  modified_base 11: mod_base = OTHER; note = 2'-O-methylcytidine
  modified_base 12: mod_base = OTHER; note = 2'-O-methyluridine
  modified_base 13: mod_base = OTHER; note = 2'-O-methylguanosine
  modified_base 14: mod_base = OTHER; note = 2'-fluoroguanosine
  modified_base 15: mod_base = OTHER; note = 2'-O-methylguanosine
  modified_base 16: mod_base = OTHER; note = 2'-fluorocytidine
  modified_base 17: mod_base = OTHER; note = 2'-O-methyluridine
  modified_base 18: mod_base = OTHER; note = 2'-O-methylcytidine
  modified_base 19: mod_base = OTHER; note = 2'-O-methyladenosine
  modified_base 20: mod_base = OTHER; note = 2'-O-methyluridine
  modified_base 21: mod_base = OTHER; note = 2'-O-methylcytidine with phosphorothioate linkage
  modified_base 22: mod_base = OTHER; note = 2'-O-methyluridine with phosphorothioate linkage
  modified_base 23: mod_base = OTHER; note = 2'-O-methyluridine
tgtgtagctgctgggctcatctt

SEQ ID NO: 1441 - RNA, 23 nt, synthetic construct
  source 1..23: mol_type = other RNA
  modified_base 1: mod_base = OTHER; note = 5'-(E)-vinylphosphonate 2'-O-methylated uridine with phosphorothioate linkage
  modified_base 2: mod_base = OTHER; note = 2'-fluorouridine with phosphorothioate linkage
  modified_base 3: mod_base = OTHER; note = 2'-O-methylguanosine
  modified_base 4: mod_base = OTHER; note = 2'-O-methyluridine
  modified_base 5: mod_base = OTHER; note = 2'-O-methylguanosine
  modified_base 6: mod_base = OTHER; note = 2'-fluorouridine
  modified_base 7: mod_base = OTHER; note = 2'-O-methyladenosine
  modified_base 8: mod_base = OTHER; note = 2'-O-methylguanosine
  modified_base 9: mod_base = OTHER; note = 2'-O-methylcytidine
  modified_base 10: mod_base = OTHER; note = 2'-O-methyluridine
  modified_base 11: mod_base = OTHER; note = 2'-O-methylguanosine
  modified_base 12: mod_base = OTHER; note = 2'-O-methylcytidine
  modified_base 13: mod_base = OTHER; note = 2'-O-methyluridine
  modified_base 14: mod_base = OTHER; note = 2'-fluoroguanosine
  modified_base 15: mod_base = OTHER; note = 2'-O-methylguanosine
  modified_base 16: mod_base = OTHER; note = 2'-fluoroguanosine
  modified_base 17: mod_base = OTHER; note = 2'-O-methylcytidine
  modified_base 18: mod_base = OTHER; note = 2'-O-methyluridine
  modified_base 19: mod_base = OTHER; note = 2'-O-methylcytidine
  modified_base 20: mod_base = OTHER; note = 2'-O-methyladenosine
  modified_base 21: mod_base = OTHER; note = 2'-O-methyluridine with phosphorothioate linkage
  modified_base 22: mod_base = OTHER; note = 2'-O-methylcytidine with phosphorothioate linkage
  modified_base 23: mod_base = OTHER; note = 2'-O-methyluridine
ttgtgtagctgctgggctcatct

SEQ ID NO: 1442 - RNA, 23 nt, synthetic construct
  source 1..23: mol_type = other RNA
  modified_base 1: mod_base = OTHER; note = 5'-(E)-vinylphosphonate 2'-O-methylated uridine with phosphorothioate linkage
  modified_base 2: mod_base = OTHER; note = 2'-fluoroadenosine with phosphorothioate linkage
  modified_base 3: mod_base = OTHER; note = 2'-O-methyluridine
  modified_base 4: mod_base = OTHER; note = 2'-O-methylguanosine
  modified_base 5: mod_base = OTHER; note = 2'-O-methyluridine
  modified_base 6: mod_base = OTHER; note = 2'-fluoroguanosine
  modified_base 7: mod_base = OTHER; note = 2'-O-methyluridine
  modified_base 8: mod_base = OTHER; note = 2'-O-methyladenosine
  modified_base 9: mod_base = OTHER; note = 2'-O-methylguanosine
  modified_base 10: mod_base = OTHER; note = 2'-O-methylcytidine
  modified_base 11: mod_base = OTHER; note = 2'-O-methyluridine
  modified_base 12: mod_base = OTHER; note = 2'-O-methylguanosine
  modified_base 13: mod_base = OTHER; note = 2'-O-methylcytidine
  modified_base 14: mod_base = OTHER; note = 2'-fluorouridine
  modified_base 15: mod_base = OTHER; note = 2'-O-methylguanosine
  modified_base 16: mod_base = OTHER; note = 2'-fluoroguanosine
  modified_base 17: mod_base = OTHER; note = 2'-O-methylguanosine
  modified_base 18: mod_base = OTHER; note = 2'-O-methylcytidine
  modified_base 19: mod_base = OTHER; note = 2'-O-methyluridine
  modified_base 20: mod_base = OTHER; note = 2'-O-methylcytidine
  modified_base 21: mod_base = OTHER; note = 2'-O-methyladenosine with phosphorothioate linkage
  modified_base 22: mod_base = OTHER; note = 2'-O-methyluridine with phosphorothioate linkage
  modified_base 23: mod_base = OTHER; note = 2'-O-methylcytidine
tatgtgtagctgctgggctcatc

SEQ ID NO: 1443 - RNA, 23 nt, synthetic construct
  source 1..23: mol_type = other RNA
  modified_base 1: mod_base = OTHER; note = 5'-(E)-vinylphosphonate 2'-O-methylated uridine with phosphorothioate linkage
  modified_base 2: mod_base = OTHER; note = 2'-fluorouridine with phosphorothioate linkage
  modified_base 3: mod_base = OTHER; note = 2'-O-methyluridine
  modified_base 4: mod_base = OTHER; note = 2'-O-methyluridine
  modified_base 5: mod_base = OTHER; note = 2'-O-methylguanosine
  modified_base 6: mod_base = OTHER; note = 2'-fluorocytidine
  modified_base 7: mod_base = OTHER; note = 2'-O-methyladenosine
  modified_base 8: mod_base = OTHER; note = 2'-O-methyladenosine
  modified_base 9: mod_base = OTHER; note = 2'-O-methylguanosine
  modified_base 10: mod_base = OTHER; note = 2'-O-methyluridine
  modified_base 11: mod_base = OTHER; note = 2'-O-methyluridine
  modified_base 12: mod_base = OTHER; note = 2'-O-methylguanosine
  modified_base 13: mod_base = OTHER; note = 2'-O-methyluridine
  modified_base 14: mod_base = OTHER; note = 2'-fluoroadenosine
  modified_base 15: mod_base = OTHER; note = 2'-O-methylcytidine
  modified_base 16: mod_base = OTHER; note = 2'-fluoroadenosine
  modified_base 17: mod_base = OTHER; note = 2'-O-methyluridine
  modified_base 18: mod_base = OTHER; note = 2'-O-methylguanosine
  modified_base 19: mod_base = OTHER; note = 2'-O-methyluridine
  modified_base 20: mod_base = OTHER; note = 2'-O-methylguanosine
  modified_base 21: mod_base = OTHER; note = 2'-O-methyluridine with phosphorothioate linkage
  modified_base 22: mod_base = OTHER; note = 2'-O-methyladenosine with phosphorothioate linkage
  modified_base 23: mod_base = OTHER; note = 2'-O-methylguanosine
ttttgcaagttgtacatgtgtag

SEQ ID NO: 1444 - RNA, 23 nt, synthetic construct
  source 1..23: mol_type = other RNA
  modified_base 1: mod_base = OTHER; note = 5'-(E)-vinylphosphonate 2'-O-methylated uridine with phosphorothioate linkage
  modified_base 2: mod_base = OTHER; note = 2'-fluorouridine with phosphorothioate linkage
  modified_base 3: mod_base = OTHER; note = 2'-O-methylguanosine
  modified_base 4: mod_base = OTHER; note = 2'-O-methyluridine
  modified_base 5: mod_base = OTHER; note = 2'-O-methyluridine
  modified_base 6: mod_base = OTHER; note = 2'-fluorouridine
  modified_base 7: mod_base = OTHER; note = 2'-O-methylguanosine
  modified_base 8: mod_base = OTHER; note = 2'-O-methylcytidine
  modified_base 9: mod_base = OTHER; note = 2'-O-methyladenosine
  modified_base 10: mod_base = OTHER; note = 2'-O-methyladenosine
  modified_base 11: mod_base = OTHER; note = 2'-O-methylguanosine
  modified_base 12: mod_base = OTHER; note = 2'-O-methyluridine
  modified_base 13: mod_base = OTHER; note = 2'-O-methyluridine
  modified_base 14: mod_base = OTHER; note = 2'-fluoroguanosine
  modified_base 15: mod_base = OTHER; note = 2'-O-methyluridine
  modified_base 16: mod_base = OTHER; note = 2'-fluoroadenosine
  modified_base 17: mod_base = OTHER; note = 2'-O-methylcytidine
  modified_base 18: mod_base = OTHER; note = 2'-O-methyladenosine
  modified_base 19: mod_base = OTHER; note = 2'-O-methyluridine
  modified_base 20: mod_base = OTHER; note = 2'-O-methylguanosine
  modified_base 21: mod_base = OTHER; note = 2'-O-methyluridine with phosphorothioate linkage
  modified_base 22: mod_base = OTHER; note = 2'-O-methylguanosine with phosphorothioate linkage
  modified_base 23: mod_base = OTHER; note = 2'-O-methyluridine
ttgtttgcaagttgtacatgtgt

SEQ ID NO: 1445 - RNA, 23 nt, synthetic construct
  source 1..23: mol_type = other RNA
  modified_base 1: mod_base = OTHER; note = 5'-(E)-vinylphosphonate 2'-O-methylated uridine with phosphorothioate linkage
  modified_base 2: mod_base = OTHER; note = 2'-fluoroadenosine with phosphorothioate linkage
  modified_base 3: mod_base = OTHER; note = 2'-O-methylguanosine
  modified_base 4: mod_base = OTHER; note = 2'-O-methyluridine
  modified_base 5: mod_base = OTHER; note = 2'-O-methylguanosine
  modified_base 6: mod_base = OTHER; note = 2'-fluorouridine
  modified_base 7: mod_base = OTHER; note = 2'-O-methyluridine
  modified_base 8: mod_base = OTHER; note = 2'-O-methylcytidine
  modified_base 9: mod_base = OTHER; note = 2'-O-methyluridine
  modified_base 10: mod_base = OTHER; note = 2'-O-methylguanosine
  modified_base 11: mod_base = OTHER; note = 2'-O-methyluridine
  modified_base 12: mod_base = OTHER; note = 2'-O-methylguanosine
  modified_base 13: mod_base = OTHER; note = 2'-O-methylcytidine
  modified_base 14: mod_base = OTHER; note = 2'-fluoroguanosine
  modified_base 15: mod_base = OTHER; note = 2'-O-methyluridine
  modified_base 16: mod_base = OTHER; note = 2'-fluoroguanosine
  modified_base 17: mod_base = OTHER; note = 2'-O-methyluridine
  modified_base 18: mod_base = OTHER; note = 2'-O-methyluridine
  modified_base 19: mod_base = OTHER; note = 2'-O-methylguanosine
  modified_base 20: mod_base = OTHER; note = 2'-O-methylcytidine
  modified_base 21: mod_base = OTHER; note = 2'-O-methyladenosine with phosphorothioate linkage
  modified_base 22: mod_base = OTHER; note = 2'-O-methyladenosine with phosphorothioate linkage
  modified_base 23: mod_base = OTHER; note = 2'-O-methylguanosine
tagtgttctgtgcgtgttgcaag

SEQ ID NO: 1446 - RNA, 23 nt, synthetic construct
  source 1..23: mol_type = other RNA
  modified_base 1: mod_base = OTHER; note = 5'-(E)-vinylphosphonate 2'-O-methylated uridine with phosphorothioate linkage
  modified_base 2: mod_base = OTHER; note = 2'-fluoroguanosine with phosphorothioate linkage
  modified_base 3: mod_base = OTHER; note = 2'-O-methyladenosine
  modified_base 4: mod_base = OTHER; note = 2'-O-methylguanosine
  modified_base 5: mod_base = OTHER; note = 2'-O-methyluridine
  modified_base 6: mod_base = OTHER; note = 2'-fluoroguanosine
  modified_base 7: mod_base = OTHER; note = 2'-O-methyluridine
  modified_base 8: mod_base = OTHER; note = 2'-O-methyluridine
  modified_base 9: mod_base = OTHER; note = 2'-O-methylcytidine
  modified_base 10: mod_base = OTHER; note = 2'-O-methyluridine
  modified_base 11: mod_base = OTHER; note = 2'-O-methylguanosine
  modified_base 12: mod_base = OTHER; note = 2'-O-methyluridine
  modified_base 13: mod_base = OTHER; note = 2'-O-methylguanosine
  modified_base 14: mod_base = OTHER; note = 2'-fluorocytidine
  modified_base 15: mod_base = OTHER; note = 2'-O-methylguanosine
  modified_base 16: mod_base = OTHER; note = 2'-fluorouridine
  modified_base 17: mod_base = OTHER; note = 2'-O-methylguanosine
  modified_base 18: mod_base = OTHER; note = 2'-O-methyluridine
  modified_base 19: mod_base = OTHER; note = 2'-O-methyluridine
  modified_base 20: mod_base = OTHER; note = 2'-O-methylguanosine
  modified_base 21: mod_base = OTHER; note = 2'-O-methylcytidine with phosphorothioate linkage
  modified_base 22: mod_base = OTHER; note = 2'-O-methyladenosine with phosphorothioate linkage
  modified_base 23: mod_base = OTHER; note = 2'-O-methyladenosine
tgagtgttctgtgcgtgttgcaa

SEQ ID NO: 1447 - RNA, 23 nt, synthetic construct
  source 1..23: mol_type = other RNA
  modified_base 1: mod_base = OTHER; note = 5'-(E)-vinylphosphonate 2'-O-methylated uridine with phosphorothioate linkage
  modified_base 2: mod_base = OTHER; note = 2'-fluorouridine with phosphorothioate linkage
  modified_base 3: mod_base = OTHER; note = 2'-O-methylguanosine
  modified_base 4: mod_base = OTHER; note = 2'-O-methyladenosine
  modified_base 5: mod_base = OTHER; note = 2'-O-methylguanosine
  modified_base 6: mod_base = OTHER; note = 2'-fluorouridine
  modified_base 7: mod_base = OTHER; note = 2'-O-methylguanosine
  modified_base 8: mod_base = OTHER; note = 2'-O-methyluridine
  modified_base 9: mod_base = OTHER; note = 2'-O-methyluridine
  modified_base 10: mod_base = OTHER; note = 2'-O-methylcytidine
  modified_base 11: mod_base = OTHER; note = 2'-O-methyluridine
  modified_base 12: mod_base = OTHER; note = 2'-O-methylguanosine
  modified_base 13: mod_base = OTHER; note = 2'-O-methyluridine
  modified_base 14: mod_base = OTHER; note = 2'-fluoroguanosine
  modified_base 15: mod_base = OTHER; note = 2'-O-methylcytidine
  modified_base 16: mod_base = OTHER; note = 2'-fluoroguanosine
  modified_base 17: mod_base = OTHER; note = 2'-O-methyluridine
  modified_base 18: mod_base = OTHER; note = 2'-O-methylguanosine
  modified_base 19: mod_base = OTHER; note = 2'-O-methyluridine
  modified_base 20: mod_base = OTHER; note = 2'-O-methyluridine
  modified_base 21: mod_base = OTHER; note = 2'-O-methylguanosine with phosphorothioate linkage
  modified_base 22: mod_base = OTHER; note = 2'-O-methylcytidine with phosphorothioate linkage
  modified_base 23: mod_base = OTHER; note = 2'-O-methyladenosine
ttgagtgttctgtgcgtgttgca

SEQ ID NO: 1448 - RNA, 23 nt, synthetic construct
  source 1..23: mol_type = other RNA
  modified_base 1: mod_base = OTHER; note = 5'-(E)-vinylphosphonate 2'-O-methylated uridine with phosphorothioate linkage
  modified_base 2: mod_base = OTHER; note = 2'-fluoroadenosine with phosphorothioate linkage
  modified_base 3: mod_base = OTHER; note = 2'-O-methyluridine
  modified_base 4: mod_base = OTHER; note = 2'-O-methylguanosine
  modified_base 5: mod_base = OTHER; note = 2'-O-methyladenosine
  modified_base 6: mod_base = OTHER; note = 2'-fluoroguanosine
  modified_base 7: mod_base = OTHER; note = 2'-O-methyluridine
  modified_base 8: mod_base = OTHER; note = 2'-O-methylguanosine
  modified_base 9: mod_base = OTHER; note = 2'-O-methyluridine
  modified_base 10: mod_base = OTHER; note = 2'-O-methyluridine
  modified_base 11: mod_base = OTHER; note = 2'-O-methylcytidine
  modified_base 12: mod_base = OTHER; note = 2'-O-methyluridine
  modified_base 13: mod_base = OTHER; note = 2'-O-methylguanosine
  modified_base 14: mod_base = OTHER; note = 2'-fluorouridine
  modified_base 15: mod_base = OTHER; note = 2'-O-methylguanosine
  modified_base 16: mod_base = OTHER; note = 2'-fluorocytidine
  modified_base 17: mod_base = OTHER; note = 2'-O-methylguanosine
  modified_base 18: mod_base = OTHER; note = 2'-O-methyluridine
  modified_base 19: mod_base = OTHER; note = 2'-O-methylguanosine
  modified_base 20: mod_base = OTHER; note = 2'-O-methyluridine
  modified_base 21: mod_base = OTHER; note = 2'-O-methyluridine with phosphorothioate linkage
  modified_base 22: mod_base = OTHER; note = 2'-O-methylguanosine with phosphorothioate linkage
  modified_base 23: mod_base = OTHER; note = 2'-O-methylcytidine
tatgagtgttctgtgcgtgttgc

SEQ ID NO: 1449 - RNA, 23 nt, synthetic construct
  source 1..23: mol_type = other RNA
  modified_base 1: mod_base = OTHER; note = 5'-(E)-vinylphosphonate 2'-O-methylated uridine with phosphorothioate linkage
  modified_base 2: mod_base = OTHER; note = 2'-fluorocytidine with phosphorothioate linkage
  modified_base 3: mod_base = OTHER; note = 2'-O-methyladenosine
  modified_base 4: mod_base = OTHER; note = 2'-O-methyluridine
  modified_base 5: mod_base = OTHER; note = 2'-O-methylguanosine
  modified_base 6: mod_base = OTHER; note = 2'-fluoroadenosine
  modified_base 7: mod_base = OTHER; note = 2'-O-methylguanosine
  modified_base 8: mod_base = OTHER; note = 2'-O-methyluridine
  modified_base 9: mod_base = OTHER; note = 2'-O-methylguanosine
  modified_base 10: mod_base = OTHER; note = 2'-O-methyluridine
  modified_base 11: mod_base = OTHER; note = 2'-O-methyluridine
  modified_base 12: mod_base = OTHER; note = 2'-O-methylcytidine
  modified_base 13: mod_base = OTHER; note = 2'-O-methyluridine
  modified_base 14: mod_base = OTHER; note = 2'-fluoroguanosine
  modified_base 15: mod_base = OTHER; note = 2'-O-methyluridine
  modified_base 16: mod_base = OTHER; note = 2'-fluoroguanosine
  modified_base 17: mod_base = OTHER; note = 2'-O-methylcytidine
  modified_base 18: mod_base = OTHER; note = 2'-O-methylguanosine
  modified_base 19: mod_base = OTHER; note = 2'-O-methyluridine
  modified_base 20: mod_base = OTHER; note = 2'-O-methylguanosine
  modified_base 21: mod_base = OTHER; note = 2'-O-methyluridine with phosphorothioate linkage
  modified_base 22: mod_base = OTHER; note = 2'-O-methyluridine with phosphorothioate linkage
  modified_base 23: mod_base = OTHER; note = 2'-O-methylguanosine
tcatgagtgttctgtgcgtgttg

SEQ ID NO: 1450 - RNA, 23 nt, synthetic construct
  source 1..23: mol_type = other RNA
  modified_base 1: mod_base = OTHER; note = 5'-(E)-vinylphosphonate 2'-O-methylated uridine with phosphorothioate linkage
  modified_base 2: mod_base = OTHER; note = 2'-fluorocytidine with phosphorothioate linkage
  modified_base 3: mod_base = OTHER; note = 2'-O-methylcytidine
  modified_base 4: mod_base = OTHER; note = 2'-O-methyladenosine
  modified_base 5: mod_base = OTHER; note = 2'-O-methyluridine
  modified_base 6: mod_base = OTHER; note = 2'-fluoroguanosine
  modified_base 7: mod_base = OTHER; note = 2'-O-methyladenosine
  modified_base 8: mod_base = OTHER; note = 2'-O-methylguanosine
  modified_base 9: mod_base = OTHER; note = 2'-O-methyluridine
  modified_base 10: mod_base = OTHER; note = 2'-O-methylguanosine
  modified_base 11: mod_base = OTHER; note = 2'-O-methyluridine
  modified_base 12: mod_base = OTHER; note = 2'-O-methyluridine
  modified_base 13: mod_base = OTHER; note = 2'-O-methylcytidine
  modified_base 14: mod_base = OTHER; note = 2'-fluorouridine
  modified_base 15: mod_base = OTHER; note = 2'-O-methylguanosine
  modified_base 16: mod_base = OTHER; note = 2'-fluorouridine
  modified_base 17: mod_base = OTHER; note = 2'-O-methylguanosine
  modified_base 18: mod_base = OTHER; note = 2'-O-methylcytidine
  modified_base 19: mod_base = OTHER; note = 2'-O-methylguanosine
  modified_base 20: mod_base = OTHER; note = 2'-O-methyluridine
  modified_base 21: mod_base = OTHER; note = 2'-O-methylguanosine with phosphorothioate linkage
  modified_base 22: mod_base = OTHER; note = 2'-O-methyluridine with phosphorothioate linkage
  modified_base 23: mod_base = OTHER; note = 2'-O-methyluridine
tccatgagtgttctgtgcgtgtt

SEQ ID NO: 1451 - RNA, 23 nt, synthetic construct
  source 1..23: mol_type = other RNA
  modified_base 1: mod_base = OTHER; note = 5'-(E)-vinylphosphonate 2'-O-methylated uridine with phosphorothioate linkage
  modified_base 2: mod_base = OTHER; note = 2'-fluoroadenosine with phosphorothioate linkage
  modified_base 3: mod_base = OTHER; note = 2'-O-methylcytidine
  modified_base 4: mod_base = OTHER; note = 2'-O-methylcytidine
  modified_base 5: mod_base = OTHER; note = 2'-O-methyladenosine
  modified_base 6: mod_base = OTHER; note = 2'-fluoroadenosine
  modified_base 7: mod_base = OTHER; note = 2'-O-methylcytidine
  modified_base 8: mod_base = OTHER; note = 2'-O-methylcytidine
  modified_base 9: mod_base = OTHER; note = 2'-O-methylcytidine
  modified_base 10: mod_base = OTHER; note = 2'-O-methylguanosine
  modified_base 11: mod_base = OTHER; note = 2'-O-methylcytidine
  modified_base 12: mod_base = OTHER; note = 2'-O-methylguanosine
  modified_base 13: mod_base = OTHER; note = 2'-O-methylguanosine
  modified_base 14: mod_base = OTHER; note = 2'-fluoroguanosine
  modified_base 15: mod_base = OTHER; note = 2'-O-methylguanosine
  modified_base 16: mod_base = OTHER; note = 2'-fluorouridine
  modified_base 17: mod_base = OTHER; note = 2'-O-methylcytidine
  modified_base 18: mod_base = OTHER; note = 2'-O-methyladenosine
  modified_base 19: mod_base = OTHER; note = 2'-O-methylguanosine
  modified_base 20: mod_base = OTHER; note = 2'-O-methylguanosine
  modified_base 21: mod_base = OTHER; note = 2'-O-methylguanosine with phosphorothioate linkage
  modified_base 22: mod_base = OTHER; note = 2'-O-methylguanosine with phosphorothioate linkage
  modified_base 23: mod_base = OTHER; note = 2'-O-methyladenosine
taccaacccgcggggtcagggga

SEQ ID NO: 1452 - RNA, 23 nt, synthetic construct
  source 1..23: mol_type = other RNA
  modified_base 1: mod_base = OTHER; note = 5'-(E)-vinylphosphonate 2'-O-methylated uridine with phosphorothioate linkage
  modified_base 2: mod_base = OTHER; note = 2'-fluoroadenosine with phosphorothioate linkage
  modified_base 3: mod_base = OTHER; note = 2'-O-methyluridine
  modified_base 4: mod_base = OTHER; note = 2'-O-methyladenosine
  modified_base 5: mod_base = OTHER; note = 2'-O-methylcytidine
  modified_base 6: mod_base = OTHER; note = 2'-fluorocytidine
  modified_base 7: mod_base = OTHER; note = 2'-O-methyladenosine
  modified_base 8: mod_base = OTHER; note = 2'-O-methyladenosine
  modified_base 9: mod_base = OTHER; note = 2'-O-methylcytidine
  modified_base 10: mod_base = OTHER; note = 2'-O-methylcytidine
  modified_base 11: mod_base = OTHER; note = 2'-O-methylcytidine
  modified_base 12: mod_base = OTHER; note = 2'-O-methylguanosine
  modified_base 13: mod_base = OTHER; note = 2'-O-methylcytidine
  modified_base 14: mod_base = OTHER; note = 2'-fluoroguanosine
  modified_base 15: mod_base = OTHER; note = 2'-O-methylguanosine
  modified_base 16: mod_base = OTHER; note = 2'-fluoroguanosine
  modified_base 17: mod_base = OTHER; note = 2'-O-methylguanosine
  modified_base 18: mod_base = OTHER; note = 2'-O-methyluridine
  modified_base 19: mod_base = OTHER; note = 2'-O-methylcytidine
  modified_base 20: mod_base = OTHER; note = 2'-O-methyladenosine
  modified_base 21: mod_base = OTHER; note = 2'-O-methylguanosine with phosphorothioate linkage
  modified_base 22: mod_base = OTHER; note = 2'-O-methylguanosine with phosphorothioate linkage
  modified_base 23: mod_base = OTHER; note = 2'-O-methylguanosine
tataccaacccgcggggtcaggg

SEQ ID NO: 1453 - RNA, 23 nt, synthetic construct
  source 1..23: mol_type = other RNA
  modified_base 1: mod_base = OTHER; note = 5'-(E)-vinylphosphonate 2'-O-methylated uridine with phosphorothioate linkage
  modified_base 2: mod_base = OTHER; note = 2'-fluoroguanosine with phosphorothioate linkage
  modified_base 3: mod_base = OTHER; note = 2'-O-methylguanosine
  modified_base 4: mod_base = OTHER; note = 2'-O-methyladenosine
  modified_base 5: mod_base = OTHER; note = 2'-O-methyluridine
  modified_base 6: mod_base = OTHER; note = 2'-fluoroadenosine
  modified_base 7: mod_base = OTHER; note = 2'-O-methylcytidine
  modified_base 8: mod_base = OTHER; note = 2'-O-methylcytidine
  modified_base 9: mod_base = OTHER; note = 2'-O-methyladenosine
  modified_base 10: mod_base = OTHER; note = 2'-O-methyladenosine
  modified_base 11: mod_base = OTHER; note = 2'-O-methylcytidine
  modified_base 12: mod_base = OTHER; note = 2'-O-methylcytidine
  modified_base 13: mod_base = OTHER; note = 2'-O-methylcytidine
  modified_base 14: mod_base = OTHER; note = 2'-fluoroguanosine
  modified_base 15: mod_base = OTHER; note = 2'-O-methylcytidine
  modified_base 16: mod_base = OTHER; note = 2'-fluoroguanosine
  modified_base 17: mod_base = OTHER; note = 2'-O-methylguanosine
  modified_base 18: mod_base = OTHER; note = 2'-O-methylguanosine
  modified_base 19: mod_base = OTHER; note = 2'-O-methylguanosine
  modified_base 20: mod_base = OTHER; note = 2'-O-methyluridine
  modified_base 21: mod_base = OTHER; note = 2'-O-methylcytidine with phosphorothioate linkage
  modified_base 22: mod_base = OTHER; note = 2'-O-methyladenosine with phosphorothioate linkage
  modified_base 23: mod_base = OTHER; note = 2'-O-methylguanosine
tggataccaacccgcggggtcag

SEQ ID NO: 1454 - RNA, 23 nt, synthetic construct
  source 1..23: mol_type = other RNA
  modified_base 1: mod_base = OTHER; note = 5'-(E)-vinylphosphonate 2'-O-methylated uridine with phosphorothioate linkage
  modified_base 2: mod_base = OTHER; note = 2'-fluoroguanosine with phosphorothioate linkage
  modified_base 3: mod_base = OTHER; note = 2'-O-methylguanosine
  modified_base 4: mod_base = OTHER; note = 2'-O-methylguanosine
  modified_base 5: mod_base = OTHER; note = 2'-O-methyladenosine
  modified_base 6: mod_base = OTHER; note = 2'-fluorouridine
  modified_base 7: mod_base = OTHER; note = 2'-O-methyladenosine
  modified_base 8: mod_base = OTHER; note = 2'-O-methylcytidine
  modified_base 9: mod_base = OTHER; note = 2'-O-methylcytidine
  modified_base 10: mod_base = OTHER; note = 2'-O-methyladenosine
  modified_base 11: mod_base = OTHER; note = 2'-O-methyladenosine
  modified_base 12: mod_base = OTHER; note = 2'-O-methylcytidine
  modified_base 13: mod_base = OTHER; note = 2'-O-methylcytidine
  modified_base 14: mod_base = OTHER; note = 2'-fluorocytidine
  modified_base 15: mod_base = OTHER; note = 2'-O-methylguanosine
  modified_base 16: mod_base = OTHER; note = 2'-fluorocytidine
  modified_base 17: mod_base = OTHER; note = 2'-O-methylguanosine
  modified_base 18: mod_base = OTHER; note = 2'-O-methylguanosine
  modified_base 19: mod_base = OTHER; note = 2'-O-methylguanosine
  modified_base 20: mod_base = OTHER; note = 2'-O-methylguanosine
  modified_base 21: mod_base = OTHER; note = 2'-O-methyluridine with phosphorothioate linkage
  modified_base 22: mod_base = OTHER; note = 2'-O-methylcytidine with phosphorothioate linkage
  modified_base 23: mod_base = OTHER; note = 2'-O-methyladenosine
tgggataccaacccgcggggtca

SEQ ID NO: 1455 - RNA, 23 nt, synthetic construct
  source 1..23: mol_type = other RNA
  modified_base 1: mod_base = OTHER; note = 5'-(E)-vinylphosphonate 2'-O-methylated uridine with phosphorothioate linkage
  modified_base 2: mod_base = OTHER; note = 2'-fluoroadenosine with phosphorothioate linkage
  modified_base 3: mod_base = OTHER; note = 2'-O-methylcytidine
  modified_base 4: mod_base = OTHER; note = 2'-O-methylcytidine
  modified_base 5: mod_base = OTHER; note = 2'-O-methyluridine
  modified_base 6: mod_base = OTHER; note = 2'-fluoroadenosine
  modified_base 7: mod_base = OTHER; note = 2'-O-methylguanosine
  modified_base 8: mod_base = OTHER; note = 2'-O-methyluridine
  modified_base 9: mod_base = OTHER; note = 2'-O-methylcytidine
  modified_base 10: mod_base = OTHER; note = 2'-O-methylcytidine
  modified_base 11: mod_base = OTHER; note = 2'-O-methyluridine
  modified_base 12: mod_base = OTHER; note = 2'-O-methylguanosine
  modified_base 13: mod_base = OTHER; note = 2'-O-methyladenosine
  modified_base 14: mod_base = OTHER; note = 2'-fluoroadenosine
  modified_base 15: mod_base = OTHER; note = 2'-O-methylguanosine
  modified_base 16: mod_base = OTHER; note = 2'-fluoroguanosine
  modified_base 17: mod_base = OTHER; note = 2'-O-methylguanosine
  modified_base 18: mod_base = OTHER; note = 2'-O-methyladenosine
  modified_base 19: mod_base = OTHER; note = 2'-O-methyluridine
  modified_base 20: mod_base = OTHER; note = 2'-O-methyladenosine
  modified_base 21: mod_base = OTHER; note = 2'-O-methylcytidine with phosphorothioate linkage
  modified_base 22: mod_base = OTHER; note = 2'-O-methylcytidine with phosphorothioate linkage
  modified_base 23: mod_base = OTHER; note = 2'-O-methyladenosine
tacctagtcctgaagggatacca

SEQ ID NO: 1456 - RNA, 23 nt, synthetic construct
  source 1..23: mol_type = other RNA
  modified_base 1: mod_base = OTHER; note = 5'-(E)-vinylphosphonate 2'-O-methylated uridine with phosphorothioate linkage
  modified_base 2: mod_base = OTHER; note = 2'-fluoroguanosine with phosphorothioate linkage
  modified_base 3: mod_base = OTHER; note = 2'-O-methyluridine
  modified_base 4: mod_base = OTHER; note = 2'-O-methyluridine
  modified_base 5: mod_base = OTHER; note = 2'-O-methyladenosine
  modified_base 6: mod_base = OTHER; note = 2'-fluoroadenosine
  modified_base 7: mod_base = OTHER; note = 2'-O-methyladenosine
  modified_base 8: mod_base = OTHER; note = 2'-O-methylguanosine
  modified_base 9: mod_base = OTHER; note = 2'-O-methylguanosine
  modified_base 10: mod_base = OTHER; note = 2'-O-methylguanosine
  modified_base 11: mod_base = OTHER; note = 2'-O-methylguanosine
  modified_base 12: mod_base = OTHER; note = 2'-O-methyluridine
  modified_base 13: mod_base = OTHER; note = 2'-O-methyluridine
  modified_base 14: mod_base = OTHER; note = 2'-fluoroadenosine
  modified_base 15: mod_base = OTHER; note = 2'-O-methyluridine
  modified_base 16: mod_base = OTHER; note = 2'-fluorouridine
  modified_base 17: mod_base = OTHER; note = 2'-O-methylguanosine
  modified_base 18: mod_base = OTHER; note = 2'-O-methyluridine
  modified_base 19: mod_base = OTHER; note = 2'-O-methylcytidine
  modified_base 20: mod_base = OTHER; note = 2'-O-methyluridine
  modified_base 21: mod_base = OTHER; note = 2'-O-methylguanosine with phosphorothioate linkage
  modified_base 22: mod_base = OTHER; note = 2'-O-methylcytidine with phosphorothioate linkage
  modified_base 23: mod_base = OTHER; note = 2'-O-methyladenosine
tgttaaaggggttattgtctgca

SEQ ID NO: 1457 - RNA, 23 nt, synthetic construct
  source 1..23: mol_type = other RNA
  modified_base 1: mod_base = OTHER; note = 5'-(E)-vinylphosphonate 2'-O-methylated uridine with phosphorothioate linkage
  modified_base 2: mod_base = OTHER; note = 2'-fluoroguanosine with phosphorothioate linkage
  modified_base 3: mod_base = OTHER; note = 2'-O-methylguanosine
  modified_base 4: mod_base = OTHER; note = 2'-O-methyluridine
  modified_base 5: mod_base = OTHER; note = 2'-O-methyluridine
  modified_base 6: mod_base = OTHER; note = 2'-fluoroadenosine
  modified_base 7: mod_base = OTHER; note = 2'-O-methyladenosine
  modified_base 8: mod_base = OTHER; note = 2'-O-methyladenosine
  modified_base 9: mod_base = OTHER; note = 2'-O-methylguanosine
  modified_base 10: mod_base = OTHER; note = 2'-O-methylguanosine
  modified_base 11: mod_base = OTHER; note = 2'-O-methylguanosine
  modified_base 12: mod_base = OTHER; note = 2'-O-methylguanosine
  modified_base 13: mod_base = OTHER; note = 2'-O-methyluridine
  modified_base 14: mod_base = OTHER; note = 2'-fluorouridine
  modified_base 15: mod_base = OTHER; note = 2'-O-methyladenosine
  modified_base 16: mod_base = OTHER; note = 2'-fluorouridine
  modified_base 17: mod_base = OTHER; note = 2'-O-methyluridine
  modified_base 18: mod_base = OTHER; note = 2'-O-methylguanosine
  modified_base 19: mod_base = OTHER; note = 2'-O-methyluridine
  modified_base 20: mod_base = OTHER; note = 2'-O-methylcytidine
  modified_base 21: mod_base = OTHER; note = 2'-O-methyluridine with phosphorothioate linkage
  modified_base 22: mod_base = OTHER; note = 2'-O-methylguanosine with phosphorothioate linkage
  modified_base 23: mod_base = OTHER; note = 2'-O-methylcytidine
tggttaaaggggttattgtctgc

SEQ ID NO: 1458 - RNA, 23 nt, synthetic construct
  source 1..23: mol_type = other RNA
  modified_base 1: mod_base = OTHER; note = 5'-(E)-vinylphosphonate 2'-O-methylated uridine with phosphorothioate linkage
  modified_base 2: mod_base = OTHER; note = 2'-fluorouridine with phosphorothioate linkage
  modified_base 3: mod_base = OTHER; note = 2'-O-methylcytidine
  modified_base 4: mod_base = OTHER; note = 2'-O-methylguanosine
  modified_base 5: mod_base = OTHER; note = 2'-O-methyladenosine
  modified_base 6: mod_base = OTHER; note = 2'-fluorouridine
  modified_base 7: mod_base = OTHER; note = 2'-O-methyladenosine
  modified_base 8: mod_base = OTHER; note = 2'-O-methylcytidine
  modified_base 9: mod_base = OTHER; note = 2'-O-methyluridine
  modified_base 10: mod_base = OTHER; note = 2'-O-methylguanosine
  modified_base 11: mod_base = OTHER; note = 2'-O-methyladenosine
  modified_base 12: mod_base = OTHER; note = 2'-O-methyluridine
  modified_base 13: mod_base = OTHER; note = 2'-O-methylcytidine
  modified_base 14: mod_base = OTHER; note = 2'-fluorocytidine
  modified_base 15: mod_base = OTHER; note = 2'-O-methyluridine
  modified_base 16: mod_base = OTHER; note = 2'-fluoroguanosine
  modified_base 17: mod_base = OTHER; note = 2'-O-methylguanosine
  modified_base 18: mod_base = OTHER; note = 2'-O-methyluridine
  modified_base 19: mod_base = OTHER; note = 2'-O-methyladenosine
  modified_base 20: mod_base = OTHER; note = 2'-O-methyluridine
  modified_base 21: mod_base = OTHER; note = 2'-O-methyluridine with phosphorothioate linkage
  modified_base 22: mod_base = OTHER; note = 2'-O-methylcytidine with phosphorothioate linkage
  modified_base 23: mod_base = OTHER; note = 2'-O-methyluridine
ttcgatactgatcctggtattct

SEQ ID NO: 1459 - RNA, 23 nt, synthetic construct
  source 1..23: mol_type = other RNA
  modified_base 1: mod_base = OTHER; note = 5'-(E)-vinylphosphonate 2'-O-methylated uridine with phosphorothioate linkage
  modified_base 2: mod_base = OTHER; note = 2'-fluorouridine with phosphorothioate linkage
  modified_base 3: mod_base = OTHER; note = 2'-O-methylcytidine
  modified_base 4: mod_base = OTHER; note = 2'-O-methylguanosine
  modified_base 5: mod_base = OTHER; note = 2'-O-methylguanosine
  modified_base 6: mod_base = OTHER; note = 2'-fluorouridine
  modified_base 7: mod_base = OTHER; note = 2'-O-methylguanosine
  modified_base 8: mod_base = OTHER; note = 2'-O-methylguanosine
  modified_base 9: mod_base = OTHER; note = 2'-O-methyluridine
  modified_base 10: mod_base = OTHER; note = 2'-O-methylguanosine
  modified_base 11: mod_base = OTHER; note = 2'-O-methylguanosine
  modified_base 12: mod_base = OTHER; note = 2'-O-methyladenosine
  modified_base 13: mod_base = OTHER; note = 2'-O-methylcytidine
  modified_base 14: mod_base = OTHER; note = 2'-fluorouridine
  modified_base 15: mod_base = OTHER; note = 2'-O-methyladenosine
  modified_base 16: mod_base = OTHER; note = 2'-fluoroadenosine
  modified_base 17: mod_base = OTHER; note = 2'-O-methyladenosine
  modified_base 18: mod_base = OTHER; note = 2'-O-methylcytidine
  modified_base 19: mod_base = OTHER; note = 2'-O-methyladenosine
  modified_base 20: mod_base = OTHER; note = 2'-O-methylguanosine
  modified_base 21: mod_base = OTHER; note = 2'-O-methylguanosine with phosphorothioate linkage
  modified_base 22: mod_base = OTHER; note = 2'-O-methylguanosine with phosphorothioate linkage
  modified_base 23: mod_base = OTHER; note = 2'-O-methylguanosine
ttcggtggtggactaaacagggg

SEQ ID NO: 1460 - RNA, 23 nt, synthetic construct
  source 1..23: mol_type = other RNA
  modified_base 1: mod_base = OTHER; note = 5'-(E)-vinylphosphonate 2'-O-methylated uridine with phosphorothioate linkage
  modified_base 2: mod_base = OTHER; note = 2'-fluoroadenosine with phosphorothioate linkage
  modified_base 3: mod_base = OTHER; note = 2'-O-methylcytidine
  modified_base 4: mod_base = OTHER; note = 2'-O-methyluridine
  modified_base 5: mod_base = OTHER; note = 2'-O-methylcytidine
  modified_base 6: mod_base = OTHER; note = 2'-fluoroguanosine
  modified_base 7: mod_base = OTHER; note = 2'-O-methylcytidine
  modified_base 8: mod_base = OTHER; note = 2'-O-methyladenosine
  modified_base 9: mod_base = OTHER; note = 2'-O-methyluridine
  modified_base 10: mod_base = OTHER; note = 2'-O-methylguanosine
  modified_base 11: mod_base = OTHER; note = 2'-O-methyladenosine
  modified_base 12: mod_base = OTHER; note = 2'-O-methylcytidine
  modified_base 13: mod_base = OTHER; note = 2'-O-methyluridine
  modified_base 14: mod_base = OTHER; note = 2'-fluorouridine
  modified_base 15: mod_base = OTHER; note = 2'-O-methylguanosine
  modified_base 16: mod_base = OTHER; note = 2'-fluoroguanosine
  modified_base 17: mod_base = OTHER; note = 2'-O-methyladenosine
  modified_base 18: mod_base = OTHER; note = 2'-O-methylcytidine
  modified_base 19: mod_base = OTHER; note = 2'-O-methyluridine
  modified_base 20: mod_base = OTHER; note = 2'-O-methyluridine
  modified_base 21: mod_base = OTHER; note = 2'-O-methylguanosine with phosphorothioate linkage
  modified_base 22: mod_base = OTHER; note = 2'-O-methyladenosine with phosphorothioate linkage
  modified_base 23: mod_base = OTHER; note = 2'-O-methylcytidine
tactcgcatgacttggacttgac

SEQ ID NO: 1461 - RNA, 23 nt, synthetic construct
  source 1..23: mol_type = other RNA
  modified_base 1: mod_base = OTHER; note = 5'-(E)-vinylphosphonate 2'-O-methylated uridine with phosphorothioate linkage
  modified_base 2: mod_base = OTHER; note = 2'-fluoroadenosine with phosphorothioate linkage
  modified_base 3: mod_base = OTHER; note = 2'-O-methyladenosine
  modified_base 4: mod_base = OTHER; note = 2'-O-methylcytidine
  modified_base 5: mod_base = OTHER; note = 2'-O-methyluridine
  modified_base 6: mod_base = OTHER; note = 2'-fluorocytidine
  modified_base 7: mod_base = OTHER; note = 2'-O-methylguanosine
  modified_base 8: mod_base = OTHER; note = 2'-O-methylcytidine
  modified_base 9: mod_base = OTHER; note = 2'-O-methyladenosine
  modified_base 10: mod_base = OTHER; note = 2'-O-methyluridine
  modified_base 11: mod_base = OTHER; note = 2'-O-methylguanosine
  modified_base 12: mod_base = OTHER; note = 2'-O-methyladenosine
  modified_base 13: mod_base = OTHER; note = 2'-O-methylcytidine
  modified_base 14: mod_base = OTHER; note = 2'-fluorouridine
  modified_base 15: mod_base = OTHER; note = 2'-O-methyluridine
  modified_base 16: mod_base = OTHER; note = 2'-fluoroguanosine
  modified_base 17: mod_base = OTHER; note = 2'-O-methylguanosine
  modified_base 18: mod_base = OTHER; note = 2'-O-methyladenosine
  modified_base 19: mod_base = OTHER; note = 2'-O-methylcytidine
  modified_base 20: mod_base = OTHER; note = 2'-O-methyluridine
  modified_base 21: mod_base = OTHER; note = 2'-O-methyluridine with phosphorothioate linkage
  modified_base 22: mod_base = OTHER; note = 2'-O-methylguanosine with phosphorothioate linkage
  modified_base 23: mod_base = OTHER; note = 2'-O-methyladenosine
taactcgcatgacttggacttga

SEQ ID NO: 1462 - RNA, 23 nt, synthetic construct
  source 1..23: mol_type = other RNA
  modified_base 1: mod_base = OTHER; note = 5'-(E)-vinylphosphonate 2'-O-methylated uridine with phosphorothioate linkage
  modified_base 2: mod_base = OTHER; note = 2'-fluoroguanosine with phosphorothioate linkage
  modified_base 3: mod_base = OTHER; note = 2'-O-methylguanosine
  modified_base 4: mod_base = OTHER; note = 2'-O-methylguanosine
  modified_base 5: mod_base = OTHER; note = 2'-O-methyluridine
  modified_base 6: mod_base = OTHER; note = 2'-fluoroguanosine
  modified_base 7: mod_base = OTHER; note = 2'-O-methylcytidine
  modified_base 8: mod_base = OTHER; note = 2'-O-methyladenosine
  modified_base 9: mod_base = OTHER; note = 2'-O-methylcytidine
  modified_base 10: mod_base = OTHER; note = 2'-O-methylguanosine
  modified_base 11: mod_base = OTHER; note = 2'-O-methylcytidine
  modified_base 12: mod_base = OTHER; note = 2'-O-methylguanosine
  modified_base 13: mod_base = OTHER; note = 2'-O-methyluridine
  modified_base 14: mod_base = OTHER; note = 2'-fluoroguanosine
  modified_base 15: mod_base = OTHER; note = 2'-O-methylguanosine
  modified_base 16: mod_base = OTHER; note = 2'-fluorouridine
  modified_base 17: mod_base = OTHER; note = 2'-O-methylcytidine
  modified_base 18: mod_base = OTHER; note = 2'-O-methylguanosine
  modified_base 19: mod_base = OTHER; note = 2'-O-methylcytidine
  modified_base 20: mod_base = OTHER; note = 2'-O-methyladenosine
  modified_base 21: mod_base = OTHER; note = 2'-O-methylcytidine with phosphorothioate linkage
  modified_base 22: mod_base = OTHER; note = 2'-O-methyladenosine with phosphorothioate linkage
  modified_base 23: mod_base = OTHER; note = 2'-O-methylguanosine
tgggtgcacgcgtggtcgcacag

SEQ ID NO: 1463 - RNA, 23 nt, synthetic construct
  source 1..23: mol_type = other RNA
  modified_base 1: mod_base = OTHER; note = 5'-(E)-vinylphosphonate 2'-O-methylated uridine with phosphorothioate linkage
  modified_base 2: mod_base = OTHER; note = 2'-fluoroguanosine with phosphorothioate linkage
  modified_base 3: mod_base = OTHER; note = 2'-O-methyluridine
  modified_base 4: mod_base = OTHER; note = 2'-O-methylcytidine
  modified_base 5: mod_base = OTHER; note = 2'-O-methylguanosine
  modified_base 6: mod_base = OTHER; note = 2'-fluoroguanosine
  modified_base 7: mod_base = OTHER; note = 2'-O-methyladenosine
  modified_base 8: mod_base = OTHER; note = 2'-O-methylcytidine
  modified_base 9: mod_base = OTHER; note = 2'-O-methyluridine
  modified_base 10: mod_base = OTHER; note = 2'-O-methyluridine
  modified_base 11: mod_base = OTHER; note = 2'-O-methylguanosine
  modified_base 12: mod_base = OTHER; note = 2'-O-methyladenosine
  modified_base 13: mod_base = OTHER; note = 2'-O-methylcytidine
  modified_base 14: mod_base = OTHER; note = 2'-fluorocytidine
  modified_base 15: mod_base = OTHER; note = 2'-O-methylguanosine
  modified_base 16: mod_base = OTHER; note = 2'-fluorouridine
  modified_base 17: mod_base = OTHER; note = 2'-O-methylcytidine
  modified_base 18: mod_base = OTHER; note = 2'-O-methyladenosine
  modified_base 19: mod_base = OTHER; note = 2'-O-methyluridine
  modified_base 20: mod_base = OTHER; note = 2'-O-methylguanosine
  modified_base 21: mod_base = OTHER; note = 2'-O-methylguanosine with phosphorothioate linkage
  modified_base 22: mod_base = OTHER; note = 2'-O-methylguanosine with phosphorothioate linkage
  modified_base 23: mod_base = OTHER; note = 2'-O-methylguanosine
tgtcggacttgaccgtcatgggg

SEQ ID NO: 1464 - RNA, 23 nt, synthetic construct
  source 1..23: mol_type = other RNA
  modified_base 1: mod_base = OTHER; note = 5'-(E)-vinylphosphonate 2'-O-methylated uridine with phosphorothioate linkage
  modified_base 2: mod_base = OTHER; note = 2'-fluorouridine with phosphorothioate linkage
  modified_base 3: mod_base = OTHER; note = 2'-O-methylcytidine
  modified_base 4: mod_base = OTHER; note = 2'-O-methylguanosine
  modified_base 5: mod_base = OTHER; note = 2'-O-methyluridine
  modified_base 6: mod_base = OTHER; note = 2'-fluorocytidine
  modified_base 7: mod_base = OTHER; note = 2'-O-methylguanosine
  modified_base 8: mod_base = OTHER; note = 2'-O-methylguanosine
  modified_base 9: mod_base = OTHER; note = 2'-O-methyladenosine
  modified_base 10: mod_base = OTHER; note = 2'-O-methylcytidine
  modified_base 11: mod_base = OTHER; note = 2'-O-methyluridine
  modified_base 12: mod_base = OTHER; note = 2'-O-methyluridine
  modified_base 13: mod_base = OTHER; note = 2'-O-methylguanosine
  modified_base 14: mod_base = OTHER; note = 2'-fluoroadenosine
  modified_base 15: mod_base = OTHER; note = 2'-O-methylcytidine
  modified_base 16: mod_base = OTHER; note = 2'-fluorocytidine
  modified_base 17: mod_base = OTHER; note = 2'-O-methylguanosine
  modified_base 18: mod_base = OTHER; note = 2'-O-methyluridine
  modified_base 19: mod_base = OTHER; note = 2'-O-methylcytidine
  modified_base 20: mod_base = OTHER; note = 2'-O-methyladenosine
  modified_base 21: mod_base = OTHER; note = 2'-O-methyluridine with phosphorothioate linkage
  modified_base 22: mod_base = OTHER; note = 2'-O-methylguanosine with phosphorothioate linkage
  modified_base 23: mod_base = OTHER; note = 2'-O-methylguanosine
ttcgtcggacttgaccgtcatgg

SEQ ID NO: 1465 - RNA, 23 nt, synthetic construct
  source 1..23: mol_type = other RNA
  modified_base 1: mod_base = OTHER; note = 5'-(E)-vinylphosphonate 2'-O-methylated uridine with phosphorothioate linkage
  modified_base 2: mod_base = OTHER; note = 2'-fluoroguanosine with phosphorothioate linkage
  modified_base 3: mod_base = OTHER; note = 2'-O-methyluridine
  modified_base 4: mod_base = OTHER; note = 2'-O-methylcytidine
  modified_base 5: mod_base = OTHER; note = 2'-O-methylguanosine
  modified_base 6: mod_base = OTHER; note = 2'-fluorouridine
  modified_base 7: mod_base = OTHER; note = 2'-O-methylcytidine
  modified_base 8: mod_base = OTHER; note = 2'-O-methylguanosine
  modified_base 9: mod_base = OTHER; note = 2'-O-methylguanosine
  modified_base 10: mod_base = OTHER; note = 2'-O-methyladenosine
  modified_base 11: mod_base = OTHER; note = 2'-O-methylcytidine
  modified_base 12: mod_base = OTHER; note = 2'-O-methyluridine
  modified_base 13: mod_base = OTHER; note = 2'-O-methyluridine
  modified_base 14: mod_base = OTHER; note = 2'-fluoroguanosine
  modified_base 15: mod_base = OTHER; note = 2'-O-methyladenosine
  modified_base 16: mod_base = OTHER; note = 2'-fluorocytidine
  modified_base 17: mod_base = OTHER; note = 2'-O-methylcytidine
  modified_base 18: mod_base = OTHER; note = 2'-O-methylguanosine
  modified_base 19: mod_base = OTHER; note = 2'-O-methyluridine
  modified_base 20: mod_base = OTHER; note = 2'-O-methylcytidine
  modified_base 21: mod_base = OTHER; note = 2'-O-methyladenosine with phosphorothioate linkage
  modified_base 22: mod_base = OTHER; note = 2'-O-methyluridine with phosphorothioate linkage
  modified_base 23: mod_base = OTHER; note = 2'-O-methylguanosine
tgtcgtcggacttgaccgtcatg

SEQ ID NO: 1466 - RNA, 23 nt, synthetic construct
  source 1..23: mol_type = other RNA
  modified_base 1: mod_base = OTHER; note = 5'-(E)-vinylphosphonate 2'-O-methylated uridine with phosphorothioate linkage
  modified_base 2: mod_base = OTHER; note = 2'-fluorocytidine with phosphorothioate linkage
  modified_base 3: mod_base = OTHER; note = 2'-O-methylguanosine
  modified_base 4: mod_base = OTHER; note = 2'-O-methyluridine
  modified_base 5: mod_base = OTHER; note = 2'-O-methylcytidine
  modified_base 6: mod_base = OTHER; note = 2'-fluoroguanosine
  modified_base 7: mod_base = OTHER; note = 2'-O-methyluridine
  modified_base 8: mod_base = OTHER; note = 2'-O-methylcytidine
  modified_base 9: mod_base = OTHER; note = 2'-O-methylguanosine
  modified_base 10: mod_base = OTHER; note = 2'-O-methylguanosine
  modified_base 11: mod_base = OTHER; note = 2'-O-methyladenosine
  modified_base 12: mod_base = OTHER; note = 2'-O-methylcytidine
  modified_base 13: mod_base = OTHER; note = 2'-O-methyluridine
  modified_base 14: mod_base = OTHER; note = 2'-fluorouridine
  modified_base 15: mod_base = OTHER; note = 2'-O-methylguanosine
  modified_base 16: mod_base = OTHER; note = 2'-fluoroadenosine
  modified_base 17: mod_base = OTHER; note = 2'-O-methylcytidine
  modified_base 18: mod_base = OTHER; note = 2'-O-methylcytidine
  modified_base 19: mod_base = OTHER; note = 2'-O-methylguanosine
  modified_base 20: mod_base = OTHER; note = 2'-O-methyluridine
  modified_base 21: mod_base = OTHER; note = 2'-O-methylcytidine with phosphorothioate linkage
  modified_base 22: mod_base = OTHER; note = 2'-O-methyladenosine with phosphorothioate linkage
  modified_base 23: mod_base = OTHER; note = 2'-O-methyluridine
tcgtcgtcggacttgaccgtcat

SEQ ID NO: 1467 - RNA, 23 nt, synthetic construct
  source 1..23: mol_type = other RNA
  modified_base 1: mod_base = OTHER; note = 5'-(E)-vinylphosphonate 2'-O-methylated uridine with phosphorothioate linkage
  modified_base 2: mod_base = OTHER; note = 2'-fluorocytidine with phosphorothioate linkage
  modified_base 3: mod_base = OTHER; note = 2'-O-methylcytidine
  modified_base 4: mod_base = OTHER; note = 2'-O-methylguanosine
  modified_base 5: mod_base = OTHER; note = 2'-O-methyluridine
  modified_base 6: mod_base = OTHER; note = 2'-fluorocytidine
  modified_base 7: mod_base = OTHER; note = 2'-O-methylguanosine
  modified_base 8: mod_base = OTHER; note = 2'-O-methyluridine
  modified_base 9: mod_base = OTHER; note = 2'-O-methylcytidine
  modified_base 10: mod_base = OTHER; note = 2'-O-methylguanosine
  modified_base 11: mod_base = OTHER; note = 2'-O-methylguanosine
  modified_base 12: mod_base = OTHER; note = 2'-O-methyladenosine
  modified_base 13: mod_base = OTHER; note = 2'-O-methylcytidine
  modified_base 14: mod_base = OTHER; note = 2'-fluorouridine
  modified_base 15: mod_base = OTHER; note = 2'-O-methyluridine
  modified_base 16: mod_base = OTHER; note = 2'-fluoroguanosine
  modified_base 17: mod_base = OTHER; note = 2'-O-methyladenosine
  modified_base 18: mod_base = OTHER; note = 2'-O-methylcytidine
  modified_base 19: mod_base = OTHER; note = 2'-O-methylcytidine
  modified_base 20: mod_base = OTHER; note = 2'-O-methylguanosine
  modified_base 21: mod_base = OTHER; note = 2'-O-methyluridine with phosphorothioate linkage
  modified_base 22: mod_base = OTHER; note = 2'-O-methylcytidine with phosphorothioate linkage
  modified_base 23: mod_base = OTHER; note = 2'-O-methyladenosine
tccgtcgtcggacttgaccgtca

SEQ ID NO: 1468 - RNA, 23 nt, synthetic construct
  source 1..23: mol_type = other RNA
  modified_base 1: mod_base = OTHER; note = 5'-(E)-vinylphosphonate 2'-O-methylated uridine with phosphorothioate linkage
  modified_base 2: mod_base = OTHER; note = 2'-fluoroadenosine with phosphorothioate linkage
  modified_base 3: mod_base = OTHER; note = 2'-O-methylcytidine
  modified_base 4: mod_base = OTHER; note = 2'-O-methylcytidine
  modified_base 5: mod_base = OTHER; note = 2'-O-methylguanosine
  modified_base 6: mod_base = OTHER; note = 2'-fluorouridine
  modified_base 7: mod_base = OTHER; note = 2'-O-methylcytidine
  modified_base 8: mod_base = OTHER; note = 2'-O-methylguanosine
  modified_base 9: mod_base = OTHER; note = 2'-O-methyluridine
  modified_base 10: mod_base = OTHER; note = 2'-O-methylcytidine
  modified_base 11: mod_base = OTHER; note = 2'-O-methylguanosine
  modified_base 12: mod_base = OTHER; note = 2'-O-methylguanosine
  modified_base 13: mod_base = OTHER; note = 2'-O-methyladenosine
  modified_base 14: mod_base = OTHER; note = 2'-fluorocytidine
  modified_base 15: mod_base = OTHER; note = 2'-O-methyluridine
  modified_base 16: mod_base = OTHER; note = 2'-fluorouridine
  modified_base 17: mod_base = OTHER; note = 2'-O-methylguanosine
  modified_base 18: mod_base = OTHER; note = 2'-O-methyladenosine
  modified_base 19: mod_base = OTHER; note = 2'-O-methylcytidine
  modified_base 20: mod_base = OTHER; note = 2'-O-methylcytidine
  modified_base 21: mod_base = OTHER; note = 2'-O-methylguanosine with phosphorothioate linkage
  modified_base 22: mod_base = OTHER; note = 2'-O-methyluridine with phosphorothioate linkage
  modified_base 23: mod_base = OTHER; note = 2'-O-methylcytidine
taccgtcgtcggacttgaccgtc

SEQ ID NO: 1469 - RNA, 23 nt, synthetic construct
  source 1..23: mol_type = other RNA
  modified_base 1: mod_base = OTHER; note = 5'-(E)-vinylphosphonate 2'-O-methylated uridine with phosphorothioate linkage
  modified_base 2: mod_base = OTHER; note = 2'-fluoroguanosine with phosphorothioate linkage
  modified_base 3: mod_base = OTHER; note = 2'-O-methyladenosine
  modified_base 4: mod_base = OTHER; note = 2'-O-methylcytidine
  modified_base 5: mod_base = OTHER; note = 2'-O-methylcytidine
  modified_base 6: mod_base = OTHER; note = 2'-fluoroguanosine
  modified_base 7: mod_base = OTHER; note = 2'-O-methyluridine
  modified_base 8: mod_base = OTHER; note = 2'-O-methylcytidine
  modified_base 9: mod_base = OTHER; note = 2'-O-methylguanosine
  modified_base 10: mod_base = OTHER; note = 2'-O-methyluridine
  modified_base 11: mod_base = OTHER; note = 2'-O-methylcytidine
  modified_base 12: mod_base = OTHER; note = 2'-O-methylguanosine
  modified_base 13: mod_base = OTHER; note = 2'-O-methylguanosine
  modified_base 14: mod_base = OTHER; note = 2'-fluoroadenosine
  modified_base 15: mod_base = OTHER; note = 2'-O-methylcytidine
  modified_base 16: mod_base = OTHER; note = 2'-fluorouridine
  modified_base 17: mod_base = OTHER; note = 2'-O-methyluridine
  modified_base 18: mod_base = OTHER; note = 2'-O-methylguanosine
  modified_base 19: mod_base = OTHER; note = 2'-O-methyladenosine
  modified_base 20: mod_base = OTHER; note = 2'-O-methylcytidine
  modified_base 21: mod_base = OTHER; note = 2'-O-methylcytidine with phosphorothioate linkage
  modified_base 22: mod_base = OTHER; note = 2'-O-methylguanosine with phosphorothioate linkage
  modified_base 23: mod_base = OTHER; note = 2'-O-methyluridine
tgaccgtcgtcggacttgaccgt

SEQ ID NO: 1470 - RNA, 23 nt, synthetic construct
  source 1..23: mol_type = other RNA
  modified_base 1: mod_base = OTHER; note = 5'-(E)-vinylphosphonate 2'-O-methylated uridine with phosphorothioate linkage
  modified_base 2: mod_base = OTHER; note = 2'-fluoroadenosine with phosphorothioate linkage
  modified_base 3: mod_base = OTHER; note = 2'-O-methylguanosine
  modified_base 4: mod_base = OTHER; note = 2'-O-methyladenosine
  modified_base 5: mod_base = OTHER; note = 2'-O-methylguanosine
  modified_base 6: mod_base = OTHER; note = 2'-fluoroadenosine
  modified_base 7: mod_base = OTHER; note = 2'-O-methylcytidine
  modified_base 8: mod_base = OTHER; note = 2'-O-methylcytidine
  modified_base 9: mod_base = OTHER; note = 2'-O-methylguanosine
  modified_base 10: mod_base = OTHER; note = 2'-O-methyluridine
  modified_base 11: mod_base = OTHER; note = 2'-O-methylcytidine
  modified_base 12: mod_base = OTHER; note = 2'-O-methylguanosine
  modified_base 13: mod_base = OTHER; note = 2'-O-methyluridine
  modified_base 14: mod_base = OTHER; note = 2'-fluorocytidine
  modified_base 15: mod_base = OTHER; note = 2'-O-methylguanosine
  modified_base 16: mod_base = OTHER; note = 2'-fluoroguanosine
  modified_base 17: mod_base = OTHER; note = 2'-O-methyladenosine
  modified_base 18: mod_base = OTHER; note = 2'-O-methylcytidine
  modified_base 19: mod_base = OTHER; note = 2'-O-methyluridine
  modified_base 20: mod_base = OTHER; note = 2'-O-methyluridine
  modified_base 21: mod_base = OTHER; note = 2'-O-methylguanosine with phosphorothioate linkage
  modified_base 22: mod_base = OTHER; note = 2'-O-methyladenosine with phosphorothioate linkage
  modified_base 23: mod_base = OTHER; note = 2'-O-methylcytidine
tagagaccgtcgtcggacttgac

SEQ ID NO: 1471 - RNA, 23 nt, synthetic construct
  source 1..23: mol_type = other RNA
  modified_base 1: mod_base = OTHER; note = 5'-(E)-vinylphosphonate 2'-O-methylated uridine with phosphorothioate linkage
  modified_base 2: mod_base = OTHER; note = 2'-fluoroadenosine with phosphorothioate linkage
  modified_base 3: mod_base = OTHER; note = 2'-O-methylcytidine
  modified_base 4: mod_base = OTHER; note = 2'-O-methylguanosine
  modified_base 5: mod_base = OTHER; note = 2'-O-methylguanosine
  modified_base 6: mod_base = OTHER; note = 2'-fluoroadenosine
  modified_base 7: mod_base = OTHER; note = 2'-O-methylcytidine
  modified_base 8: mod_base = OTHER; note = 2'-O-methyluridine
  modified_base 9: mod_base = OTHER; note = 2'-O-methyluridine
  modified_base 10: mod_base = OTHER; note = 2'-O-methylguanosine
  modified_base 11: mod_base = OTHER; note = 2'-O-methyladenosine
  modified_base 12: mod_base = OTHER; note = 2'-O-methylguanosine
  modified_base 13: mod_base = OTHER; note = 2'-O-methylcytidine
  modified_base 14: mod_base = OTHER; note = 2'-fluoroguanosine
  modified_base 15: mod_base = OTHER; note = 2'-O-methylcytidine
  modified_base 16: mod_base = OTHER; note = 2'-fluoroguanosine
  modified_base 17: mod_base = OTHER; note = 2'-O-methylcytidine
  modified_base 18: mod_base = OTHER; note = 2'-O-methyluridine
  modified_base 19: mod_base = OTHER; note = 2'-O-methylguanosine
  modified_base 20: mod_base = OTHER; note = 2'-O-methylcytidine
  modified_base 21: mod_base = OTHER; note = 2'-O-methyluridine with phosphorothioate linkage
  modified_base 22: mod_base = OTHER; note = 2'-O-methylguanosine with phosphorothioate linkage
  modified_base 23: mod_base = OTHER; note = 2'-O-methylguanosine
tacggacttgagcgcgctgctgg

SEQ ID NO: 1472 - RNA, 23 nt, synthetic construct
  source 1..23: mol_type = other RNA
  modified_base 1: mod_base = OTHER; note = 5'-(E)-vinylphosphonate 2'-O-methylated uridine with phosphorothioate linkage
  modified_base 2: mod_base = OTHER; note = 2'-fluorocytidine with phosphorothioate linkage
  modified_base 3: mod_base = OTHER; note = 2'-O-methyladenosine
  modified_base 4: mod_base = OTHER; note = 2'-O-methylcytidine
  modified_base 5: mod_base = OTHER; note = 2'-O-methylguanosine
  modified_base 6: mod_base = OTHER; note = 2'-fluoroguanosine
  modified_base 7: mod_base = OTHER; note = 2'-O-methyladenosine
  modified_base 8: mod_base = OTHER; note = 2'-O-methylcytidine
  modified_base 9: mod_base = OTHER; note = 2'-O-methyluridine
  modified_base 10: mod_base = OTHER; note = 2'-O-methyluridine
  modified_base 11: mod_base = OTHER; note = 2'-O-methylguanosine
  modified_base 12: mod_base = OTHER; note = 2'-O-methyladenosine
  modified_base 13: mod_base = OTHER; note = 2'-O-methylguanosine
  modified_base 14: mod_base = OTHER; note = 2'-fluorocytidine
  modified_base 15: mod_base = OTHER; note = 2'-O-methylguanosine
  modified_base 16: mod_base = OTHER; note = 2'-fluorocytidine
  modified_base 17: mod_base = OTHER; note = 2'-O-methylguanosine
  modified_base 18: mod_base = OTHER; note = 2'-O-methylcytidine
  modified_base 19: mod_base = OTHER; note = 2'-O-methyluridine
  modified_base 20: mod_base = OTHER; note = 2'-O-methylguanosine
  modified_base 21: mod_base = OTHER; note = 2'-O-methylcytidine with phosphorothioate linkage
  modified_base 22: mod_base = OTHER; note = 2'-O-methyluridine with phosphorothioate linkage
  modified_base 23: mod_base = OTHER; note = 2'-O-methylguanosine
tcacggacttgagcgcgctgctg

SEQ ID NO: 1473 - RNA, 23 nt, synthetic construct
  source 1..23: mol_type = other RNA
  modified_base 1: mod_base = OTHER; note = 5'-(E)-vinylphosphonate 2'-O-methylated uridine with phosphorothioate linkage
  modified_base 2: mod_base = OTHER; note = 2'-fluoroadenosine with phosphorothioate linkage
  modified_base 3: mod_base = OTHER; note = 2'-O-methyluridine
  modified_base 4: mod_base = OTHER; note = 2'-O-methylcytidine
  modified_base 5: mod_base = OTHER; note = 2'-O-methyladenosine
  modified_base 6: mod_base = OTHER; note = 2'-fluoroguanosine
  modified_base 7: mod_base = OTHER; note = 2'-O-methylguanosine
  modified_base 8: mod_base = OTHER; note = 2'-O-methyluridine
  modified_base 9: mod_base = OTHER; note = 2'-O-methyluridine
  modified_base 10: mod_base = OTHER; note = 2'-O-methylguanosine
  modified_base 11: mod_base = OTHER; note = 2'-O-methylguanosine
  modified_base 12: mod_base = OTHER; note = 2'-O-methylguanosine
  modified_base 13: mod_base = OTHER; note = 2'-O-methylguanosine
  modified_base 14: mod_base = OTHER; note = 2'-fluorouridine
  modified_base 15: mod_base = OTHER; note = 2'-O-methylcytidine
  modified_base 16: mod_base = OTHER; note = 2'-fluoroguanosine
  modified_base 17: mod_base = OTHER; note = 2'-O-methyluridine
  modified_base 18: mod_base = OTHER; note = 2'-O-methyluridine
  modified_base 19: mod_base = OTHER; note = 2'-O-methylcytidine
  modified_base 20: mod_base = OTHER; note = 2'-O-methyluridine
  modified_base 21: mod_base = OTHER; note = 2'-O-methylcytidine with phosphorothioate linkage
  modified_base 22: mod_base = OTHER; note = 2'-O-methylguanosine with phosphorothioate linkage
  modified_base 23: mod_base = OTHER; note = 2'-O-methylcytidine
tatcaggttggggtcgttctcgc

SEQ ID NO: 1474 - RNA, 23 nt, synthetic construct
  source 1..23: mol_type = other RNA
  modified_base 1: mod_base = OTHER; note = 5'-(E)-vinylphosphonate 2'-O-methylated uridine with phosphorothioate linkage
  modified_base 2: mod_base = OTHER; note = 2'-fluoroadenosine with phosphorothioate linkage
  modified_base 3: mod_base = OTHER; note = 2'-O-methylcytidine
  modified_base 4: mod_base = OTHER; note = 2'-O-methylcytidine
  modified_base 5: mod_base = OTHER; note = 2'-O-methylcytidine
  modified_base 6: mod_base = OTHER; note = 2'-fluorouridine
  modified_base 7: mod_base = OTHER; note = 2'-O-methylcytidine
  modified_base 8: mod_base = OTHER; note = 2'-O-methyluridine
  modified_base 9: mod_base = OTHER; note = 2'-O-methylcytidine
  modified_base 10: mod_base = OTHER; note = 2'-O-methylguanosine
  modified_base 11: mod_base = OTHER; note = 2'-O-methylcytidine
  modified_base 12: mod_base = OTHER; note = 2'-O-methyluridine
  modified_base 13: mod_base = OTHER; note = 2'-O-methylcytidine
  modified_base 14: mod_base = OTHER; note = 2'-fluorouridine
  modified_base 15: mod_base = OTHER; note = 2'-O-methylcytidine
  modified_base 16: mod_base = OTHER; note = 2'-fluorocytidine
  modified_base 17: mod_base = OTHER; note = 2'-O-methylguanosine
  modified_base 18: mod_base = OTHER; note = 2'-O-methyluridine
  modified_base 19: mod_base = OTHER; note = 2'-O-methylcytidine
  modified_base 20: mod_base = OTHER; note = 2'-O-methyladenosine
  modified_base 21: mod_base = OTHER; note = 2'-O-methylguanosine with phosphorothioate linkage
  modified_base 22: mod_base = OTHER; note = 2'-O-methylcytidine with phosphorothioate linkage
  modified_base 23: mod_base = OTHER; note = 2'-O-methyluridine
taccctctcgctctccgtcagct

SEQ ID NO: 1475 - RNA, 23 nt, synthetic construct
  source 1..23: mol_type = other RNA
  modified_base 1: mod_base = OTHER; note = 5'-(E)-vinylphosphonate 2'-O-methylated uridine with phosphorothioate linkage
  modified_base 2: mod_base = OTHER; note = 2'-fluoroguanosine with phosphorothioate linkage
  modified_base 3: mod_base = OTHER; note = 2'-O-methyluridine
  modified_base 4: mod_base = OTHER; note = 2'-O-methyladenosine
  modified_base 5: mod_base = OTHER; note = 2'-O-methylguanosine
  modified_base 6: mod_base = OTHER; note = 2'-fluorouridine
  modified_base 7: mod_base = OTHER; note = 2'-O-methylcytidine
  modified_base 8: mod_base = OTHER; note = 2'-O-methylcytidine
  modified_base 9: mod_base = OTHER; note = 2'-O-methyladenosine
  modified_base 10: mod_base = OTHER; note = 2'-O-methylcytidine
  modified_base 11: mod_base = OTHER; note = 2'-O-methylcytidine
  modified_base 12: mod_base = OTHER; note = 2'-O-methylcytidine
  modified_base 13: mod_base = OTHER; note = 2'-O-methyluridine
  modified_base 14: mod_base = OTHER; note = 2'-fluorocytidine
  modified_base 15: mod_base = OTHER; note = 2'-O-methyluridine
  modified_base 16: mod_base = OTHER; note = 2'-fluorocytidine
  modified_base 17: mod_base = OTHER; note = 2'-O-methylguanosine
  modified_base 18: mod_base = OTHER; note = 2'-O-methylcytidine
  modified_base 19: mod_base = OTHER; note = 2'-O-methyluridine
  modified_base 20: mod_base = OTHER; note = 2'-O-methylcytidine
  modified_base 21: mod_base = OTHER; note = 2'-O-methyluridine with phosphorothioate linkage
  modified_base 22: mod_base = OTHER; note = 2'-O-methylcytidine with phosphorothioate linkage
  modified_base 23: mod_base = OTHER; note = 2'-O-methylcytidine
tgtagtccaccctctcgctctcc

SEQ ID NO: 1476 - RNA, 23 nt, synthetic construct
  source 1..23: mol_type = other RNA
  modified_base 1: mod_base = OTHER; note = 5'-(E)-vinylphosphonate 2'-O-methylated uridine with phosphorothioate linkage
  modified_base 2: mod_base = OTHER; note = 2'-fluoroguanosine with phosphorothioate linkage
  modified_base 3: mod_base = OTHER; note = 2'-O-methylcytidine
  modified_base 4: mod_base = OTHER; note = 2'-O-methylcytidine
  modified_base 5: mod_base = OTHER; note = 2'-O-methylguanosine
  modified_base 6: mod_base = OTHER; note = 2'-fluorouridine
  modified_base 7: mod_base = OTHER; note = 2'-O-methyladenosine
  modified_base 8: mod_base = OTHER; note = 2'-O-methylguanosine
  modified_base 9: mod_base = OTHER; note = 2'-O-methyluridine
  modified_base 10: mod_base = OTHER; note = 2'-O-methylcytidine
  modified_base 11: mod_base = OTHER; note = 2'-O-methylcytidine
  modified_base 12: mod_base = OTHER; note = 2'-O-methyladenosine
  modified_base 13: mod_base = OTHER; note = 2'-O-methylcytidine
  modified_base 14: mod_base = OTHER; note = 2'-fluorocytidine
  modified_base 15: mod_base = OTHER; note = 2'-O-methylcytidine
  modified_base 16: mod_base = OTHER; note = 2'-fluorouridine
  modified_base 17: mod_base = OTHER; note = 2'-O-methylcytidine
  modified_base 18: mod_base = OTHER; note = 2'-O-methyluridine
  modified_base 19: mod_base = OTHER; note = 2'-O-methylcytidine
  modified_base 20: mod_base = OTHER; note = 2'-O-methylguanosine
  modified_base 21: mod_base = OTHER; note = 2'-O-methylcytidine with phosphorothioate linkage
  modified_base 22: mod_base = OTHER; note = 2'-O-methyluridine with phosphorothioate linkage
  modified_base 23: mod_base = OTHER; note = 2'-O-methylcytidine
tgccgtagtccaccctctcgctc

SEQ ID NO: 1477 - RNA, 23 nt, synthetic construct
  source 1..23: mol_type = other RNA
  modified_base 1: mod_base = OTHER; note = 5'-(E)-vinylphosphonate 2'-O-methylated uridine with phosphorothioate linkage
  modified_base 2: mod_base = OTHER; note = 2'-fluoroadenosine with phosphorothioate linkage
  modified_base 3: mod_base = OTHER; note = 2'-O-methylguanosine
  modified_base 4: mod_base = OTHER; note = 2'-O-methylcytidine
  modified_base 5: mod_base = OTHER; note = 2'-O-methylcytidine
  modified_base 6: mod_base = OTHER; note = 2'-fluoroguanosine
  modified_base 7: mod_base = OTHER; note = 2'-O-methyluridine
  modified_base 8: mod_base = OTHER; note = 2'-O-methyladenosine
  modified_base 9: mod_base = OTHER; note = 2'-O-methylguanosine
  modified_base 10: mod_base = OTHER; note = 2'-O-methyluridine
  modified_base 11: mod_base = OTHER; note = 2'-O-methylcytidine
  modified_base 12: mod_base = OTHER; note = 2'-O-methylcytidine
  modified_base 13: mod_base = OTHER; note = 2'-O-methyladenosine
  modified_base 14: mod_base = OTHER; note = 2'-fluorocytidine
  modified_base 15: mod_base = OTHER; note = 2'-O-methylcytidine
  modified_base 16: mod_base = OTHER; note = 2'-fluorocytidine
  modified_base 17: mod_base = OTHER; note = 2'-O-methyluridine
  modified_base 18: mod_base = OTHER; note = 2'-O-methylcytidine
  modified_base 19: mod_base = OTHER; note = 2'-O-methyluridine
  modified_base 20: mod_base = OTHER; note = 2'-O-methylcytidine
  modified_base 21: mod_base = OTHER; note = 2'-O-methylguanosine with phosphorothioate linkage
  modified_base 22: mod_base = OTHER; note = 2'-O-methylcytidine with phosphorothioate linkage
  modified_base 23: mod_base = OTHER; note = 2'-O-methyluridine
tagccgtagtccaccctctcgct

SEQ ID NO: 1478 - RNA, 23 nt, synthetic construct
  source 1..23: mol_type = other RNA
  modified_base 1: mod_base = OTHER; note = 5'-(E)-vinylphosphonate 2'-O-methylated uridine with phosphorothioate linkage
  modified_base 2: mod_base = OTHER; note = 2'-fluorocytidine with phosphorothioate linkage
  modified_base 3: mod_base = OTHER; note = 2'-O-methylguanosine
  modified_base 4: mod_base = OTHER; note = 2'-O-methyladenosine
  modified_base 5: mod_base = OTHER; note = 2'-O-methyladenosine
  modified_base 6: mod_base = OTHER; note = 2'-fluoroguanosine
  modified_base 7: mod_base = OTHER; note = 2'-O-methylcytidine
  modified_base 8: mod_base = OTHER; note = 2'-O-methylcytidine
  modified_base 9: mod_base = OTHER; note = 2'-O-methylguanosine
  modified_base 10: mod_base = OTHER; note = 2'-O-methyluridine
  modified_base 11: mod_base = OTHER; note = 2'-O-methyladenosine
  modified_base 12: mod_base = OTHER; note = 2'-O-methylguanosine
  modified_base 13: mod_base = OTHER; note = 2'-O-methyluridine
  modified_base 14: mod_base = OTHER; note = 2'-fluorocytidine
  modified_base 15: mod_base = OTHER; note = 2'-O-methylcytidine
  modified_base 16: mod_base = OTHER; note = 2'-fluoroadenosine
  modified_base 17: mod_base = OTHER; note = 2'-O-methylcytidine
  modified_base 18: mod_base = OTHER; note = 2'-O-methylcytidine
  modified_base 19: mod_base = OTHER; note = 2'-O-methylcytidine
  modified_base 20: mod_base = OTHER; note = 2'-O-methyluridine
  modified_base 21: mod_base = OTHER; note = 2'-O-methylcytidine with phosphorothioate linkage
  modified_base 22: mod_base = OTHER; note = 2'-O-methyluridine with phosphorothioate linkage
  modified_base 23: mod_base = OTHER; note = 2'-O-methylcytidine
tcgaagccgtagtccaccctctc

SEQ ID NO: 1479 - RNA, 23 nt, synthetic construct
  source 1..23: mol_type = other RNA
  modified_base 1: mod_base = OTHER; note = 5'-(E)-vinylphosphonate 2'-O-methylated uridine with phosphorothioate linkage
  modified_base 2: mod_base = OTHER; note = 2'-fluorocytidine with phosphorothioate linkage
  modified_base 3: mod_base = OTHER; note = 2'-O-methylcytidine
  modified_base 4: mod_base = OTHER; note = 2'-O-methylcytidine
  modified_base 5: mod_base = OTHER; note = 2'-O-methylcytidine
  modified_base 6: mod_base = OTHER; note = 2'-fluoroguanosine
  modified_base 7: mod_base = OTHER; note = 2'-O-methylcytidine
  modified_base 8: mod_base = OTHER; note = 2'-O-methylguanosine
  modified_base 9: mod_base = OTHER; note = 2'-O-methyladenosine
  modified_base 10: mod_base = OTHER; note = 2'-O-methylguanosine
  modified_base 11: mod_base = OTHER; note = 2'-O-methylcytidine
  modified_base 12: mod_base = OTHER; note = 2'-O-methyluridine
  modified_base 13: mod_base = OTHER; note = 2'-O-methylguanosine
  modified_base 14: mod_base = OTHER; note = 2'-fluorouridine
  modified_base 15: mod_base = OTHER; note = 2'-O-methyluridine
  modified_base 16: mod_base = OTHER; note = 2'-fluorocytidine
  modified_base 17: mod_base = OTHER; note = 2'-O-methyluridine
  modified_base 18: mod_base = OTHER; note = 2'-O-methylcytidine
  modified_base 19: mod_base = OTHER; note = 2'-O-methylguanosine
  modified_base 20: mod_base = OTHER; note = 2'-O-methyluridine
  modified_base 21: mod_base = OTHER; note = 2'-O-methylguanosine with phosphorothioate linkage
  modified_base 22: mod_base = OTHER; note = 2'-O-methylguanosine with phosphorothioate linkage
  modified_base 23: mod_base = OTHER; note = 2'-O-methyluridine
tccccgcgagctgttctcgtggt

SEQ ID NO: 1480 - RNA, 23 nt, synthetic construct
  source 1..23: mol_type = other RNA
  modified_base 1: mod_base = OTHER; note = 5'-(E)-vinylphosphonate 2'-O-methylated uridine with phosphorothioate linkage
  modified_base 2: mod_base = OTHER; note = 2'-fluorocytidine with phosphorothioate linkage
  modified_base 3: mod_base = OTHER; note = 2'-O-methylguanosine
  modified_base 4: mod_base = OTHER; note = 2'-O-methylcytidine
  modified_base 5: mod_base = OTHER; note = 2'-O-methylguanosine
  modified_base 6: mod_base = OTHER; note = 2'-fluorocytidine
  modified_base 7: mod_base = OTHER; note = 2'-O-methyluridine
  modified_base 8: mod_base = OTHER; note = 2'-O-methyluridine
  modified_base 9: mod_base = OTHER; note = 2'-O-methyladenosine
  modified_base 10: mod_base = OTHER; note = 2'-O-methyluridine
  modified_base 11: mod_base = OTHER; note = 2'-O-methylguanosine
  modified_base 12: mod_base = OTHER; note = 2'-O-methylcytidine
  modified_base 13: mod_base = OTHER; note = 2'-O-methyluridine
  modified_base 14: mod_base = OTHER; note = 2'-fluorouridine
  modified_base 15: mod_base = OTHER; note = 2'-O-methylcytidine
  modified_base 16: mod_base = OTHER; note = 2'-fluorouridine
  modified_base 17: mod_base = OTHER; note = 2'-O-methylcytidine
  modified_base 18: mod_base = OTHER; note = 2'-O-methylguanosine
  modified_base 19: mod_base = OTHER; note = 2'-O-methylcytidine
  modified_base 20: mod_base = OTHER; note = 2'-O-methylcytidine
  modified_base 21: mod_base = OTHER; note = 2'-O-methylcytidine with phosphorothioate linkage
  modified_base 22: mod_base = OTHER; note = 2'-O-methyladenosine with phosphorothioate linkage
  modified_base 23: mod_base = OTHER; note = 2'-O-methylguanosine
tcgcgcttatgcttctcgcccag

SEQ ID NO: 1481 - RNA, 23 nt, synthetic construct
  source 1..23: mol_type = other RNA
  modified_base 1: mod_base = OTHER; note = 5'-(E)-vinylphosphonate 2'-O-methylated uridine with phosphorothioate linkage
  modified_base 2: mod_base = OTHER; note = 2'-fluorouridine with phosphorothioate linkage
  modified_base 3: mod_base = OTHER; note = 2'-O-methylguanosine
  modified_base 4: mod_base = OTHER; note = 2'-O-methylguanosine
  modified_base 5: mod_base = OTHER; note = 2'-O-methylcytidine
  modified_base 6: mod_base = OTHER; note = 2'-fluorocytidine
  modified_base 7: mod_base = OTHER; note = 2'-O-methylguanosine
  modified_base 8: mod_base = OTHER; note = 2'-O-methylcytidine
  modified_base 9: mod_base = OTHER; note = 2'-O-methylguanosine
  modified_base 10: mod_base = OTHER; note = 2'-O-methylcytidine
  modified_base 11: mod_base = OTHER; note = 2'-O-methyluridine
  modified_base 12: mod_base = OTHER; note = 2'-O-methyluridine
  modified_base 13: mod_base = OTHER; note = 2'-O-methyladenosine
  modified_base 14: mod_base = OTHER; note = 2'-fluorouridine
  modified_base 15: mod_base = OTHER; note = 2'-O-methylguanosine
  modified_base 16: mod_base = OTHER; note = 2'-fluorocytidine
  modified_base 17: mod_base = OTHER; note = 2'-O-methyluridine
  modified_base 18: mod_base = OTHER; note = 2'-O-methyluridine
  modified_base 19: mod_base = OTHER; note = 2'-O-methylcytidine
  modified_base 20: mod_base = OTHER; note = 2'-O-methyluridine
  modified_base 21: mod_base = OTHER; note = 2'-O-methylcytidine with phosphorothioate linkage
  modified_base 22: mod_base = OTHER; note = 2'-O-methylguanosine with phosphorothioate linkage
  modified_base 23: mod_base = OTHER; note = 2'-O-methylcytidine
ttggccgcgcttatgcttctcgc

SEQ ID NO: 1482 - RNA, 23 nt, synthetic construct
  source 1..23: mol_type = other RNA
  modified_base 1: mod_base = OTHER; note = 5'-(E)-vinylphosphonate 2'-O-methylated uridine with phosphorothioate linkage
  modified_base 2: mod_base = OTHER; note = 2'-fluorouridine with phosphorothioate linkage
  modified_base 3: mod_base = OTHER; note = 2'-O-methylcytidine
  modified_base 4: mod_base = OTHER; note = 2'-O-methylguanosine
  modified_base 5: mod_base = OTHER; note = 2'-O-methyluridine
  modified_base 6: mod_base = OTHER; note = 2'-fluorocytidine
  modified_base 7: mod_base = OTHER; note = 2'-O-methylguanosine
  modified_base 8: mod_base = OTHER; note = 2'-O-methylcytidine
  modified_base 9: mod_base = OTHER; note = 2'-O-methyladenosine
  modified_base 10: mod_base = OTHER; note = 2'-O-methyladenosine
  modified_base 11: mod_base = OTHER; note = 2'-O-methylguanosine
  modified_base 12: mod_base = OTHER; note = 2'-O-methyluridine
  modified_base 13: mod_base = OTHER; note = 2'-O-methylguanosine
  modified_base 14: mod_base = OTHER; note = 2'-fluorouridine
  modified_base 15: mod_base = OTHER; note = 2'-O-methylcytidine
  modified_base 16: mod_base = OTHER; note = 2'-fluorocytidine
  modified_base 17: mod_base = OTHER; note = 2'-O-methylcytidine
  modified_base 18: mod_base = OTHER; note = 2'-O-methyluridine
  modified_base 19: mod_base = OTHER; note = 2'-O-methylguanosine
  modified_base 20: mod_base = OTHER; note = 2'-O-methyluridine
  modified_base 21: mod_base = OTHER; note = 2'-O-methylguanosine with phosphorothioate linkage
  modified_base 22: mod_base = OTHER; note = 2'-O-methylguanosine with phosphorothioate linkage
  modified_base 23: mod_base = OTHER; note = 2'-O-methylcytidine
ttcgtcgcaagtgtccctgtggc

SEQ ID NO: 1483 - RNA, 23 nt, synthetic construct
  source 1..23: mol_type = other RNA
  modified_base 1: mod_base = OTHER; note = 5'-(E)-vinylphosphonate 2'-O-methylated uridine with phosphorothioate linkage
  modified_base 2: mod_base = OTHER; note = 2'-fluoroguanosine with phosphorothioate linkage
  modified_base 3: mod_base = OTHER; note = 2'-O-methylcytidine
  modified_base 4: mod_base = OTHER; note = 2'-O-methylcytidine
  modified_base 5: mod_base = OTHER; note = 2'-O-methyladenosine
  modified_base 6: mod_base = OTHER; note = 2'-fluorocytidine
  modified_base 7: mod_base = OTHER; note = 2'-O-methylcytidine
  modified_base 8: mod_base = OTHER; note = 2'-O-methylguanosine
  modified_base 9: mod_base = OTHER; note = 2'-O-methyladenosine
  modified_base 10: mod_base = OTHER; note = 2'-O-methylguanosine
  modified_base 11: mod_base = OTHER; note = 2'-O-methyluridine
  modified_base 12: mod_base = OTHER; note = 2'-O-methylcytidine
  modified_base 13: mod_base = OTHER; note = 2'-O-methyluridine
  modified_base 14: mod_base = OTHER; note = 2'-fluorouridine
  modified_base 15: mod_base = OTHER; note = 2'-O-methylcytidine
  modified_base 16: mod_base = OTHER; note = 2'-fluoroguanosine
  modified_base 17: mod_base = OTHER; note = 2'-O-methyluridine
  modified_base 18: mod_base = OTHER; note = 2'-O-methylcytidine
  modified_base 19: mod_base = OTHER; note = 2'-O-methylguanosine
  modified_base 20: mod_base = OTHER; note = 2'-O-methylcytidine
  modified_base 21: mod_base = OTHER; note = 2'-O-methyladenosine with phosphorothioate linkage
  modified_base 22: mod_base = OTHER; note = 2'-O-methyladenosine with phosphorothioate linkage
  modified_base 23: mod_base = OTHER; note = 2'-O-methylguanosine
tgccaccgagtcttcgtcgcaag

SEQ ID NO: 1484 - RNA, 23 nt, synthetic construct
  source 1..23: mol_type = other RNA
  modified_base 1: mod_base = OTHER; note = 5'-(E)-vinylphosphonate 2'-O-methylated uridine with phosphorothioate linkage
  modified_base 2: mod_base = OTHER; note = 2'-fluoroguanosine with phosphorothioate linkage
  modified_base 3: mod_base = OTHER; note = 2'-O-methyladenosine
  modified_base 4: mod_base = OTHER; note = 2'-O-methylcytidine
  modified_base 5: mod_base = OTHER; note = 2'-O-methyluridine
  modified_base 6: mod_base = OTHER; note = 2'-fluorocytidine
  modified_base 7: mod_base = OTHER; note = 2'-O-methylguanosine
  modified_base 8: mod_base = OTHER; note = 2'-O-methylcytidine
  modified_base 9: mod_base = OTHER; note = 2'-O-methylcytidine
  modified_base 10: mod_base = OTHER; note = 2'-O-methylguanosine
  modified_base 11: mod_base = OTHER; note = 2'-O-methylguanosine
  modified_base 12: mod_base = OTHER; note = 2'-O-methylcytidine
  modified_base 13: mod_base = OTHER; note = 2'-O-methylcytidine
  modified_base 14: mod_base = OTHER; note = 2'-fluoroadenosine
  modified_base 15: mod_base = OTHER; note = 2'-O-methylcytidine
  modified_base 16: mod_base = OTHER; note = 2'-fluorocytidine
  modified_base 17: mod_base = OTHER; note = 2'-O-methylguanosine
  modified_base 18: mod_base = OTHER; note = 2'-O-methyladenosine
  modified_base 19: mod_base = OTHER; note = 2'-O-methylguanosine
  modified_base 20: mod_base = OTHER; note = 2'-O-methyluridine
  modified_base 21: mod_base = OTHER; note = 2'-O-methylcytidine with phosphorothioate linkage
  modified_base 22: mod_base = OTHER; note = 2'-O-methyluridine with phosphorothioate linkage
  modified_base 23: mod_base = OTHER; note = 2'-O-methyluridine
tgactcgccggccaccgagtctt

SEQ ID NO: 1485 - RNA, 23 nt, synthetic construct
  source 1..23: mol_type = other RNA
  modified_base 1: mod_base = OTHER; note = 5'-(E)-vinylphosphonate 2'-O-methylated uridine with phosphorothioate linkage
  modified_base 2: mod_base = OTHER; note = 2'-fluoroadenosine with phosphorothioate linkage
  modified_base 3: mod_base = OTHER; note = 2'-O-methyluridine
  modified_base 4: mod_base = OTHER; note = 2'-O-methylguanosine
  modified_base 5: mod_base = OTHER; note = 2'-O-methylcytidine
  modified_base 6: mod_base = OTHER; note = 2'-fluoroguanosine
  modified_base 7: mod_base = OTHER; note = 2'-O-methylguanosine
  modified_base 8: mod_base = OTHER; note = 2'-O-methyluridine
  modified_base 9: mod_base = OTHER; note = 2'-O-methylcytidine
  modified_base 10: mod_base = OTHER; note = 2'-O-methylcytidine
  modified_base 11: mod_base = OTHER; note = 2'-O-methylguanosine
  modified_base 12: mod_base = OTHER; note = 2'-O-methyladenosine
  modified_base 13: mod_base = OTHER; note = 2'-O-methylcytidine
  modified_base 14: mod_base = OTHER; note = 2'-fluorouridine
  modified_base 15: mod_base = OTHER; note = 2'-O-methylcytidine
  modified_base 16: mod_base = OTHER; note = 2'-fluoroguanosine
  modified_base 17: mod_base = OTHER; note = 2'-O-methylcytidine
  modified_base 18: mod_base = OTHER; note = 2'-O-methylcytidine
  modified_base 19: mod_base = OTHER; note = 2'-O-methylguanosine
  modified_base 20: mod_base = OTHER; note = 2'-O-methylguanosine
  modified_base 21: mod_base = OTHER; note = 2'-O-methylcytidine with phosphorothioate linkage
  modified_base 22: mod_base = OTHER; note = 2'-O-methylcytidine with phosphorothioate linkage
  modified_base 23: mod_base = OTHER; note = 2'-O-methyladenosine
tatgcggtccgactcgccggcca

SEQ ID NO: 1486 - RNA, 23 nt, synthetic construct
  source 1..23: mol_type = other RNA
  modified_base 1: mod_base = OTHER; note = 5'-(E)-vinylphosphonate 2'-O-methylated uridine with phosphorothioate linkage
  modified_base 2: mod_base = OTHER; note = 2'-fluorocytidine with phosphorothioate linkage
  modified_base 3: mod_base = OTHER; note = 2'-O-methyluridine
  modified_base 4: mod_base = OTHER; note = 2'-O-methyladenosine
  modified_base 5: mod_base = OTHER; note = 2'-O-methyluridine
  modified_base 6: mod_base = OTHER; note = 2'-fluoroguanosine
  modified_base 7: mod_base = OTHER; note = 2'-O-methylcytidine
  modified_base 8: mod_base = OTHER; note = 2'-O-methylguanosine
  modified_base 9: mod_base = OTHER; note = 2'-O-methylguanosine
  modified_base 10: mod_base = OTHER; note = 2'-O-methyluridine
  modified_base 11: mod_base = OTHER; note = 2'-O-methylcytidine
  modified_base 12: mod_base = OTHER; note = 2'-O-methylcytidine
  modified_base 13: mod_base = OTHER; note = 2'-O-methylguanosine
  modified_base 14: mod_base = OTHER; note = 2'-fluoroadenosine
  modified_base 15: mod_base = OTHER; note = 2'-O-methylcytidine
  modified_base 16: mod_base = OTHER; note = 2'-fluorouridine
  modified_base 17: mod_base = OTHER; note = 2'-O-methylcytidine
  modified_base 18: mod_base = OTHER; note = 2'-O-methylguanosine
  modified_base 19: mod_base = OTHER; note = 2'-O-methylcytidine
  modified_base 20: mod_base = OTHER; note = 2'-O-methylcytidine
  modified_base 21: mod_base = OTHER; note = 2'-O-methylguanosine with phosphorothioate linkage
  modified_base 22: mod_base = OTHER; note = 2'-O-methylguanosine with phosphorothioate linkage
  modified_base 23: mod_base = OTHER; note = 2'-O-methylcytidine
tctatgcggtccgactcgccggc

SEQ ID NO: 1487 - RNA, 23 nt, synthetic construct
  source 1..23: mol_type = other RNA
  modified_base 1: mod_base = OTHER; note = 5'-(E)-vinylphosphonate 2'-O-methylated uridine with phosphorothioate linkage
  modified_base 2: mod_base = OTHER; note = 2'-fluorouridine with phosphorothioate linkage
  modified_base 3: mod_base = OTHER; note = 2'-O-methylcytidine
  modified_base 4: mod_base = OTHER; note = 2'-O-methyluridine
  modified_base 5: mod_base = OTHER; note = 2'-O-methyladenosine
  modified_base 6: mod_base = OTHER; note = 2'-fluorouridine
  modified_base 7: mod_base = OTHER; note = 2'-O-methylguanosine
  modified_base 8: mod_base = OTHER; note = 2'-O-methylcytidine
  modified_base 9: mod_base = OTHER; note = 2'-O-methylguanosine
  modified_base 10: mod_base = OTHER; note = 2'-O-methylguanosine
  modified_base 11: mod_base = OTHER; note = 2'-O-methyluridine
  modified_base 12: mod_base = OTHER; note = 2'-O-methylcytidine
  modified_base 13: mod_base = OTHER; note = 2'-O-methylcytidine
  modified_base 14: mod_base = OTHER; note = 2'-fluoroguanosine
  modified_base 15: mod_base = OTHER; note = 2'-O-methyladenosine
  modified_base 16: mod_base = OTHER; note = 2'-fluorocytidine
  modified_base 17: mod_base = OTHER; note = 2'-O-methyluridine
  modified_base 18: mod_base = OTHER; note = 2'-O-methylcytidine
  modified_base 19: mod_base = OTHER; note = 2'-O-methylguanosine
  modified_base 20: mod_base = OTHER; note = 2'-O-methylcytidine
  modified_base 21: mod_base = OTHER; note = 2'-O-methylcytidine with phosphorothioate linkage
  modified_base 22: mod_base = OTHER; note = 2'-O-methylguanosine with phosphorothioate linkage
  modified_base 23: mod_base = OTHER; note = 2'-O-methylguanosine
ttctatgcggtccgactcgccgg

SEQ ID NO: 1488 - RNA, 23 nt, synthetic construct
  source 1..23: mol_type = other RNA
  modified_base 1: mod_base = OTHER; note = 5'-(E)-vinylphosphonate 2'-O-methylated uridine with phosphorothioate linkage
  modified_base 2: mod_base = OTHER; note = 2'-fluorouridine with phosphorothioate linkage
  modified_base 3: mod_base = OTHER; note = 2'-O-methylcytidine
  modified_base 4: mod_base = OTHER; note = 2'-O-methylguanosine
  modified_base 5: mod_base = OTHER; note = 2'-O-methyluridine
  modified_base 6: mod_base = OTHER; note = 2'-fluorocytidine
  modified_base 7: mod_base = OTHER; note = 2'-O-methyluridine
  modified_base 8: mod_base = OTHER; note = 2'-O-methyladenosine
  modified_base 9: mod_base = OTHER; note = 2'-O-methyluridine
  modified_base 10: mod_base = OTHER; note = 2'-O-methylguanosine
  modified_base 11: mod_base = OTHER; note = 2'-O-methylcytidine
  modified_base 12: mod_base = OTHER; note = 2'-O-methylguanosine
  modified_base 13: mod_base = OTHER; note = 2'-O-methylguanosine
  modified_base 14: mod_base = OTHER; note = 2'-fluorouridine
  modified_base 15: mod_base = OTHER; note = 2'-O-methylcytidine
  modified_base 16: mod_base = OTHER; note = 2'-fluorocytidine
  modified_base 17: mod_base = OTHER; note = 2'-O-methylguanosine
  modified_base 18: mod_base = OTHER; note = 2'-O-methyladenosine
  modified_base 19: mod_base = OTHER; note = 2'-O-methylcytidine
  modified_base 20: mod_base = OTHER; note = 2'-O-methyluridine
  modified_base 21: mod_base = OTHER; note = 2'-O-methylcytidine with phosphorothioate linkage
  modified_base 22: mod_base = OTHER; note = 2'-O-methylguanosine with phosphorothioate linkage
  modified_base 23: mod_base = OTHER; note = 2'-O-methylcytidine
ttcgtctatgcggtccgactcgc

SEQ ID NO: 1489 - RNA, 23 nt, synthetic construct
  source 1..23: mol_type = other RNA
  modified_base 1: mod_base = OTHER; note = 5'-(E)-vinylphosphonate 2'-O-methylated uridine with phosphorothioate linkage
  modified_base 2: mod_base = OTHER; note = 2'-fluoroadenosine with phosphorothioate linkage
  modified_base 3: mod_base = OTHER; note = 2'-O-methyluridine
  modified_base 4: mod_base = OTHER; note = 2'-O-methylcytidine
  modified_base 5: mod_base = OTHER; note = 2'-O-methylguanosine
  modified_base 6: mod_base = OTHER; note = 2'-fluorouridine
  modified_base 7: mod_base = OTHER; note = 2'-O-methylcytidine
  modified_base 8: mod_base = OTHER; note = 2'-O-methyluridine
  modified_base 9: mod_base = OTHER; note = 2'-O-methyladenosine
  modified_base 10: mod_base = OTHER; note = 2'-O-methyluridine
  modified_base 11: mod_base = OTHER; note = 2'-O-methylguanosine
  modified_base 12: mod_base = OTHER; note = 2'-O-methylcytidine
  modified_base 13: mod_base = OTHER; note = 2'-O-methylguanosine
  modified_base 14: mod_base = OTHER; note = 2'-fluoroguanosine
  modified_base 15: mod_base = OTHER; note = 2'-O-methyluridine
  modified_base 16: mod_base = OTHER; note = 2'-fluorocytidine
  modified_base 17: mod_base = OTHER; note = 2'-O-methylcytidine
  modified_base 18: mod_base = OTHER; note = 2'-O-methylguanosine
  modified_base 19: mod_base = OTHER; note = 2'-O-methyladenosine
  modified_base 20: mod_base = OTHER; note = 2'-O-methylcytidine
  modified_base 21: mod_base = OTHER; note = 2'-O-methyluridine with phosphorothioate linkage
  modified_base 22: mod_base = OTHER; note = 2'-O-methylcytidine with phosphorothioate linkage
  modified_base 23: mod_base = OTHER; note = 2'-O-methylguanosine
tatcgtctatgcggtccgactcg

SEQ ID NO: 1490 - RNA, 23 nt, synthetic construct
  source 1..23: mol_type = other RNA
  modified_base 1: mod_base = OTHER; note = 5'-(E)-vinylphosphonate 2'-O-methylated uridine with phosphorothioate linkage
  modified_base 2: mod_base = OTHER; note = 2'-fluorocytidine with phosphorothioate linkage
  modified_base 3: mod_base = OTHER; note = 2'-O-methyladenosine
  modified_base 4: mod_base = OTHER; note = 2'-O-methyluridine
  modified_base 5: mod_base = OTHER; note = 2'-O-methylcytidine
  modified_base 6: mod_base = OTHER; note = 2'-fluoroguanosine
  modified_base 7: mod_base = OTHER; note = 2'-O-methyluridine
  modified_base 8: mod_base = OTHER; note = 2'-O-methylcytidine
  modified_base 9: mod_base = OTHER; note = 2'-O-methyluridine
  modified_base 10: mod_base = OTHER; note = 2'-O-methyladenosine
  modified_base 11: mod_base = OTHER; note = 2'-O-methyluridine
  modified_base 12: mod_base = OTHER; note = 2'-O-methylguanosine
  modified_base 13: mod_base = OTHER; note = 2'-O-methylcytidine
  modified_base 14: mod_base = OTHER; note = 2'-fluoroguanosine
  modified_base 15: mod_base = OTHER; note = 2'-O-methylguanosine
  modified_base 16: mod_base = OTHER; note = 2'-fluorouridine
  modified_base 17: mod_base = OTHER; note = 2'-O-methylcytidine
  modified_base 18: mod_base = OTHER; note = 2'-O-methylcytidine
  modified_base 19: mod_base = OTHER; note = 2'-O-methylguanosine
  modified_base 20: mod_base = OTHER; note = 2'-O-methyladenosine
  modified_base 21: mod_base = OTHER; note = 2'-O-methylcytidine with phosphorothioate linkage
  modified_base 22: mod_base = OTHER; note = 2'-O-methyluridine with phosphorothioate linkage
  modified_base 23: mod_base = OTHER; note = 2'-O-methylcytidine
tcatcgtctatgcggtccgactc

SEQ ID NO: 1491 - RNA, 23 nt, synthetic construct
  source 1..23: mol_type = other RNA
  modified_base 1: mod_base = OTHER; note = 5'-(E)-vinylphosphonate 2'-O-methylated uridine with phosphorothioate linkage
  modified_base 2: mod_base = OTHER; note = 2'-fluoroadenosine with phosphorothioate linkage
  modified_base 3: mod_base = OTHER; note = 2'-O-methylguanosine
  modified_base 4: mod_base = OTHER; note = 2'-O-methylguanosine
  modified_base 5: mod_base = OTHER; note = 2'-O-methylcytidine
  modified_base 6: mod_base = OTHER; note = 2'-fluoroguanosine
  modified_base 7: mod_base = OTHER; note = 2'-O-methyladenosine
  modified_base 8: mod_base = OTHER; note = 2'-O-methyluridine
  modified_base 9: mod_base = OTHER; note = 2'-O-methyluridine
  modified_base 10: mod_base = OTHER; note = 2'-O-methylguanosine
  modified_base 11: mod_base = OTHER; note = 2'-O-methyluridine
  modified_base 12: mod_base = OTHER; note = 2'-O-methylcytidine
  modified_base 13: mod_base = OTHER; note = 2'-O-methyluridine
  modified_base 14: mod_base = OTHER; note = 2'-fluoroguanosine
  modified_base 15: mod_base = OTHER; note = 2'-O-methylguanosine
  modified_base 16: mod_base = OTHER; note = 2'-fluoroadenosine
  modified_base 17: mod_base = OTHER; note = 2'-O-methylguanosine
  modified_base 18: mod_base = OTHER; note = 2'-O-methyluridine
  modified_base 19: mod_base = OTHER; note = 2'-O-methylcytidine
  modified_base 20: mod_base = OTHER; note = 2'-O-methyluridine
  modified_base 21: mod_base = OTHER; note = 2'-O-methylcytidine with phosphorothioate linkage
  modified_base 22: mod_base = OTHER; note = 2'-O-methylcytidine with phosphorothioate linkage
  modified_base 23: mod_base = OTHER; note = 2'-O-methylguanosine
taggcgattgtctggagtctccg

SEQ ID NO: 1492 - RNA, 23 nt, synthetic construct
  source 1..23: mol_type = other RNA
  modified_base 1: mod_base = OTHER; note = 5'-(E)-vinylphosphonate 2'-O-methylated uridine with phosphorothioate linkage
  modified_base 2: mod_base = OTHER; note = 2'-fluorocytidine with phosphorothioate linkage
  modified_base 3: mod_base = OTHER; note = 2'-O-methylcytidine
  modified_base 4: mod_base = OTHER; note = 2'-O-methylguanosine
  modified_base 5: mod_base = OTHER; note = 2'-O-methyladenosine
  modified_base 6: mod_base = OTHER; note = 2'-fluorocytidine
  modified_base 7: mod_base = OTHER; note = 2'-O-methylguanosine
  modified_base 8: mod_base = OTHER; note = 2'-O-methyladenosine
  modified_base 9: mod_base = OTHER; note = 2'-O-methylguanosine
  modified_base 10: mod_base = OTHER; note = 2'-O-methylguanosine
  modified_base 11: mod_base = OTHER; note = 2'-O-methyladenosine
  modified_base 12: mod_base = OTHER; note = 2'-O-methylguanosine
  modified_base 13: mod_base = OTHER; note = 2'-O-methylguanosine
  modified_base 14: mod_base = OTHER; note = 2'-fluorocytidine
  modified_base 15: mod_base = OTHER; note = 2'-O-methyladenosine
  modified_base 16: mod_base = OTHER; note = 2'-fluoroadenosine
  modified_base 17: mod_base = OTHER; note = 2'-O-methyladenosine
  modified_base 18: mod_base = OTHER; note = 2'-O-methyladenosine
  modified_base 19: mod_base = OTHER; note = 2'-O-methylguanosine
  modified_base 20: mod_base = OTHER; note = 2'-O-methylguanosine
  modified_base 21: mod_base = OTHER; note = 2'-O-methylcytidine with phosphorothioate linkage
  modified_base 22: mod_base = OTHER; note = 2'-O-methylguanosine with phosphorothioate linkage
  modified_base 23: mod_base = OTHER; note = 2'-O-methyladenosine
tccgacgaggaggcaaaaggcga

SEQ ID NO: 1493 - RNA, 23 nt, synthetic construct
  source 1..23: mol_type = other RNA
  modified_base 1: mod_base = OTHER; note = 5'-(E)-vinylphosphonate 2'-O-methylated uridine with phosphorothioate linkage
  modified_base 2: mod_base = OTHER; note = 2'-fluorocytidine with phosphorothioate linkage
  modified_base 3: mod_base = OTHER; note = 2'-O-methylcytidine
  modified_base 4: mod_base = OTHER; note = 2'-O-methylguanosine
  modified_base 5: mod_base = OTHER; note = 2'-O-methyladenosine
  modified_base 6: mod_base = OTHER; note = 2'-fluoroguanosine
  modified_base 7: mod_base = OTHER; note = 2'-O-methylguanosine
  modified_base 8: mod_base = OTHER; note = 2'-O-methyladenosine
  modified_base 9: mod_base = OTHER; note = 2'-O-methylguanosine
  modified_base 10: mod_base = OTHER; note = 2'-O-methyluridine
  modified_base 11: mod_base = OTHER; note = 2'-O-methylguanosine
  modified_base 12: mod_base = OTHER; note = 2'-O-methylcytidine
  modified_base 13: mod_base = OTHER; note = 2'-O-methyluridine
  modified_base 14: mod_base = OTHER; note = 2'-fluorocytidine
  modified_base 15: mod_base = OTHER; note = 2'-O-methylcytidine
  modified_base 16: mod_base = OTHER; note = 2'-fluoroguanosine
  modified_base 17: mod_base = OTHER; note = 2'-O-methyladenosine
  modified_base 18: mod_base = OTHER; note = 2'-O-methylcytidine
  modified_base 19: mod_base = OTHER; note = 2'-O-methylguanosine
  modified_base 20: mod_base = OTHER; note = 2'-O-methyladenosine
  modified_base 21: mod_base = OTHER; note = 2'-O-methylguanosine with phosphorothioate linkage
  modified_base 22: mod_base = OTHER; note = 2'-O-methylguanosine with phosphorothioate linkage
  modified_base 23: mod_base = OTHER; note = 2'-O-methyladenosine
tccgaggagtgctccgacgagga

SEQ ID NO: 1494 - RNA, 23 nt, synthetic construct
  source 1..23: mol_type = other RNA
  modified_base 1: mod_base = OTHER; note = 5'-(E)-vinylphosphonate 2'-O-methylated uridine with phosphorothioate linkage
  modified_base 2: mod_base = OTHER; note = 2'-fluorocytidine with phosphorothioate linkage
  modified_base 3: mod_base = OTHER; note = 2'-O-methyluridine
  modified_base 4: mod_base = OTHER; note = 2'-O-methylcytidine
  modified_base 5: mod_base = OTHER; note = 2'-O-methylcytidine
  modified_base 6: mod_base = OTHER; note = 2'-fluoroguanosine
  modified_base 7: mod_base = OTHER; note = 2'-O-methyladenosine
  modified_base 8: mod_base = OTHER; note = 2'-O-methylguanosine
  modified_base 9: mod_base = OTHER; note = 2'-O-methylguanosine
  modified_base 10: mod_base = OTHER; note = 2'-O-methyladenosine
  modified_base 11: mod_base = OTHER; note = 2'-O-methylguanosine
  modified_base 12: mod_base = OTHER; note = 2'-O-methyluridine
  modified_base 13: mod_base = OTHER; note = 2'-O-methylguanosine
  modified_base 14: mod_base = OTHER; note = 2'-fluorocytidine
  modified_base 15: mod_base = OTHER; note = 2'-O-methyluridine
  modified_base 16: mod_base = OTHER; note = 2'-fluorocytidine
  modified_base 17: mod_base = OTHER; note = 2'-O-methylcytidine
  modified_base 18: mod_base = OTHER; note = 2'-O-methylguanosine
  modified_base 19: mod_base = OTHER; note = 2'-O-methyladenosine
  modified_base 20: mod_base = OTHER; note = 2'-O-methylcytidine
  modified_base 21: mod_base = OTHER; note = 2'-O-methylguanosine with phosphorothioate linkage
  modified_base 22: mod_base = OTHER; note = 2'-O-methyladenosine with phosphorothioate linkage
  modified_base 23: mod_base = OTHER; note = 2'-O-methylguanosine
tctccgaggagtgctccgacgag

SEQ ID NO: 1495 - RNA, 23 nt, synthetic construct
  source 1..23: mol_type = other RNA
  modified_base 1: mod_base = OTHER; note = 5'-(E)-vinylphosphonate 2'-O-methylated uridine with phosphorothioate linkage
  modified_base 2: mod_base = OTHER; note = 2'-fluorocytidine with phosphorothioate linkage
  modified_base 3: mod_base = OTHER; note = 2'-O-methylcytidine
  modified_base 4: mod_base = OTHER; note = 2'-O-methylguanosine
  modified_base 5: mod_base = OTHER; note = 2'-O-methyluridine
  modified_base 6: mod_base = OTHER; note = 2'-fluorouridine
  modified_base 7: mod_base = OTHER; note = 2'-O-methylcytidine
  modified_base 8: mod_base = OTHER; note = 2'-O-methyluridine
  modified_base 9: mod_base = OTHER; note = 2'-O-methylcytidine
  modified_base 10: mod_base = OTHER; note = 2'-O-methylcytidine
  modified_base 11: mod_base = OTHER; note = 2'-O-methylguanosine
  modified_base 12: mod_base = OTHER; note = 2'-O-methyladenosine
  modified_base 13: mod_base = OTHER; note = 2'-O-methylguanosine
  modified_base 14: mod_base = OTHER; note = 2'-fluoroguanosine
  modified_base 15: mod_base = OTHER; note = 2'-O-methyladenosine
  modified_base 16: mod_base = OTHER; note = 2'-fluoroguanosine
  modified_base 17: mod_base = OTHER; note = 2'-O-methyluridine
  modified_base 18: mod_base = OTHER; note = 2'-O-methylguanosine
  modified_base 19: mod_base = OTHER; note = 2'-O-methylcytidine
  modified_base 20: mod_base = OTHER; note = 2'-O-methyluridine
  modified_base 21: mod_base = OTHER; note = 2'-O-methylcytidine with phosphorothioate linkage
  modified_base 22: mod_base = OTHER; note = 2'-O-methylcytidine with phosphorothioate linkage
  modified_base 23: mod_base = OTHER; note = 2'-O-methylguanosine
tccgttctccgaggagtgctccg

SEQ ID NO: 1496 - RNA, 23 nt, synthetic construct
  source 1..23: mol_type = other RNA
  modified_base 1: mod_base = OTHER; note = 5'-(E)-vinylphosphonate 2'-O-methylated uridine with phosphorothioate linkage
  modified_base 2: mod_base = OTHER; note = 2'-fluorocytidine with phosphorothioate linkage
  modified_base 3: mod_base = OTHER; note = 2'-O-methyladenosine
  modified_base 4: mod_base = OTHER; note = 2'-O-methylcytidine
  modified_base 5: mod_base = OTHER; note = 2'-O-methyluridine
  modified_base 6: mod_base = OTHER; note = 2'-fluoroadenosine
  modified_base 7: mod_base = OTHER; note = 2'-O-methyladenosine
  modified_base 8: mod_base = OTHER; note = 2'-O-methyluridine
  modified_base 9: mod_base = OTHER; note = 2'-O-methyladenosine
  modified_base 10: mod_base = OTHER; note = 2'-O-methyluridine
  modified_base 11: mod_base = OTHER; note = 2'-O-methylguanosine
  modified_base 12: mod_base = OTHER; note = 2'-O-methylguanosine
  modified_base 13: mod_base = OTHER; note = 2'-O-methylguanosine
  modified_base 14: mod_base = OTHER; note = 2'-fluoroguanosine
  modified_base 15: mod_base = OTHER; note = 2'-O-methylcytidine
  modified_base 16: mod_base = OTHER; note = 2'-fluoroguanosine
  modified_base 17: mod_base = OTHER; note = 2'-O-methyluridine
  modified_base 18: mod_base = OTHER; note = 2'-O-methylguanosine
  modified_base 19: mod_base = OTHER; note = 2'-O-methylcytidine
  modified_base 20: mod_base = OTHER; note = 2'-O-methyluridine
  modified_base 21: mod_base = OTHER; note = 2'-O-methylcytidine with phosphorothioate linkage
  modified_base 22: mod_base = OTHER; note = 2'-O-methylcytidine with phosphorothioate linkage
  modified_base 23: mod_base = OTHER; note = 2'-O-methylcytidine
tcactaatatggggcgtgctccc

SEQ ID NO: 1497 - RNA, 23 nt, synthetic construct
  source 1..23: mol_type = other RNA
  modified_base 1: mod_base = OTHER; note = 5'-(E)-vinylphosphonate 2'-O-methylated uridine with phosphorothioate linkage
  modified_base 2: mod_base = OTHER; note = 2'-fluorocytidine with phosphorothioate linkage
  modified_base 3: mod_base = OTHER; note = 2'-O-methylcytidine
  modified_base 4: mod_base = OTHER; note = 2'-O-methyladenosine
  modified_base 5: mod_base = OTHER; note = 2'-O-methylcytidine
  modified_base 6: mod_base = OTHER; note = 2'-fluorouridine
  modified_base 7: mod_base = OTHER; note = 2'-O-methyladenosine
  modified_base 8: mod_base = OTHER; note = 2'-O-methyladenosine
  modified_base 9: mod_base = OTHER; note = 2'-O-methyluridine
  modified_base 10: mod_base = OTHER; note = 2'-O-methyladenosine
  modified_base 11: mod_base = OTHER; note = 2'-O-methyluridine
  modified_base 12: mod_base = OTHER; note = 2'-O-methylguanosine
  modified_base 13: mod_base = OTHER; note = 2'-O-methylguanosine
  modified_base 14: mod_base = OTHER; note = 2'-fluoroguanosine
  modified_base 15: mod_base = OTHER; note = 2'-O-methylguanosine
  modified_base 16: mod_base = OTHER; note = 2'-fluorocytidine
  modified_base 17: mod_base = OTHER; note = 2'-O-methylguanosine
  modified_base 18: mod_base = OTHER; note = 2'-O-methyluridine
  modified_base 19: mod_base = OTHER; note = 2'-O-methylguanosine
  modified_base 20: mod_base = OTHER; note = 2'-O-methylcytidine
  modified_base 21: mod_base = OTHER; note = 2'-O-methyluridine with phosphorothioate linkage
  modified_base 22: mod_base = OTHER; note = 2'-O-methylcytidine with phosphorothioate linkage
  modified_base 23: mod_base = OTHER; note = 2'-O-methylcytidine
tccactaatatggggcgtgctcc

SEQ ID NO: 1498 - RNA, 23 nt, synthetic construct
  source 1..23: mol_type = other RNA
  modified_base 1: mod_base = OTHER; note = 5'-(E)-vinylphosphonate 2'-O-methylated uridine with phosphorothioate linkage
  modified_base 2: mod_base = OTHER; note = 2'-fluoroguanosine with phosphorothioate linkage
  modified_base 3: mod_base = OTHER; note = 2'-O-methyladenosine
  modified_base 4: mod_base = OTHER; note = 2'-O-methylcytidine
  modified_base 5: mod_base = OTHER; note = 2'-O-methylcytidine
  modified_base 6: mod_base = OTHER; note = 2'-fluoroadenosine
  modified_base 7: mod_base = OTHER; note = 2'-O-methylcytidine
  modified_base 8: mod_base = OTHER; note = 2'-O-methyluridine
  modified_base 9: mod_base = OTHER; note = 2'-O-methyladenosine
  modified_base 10: mod_base = OTHER; note = 2'-O-methyladenosine
  modified_base 11: mod_base = OTHER; note = 2'-O-methyluridine
  modified_base 12: mod_base = OTHER; note = 2'-O-methyladenosine
  modified_base 13: mod_base = OTHER; note = 2'-O-methyluridine
  modified_base 14: mod_base = OTHER; note = 2'-fluoroguanosine
  modified_base 15: mod_base = OTHER; note = 2'-O-methylguanosine
  modified_base 16: mod_base = OTHER; note = 2'-fluoroguanosine
  modified_base 17: mod_base = OTHER; note = 2'-O-methylguanosine
  modified_base 18: mod_base = OTHER; note = 2'-O-methylcytidine
  modified_base 19: mod_base = OTHER; note = 2'-O-methylguanosine
  modified_base 20: mod_base = OTHER; note = 2'-O-methyluridine
  modified_base 21: mod_base = OTHER; note = 2'-O-methylguanosine with phosphorothioate linkage
  modified_base 22: mod_base = OTHER; note = 2'-O-methylcytidine with phosphorothioate linkage
  modified_base 23: mod_base = OTHER; note = 2'-O-methyluridine
tgaccactaatatggggcgtgct

SEQ ID NO: 1499 - RNA, 23 nt, synthetic construct
  source 1..23: mol_type = other RNA
  modified_base 1: mod_base = OTHER; note = 5'-(E)-vinylphosphonate 2'-O-methylated uridine with phosphorothioate linkage
  modified_base 2: mod_base = OTHER; note = 2'-fluoroguanosine with phosphorothioate linkage
  modified_base 3: mod_base = OTHER; note = 2'-O-methylcytidine
  modified_base 4: mod_base = OTHER; note = 2'-O-methylcytidine
  modified_base 5: mod_base = OTHER; note = 2'-O-methylcytidine
  modified_base 6: mod_base = OTHER; note = 2'-fluoroguanosine
  modified_base 7: mod_base = OTHER; note = 2'-O-methylguanosine
  modified_base 8: mod_base = OTHER; note = 2'-O-methyladenosine
  modified_base 9: mod_base = OTHER; note = 2'-O-methylcytidine
  modified_base 10: mod_base = OTHER; note = 2'-O-methylcytidine
  modified_base 11: mod_base = OTHER; note = 2'-O-methyladenosine
  modified_base 12: mod_base = OTHER; note = 2'-O-methylcytidine
  modified_base 13: mod_base = OTHER; note = 2'-O-methyluridine
  modified_base 14: mod_base = OTHER; note = 2'-fluoroadenosine
  modified_base 15: mod_base = OTHER; note = 2'-O-methyladenosine
  modified_base 16: mod_base = OTHER; note = 2'-fluorouridine
  modified_base 17: mod_base = OTHER; note = 2'-O-methyladenosine
  modified_base 18: mod_base = OTHER; note = 2'-O-methyluridine
  modified_base 19: mod_base = OTHER; note = 2'-O-methylguanosine
  modified_base 20: mod_base = OTHER; note = 2'-O-methylguanosine
  modified_base 21: mod_base = OTHER; note = 2'-O-methylguanosine with phosphorothioate linkage
  modified_base 22: mod_base = OTHER; note = 2'-O-methylguanosine with phosphorothioate linkage
  modified_base 23: mod_base = OTHER; note = 2'-O-methylcytidine
tgcccggaccactaatatggggc

SEQ ID NO: 1500 - RNA, 23 nt, synthetic construct
  source 1..23: mol_type = other RNA
  modified_base 1: mod_base = OTHER; note = 5'-(E)-vinylphosphonate 2'-O-methylated uridine with phosphorothioate linkage
  modified_base 2: mod_base = OTHER; note = 2'-fluorocytidine with phosphorothioate linkage
  modified_base 3: mod_base = OTHER; note = 2'-O-methylcytidine
  modified_base 4: mod_base = OTHER; note = 2'-O-methylguanosine
  modified_base 5: mod_base = OTHER; note = 2'-O-methylguanosine
  modified_base 6: mod_base = OTHER; note = 2'-fluoroguanosine
  modified_base 7: mod_base = OTHER; note = 2'-O-methylcytidine
  modified_base 8: mod_base = OTHER; note = 2'-O-methylcytidine
  modified_base 9: mod_base = OTHER; note = 2'-O-methylcytidine
  modified_base 10: mod_base = OTHER; note = 2'-O-methylguanosine
  modified_base 11: mod_base = OTHER; note = 2'-O-methylguanosine
  modified_base 12: mod_base = OTHER; note = 2'-O-methyladenosine
  modified_base 13: mod_base = OTHER; note = 2'-O-methylcytidine
  modified_base 14: mod_base = OTHER; note = 2'-fluorocytidine
  modified_base 15: mod_base = OTHER; note = 2'-O-methyladenosine
  modified_base 16: mod_base = OTHER; note = 2'-fluorocytidine
  modified_base 17: mod_base = OTHER; note = 2'-O-methyluridine
  modified_base 18: mod_base = OTHER; note = 2'-O-methyladenosine
  modified_base 19: mod_base = OTHER; note = 2'-O-methyladenosine
  modified_base 20: mod_base = OTHER; note = 2'-O-methyluridine
  modified_base 21: mod_base = OTHER; note = 2'-O-methyladenosine with phosphorothioate linkage
  modified_base 22: mod_base = OTHER; note = 2'-O-methyluridine with phosphorothioate linkage
  modified_base 23: mod_base = OTHER; note = 2'-O-methylguanosine
tccgggcccggaccactaatatg

SEQ ID NO: 1501 - RNA, 23 nt, synthetic construct
  source 1..23: mol_type = other RNA
  modified_base 1: mod_base = OTHER; note = 5'-(E)-vinylphosphonate 2'-O-methylated uridine with phosphorothioate linkage
  modified_base 2: mod_base = OTHER; note = 2'-fluoroguanosine with phosphorothioate linkage
  modified_base 3: mod_base = OTHER; note = 2'-O-methylcytidine
  modified_base 4: mod_base = OTHER; note = 2'-O-methyluridine
  modified_base 5: mod_base = OTHER; note = 2'-O-methyladenosine
  modified_base 6: mod_base = OTHER; note = 2'-fluoroadenosine
  modified_base 7: mod_base = OTHER; note = 2'-O-methyladenosine
  modified_base 8: mod_base = OTHER; note = 2'-O-methyladenosine
  modified_base 9: mod_base = OTHER; note = 2'-O-methylguanosine
  modified_base 10: mod_base = OTHER; note = 2'-O-methylguanosine
  modified_base 11: mod_base = OTHER; note = 2'-O-methylcytidine
  modified_base 12: mod_base = OTHER; note = 2'-O-methyladenosine
  modified_base 13: mod_base = OTHER; note = 2'-O-methyluridine
  modified_base 14: mod_base = OTHER; note = 2'-fluorocytidine
  modified_base 15: mod_base = OTHER; note = 2'-O-methyluridine
  modified_base 16: mod_base = OTHER; note = 2'-fluorouridine
  modified_base 17: mod_base = OTHER; note = 2'-O-methyladenosine
  modified_base 18: mod_base = OTHER; note = 2'-O-methylcytidine
  modified_base 19: mod_base = OTHER; note = 2'-O-methyladenosine
  modified_base 20: mod_base = OTHER; note = 2'-O-methyladenosine
  modified_base 21: mod_base = OTHER; note = 2'-O-methyladenosine with phosphorothioate linkage
  modified_base 22: mod_base = OTHER; note = 2'-O-methyluridine with phosphorothioate linkage
  modified_base 23: mod_base = OTHER; note = 2'-O-methyluridine
tgctaaaaggcatcttacaaatt

SEQ ID NO: 1502 - RNA, 23 nt, synthetic construct
  source 1..23: mol_type = other RNA
  modified_base 1: mod_base = OTHER; note = 5'-(E)-vinylphosphonate 2'-O-methylated uridine with phosphorothioate linkage
  modified_base 2: mod_base = OTHER; note = 2'-fluorocytidine with phosphorothioate linkage
  modified_base 3: mod_base = OTHER; note = 2'-O-methylguanosine
  modified_base 4: mod_base = OTHER; note = 2'-O-methylcytidine
  modified_base 5: mod_base = OTHER; note = 2'-O-methyluridine
  modified_base 6: mod_base = OTHER; note = 2'-fluoroadenosine
  modified_base 7: mod_base = OTHER; note = 2'-O-methyladenosine
  modified_base 8: mod_base = OTHER; note = 2'-O-methyladenosine
  modified_base 9: mod_base = OTHER; note = 2'-O-methyladenosine
  modified_base 10: mod_base = OTHER; note = 2'-O-methylguanosine
  modified_base 11: mod_base = OTHER; note = 2'-O-methylguanosine
  modified_base 12: mod_base = OTHER; note = 2'-O-methylcytidine
  modified_base 13: mod_base = OTHER; note = 2'-O-methyladenosine
  modified_base 14: mod_base = OTHER; note = 2'-fluorouridine
  modified_base 15: mod_base = OTHER; note = 2'-O-methylcytidine
  modified_base 16: mod_base = OTHER; note = 2'-fluorouridine
  modified_base 17: mod_base = OTHER; note = 2'-O-methyluridine
  modified_base 18: mod_base = OTHER; note = 2'-O-methyladenosine
  modified_base 19: mod_base = OTHER; note = 2'-O-methylcytidine
  modified_base 20: mod_base = OTHER; note = 2'-O-methyladenosine
  modified_base 21: mod_base = OTHER; note = 2'-O-methyladenosine with phosphorothioate linkage
  modified_base 22: mod_base = OTHER; note = 2'-O-methyladenosine with phosphorothioate linkage
  modified_base 23: mod_base = OTHER; note = 2'-O-methyluridine
tcgctaaaaggcatcttacaaat

SEQ ID NO: 1503 - RNA, 23 nt, synthetic construct
  source 1..23: mol_type = other RNA
  modified_base 1: mod_base = OTHER; note = 5'-(E)-vinylphosphonate 2'-O-methylated uridine with phosphorothioate linkage
  modified_base 2: mod_base = OTHER; note = 2'-fluoroadenosine with phosphorothioate linkage
  modified_base 3: mod_base = OTHER; note = 2'-O-methylcytidine
  modified_base 4: mod_base = OTHER; note = 2'-O-methylguanosine
  modified_base 5: mod_base = OTHER; note = 2'-O-methylcytidine
  modified_base 6: mod_base = OTHER; note = 2'-fluorouridine
  modified_base 7: mod_base = OTHER; note = 2'-O-methyladenosine
  modified_base 8: mod_base = OTHER; note = 2'-O-methyladenosine
  modified_base 9: mod_base = OTHER; note = 2'-O-methyladenosine
  modified_base 10: mod_base = OTHER; note = 2'-O-methyladenosine
  modified_base 11: mod_base = OTHER; note = 2'-O-methylguanosine
  modified_base 12: mod_base = OTHER; note = 2'-O-methylguanosine
  modified_base 13: mod_base = OTHER; note = 2'-O-methylcytidine
  modified_base 14: mod_base = OTHER; note = 2'-fluoroadenosine
  modified_base 15: mod_base = OTHER; note = 2'-O-methyluridine
  modified_base 16: mod_base = OTHER; note = 2'-fluorocytidine
  modified_base 17: mod_base = OTHER; note = 2'-O-methyluridine
  modified_base 18: mod_base = OTHER; note = 2'-O-methyluridine
  modified_base 19: mod_base = OTHER; note = 2'-O-methyladenosine
  modified_base 20: mod_base = OTHER; note = 2'-O-methylcytidine
  modified_base 21: mod_base = OTHER; note = 2'-O-methyladenosine with phosphorothioate linkage
  modified_base 22: mod_base = OTHER; note = 2'-O-methyladenosine with phosphorothioate linkage
  modified_base 23: mod_base = OTHER; note = 2'-O-methyladenosine
tacgctaaaaggcatcttacaaa

SEQ ID NO: 1504 - RNA, 23 nt, synthetic construct
  source 1..23: mol_type = other RNA
  modified_base 1: mod_base = OTHER; note = 5'-(E)-vinylphosphonate 2'-O-methylated uridine with phosphorothioate linkage
  modified_base 2: mod_base = OTHER; note = 2'-fluorouridine with phosphorothioate linkage
  modified_base 3: mod_base = OTHER; note = 2'-O-methyladenosine
  modified_base 4: mod_base = OTHER; note = 2'-O-methylcytidine
  modified_base 5: mod_base = OTHER; note = 2'-O-methyladenosine
  modified_base 6: mod_base = OTHER; note = 2'-fluorocytidine
  modified_base 7: mod_base = OTHER; note = 2'-O-methylguanosine
  modified_base 8: mod_base = OTHER; note = 2'-O-methylcytidine
  modified_base 9: mod_base = OTHER; note = 2'-O-methyluridine
  modified_base 10: mod_base = OTHER; note = 2'-O-methyladenosine
  modified_base 11: mod_base = OTHER; note = 2'-O-methyladenosine
  modified_base 12: mod_base = OTHER; note = 2'-O-methyladenosine
  modified_base 13: mod_base = OTHER; note = 2'-O-methyladenosine
  modified_base 14: mod_base = OTHER; note = 2'-fluoroguanosine
  modified_base 15: mod_base = OTHER; note = 2'-O-methylguanosine
  modified_base 16: mod_base = OTHER; note = 2'-fluorocytidine
  modified_base 17: mod_base = OTHER; note = 2'-O-methyladenosine
  modified_base 18: mod_base = OTHER; note = 2'-O-methyluridine
  modified_base 19: mod_base = OTHER; note = 2'-O-methylcytidine
  modified_base 20: mod_base = OTHER; note = 2'-O-methyluridine
  modified_base 21: mod_base = OTHER; note = 2'-O-methyluridine with phosphorothioate linkage
  modified_base 22: mod_base = OTHER; note = 2'-O-methyladenosine with phosphorothioate linkage
  modified_base 23: mod_base = OTHER; note = 2'-O-methylcytidine
ttacacgctaaaaggcatcttac

SEQ ID NO: 1505 - RNA, 23 nt, synthetic construct
  source 1..23: mol_type = other RNA
  modified_base 1: mod_base = OTHER; note = 5'-(E)-vinylphosphonate 2'-O-methylated uridine with phosphorothioate linkage
  modified_base 2: mod_base = OTHER; note = 2'-fluoroguanosine with phosphorothioate linkage
  modified_base 3: mod_base = OTHER; note = 2'-O-methylguanosine
  modified_base 4: mod_base = OTHER; note = 2'-O-methyluridine
  modified_base 5: mod_base = OTHER; note = 2'-O-methyladenosine
  modified_base 6: mod_base = OTHER; note = 2'-fluorocytidine
  modified_base 7: mod_base = OTHER; note = 2'-O-methyluridine
  modified_base 8: mod_base = OTHER; note = 2'-O-methylguanosine
  modified_base 9: mod_base = OTHER; note = 2'-O-methyluridine
  modified_base 10: mod_base = OTHER; note = 2'-O-methyladenosine
  modified_base 11: mod_base = OTHER; note = 2'-O-methylcytidine
  modified_base 12: mod_base = OTHER; note = 2'-O-methyladenosine
  modified_base 13: mod_base = OTHER; note = 2'-O-methylcytidine
  modified_base 14: mod_base = OTHER; note = 2'-fluoroguanosine
  modified_base 15: mod_base = OTHER; note = 2'-O-methylcytidine
  modified_base 16: mod_base = OTHER; note = 2'-fluorouridine
  modified_base 17: mod_base = OTHER; note = 2'-O-methyladenosine
  modified_base 18: mod_base = OTHER; note = 2'-O-methyladenosine
  modified_base 19: mod_base = OTHER; note = 2'-O-methyladenosine
  modified_base 20: mod_base = OTHER; note = 2'-O-methyladenosine
  modified_base 21: mod_base = OTHER; note = 2'-O-methylguanosine with phosphorothioate linkage
  modified_base 22: mod_base = OTHER; note = 2'-O-methylguanosine with phosphorothioate linkage
  modified_base 23: mod_base = OTHER; note = 2'-O-methylcytidine
tggtactgtacacgctaaaaggc

SEQ ID NO: 1506 - RNA, 23 nt, synthetic construct
  source 1..23: mol_type = other RNA
  modified_base 1: mod_base = OTHER; note = 5'-(E)-vinylphosphonate 2'-O-methylated uridine with phosphorothioate linkage
  modified_base 2: mod_base = OTHER; note = 2'-fluoroguanosine with phosphorothioate linkage
  modified_base 3: mod_base = OTHER; note = 2'-O-methylguanosine
  modified_base 4: mod_base = OTHER; note = 2'-O-methylguanosine
  modified_base 5: mod_base = OTHER; note = 2'-O-methyluridine
  modified_base 6: mod_base = OTHER; note = 2'-fluoroadenosine
  modified_base 7: mod_base = OTHER; note = 2'-O-methylcytidine
  modified_base 8: mod_base = OTHER; note = 2'-O-methyluridine
  modified_base 9: mod_base = OTHER; note = 2'-O-methylguanosine
  modified_base 10: mod_base = OTHER; note = 2'-O-methyluridine
  modified_base 11: mod_base = OTHER; note = 2'-O-methyladenosine
  modified_base 12: mod_base = OTHER; note = 2'-O-methylcytidine
  modified_base 13: mod_base = OTHER; note = 2'-O-methyladenosine
  modified_base 14: mod_base = OTHER; note = 2'-fluorocytidine
  modified_base 15: mod_base = OTHER; note = 2'-O-methylguanosine
  modified_base 16: mod_base = OTHER; note = 2'-fluorocytidine
  modified_base 17: mod_base = OTHER; note = 2'-O-methyluridine
  modified_base 18: mod_base = OTHER; note = 2'-O-methyladenosine
  modified_base 19: mod_base = OTHER; note = 2'-O-methyladenosine
  modified_base 20: mod_base = OTHER; note = 2'-O-methyladenosine
  modified_base 21: mod_base = OTHER; note = 2'-O-methyladenosine with phosphorothioate linkage
  modified_base 22: mod_base = OTHER; note = 2'-O-methylguanosine with phosphorothioate linkage
  modified_base 23: mod_base = OTHER; note = 2'-O-methylguanosine
tgggtactgtacacgctaaaagg

SEQ ID NO: 1507 - RNA, 23 nt, synthetic construct
  source 1..23: mol_type = other RNA
  modified_base 1: mod_base = OTHER; note = 5'-(E)-vinylphosphonate 2'-O-methylated uridine with phosphorothioate linkage
  modified_base 2: mod_base = OTHER; note = 2'-fluoroguanosine with phosphorothioate linkage
  modified_base 3: mod_base = OTHER; note = 2'-O-methyluridine
  modified_base 4: mod_base = OTHER; note = 2'-O-methyluridine
  modified_base 5: mod_base = OTHER; note = 2'-O-methyluridine
  modified_base 6: mod_base = OTHER; note = 2'-fluorocytidine
  modified_base 7: mod_base = OTHER; note = 2'-O-methyluridine
  modified_base 8: mod_base = OTHER; note = 2'-O-methylcytidine
  modified_base 9: mod_base = OTHER; note = 2'-O-methylcytidine
  modified_base 10: mod_base = OTHER; note = 2'-O-methyladenosine
  modified_base 11: mod_base = OTHER; note = 2'-O-methylguanosine
  modified_base 12: mod_base = OTHER; note = 2'-O-methylguanosine
  modified_base 13: mod_base = OTHER; note = 2'-O-methylguanosine
  modified_base 14: mod_base = OTHER; note = 2'-fluorouridine
  modified_base 15: mod_base = OTHER; note = 2'-O-methyladenosine
  modified_base 16: mod_base = OTHER; note = 2'-fluorocytidine
  modified_base 17: mod_base = OTHER; note = 2'-O-methyluridine
  modified_base 18: mod_base = OTHER; note = 2'-O-methylguanosine
  modified_base 19: mod_base = OTHER; note = 2'-O-methyluridine
  modified_base 20: mod_base = OTHER; note = 2'-O-methyladenosine
  modified_base 21: mod_base = OTHER; note = 2'-O-methylcytidine with phosphorothioate linkage
  modified_base 22: mod_base = OTHER; note = 2'-O-methyladenosine with phosphorothioate linkage
  modified_base 23: mod_base = OTHER; note = 2'-O-methylcytidine
tgtttctccagggtactgtacac

SEQ ID NO: 1508 - RNA, 23 nt, synthetic construct
  source 1..23: mol_type = other RNA
  modified_base 1: mod_base = OTHER; note = 5'-(E)-vinylphosphonate 2'-O-methylated uridine with phosphorothioate linkage
  modified_base 2: mod_base = OTHER; note = 2'-fluorouridine with phosphorothioate linkage
  modified_base 3: mod_base = OTHER; note = 2'-O-methylguanosine
  modified_base 4: mod_base = OTHER; note = 2'-O-methyluridine
  modified_base 5: mod_base = OTHER; note = 2'-O-methyluridine
  modified_base 6: mod_base = OTHER; note = 2'-fluorouridine
  modified_base 7: mod_base = OTHER; note = 2'-O-methylcytidine
  modified_base 8: mod_base = OTHER; note = 2'-O-methyluridine
  modified_base 9: mod_base = OTHER; note = 2'-O-methylcytidine
  modified_base 10: mod_base = OTHER; note = 2'-O-methylcytidine
  modified_base 11: mod_base = OTHER; note = 2'-O-methyladenosine
  modified_base 12: mod_base = OTHER; note = 2'-O-methylguanosine
  modified_base 13: mod_base = OTHER; note = 2'-O-methylguanosine
  modified_base 14: mod_base = OTHER; note = 2'-fluoroguanosine
  modified_base 15: mod_base = OTHER; note = 2'-O-methyluridine
  modified_base 16: mod_base = OTHER; note = 2'-fluoroadenosine
  modified_base 17: mod_base = OTHER; note = 2'-O-methylcytidine
  modified_base 18: mod_base = OTHER; note = 2'-O-methyluridine
  modified_base 19: mod_base = OTHER; note = 2'-O-methylguanosine
  modified_base 20: mod_base = OTHER; note = 2'-O-methyluridine
  modified_base 21: mod_base = OTHER; note = 2'-O-methyladenosine with phosphorothioate linkage
  modified_base 22: mod_base = OTHER; note = 2'-O-methylcytidine with phosphorothioate linkage
  modified_base 23: mod_base = OTHER; note = 2'-O-methyladenosine
ttgtttctccagggtactgtaca

SEQ ID NO: 1509 - RNA, 23 nt, synthetic construct
  source 1..23: mol_type = other RNA
  modified_base 1: mod_base = OTHER; note = 5'-(E)-vinylphosphonate 2'-O-methylated uridine with phosphorothioate linkage
  modified_base 2: mod_base = OTHER; note = 2'-fluoroguanosine with phosphorothioate linkage
  modified_base 3: mod_base = OTHER; note = 2'-O-methyluridine
  modified_base 4: mod_base = OTHER; note = 2'-O-methylguanosine
  modified_base 5: mod_base = OTHER; note = 2'-O-methyluridine
  modified_base 6: mod_base = OTHER; note = 2'-fluorouridine
  modified_base 7: mod_base = OTHER; note = 2'-O-methyluridine
  modified_base 8: mod_base = OTHER; note = 2'-O-methylcytidine
  modified_base 9: mod_base = OTHER; note = 2'-O-methyluridine
  modified_base 10: mod_base = OTHER; note = 2'-O-methylcytidine
  modified_base 11: mod_base = OTHER; note = 2'-O-methylcytidine
  modified_base 12: mod_base = OTHER; note = 2'-O-methyladenosine
  modified_base 13: mod_base = OTHER; note = 2'-O-methylguanosine
  modified_base 14: mod_base = OTHER; note = 2'-fluoroguanosine
  modified_base 15: mod_base = OTHER; note = 2'-O-methylguanosine
  modified_base 16: mod_base = OTHER; note = 2'-fluorouridine
  modified_base 17: mod_base = OTHER; note = 2'-O-methyladenosine
  modified_base 18: mod_base = OTHER; note = 2'-O-methylcytidine
  modified_base 19: mod_base = OTHER; note = 2'-O-methyluridine
  modified_base 20: mod_base = OTHER; note = 2'-O-methylguanosine
  modified_base 21: mod_base = OTHER; note = 2'-O-methyluridine with phosphorothioate linkage
  modified_base 22: mod_base = OTHER; note = 2'-O-methyladenosine with phosphorothioate linkage
  modified_base 23: mod_base = OTHER; note = 2'-O-methylcytidine
tgtgtttctccagggtactgtac

SEQ ID NO: 1510 - RNA, 23 nt, synthetic construct
  source 1..23: mol_type = other RNA
  modified_base 1: mod_base = OTHER; note = 5'-(E)-vinylphosphonate 2'-O-methylated uridine with phosphorothioate linkage
  modified_base 2: mod_base = OTHER; note = 2'-fluorouridine with phosphorothioate linkage
  modified_base 3: mod_base = OTHER; note = 2'-O-methylguanosine
  modified_base 4: mod_base = OTHER; note = 2'-O-methyluridine
  modified_base 5: mod_base = OTHER; note = 2'-O-methylguanosine
  modified_base 6: mod_base = OTHER; note = 2'-fluorouridine
  modified_base 7: mod_base = OTHER; note = 2'-O-methyluridine
  modified_base 8: mod_base = OTHER; note = 2'-O-methyluridine
  modified_base 9: mod_base = OTHER; note = 2'-O-methylcytidine
  modified_base 10: mod_base = OTHER; note = 2'-O-methyluridine
  modified_base 11: mod_base = OTHER; note = 2'-O-methylcytidine
  modified_base 12: mod_base = OTHER; note = 2'-O-methylcytidine
  modified_base 13: mod_base = OTHER; note = 2'-O-methyladenosine
  modified_base 14: mod_base = OTHER; note = 2'-fluoroguanosine
  modified_base 15: mod_base = OTHER; note = 2'-O-methylguanosine
  modified_base 16: mod_base = OTHER; note = 2'-fluoroguanosine
  modified_base 17: mod_base = OTHER; note = 2'-O-methyluridine
  modified_base 18: mod_base = OTHER; note = 2'-O-methyladenosine
  modified_base 19: mod_base = OTHER; note = 2'-O-methylcytidine
  modified_base 20: mod_base = OTHER; note = 2'-O-methyluridine
  modified_base 21: mod_base = OTHER; note = 2'-O-methylguanosine with phosphorothioate linkage
  modified_base 22: mod_base = OTHER; note = 2'-O-methyluridine with phosphorothioate linkage
  modified_base 23: mod_base = OTHER; note = 2'-O-methyladenosine
ttgtgtttctccagggtactgta

SEQ ID NO: 1511 - RNA, 23 nt, synthetic construct
  source 1..23: mol_type = other RNA
  modified_base 1: mod_base = OTHER; note = 5'-(E)-vinylphosphonate 2'-O-methylated uridine with phosphorothioate linkage
  modified_base 2: mod_base = OTHER; note = 2'-fluoroadenosine with phosphorothioate linkage
  modified_base 3: mod_base = OTHER; note = 2'-O-methyluridine
  modified_base 4: mod_base = OTHER; note = 2'-O-methylguanosine
  modified_base 5: mod_base = OTHER; note = 2'-O-methyluridine
  modified_base 6: mod_base = OTHER; note = 2'-fluoroguanosine
  modified_base 7: mod_base = OTHER; note = 2'-O-methyluridine
  modified_base 8: mod_base = OTHER; note = 2'-O-methyluridine
  modified_base 9: mod_base = OTHER; note = 2'-O-methyluridine
  modified_base 10: mod_base = OTHER; note = 2'-O-methylcytidine
  modified_base 11: mod_base = OTHER; note = 2'-O-methyluridine
  modified_base 12: mod_base = OTHER; note = 2'-O-methylcytidine
  modified_base 13: mod_base = OTHER; note = 2'-O-methylcytidine
  modified_base 14: mod_base = OTHER; note = 2'-fluoroadenosine
  modified_base 15: mod_base = OTHER; note = 2'-O-methylguanosine
  modified_base 16: mod_base = OTHER; note = 2'-fluoroguanosine
  modified_base 17: mod_base = OTHER; note = 2'-O-methylguanosine
  modified_base 18: mod_base = OTHER; note = 2'-O-methyluridine
  modified_base 19: mod_base = OTHER; note = 2'-O-methyladenosine
  modified_base 20: mod_base = OTHER; note = 2'-O-methylcytidine
  modified_base 21: mod_base = OTHER; note = 2'-O-methyluridine with phosphorothioate linkage
  modified_base 22: mod_base = OTHER; note = 2'-O-methylguanosine with phosphorothioate linkage
  modified_base 23: mod_base = OTHER; note = 2'-O-methyluridine
tatgtgtttctccagggtactgt

SEQ ID NO: 1512 - RNA, 23 nt, synthetic construct
  source 1..23: mol_type = other RNA
  modified_base 1: mod_base = OTHER; note = 5'-(E)-vinylphosphonate 2'-O-methylated uridine with phosphorothioate linkage
  modified_base 2: mod_base = OTHER; note = 2'-fluorocytidine with phosphorothioate linkage
  modified_base 3: mod_base = OTHER; note = 2'-O-methyladenosine
  modified_base 4: mod_base = OTHER; note = 2'-O-methyluridine
  modified_base 5: mod_base = OTHER; note = 2'-O-methylguanosine
  modified_base 6: mod_base = OTHER; note = 2'-fluorouridine
  modified_base 7: mod_base = OTHER; note = 2'-O-methylguanosine
  modified_base 8: mod_base = OTHER; note = 2'-O-methyluridine
  modified_base 9: mod_base = OTHER; note = 2'-O-methyluridine
  modified_base 10: mod_base = OTHER; note = 2'-O-methyluridine
  modified_base 11: mod_base = OTHER; note = 2'-O-methylcytidine
  modified_base 12: mod_base = OTHER; note = 2'-O-methyluridine
  modified_base 13: mod_base = OTHER; note = 2'-O-methylcytidine
  modified_base 14: mod_base = OTHER; note = 2'-fluorocytidine
  modified_base 15: mod_base = OTHER; note = 2'-O-methyladenosine
  modified_base 16: mod_base = OTHER; note = 2'-fluoroguanosine
  modified_base 17: mod_base = OTHER; note = 2'-O-methylguanosine
  modified_base 18: mod_base = OTHER; note = 2'-O-methylguanosine
  modified_base 19: mod_base = OTHER; note = 2'-O-methyluridine
  modified_base 20: mod_base = OTHER; note = 2'-O-methyladenosine
  modified_base 21: mod_base = OTHER; note = 2'-O-methylcytidine with phosphorothioate linkage
  modified_base 22: mod_base = OTHER; note = 2'-O-methyluridine with phosphorothioate linkage
  modified_base 23: mod_base = OTHER; note = 2'-O-methylguanosine
tcatgtgtttctccagggtactg

SEQ ID NO: 1513 - RNA, 23 nt, synthetic construct
  source 1..23: mol_type = other RNA
  modified_base 1: mod_base = OTHER; note = 5'-(E)-vinylphosphonate 2'-O-methylated uridine with phosphorothioate linkage
  modified_base 2: mod_base = OTHER; note = 2'-fluorouridine with phosphorothioate linkage
  modified_base 3: mod_base = OTHER; note = 2'-O-methylcytidine
  modified_base 4: mod_base = OTHER; note = 2'-O-methyladenosine
  modified_base 5: mod_base = OTHER; note = 2'-O-methyluridine
  modified_base 6: mod_base = OTHER; note = 2'-fluoroguanosine
  modified_base 7: mod_base = OTHER; note = 2'-O-methyluridine
  modified_base 8: mod_base = OTHER; note = 2'-O-methylguanosine
  modified_base 9: mod_base = OTHER; note = 2'-O-methyluridine
  modified_base 10: mod_base = OTHER; note = 2'-O-methyluridine
  modified_base 11: mod_base = OTHER; note = 2'-O-methyluridine
  modified_base 12: mod_base = OTHER; note = 2'-O-methylcytidine
  modified_base 13: mod_base = OTHER; note = 2'-O-methyluridine
  modified_base 14: mod_base = OTHER; note = 2'-fluorocytidine
  modified_base 15: mod_base = OTHER; note = 2'-O-methylcytidine
  modified_base 16: mod_base = OTHER; note = 2'-fluoroadenosine
  modified_base 17: mod_base = OTHER; note = 2'-O-methylguanosine
  modified_base 18: mod_base = OTHER; note = 2'-O-methylguanosine
  modified_base 19: mod_base = OTHER; note = 2'-O-methylguanosine
  modified_base 20: mod_base = OTHER; note = 2'-O-methyluridine
  modified_base 21: mod_base = OTHER; note = 2'-O-methyladenosine with phosphorothioate linkage
  modified_base 22: mod_base = OTHER; note = 2'-O-methylcytidine with phosphorothioate linkage
  modified_base 23: mod_base = OTHER; note = 2'-O-methyluridine
ttcatgtgtttctccagggtact

SEQ ID NO: 1514 - RNA, 23 nt, synthetic construct
  source 1..23: mol_type = other RNA
  modified_base 1: mod_base = OTHER; note = 5'-(E)-vinylphosphonate 2'-O-methylated uridine with phosphorothioate linkage
  modified_base 2: mod_base = OTHER; note = 2'-fluorouridine with phosphorothioate linkage
  modified_base 3: mod_base = OTHER; note = 2'-O-methyluridine
  modified_base 4: mod_base = OTHER; note = 2'-O-methylcytidine
  modified_base 5: mod_base = OTHER; note = 2'-O-methyladenosine
  modified_base 6: mod_base = OTHER; note = 2'-fluorouridine
  modified_base 7: mod_base = OTHER; note = 2'-O-methylguanosine
  modified_base 8: mod_base = OTHER; note = 2'-O-methyluridine
  modified_base 9: mod_base = OTHER; note = 2'-O-methylguanosine
  modified_base 10: mod_base = OTHER; note = 2'-O-methyluridine
  modified_base 11: mod_base = OTHER; note = 2'-O-methyluridine
  modified_base 12: mod_base = OTHER; note = 2'-O-methyluridine
  modified_base 13: mod_base = OTHER; note = 2'-O-methylcytidine
  modified_base 14: mod_base = OTHER; note = 2'-fluorouridine
  modified_base 15: mod_base = OTHER; note = 2'-O-methylcytidine
  modified_base 16: mod_base = OTHER; note = 2'-fluorocytidine
  modified_base 17: mod_base = OTHER; note = 2'-O-methyladenosine
  modified_base 18: mod_base = OTHER; note = 2'-O-methylguanosine
  modified_base 19: mod_base = OTHER; note = 2'-O-methylguanosine
  modified_base 20: mod_base = OTHER; note = 2'-O-methylguanosine
  modified_base 21: mod_base = OTHER; note = 2'-O-methyluridine with phosphorothioate linkage
  modified_base 22: mod_base = OTHER; note = 2'-O-methyladenosine with phosphorothioate linkage
  modified_base 23: mod_base = OTHER; note = 2'-O-methylcytidine
tttcatgtgtttctccagggtac

SEQ ID NO: 1515 - RNA, 23 nt, synthetic construct
  source 1..23: mol_type = other RNA
  modified_base 1: mod_base = OTHER; note = 5'-(E)-vinylphosphonate 2'-O-methylated uridine with phosphorothioate linkage
  modified_base 2: mod_base = OTHER; note = 2'-fluorouridine with phosphorothioate linkage
  modified_base 3: mod_base = OTHER; note = 2'-O-methyluridine
  modified_base 4: mod_base = OTHER; note = 2'-O-methyluridine
  modified_base 5: mod_base = OTHER; note = 2'-O-methylcytidine
  modified_base 6: mod_base = OTHER; note = 2'-fluoroadenosine
  modified_base 7: mod_base = OTHER; note = 2'-O-methyluridine
  modified_base 8: mod_base = OTHER; note = 2'-O-methylguanosine
  modified_base 9: mod_base = OTHER; note = 2'-O-methyluridine
  modified_base 10: mod_base = OTHER; note = 2'-O-methylguanosine
  modified_base 11: mod_base = OTHER; note = 2'-O-methyluridine
  modified_base 12: mod_base = OTHER; note = 2'-O-methyluridine
  modified_base 13: mod_base = OTHER; note = 2'-O-methyluridine
  modified_base 14: mod_base = OTHER; note = 2'-fluorocytidine
  modified_base 15: mod_base = OTHER; note = 2'-O-methyluridine
  modified_base 16: mod_base = OTHER; note = 2'-fluorocytidine
  modified_base 17: mod_base = OTHER; note = 2'-O-methylcytidine
  modified_base 18: mod_base = OTHER; note = 2'-O-methyladenosine
  modified_base 19: mod_base = OTHER; note = 2'-O-methylguanosine
  modified_base 20: mod_base = OTHER; note = 2'-O-methylguanosine
  modified_base 21: mod_base = OTHER; note = 2'-O-methylguanosine with phosphorothioate linkage
  modified_base 22: mod_base = OTHER; note = 2'-O-methyluridine with phosphorothioate linkage
  modified_base 23: mod_base = OTHER; note = 2'-O-methyladenosine
ttttcatgtgtttctccagggta

SEQ ID NO: 1516 - RNA, 23 nt, synthetic construct
  source 1..23: mol_type = other RNA
  modified_base 1: mod_base = OTHER; note = 5'-(E)-vinylphosphonate 2'-O-methylated uridine with phosphorothioate linkage
  modified_base 2: mod_base = OTHER; note = 2'-fluorouridine with phosphorothioate linkage
  modified_base 3: mod_base = OTHER; note = 2'-O-methyluridine
  modified_base 4: mod_base = OTHER; note = 2'-O-methyluridine
  modified_base 5: mod_base = OTHER; note = 2'-O-methyluridine
  modified_base 6: mod_base = OTHER; note = 2'-fluorocytidine
  modified_base 7: mod_base = OTHER; note = 2'-O-methyladenosine
  modified_base 8: mod_base = OTHER; note = 2'-O-methyluridine
  modified_base 9: mod_base = OTHER; note = 2'-O-methylguanosine
  modified_base 10: mod_base = OTHER; note = 2'-O-methyluridine
  modified_base 11: mod_base = OTHER; note = 2'-O-methylguanosine
  modified_base 12: mod_base = OTHER; note = 2'-O-methyluridine
  modified_base 13: mod_base = OTHER; note = 2'-O-methyluridine
  modified_base 14: mod_base = OTHER; note = 2'-fluorouridine
  modified_base 15: mod_base = OTHER; note = 2'-O-methylcytidine
  modified_base 16: mod_base = OTHER; note = 2'-fluorouridine
  modified_base 17: mod_base = OTHER; note = 2'-O-methylcytidine
  modified_base 18: mod_base = OTHER; note = 2'-O-methylcytidine
  modified_base 19: mod_base = OTHER; note = 2'-O-methyladenosine
  modified_base 20: mod_base = OTHER; note = 2'-O-methylguanosine
  modified_base 21: mod_base = OTHER; note = 2'-O-methylguanosine with phosphorothioate linkage
  modified_base 22: mod_base = OTHER; note = 2'-O-methylguanosine with phosphorothioate linkage
  modified_base 23: mod_base = OTHER; note = 2'-O-methyluridine
tttttcatgtgtttctccagggt

SEQ ID NO: 1517 - RNA, 23 nt, synthetic construct
  source 1..23: mol_type = other RNA
  modified_base 1: mod_base = OTHER; note = 5'-(E)-vinylphosphonate 2'-O-methylated uridine with phosphorothioate linkage
  modified_base 2: mod_base = OTHER; note = 2'-fluorouridine with phosphorothioate linkage
  modified_base 3: mod_base = OTHER; note = 2'-O-methyluridine
  modified_base 4: mod_base = OTHER; note = 2'-O-methyluridine
  modified_base 5: mod_base = OTHER; note = 2'-O-methyluridine
  modified_base 6: mod_base = OTHER; note = 2'-fluorouridine
  modified_base 7: mod_base = OTHER; note = 2'-O-methylcytidine
  modified_base 8: mod_base = OTHER; note = 2'-O-methyladenosine
  modified_base 9: mod_base = OTHER; note = 2'-O-methyluridine
  modified_base 10: mod_base = OTHER; note = 2'-O-methylguanosine
  modified_base 11: mod_base = OTHER; note = 2'-O-methyluridine
  modified_base 12: mod_base = OTHER; note = 2'-O-methylguanosine
  modified_base 13: mod_base = OTHER; note = 2'-O-methyluridine
  modified_base 14: mod_base = OTHER; note = 2'-fluorouridine
  modified_base 15: mod_base = OTHER; note = 2'-O-methyluridine
  modified_base 16: mod_base = OTHER; note = 2'-fluorocytidine
  modified_base 17: mod_base = OTHER; note = 2'-O-methyluridine
  modified_base 18: mod_base = OTHER; note = 2'-O-methylcytidine
  modified_base 19: mod_base = OTHER; note = 2'-O-methylcytidine
  modified_base 20: mod_base = OTHER; note = 2'-O-methyladenosine
  modified_base 21: mod_base = OTHER; note = 2'-O-methylguanosine with phosphorothioate linkage
  modified_base 22: mod_base = OTHER; note = 2'-O-methylguanosine with phosphorothioate linkage
  modified_base 23: mod_base = OTHER; note = 2'-O-methylguanosine
ttttttcatgtgtttctccaggg

SEQ ID NO: 1518 - RNA, 23 nt, synthetic construct
  source 1..23: mol_type = other RNA
  modified_base 1: mod_base = OTHER; note = 5'-(E)-vinylphosphonate 2'-O-methylated uridine with phosphorothioate linkage
  modified_base 2: mod_base = OTHER; note = 2'-fluorouridine with phosphorothioate linkage
  modified_base 3: mod_base = OTHER; note = 2'-O-methyluridine
  modified_base 4: mod_base = OTHER; note = 2'-O-methyluridine
  modified_base 5: mod_base = OTHER; note = 2'-O-methyluridine
  modified_base 6: mod_base = OTHER; note = 2'-fluorouridine
  modified_base 7: mod_base = OTHER; note = 2'-O-methyluridine
  modified_base 8: mod_base = OTHER; note = 2'-O-methylcytidine
  modified_base 9: mod_base = OTHER; note = 2'-O-methyladenosine
  modified_base 10: mod_base = OTHER; note = 2'-O-methyluridine
  modified_base 11: mod_base = OTHER; note = 2'-O-methylguanosine
  modified_base 12: mod_base = OTHER; note = 2'-O-methyluridine
  modified_base 13: mod_base = OTHER; note = 2'-O-methylguanosine
  modified_base 14: mod_base = OTHER; note = 2'-fluorouridine
  modified_base 15: mod_base = OTHER; note = 2'-O-methyluridine
  modified_base 16: mod_base = OTHER; note = 2'-fluorouridine
  modified_base 17: mod_base = OTHER; note = 2'-O-methylcytidine
  modified_base 18: mod_base = OTHER; note = 2'-O-methyluridine
  modified_base 19: mod_base = OTHER; note = 2'-O-methylcytidine
  modified_base 20: mod_base = OTHER; note = 2'-O-methylcytidine
  modified_base 21: mod_base = OTHER; note = 2'-O-methyladenosine with phosphorothioate linkage
  modified_base 22: mod_base = OTHER; note = 2'-O-methylguanosine with phosphorothioate linkage
  modified_base 23: mod_base = OTHER; note = 2'-O-methylguanosine
tttttttcatgtgtttctccagg

SEQ ID NO: 1519 - RNA, 23 nt, synthetic construct
  source 1..23: mol_type = other RNA
  modified_base 1: mod_base = OTHER; note = 5'-(E)-vinylphosphonate 2'-O-methylated uridine with phosphorothioate linkage
  modified_base 2: mod_base = OTHER; note = 2'-fluoroadenosine with phosphorothioate linkage
  modified_base 3: mod_base = OTHER; note = 2'-O-methyluridine
  modified_base 4: mod_base = OTHER; note = 2'-O-methyluridine
  modified_base 5: mod_base = OTHER; note = 2'-O-methyluridine
  modified_base 6: mod_base = OTHER; note = 2'-fluorouridine
  modified_base 7: mod_base = OTHER; note = 2'-O-methyluridine
  modified_base 8: mod_base = OTHER; note = 2'-O-methyluridine
  modified_base 9: mod_base = OTHER; note = 2'-O-methylcytidine
  modified_base 10: mod_base = OTHER; note = 2'-O-methyladenosine
  modified_base 11: mod_base = OTHER; note = 2'-O-methyluridine
  modified_base 12: mod_base = OTHER; note = 2'-O-methylguanosine
  modified_base 13: mod_base = OTHER; note = 2'-O-methyluridine
  modified_base 14: mod_base = OTHER; note = 2'-fluoroguanosine
  modified_base 15: mod_base = OTHER; note = 2'-O-methyluridine
  modified_base 16: mod_base = OTHER; note = 2'-fluorouridine
  modified_base 17: mod_base = OTHER; note = 2'-O-methyluridine
  modified_base 18: mod_base = OTHER; note = 2'-O-methylcytidine
  modified_base 19: mod_base = OTHER; note = 2'-O-methyluridine
  modified_base 20: mod_base = OTHER; note = 2'-O-methylcytidine
  modified_base 21: mod_base = OTHER; note = 2'-O-methylcytidine with phosphorothioate linkage
  modified_base 22: mod_base = OTHER; note = 2'-O-methyladenosine with phosphorothioate linkage
  modified_base 23: mod_base = OTHER; note = 2'-O-methylguanosine
tattttttcatgtgtttctccag

SEQ ID NO: 1520 - RNA, 23 nt, synthetic construct
  source 1..23: mol_type = other RNA
  modified_base 1: mod_base = OTHER; note = 5'-(E)-vinylphosphonate 2'-O-methylated uridine with phosphorothioate linkage
  modified_base 2: mod_base = OTHER; note = 2'-fluoroadenosine with phosphorothioate linkage
  modified_base 3: mod_base = OTHER; note = 2'-O-methylcytidine
  modified_base 4: mod_base = OTHER; note = 2'-O-methyladenosine
  modified_base 5: mod_base = OTHER; note = 2'-O-methylcytidine
  modified_base 6: mod_base = OTHER; note = 2'-fluorouridine
  modified_base 7: mod_base = OTHER; note = 2'-O-methylcytidine
  modified_base 8: mod_base = OTHER; note = 2'-O-methylguanosine
  modified_base 9: mod_base = OTHER; note = 2'-O-methyladenosine
  modified_base 10: mod_base = OTHER; note = 2'-O-methyluridine
  modified_base 11: mod_base = OTHER; note = 2'-O-methylcytidine
  modified_base 12: mod_base = OTHER; note = 2'-O-methyladenosine
  modified_base 13: mod_base = OTHER; note = 2'-O-methylcytidine
  modified_base 14: mod_base = OTHER; note = 2'-fluorouridine
  modified_base 15: mod_base = OTHER; note = 2'-O-methylguanosine
  modified_base 16: mod_base = OTHER; note = 2'-fluorouridine
  modified_base 17: mod_base = OTHER; note = 2'-O-methylguanosine
  modified_base 18: mod_base = OTHER; note = 2'-O-methylcytidine
  modified_base 19: mod_base = OTHER; note = 2'-O-methylcytidine
  modified_base 20: mod_base = OTHER; note = 2'-O-methyladenosine
  modified_base 21: mod_base = OTHER; note = 2'-O-methyluridine with phosphorothioate linkage
  modified_base 22: mod_base = OTHER; note = 2'-O-methyluridine with phosphorothioate linkage
  modified_base 23: mod_base = OTHER; note = 2'-O-methyluridine
tacactcgatcactgtgccattt

SEQ ID NO: 1521 - RNA, 23 nt, synthetic construct
  source 1..23: mol_type = other RNA
  modified_base 1: mod_base = OTHER; note = 5'-(E)-vinylphosphonate 2'-O-methylated uridine with phosphorothioate linkage
  modified_base 2: mod_base = OTHER; note = 2'-fluoroguanosine with phosphorothioate linkage
  modified_base 3: mod_base = OTHER; note = 2'-O-methylguanosine
  modified_base 4: mod_base = OTHER; note = 2'-O-methylguanosine
  modified_base 5: mod_base = OTHER; note = 2'-O-methyluridine
  modified_base 6: mod_base = OTHER; note = 2'-fluorouridine
  modified_base 7: mod_base = OTHER; note = 2'-O-methyladenosine
  modified_base 8: mod_base = OTHER; note = 2'-O-methyladenosine
  modified_base 9: mod_base = OTHER; note = 2'-O-methyluridine
  modified_base 10: mod_base = OTHER; note = 2'-O-methylcytidine
  modified_base 11: mod_base = OTHER; note = 2'-O-methylcytidine
  modified_base 12: mod_base = OTHER; note = 2'-O-methyladenosine
  modified_base 13: mod_base = OTHER; note = 2'-O-methyladenosine
  modified_base 14: mod_base = OTHER; note = 2'-fluoroadenosine
  modified_base 15: mod_base = OTHER; note = 2'-O-methylguanosine
  modified_base 16: mod_base = OTHER; note = 2'-fluoroadenosine
  modified_base 17: mod_base = OTHER; note = 2'-O-methylcytidine
  modified_base 18: mod_base = OTHER; note = 2'-O-methyluridine
  modified_base 19: mod_base = OTHER; note = 2'-O-methylguanosine
  modified_base 20: mod_base = OTHER; note = 2'-O-methyluridine
  modified_base 21: mod_base = OTHER; note = 2'-O-methyluridine with phosphorothioate linkage
  modified_base 22: mod_base = OTHER; note = 2'-O-methyluridine with phosphorothioate linkage
  modified_base 23: mod_base = OTHER; note = 2'-O-methyluridine
tgggttaatccaaagactgtttt

SEQ ID NO: 1522 - RNA, 23 nt, synthetic construct
  source 1..23: mol_type = other RNA
  modified_base 1: mod_base = OTHER; note = 5'-(E)-vinylphosphonate 2'-O-methylated uridine with phosphorothioate linkage
  modified_base 2: mod_base = OTHER; note = 2'-fluorouridine with phosphorothioate linkage
  modified_base 3: mod_base = OTHER; note = 2'-O-methylguanosine
  modified_base 4: mod_base = OTHER; note = 2'-O-methyluridine
  modified_base 5: mod_base = OTHER; note = 2'-O-methylcytidine
  modified_base 6: mod_base = OTHER; note = 2'-fluorouridine
  modified_base 7: mod_base = OTHER; note = 2'-O-methyladenosine
  modified_base 8: mod_base = OTHER; note = 2'-O-methyluridine
  modified_base 9: mod_base = OTHER; note = 2'-O-methyladenosine
  modified_base 10: mod_base = OTHER; note = 2'-O-methylguanosine
  modified_base 11: mod_base = OTHER; note = 2'-O-methyladenosine
  modified_base 12: mod_base = OTHER; note = 2'-O-methylguanosine
  modified_base 13: mod_base = OTHER; note = 2'-O-methylguanosine
  modified_base 14: mod_base = OTHER; note = 2'-fluoroguanosine
  modified_base 15: mod_base = OTHER; note = 2'-O-methyluridine
  modified_base 16: mod_base = OTHER; note = 2'-fluorouridine
  modified_base 17: mod_base = OTHER; note = 2'-O-methyladenosine
  modified_base 18: mod_base = OTHER; note = 2'-O-methyladenosine
  modified_base 19: mod_base = OTHER; note = 2'-O-methyluridine
  modified_base 20: mod_base = OTHER; note = 2'-O-methylcytidine
  modified_base 21: mod_base = OTHER; note = 2'-O-methylcytidine with phosphorothioate linkage
  modified_base 22: mod_base = OTHER; note = 2'-O-methyladenosine with phosphorothioate linkage
  modified_base 23: mod_base = OTHER; note = 2'-O-methyladenosine
ttgtctatagagggttaatccaa

SEQ ID NO: 1523 - RNA, 23 nt, synthetic construct
  source 1..23: mol_type = other RNA
  modified_base 1: mod_base = OTHER; note = 5'-(E)-vinylphosphonate 2'-O-methylated uridine with phosphorothioate linkage
  modified_base 2: mod_base = OTHER; note = 2'-fluoroguanosine with phosphorothioate linkage
  modified_base 3: mod_base = OTHER; note = 2'-O-methyluridine
  modified_base 4: mod_base = OTHER; note = 2'-O-methylguanosine
  modified_base 5: mod_base = OTHER; note = 2'-O-methylcytidine
  modified_base 6: mod_base = OTHER; note = 2'-fluorouridine
  modified_base 7: mod_base = OTHER; note = 2'-O-methyladenosine
  modified_base 8: mod_base = OTHER; note = 2'-O-methyluridine
  modified_base 9: mod_base = OTHER; note = 2'-O-methylcytidine
  modified_base 10: mod_base = OTHER; note = 2'-O-methyluridine
  modified_base 11: mod_base = OTHER; note = 2'-O-methyladenosine
  modified_base 12: mod_base = OTHER; note = 2'-O-methyluridine
  modified_base 13: mod_base = OTHER; note = 2'-O-methyluridine
  modified_base 14: mod_base = OTHER; note = 2'-fluorocytidine
  modified_base 15: mod_base = OTHER; note = 2'-O-methyluridine
  modified_base 16: mod_base = OTHER; note = 2'-fluoroguanosine
  modified_base 17: mod_base = OTHER; note = 2'-O-methyluridine
  modified_base 18: mod_base = OTHER; note = 2'-O-methylcytidine
  modified_base 19: mod_base = OTHER; note = 2'-O-methyluridine
  modified_base 20: mod_base = OTHER; note = 2'-O-methyladenosine
  modified_base 21: mod_base = OTHER; note = 2'-O-methyluridine with phosphorothioate linkage
  modified_base 22: mod_base = OTHER; note = 2'-O-methyladenosine with phosphorothioate linkage
  modified_base 23: mod_base = OTHER; note = 2'-O-methylguanosine
tgtgctatctattctgtctatag

SEQ ID NO: 1524 - RNA, 23 nt, synthetic construct
  source 1..23: mol_type = other RNA
  modified_base 1: mod_base = OTHER; note = 5'-(E)-vinylphosphonate 2'-O-methylated uridine with phosphorothioate linkage
  modified_base 2: mod_base = OTHER; note = 2'-fluorocytidine with phosphorothioate linkage
  modified_base 3: mod_base = OTHER; note = 2'-O-methyluridine
  modified_base 4: mod_base = OTHER; note = 2'-O-methyladenosine
  modified_base 5: mod_base = OTHER; note = 2'-O-methylguanosine
  modified_base 6: mod_base = OTHER; note = 2'-fluorouridine
  modified_base 7: mod_base = OTHER; note = 2'-O-methyluridine
  modified_base 8: mod_base = OTHER; note = 2'-O-methylcytidine
  modified_base 9: mod_base = OTHER; note = 2'-O-methylcytidine
  modified_base 10: mod_base = OTHER; note = 2'-O-methyluridine
  modified_base 11: mod_base = OTHER; note = 2'-O-methyladenosine
  modified_base 12: mod_base = OTHER; note = 2'-O-methyladenosine
  modified_base 13: mod_base = OTHER; note = 2'-O-methylguanosine
  modified_base 14: mod_base = OTHER; note = 2'-fluoroguanosine
  modified_base 15: mod_base = OTHER; note = 2'-O-methyluridine
  modified_base 16: mod_base = OTHER; note = 2'-fluorouridine
  modified_base 17: mod_base = OTHER; note = 2'-O-methyluridine
  modified_base 18: mod_base = OTHER; note = 2'-O-methyladenosine
  modified_base 19: mod_base = OTHER; note = 2'-O-methyluridine
  modified_base 20: mod_base = OTHER; note = 2'-O-methyluridine
  modified_base 21: mod_base = OTHER; note = 2'-O-methyladenosine with phosphorothioate linkage
  modified_base 22: mod_base = OTHER; note = 2'-O-methylcytidine with phosphorothioate linkage
  modified_base 23: mod_base = OTHER; note = 2'-O-methylcytidine
tctagttcctaaggtttattacc

SEQ ID NO: 1525 - RNA, 23 nt, synthetic construct
  source 1..23: mol_type = other RNA
  modified_base 1: mod_base = OTHER; note = 5'-(E)-vinylphosphonate 2'-O-methylated uridine with phosphorothioate linkage
  modified_base 2: mod_base = OTHER; note = 2'-fluoroadenosine with phosphorothioate linkage
  modified_base 3: mod_base = OTHER; note = 2'-O-methylcytidine
  modified_base 4: mod_base = OTHER; note = 2'-O-methyluridine
  modified_base 5: mod_base = OTHER; note = 2'-O-methyladenosine
  modified_base 6: mod_base = OTHER; note = 2'-fluoroguanosine
  modified_base 7: mod_base = OTHER; note = 2'-O-methylguanosine
  modified_base 8: mod_base = OTHER; note = 2'-O-methyladenosine
  modified_base 9: mod_base = OTHER; note = 2'-O-methylcytidine
  modified_base 10: mod_base = OTHER; note = 2'-O-methyladenosine
  modified_base 11: mod_base = OTHER; note = 2'-O-methyluridine
  modified_base 12: mod_base = OTHER; note = 2'-O-methyladenosine
  modified_base 13: mod_base = OTHER; note = 2'-O-methyladenosine
  modified_base 14: mod_base = OTHER; note = 2'-fluorouridine
  modified_base 15: mod_base = OTHER; note = 2'-O-methylguanosine
  modified_base 16: mod_base = OTHER; note = 2'-fluoroguanosine
  modified_base 17: mod_base = OTHER; note = 2'-O-methylguanosine
  modified_base 18: mod_base = OTHER; note = 2'-O-methyluridine
  modified_base 19: mod_base = OTHER; note = 2'-O-methylcytidine
  modified_base 20: mod_base = OTHER; note = 2'-O-methyladenosine
  modified_base 21: mod_base = OTHER; note = 2'-O-methyluridine with phosphorothioate linkage
  modified_base 22: mod_base = OTHER; note = 2'-O-methylcytidine with phosphorothioate linkage
  modified_base 23: mod_base = OTHER; note = 2'-O-methyluridine
tactaggacataatgggtcatct

SEQ ID NO: 1526 - RNA, 23 nt, synthetic construct
  source 1..23: mol_type = other RNA
  modified_base 1: mod_base = OTHER; note = 5'-(E)-vinylphosphonate 2'-O-methylated uridine with phosphorothioate linkage
  modified_base 2: mod_base = OTHER; note = 2'-fluoroguanosine with phosphorothioate linkage
  modified_base 3: mod_base = OTHER; note = 2'-O-methyluridine
  modified_base 4: mod_base = OTHER; note = 2'-O-methyladenosine
  modified_base 5: mod_base = OTHER; note = 2'-O-methylguanosine
  modified_base 6: mod_base = OTHER; note = 2'-fluorocytidine
  modified_base 7: mod_base = OTHER; note = 2'-O-methyluridine
  modified_base 8: mod_base = OTHER; note = 2'-O-methyluridine
  modified_base 9: mod_base = OTHER; note = 2'-O-methyluridine
  modified_base 10: mod_base = OTHER; note = 2'-O-methyluridine
  modified_base 11: mod_base = OTHER; note = 2'-O-methyladenosine
  modified_base 12: mod_base = OTHER; note = 2'-O-methyluridine
  modified_base 13: mod_base = OTHER; note = 2'-O-methyladenosine
  modified_base 14: mod_base = OTHER; note = 2'-fluorocytidine
  modified_base 15: mod_base = OTHER; note = 2'-O-methyluridine
  modified_base 16: mod_base = OTHER; note = 2'-fluoroguanosine
  modified_base 17: mod_base = OTHER; note = 2'-O-methylguanosine
  modified_base 18: mod_base = OTHER; note = 2'-O-methyluridine
  modified_base 19: mod_base = OTHER; note = 2'-O-methyladenosine
  modified_base 20: mod_base = OTHER; note = 2'-O-methyluridine
  modified_base 21: mod_base = OTHER; note = 2'-O-methyladenosine with phosphorothioate linkage
  modified_base 22: mod_base = OTHER; note = 2'-O-methyladenosine with phosphorothioate linkage
  modified_base 23: mod_base = OTHER; note = 2'-O-methyluridine
tgtagcttttatactggtataat

SEQ ID NO: 1527 - RNA, 23 nt, synthetic construct
  source 1..23: mol_type = other RNA
  modified_base 1: mod_base = OTHER; note = 5'-(E)-vinylphosphonate 2'-O-methylated uridine with phosphorothioate linkage
  modified_base 2: mod_base = OTHER; note = 2'-fluorouridine with phosphorothioate linkage
  modified_base 3: mod_base = OTHER; note = 2'-O-methyladenosine
  modified_base 4: mod_base = OTHER; note = 2'-O-methyladenosine
  modified_base 5: mod_base = OTHER; note = 2'-O-methyluridine
  modified_base 6: mod_base = OTHER; note = 2'-fluorouridine
  modified_base 7: mod_base = OTHER; note = 2'-O-methylguanosine
  modified_base 8: mod_base = OTHER; note = 2'-O-methylcytidine
  modified_base 9: mod_base = OTHER; note = 2'-O-methylguanosine
  modified_base 10: mod_base = OTHER; note = 2'-O-methyluridine
  modified_base 11: mod_base = OTHER; note = 2'-O-methyluridine
  modified_base 12: mod_base = OTHER; note = 2'-O-methylcytidine
  modified_base 13: mod_base = OTHER; note = 2'-O-methylcytidine
  modified_base 14: mod_base = OTHER; note = 2'-fluoroadenosine
  modified_base 15: mod_base = OTHER; note = 2'-O-methylguanosine
  modified_base 16: mod_base = OTHER; note = 2'-fluoroguanosine
  modified_base 17: mod_base = OTHER; note = 2'-O-methylguanosine
  modified_base 18: mod_base = OTHER; note = 2'-O-methylcytidine
  modified_base 19: mod_base = OTHER; note = 2'-O-methyluridine
  modified_base 20: mod_base = OTHER; note = 2'-O-methyluridine
  modified_base 21: mod_base = OTHER; note = 2'-O-methyluridine with phosphorothioate linkage
  modified_base 22: mod_base = OTHER; note = 2'-O-methyluridine with phosphorothioate linkage
  modified_base 23: mod_base = OTHER; note = 2'-O-methylguanosine
ttaattgcgttccagggcttttg

SEQ ID NO: 1528 - RNA, 23 nt, synthetic construct
  source 1..23: mol_type = other RNA
  modified_base 1: mod_base = OTHER; note = 5'-(E)-vinylphosphonate 2'-O-methylated uridine with phosphorothioate linkage
  modified_base 2: mod_base = OTHER; note = 2'-fluorocytidine with phosphorothioate linkage
  modified_base 3: mod_base = OTHER; note = 2'-O-methylcytidine
  modified_base 4: mod_base = OTHER; note = 2'-O-methyluridine
  modified_base 5: mod_base = OTHER; note = 2'-O-methyluridine
  modified_base 6: mod_base = OTHER; note = 2'-fluoroadenosine
  modified_base 7: mod_base = OTHER; note = 2'-O-methylcytidine
  modified_base 8: mod_base = OTHER; note = 2'-O-methyluridine
  modified_base 9: mod_base = OTHER; note = 2'-O-methyladenosine
  modified_base 10: mod_base = OTHER; note = 2'-O-methylguanosine
  modified_base 11: mod_base = OTHER; note = 2'-O-methyluridine
  modified_base 12: mod_base = OTHER; note = 2'-O-methylguanosine
  modified_base 13: mod_base = OTHER; note = 2'-O-methyluridine
  modified_base 14: mod_base = OTHER; note = 2'-fluoroadenosine
  modified_base 15: mod_base = OTHER; note = 2'-O-methyluridine
  modified_base 16: mod_base = OTHER; note = 2'-fluorouridine
  modified_base 17: mod_base = OTHER; note = 2'-O-methyluridine
  modified_base 18: mod_base = OTHER; note = 2'-O-methyladenosine
  modified_base 19: mod_base = OTHER; note = 2'-O-methyladenosine
  modified_base 20: mod_base = OTHER; note = 2'-O-methyluridine
  modified_base 21: mod_base = OTHER; note = 2'-O-methyluridine with phosphorothioate linkage
  modified_base 22: mod_base = OTHER; note = 2'-O-methylguanosine with phosphorothioate linkage
  modified_base 23: mod_base = OTHER; note = 2'-O-methylcytidine
tccttactagtgtatttaattgc

SEQ ID NO: 1529 - RNA, 23 nt, synthetic construct
  source 1..23: mol_type = other RNA
  modified_base 1: mod_base = OTHER; note = 5'-(E)-vinylphosphonate 2'-O-methylated uridine with phosphorothioate linkage
  modified_base 2: mod_base = OTHER; note = 2'-fluorouridine with phosphorothioate linkage
  modified_base 3: mod_base = OTHER; note = 2'-O-methylcytidine
  modified_base 4: mod_base = OTHER; note = 2'-O-methylcytidine
  modified_base 5: mod_base = OTHER; note = 2'-O-methyluridine
  modified_base 6: mod_base = OTHER; note = 2'-fluorouridine
  modified_base 7: mod_base = OTHER; note = 2'-O-methyladenosine
  modified_base 8: mod_base = OTHER; note = 2'-O-methylcytidine
  modified_base 9: mod_base = OTHER; note = 2'-O-methyluridine
  modified_base 10: mod_base = OTHER; note = 2'-O-methyladenosine
  modified_base 11: mod_base = OTHER; note = 2'-O-methylguanosine
  modified_base 12: mod_base = OTHER; note = 2'-O-methyluridine
  modified_base 13: mod_base = OTHER; note = 2'-O-methylguanosine
  modified_base 14: mod_base = OTHER; note = 2'-fluorouridine
  modified_base 15: mod_base = OTHER; note = 2'-O-methyladenosine
  modified_base 16: mod_base = OTHER; note = 2'-fluorouridine
  modified_base 17: mod_base = OTHER; note = 2'-O-methyluridine
  modified_base 18: mod_base = OTHER; note = 2'-O-methyluridine
  modified_base 19: mod_base = OTHER; note = 2'-O-methyladenosine
  modified_base 20: mod_base = OTHER; note = 2'-O-methyladenosine
  modified_base 21: mod_base = OTHER; note = 2'-O-methyluridine with phosphorothioate linkage
  modified_base 22: mod_base = OTHER; note = 2'-O-methyluridine with phosphorothioate linkage
  modified_base 23: mod_base = OTHER; note = 2'-O-methylguanosine
ttccttactagtgtatttaattg

SEQ ID NO: 1530 - RNA, 23 nt, synthetic construct
  source 1..23: mol_type = other RNA
  modified_base 1: mod_base = OTHER; note = 5'-(E)-vinylphosphonate 2'-O-methylated uridine with phosphorothioate linkage
  modified_base 2: mod_base = OTHER; note = 2'-fluorocytidine with phosphorothioate linkage
  modified_base 3: mod_base = OTHER; note = 2'-O-methylguanosine
  modified_base 4: mod_base = OTHER; note = 2'-O-methyluridine
  modified_base 5: mod_base = OTHER; note = 2'-O-methyluridine
  modified_base 6: mod_base = OTHER; note = 2'-fluoroguanosine
  modified_base 7: mod_base = OTHER; note = 2'-O-methyluridine
  modified_base 8: mod_base = OTHER; note = 2'-O-methylguanosine
  modified_base 9: mod_base = OTHER; note = 2'-O-methylcytidine
  modified_base 10: mod_base = OTHER; note = 2'-O-methyluridine
  modified_base 11: mod_base = OTHER; note = 2'-O-methyladenosine
  modified_base 12: mod_base = OTHER; note = 2'-O-methyladenosine
  modified_base 13: mod_base = OTHER; note = 2'-O-methyluridine
  modified_base 14: mod_base = OTHER; note = 2'-fluoroadenosine
  modified_base 15: mod_base = OTHER; note = 2'-O-methyladenosine
  modified_base 16: mod_base = OTHER; note = 2'-fluoroadenosine
  modified_base 17: mod_base = OTHER; note = 2'-O-methyluridine
  modified_base 18: mod_base = OTHER; note = 2'-O-methylcytidine
  modified_base 19: mod_base = OTHER; note = 2'-O-methyladenosine
  modified_base 20: mod_base = OTHER; note = 2'-O-methyluridine
  modified_base 21: mod_base = OTHER; note = 2'-O-methyladenosine with phosphorothioate linkage
  modified_base 22: mod_base = OTHER; note = 2'-O-methyluridine with phosphorothioate linkage
  modified_base 23: mod_base = OTHER; note = 2'-O-methyluridine
tcgttgtgctaataaatcatatt

SEQ ID NO: 1531 - RNA, 23 nt, synthetic construct
  source 1..23: mol_type = other RNA
  modified_base 1: mod_base = OTHER; note = 5'-(E)-vinylphosphonate 2'-O-methylated uridine with phosphorothioate linkage
  modified_base 2: mod_base = OTHER; note = 2'-fluoroadenosine with phosphorothioate linkage
  modified_base 3: mod_base = OTHER; note = 2'-O-methylcytidine
  modified_base 4: mod_base = OTHER; note = 2'-O-methylguanosine
  modified_base 5: mod_base = OTHER; note = 2'-O-methyluridine
  modified_base 6: mod_base = OTHER; note = 2'-fluorouridine
  modified_base 7: mod_base = OTHER; note = 2'-O-methylguanosine
  modified_base 8: mod_base = OTHER; note = 2'-O-methyluridine
  modified_base 9: mod_base = OTHER; note = 2'-O-methylguanosine
  modified_base 10: mod_base = OTHER; note = 2'-O-methylcytidine
  modified_base 11: mod_base = OTHER; note = 2'-O-methyluridine
  modified_base 12: mod_base = OTHER; note = 2'-O-methyladenosine
  modified_base 13: mod_base = OTHER; note = 2'-O-methyladenosine
  modified_base 14: mod_base = OTHER; note = 2'-fluorouridine
  modified_base 15: mod_base = OTHER; note = 2'-O-methyladenosine
  modified_base 16: mod_base = OTHER; note = 2'-fluoroadenosine
  modified_base 17: mod_base = OTHER; note = 2'-O-methyladenosine
  modified_base 18: mod_base = OTHER; note = 2'-O-methyluridine
  modified_base 19: mod_base = OTHER; note = 2'-O-methylcytidine
  modified_base 20: mod_base = OTHER; note = 2'-O-methyladenosine
  modified_base 21: mod_base = OTHER; note = 2'-O-methyluridine with phosphorothioate linkage
  modified_base 22: mod_base = OTHER; note = 2'-O-methyladenosine with phosphorothioate linkage
  modified_base 23: mod_base = OTHER; note = 2'-O-methyluridine
tacgttgtgctaataaatcatat

SEQ ID NO: 1532 - RNA, 23 nt, synthetic construct
  source 1..23: mol_type = other RNA
  modified_base 1: mod_base = OTHER; note = 5'-(E)-vinylphosphonate 2'-O-methylated uridine with phosphorothioate linkage
  modified_base 2: mod_base = OTHER; note = 2'-fluorocytidine with phosphorothioate linkage
  modified_base 3: mod_base = OTHER; note = 2'-O-methylcytidine
  modified_base 4: mod_base = OTHER; note = 2'-O-methyladenosine
  modified_base 5: mod_base = OTHER; note = 2'-O-methylcytidine
  modified_base 6: mod_base = OTHER; note = 2'-fluoroguanosine
  modified_base 7: mod_base = OTHER; note = 2'-O-methyluridine
  modified_base 8: mod_base = OTHER; note = 2'-O-methyluridine
  modified_base 9: mod_base = OTHER; note = 2'-O-methylguanosine
  modified_base 10: mod_base = OTHER; note = 2'-O-methyluridine
  modified_base 11: mod_base = OTHER; note = 2'-O-methylguanosine
  modified_base 12: mod_base = OTHER; note = 2'-O-methylcytidine
  modified_base 13: mod_base = OTHER; note = 2'-O-methyluridine
  modified_base 14: mod_base = OTHER; note = 2'-fluoroadenosine
  modified_base 15: mod_base = OTHER; note = 2'-O-methyladenosine
  modified_base 16: mod_base = OTHER; note = 2'-fluorouridine
  modified_base 17: mod_base = OTHER; note = 2'-O-methyladenosine
  modified_base 18: mod_base = OTHER; note = 2'-O-methyladenosine
  modified_base 19: mod_base = OTHER; note = 2'-O-methyladenosine
  modified_base 20: mod_base = OTHER; note = 2'-O-methyluridine
  modified_base 21: mod_base = OTHER; note = 2'-O-methylcytidine with phosphorothioate linkage
  modified_base 22: mod_base = OTHER; note = 2'-O-methyladenosine with phosphorothioate linkage
  modified_base 23: mod_base = OTHER; note = 2'-O-methyluridine
tccacgttgtgctaataaatcat

SEQ ID NO: 1533 - RNA, 23 nt, synthetic construct
  source 1..23: mol_type = other RNA
  modified_base 1: mod_base = OTHER; note = 5'-(E)-vinylphosphonate 2'-O-methylated uridine with phosphorothioate linkage
  modified_base 2: mod_base = OTHER; note = 2'-fluoroadenosine with phosphorothioate linkage
  modified_base 3: mod_base = OTHER; note = 2'-O-methylcytidine
  modified_base 4: mod_base = OTHER; note = 2'-O-methylcytidine
  modified_base 5: mod_base = OTHER; note = 2'-O-methyladenosine
  modified_base 6: mod_base = OTHER; note = 2'-fluorocytidine
  modified_base 7: mod_base = OTHER; note = 2'-O-methylguanosine
  modified_base 8: mod_base = OTHER; note = 2'-O-methyluridine
  modified_base 9: mod_base = OTHER; note = 2'-O-methyluridine
  modified_base 10: mod_base = OTHER; note = 2'-O-methylguanosine
  modified_base 11: mod_base = OTHER; note = 2'-O-methyluridine
  modified_base 12: mod_base = OTHER; note = 2'-O-methylguanosine
  modified_base 13: mod_base = OTHER; note = 2'-O-methylcytidine
  modified_base 14: mod_base = OTHER; note = 2'-fluorouridine
  modified_base 15: mod_base = OTHER; note = 2'-O-methyladenosine
  modified_base 16: mod_base = OTHER; note = 2'-fluoroadenosine
  modified_base 17: mod_base = OTHER; note = 2'-O-methyluridine
  modified_base 18: mod_base = OTHER; note = 2'-O-methyladenosine
  modified_base 19: mod_base = OTHER; note = 2'-O-methyladenosine
  modified_base 20: mod_base = OTHER; note = 2'-O-methyladenosine
  modified_base 21: mod_base = OTHER; note = 2'-O-methyluridine with phosphorothioate linkage
  modified_base 22: mod_base = OTHER; note = 2'-O-methylcytidine with phosphorothioate linkage
  modified_base 23: mod_base = OTHER; note = 2'-O-methyladenosine
taccacgttgtgctaataaatca

SEQ ID NO: 1534 - RNA, 23 nt, synthetic construct
  source 1..23: mol_type = other RNA
  modified_base 1: mod_base = OTHER; note = 5'-(E)-vinylphosphonate 2'-O-methylated uridine with phosphorothioate linkage
  modified_base 2: mod_base = OTHER; note = 2'-fluoroguanosine with phosphorothioate linkage
  modified_base 3: mod_base = OTHER; note = 2'-O-methyluridine
  modified_base 4: mod_base = OTHER; note = 2'-O-methyladenosine
  modified_base 5: mod_base = OTHER; note = 2'-O-methylcytidine
  modified_base 6: mod_base = OTHER; note = 2'-fluorocytidine
  modified_base 7: mod_base = OTHER; note = 2'-O-methyladenosine
  modified_base 8: mod_base = OTHER; note = 2'-O-methylcytidine
  modified_base 9: mod_base = OTHER; note = 2'-O-methylguanosine
  modified_base 10: mod_base = OTHER; note = 2'-O-methyluridine
  modified_base 11: mod_base = OTHER; note = 2'-O-methyluridine
  modified_base 12: mod_base = OTHER; note = 2'-O-methylguanosine
  modified_base 13: mod_base = OTHER; note = 2'-O-methyluridine
  modified_base 14: mod_base = OTHER; note = 2'-fluoroguanosine
  modified_base 15: mod_base = OTHER; note = 2'-O-methylcytidine
  modified_base 16: mod_base = OTHER; note = 2'-fluorouridine
  modified_base 17: mod_base = OTHER; note = 2'-O-methyladenosine
  modified_base 18: mod_base = OTHER; note = 2'-O-methyladenosine
  modified_base 19: mod_base = OTHER; note = 2'-O-methyluridine
  modified_base 20: mod_base = OTHER; note = 2'-O-methyladenosine
  modified_base 21: mod_base = OTHER; note = 2'-O-methyladenosine with phosphorothioate linkage
  modified_base 22: mod_base = OTHER; note = 2'-O-methyladenosine with phosphorothioate linkage
  modified_base 23: mod_base = OTHER; note = 2'-O-methyluridine
tgtaccacgttgtgctaataaat

SEQ ID NO: 1535 - RNA, 23 nt, synthetic construct
  source 1..23: mol_type = other RNA
  modified_base 1: mod_base = OTHER; note = 5'-(E)-vinylphosphonate 2'-O-methylated uridine with phosphorothioate linkage
  modified_base 2: mod_base = OTHER; note = 2'-fluoroadenosine with phosphorothioate linkage
  modified_base 3: mod_base = OTHER; note = 2'-O-methyladenosine
  modified_base 4: mod_base = OTHER; note = 2'-O-methyluridine
  modified_base 5: mod_base = OTHER; note = 2'-O-methyladenosine
  modified_base 6: mod_base = OTHER; note = 2'-fluoroguanosine
  modified_base 7: mod_base = OTHER; note = 2'-O-methyluridine
  modified_base 8: mod_base = OTHER; note = 2'-O-methyladenosine
  modified_base 9: mod_base = OTHER; note = 2'-O-methylcytidine
  modified_base 10: mod_base = OTHER; note = 2'-O-methylcytidine
  modified_base 11: mod_base = OTHER; note = 2'-O-methyladenosine
  modified_base 12: mod_base = OTHER; note = 2'-O-methylcytidine
  modified_base 13: mod_base = OTHER; note = 2'-O-methylguanosine
  modified_base 14: mod_base = OTHER; note = 2'-fluorouridine
  modified_base 15: mod_base = OTHER; note = 2'-O-methyluridine
  modified_base 16: mod_base = OTHER; note = 2'-fluoroguanosine
  modified_base 17: mod_base = OTHER; note = 2'-O-methyluridine
  modified_base 18: mod_base = OTHER; note = 2'-O-methylguanosine
  modified_base 19: mod_base = OTHER; note = 2'-O-methylcytidine
  modified_base 20: mod_base = OTHER; note = 2'-O-methyluridine
  modified_base 21: mod_base = OTHER; note = 2'-O-methyladenosine with phosphorothioate linkage
  modified_base 22: mod_base = OTHER; note = 2'-O-methyladenosine with phosphorothioate linkage
  modified_base 23: mod_base = OTHER; note = 2'-O-methyluridine
taatagtaccacgttgtgctaat

SEQ ID NO: 1536 - RNA, 23 nt, synthetic construct
  source 1..23: mol_type = other RNA
  modified_base 1: mod_base = OTHER; note = 5'-(E)-vinylphosphonate 2'-O-methylated uridine with phosphorothioate linkage
  modified_base 2: mod_base = OTHER; note = 2'-fluoroguanosine with phosphorothioate linkage
  modified_base 3: mod_base = OTHER; note = 2'-O-methyladenosine
  modified_base 4: mod_base = OTHER; note = 2'-O-methyluridine
  modified_base 5: mod_base = OTHER; note = 2'-O-methylguanosine
  modified_base 6: mod_base = OTHER; note = 2'-fluorocytidine
  modified_base 7: mod_base = OTHER; note = 2'-O-methyluridine
  modified_base 8: mod_base = OTHER; note = 2'-O-methyladenosine
  modified_base 9: mod_base = OTHER; note = 2'-O-methylguanosine
  modified_base 10: mod_base = OTHER; note = 2'-O-methylcytidine
  modified_base 11: mod_base = OTHER; note = 2'-O-methyluridine
  modified_base 12: mod_base = OTHER; note = 2'-O-methyluridine
  modified_base 13: mod_base = OTHER; note = 2'-O-methyladenosine
  modified_base 14: mod_base = OTHER; note = 2'-fluoroadenosine
  modified_base 15: mod_base = OTHER; note = 2'-O-methyluridine
  modified_base 16: mod_base = OTHER; note = 2'-fluoroadenosine
  modified_base 17: mod_base = OTHER; note = 2'-O-methyladenosine
  modified_base 18: mod_base = OTHER; note = 2'-O-methyladenosine
  modified_base 19: mod_base = OTHER; note = 2'-O-methyladenosine
  modified_base 20: mod_base = OTHER; note = 2'-O-methyladenosine
  modified_base 21: mod_base = OTHER; note = 2'-O-methyladenosine with phosphorothioate linkage
  modified_base 22: mod_base = OTHER; note = 2'-O-methylguanosine with phosphorothioate linkage
  modified_base 23: mod_base = OTHER; note = 2'-O-methyladenosine
tgatgctagcttaataaaaaaga

SEQ ID NO: 1537 - RNA, 23 nt, synthetic construct
  source 1..23: mol_type = other RNA
  modified_base 1: mod_base = OTHER; note = 5'-(E)-vinylphosphonate 2'-O-methylated uridine with phosphorothioate linkage
  modified_base 2: mod_base = OTHER; note = 2'-fluoroguanosine with phosphorothioate linkage
  modified_base 3: mod_base = OTHER; note = 2'-O-methylcytidine
  modified_base 4: mod_base = OTHER; note = 2'-O-methyladenosine
  modified_base 5: mod_base = OTHER; note = 2'-O-methylguanosine
  modified_base 6: mod_base = OTHER; note = 2'-fluoroadenosine
  modified_base 7: mod_base = OTHER; note = 2'-O-methyluridine
  modified_base 8: mod_base = OTHER; note = 2'-O-methylguanosine
  modified_base 9: mod_base = OTHER; note = 2'-O-methylcytidine
  modified_base 10: mod_base = OTHER; note = 2'-O-methyluridine
  modified_base 11: mod_base = OTHER; note = 2'-O-methyladenosine
  modified_base 12: mod_base = OTHER; note = 2'-O-methylguanosine
  modified_base 13: mod_base = OTHER; note = 2'-O-methylcytidine
  modified_base 14: mod_base = OTHER; note = 2'-fluorouridine
  modified_base 15: mod_base = OTHER; note = 2'-O-methyluridine
  modified_base 16: mod_base = OTHER; note = 2'-fluoroadenosine
  modified_base 17: mod_base = OTHER; note = 2'-O-methyladenosine
  modified_base 18: mod_base = OTHER; note = 2'-O-methyluridine
  modified_base 19: mod_base = OTHER; note = 2'-O-methyladenosine
  modified_base 20: mod_base = OTHER; note = 2'-O-methyladenosine
  modified_base 21: mod_base = OTHER; note = 2'-O-methyladenosine with phosphorothioate linkage
  modified_base 22: mod_base = OTHER; note = 2'-O-methyladenosine with phosphorothioate linkage
  modified_base 23: mod_base = OTHER; note = 2'-O-methyladenosine
tgcagatgctagcttaataaaaa

SEQ ID NO: 1538 - RNA, 23 nt, synthetic construct
  source 1..23: mol_type = other RNA
  modified_base 1: mod_base = OTHER; note = 5'-(E)-vinylphosphonate 2'-O-methylated uridine with phosphorothioate linkage
  modified_base 2: mod_base = OTHER; note = 2'-fluoroguanosine with phosphorothioate linkage
  modified_base 3: mod_base = OTHER; note = 2'-O-methyluridine
  modified_base 4: mod_base = OTHER; note = 2'-O-methyladenosine
  modified_base 5: mod_base = OTHER; note = 2'-O-methyluridine
  modified_base 6: mod_base = OTHER; note = 2'-fluorocytidine
  modified_base 7: mod_base = OTHER; note = 2'-O-methyluridine
  modified_base 8: mod_base = OTHER; note = 2'-O-methylcytidine
  modified_base 9: mod_base = OTHER; note = 2'-O-methyluridine
  modified_base 10: mod_base = OTHER; note = 2'-O-methylguanosine
  modified_base 11: mod_base = OTHER; note = 2'-O-methyladenosine
  modified_base 12: mod_base = OTHER; note = 2'-O-methyluridine
  modified_base 13: mod_base = OTHER; note = 2'-O-methyluridine
  modified_base 14: mod_base = OTHER; note = 2'-fluoroadenosine
  modified_base 15: mod_base = OTHER; note = 2'-O-methylguanosine
  modified_base 16: mod_base = OTHER; note = 2'-fluoroadenosine
  modified_base 17: mod_base = OTHER; note = 2'-O-methylguanosine
  modified_base 18: mod_base = OTHER; note = 2'-O-methyladenosine
  modified_base 19: mod_base = OTHER; note = 2'-O-methyladenosine
  modified_base 20: mod_base = OTHER; note = 2'-O-methyladenosine
  modified_base 21: mod_base = OTHER; note = 2'-O-methyladenosine with phosphorothioate linkage
  modified_base 22: mod_base = OTHER; note = 2'-O-methylguanosine with phosphorothioate linkage
  modified_base 23: mod_base = OTHER; note = 2'-O-methyladenosine
tgtatctctgattagagaaaaga

SEQ ID NO: 1539 - RNA, 23 nt, synthetic construct
  source 1..23: mol_type = other RNA
  modified_base 1: mod_base = OTHER; note = 5'-(E)-vinylphosphonate 2'-O-methylated uridine with phosphorothioate linkage
  modified_base 2: mod_base = OTHER; note = 2'-fluorouridine with phosphorothioate linkage
  modified_base 3: mod_base = OTHER; note = 2'-O-methyluridine
  modified_base 4: mod_base = OTHER; note = 2'-O-methyladenosine
  modified_base 5: mod_base = OTHER; note = 2'-O-methyluridine
  modified_base 6: mod_base = OTHER; note = 2'-fluoroadenosine
  modified_base 7: mod_base = OTHER; note = 2'-O-methylcytidine
  modified_base 8: mod_base = OTHER; note = 2'-O-methyluridine
  modified_base 9: mod_base = OTHER; note = 2'-O-methylcytidine
  modified_base 10: mod_base = OTHER; note = 2'-O-methyladenosine
  modified_base 11: mod_base = OTHER; note = 2'-O-methyladenosine
  modified_base 12: mod_base = OTHER; note = 2'-O-methylcytidine
  modified_base 13: mod_base = OTHER; note = 2'-O-methylcytidine
  modified_base 14: mod_base = OTHER; note = 2'-fluorouridine
  modified_base 15: mod_base = OTHER; note = 2'-O-methylcytidine
  modified_base 16: mod_base = OTHER; note = 2'-fluorouridine
  modified_base 17: mod_base = OTHER; note = 2'-O-methylguanosine
  modified_base 18: mod_base = OTHER; note = 2'-O-methyluridine
  modified_base 19: mod_base = OTHER; note = 2'-O-methyladenosine
  modified_base 20: mod_base = OTHER; note = 2'-O-methyluridine
  modified_base 21: mod_base = OTHER; note = 2'-O-methylcytidine with phosphorothioate linkage
  modified_base 22: mod_base = OTHER; note = 2'-O-methyluridine with phosphorothioate linkage
  modified_base 23: mod_base = OTHER; note = 2'-O-methylcytidine
tttatactcaacctctgtatctc

SEQ ID NO: 1540 - RNA, 23 nt, synthetic construct
  source 1..23: mol_type = other RNA
  modified_base 1: mod_base = OTHER; note = 5'-(E)-vinylphosphonate 2'-O-methylated uridine with phosphorothioate linkage
  modified_base 2: mod_base = OTHER; note = 2'-fluoroguanosine with phosphorothioate linkage
  modified_base 3: mod_base = OTHER; note = 2'-O-methylcytidine
  modified_base 4: mod_base = OTHER; note = 2'-O-methyladenosine
  modified_base 5: mod_base = OTHER; note = 2'-O-methylcytidine
  modified_base 6: mod_base = OTHER; note = 2'-fluorouridine
  modified_base 7: mod_base = OTHER; note = 2'-O-methyluridine
  modified_base 8: mod_base = OTHER; note = 2'-O-methyladenosine
  modified_base 9: mod_base = OTHER; note = 2'-O-methyladenosine
  modified_base 10: mod_base = OTHER; note = 2'-O-methyluridine
  modified_base 11: mod_base = OTHER; note = 2'-O-methyluridine
  modified_base 12: mod_base = OTHER; note = 2'-O-methylguanosine
  modified_base 13: mod_base = OTHER; note = 2'-O-methyluridine
  modified_base 14: mod_base = OTHER; note = 2'-fluorocytidine
  modified_base 15: mod_base = OTHER; note = 2'-O-methylcytidine
  modified_base 16: mod_base = OTHER; note = 2'-fluorouridine
  modified_base 17: mod_base = OTHER; note = 2'-O-methyladenosine
  modified_base 18: mod_base = OTHER; note = 2'-O-methyluridine
  modified_base 19: mod_base = OTHER; note = 2'-O-methylcytidine
  modified_base 20: mod_base = OTHER; note = 2'-O-methyluridine
  modified_base 21: mod_base = OTHER; note = 2'-O-methylguanosine with phosphorothioate linkage
  modified_base 22: mod_base = OTHER; note = 2'-O-methyladenosine with phosphorothioate linkage
  modified_base 23: mod_base = OTHER; note = 2'-O-methylguanosine
tgcacttaattgtcctatctgag

SEQ ID NO: 1541 - RNA, 23 nt, synthetic construct
  source 1..23: mol_type = other RNA
  modified_base 1: mod_base = OTHER; note = 5'-(E)-vinylphosphonate 2'-O-methylated uridine with phosphorothioate linkage
  modified_base 2: mod_base = OTHER; note = 2'-fluoroguanosine with phosphorothioate linkage
  modified_base 3: mod_base = OTHER; note = 2'-O-methyluridine
  modified_base 4: mod_base = OTHER; note = 2'-O-methylguanosine
  modified_base 5: mod_base = OTHER; note = 2'-O-methylcytidine
  modified_base 6: mod_base = OTHER; note = 2'-fluoroadenosine
  modified_base 7: mod_base = OTHER; note = 2'-O-methylcytidine
  modified_base 8: mod_base = OTHER; note = 2'-O-methyluridine
  modified_base 9: mod_base = OTHER; note = 2'-O-methyluridine
  modified_base 10: mod_base = OTHER; note = 2'-O-methyladenosine
  modified_base 11: mod_base = OTHER; note = 2'-O-methyladenosine
  modified_base 12: mod_base = OTHER; note = 2'-O-methyluridine
  modified_base 13: mod_base = OTHER; note = 2'-O-methyluridine
  modified_base 14: mod_base = OTHER; note = 2'-fluoroguanosine
  modified_base 15: mod_base = OTHER; note = 2'-O-methyluridine
  modified_base 16: mod_base = OTHER; note = 2'-fluorocytidine
  modified_base 17: mod_base = OTHER; note = 2'-O-methylcytidine
  modified_base 18: mod_base = OTHER; note = 2'-O-methyluridine
  modified_base 19: mod_base = OTHER; note = 2'-O-methyladenosine
  modified_base 20: mod_base = OTHER; note = 2'-O-methyluridine
  modified_base 21: mod_base = OTHER; note = 2'-O-methylcytidine with phosphorothioate linkage
  modified_base 22: mod_base = OTHER; note = 2'-O-methyluridine with phosphorothioate linkage
  modified_base 23: mod_base = OTHER; note = 2'-O-methylguanosine
tgtgcacttaattgtcctatctg

SEQ ID NO: 1542 - RNA, 23 nt, synthetic construct
  source 1..23: mol_type = other RNA
  modified_base 1: mod_base = OTHER; note = 5'-(E)-vinylphosphonate 2'-O-methylated uridine with phosphorothioate linkage
  modified_base 2: mod_base = OTHER; note = 2'-fluoroguanosine with phosphorothioate linkage
  modified_base 3: mod_base = OTHER; note = 2'-O-methyluridine
  modified_base 4: mod_base = OTHER; note = 2'-O-methyladenosine
  modified_base 5: mod_base = OTHER; note = 2'-O-methyluridine
  modified_base 6: mod_base = OTHER; note = 2'-fluoroadenosine
  modified_base 7: mod_base = OTHER; note = 2'-O-methylguanosine
  modified_base 8: mod_base = OTHER; note = 2'-O-methyladenosine
  modified_base 9: mod_base = OTHER; note = 2'-O-methylcytidine
  modified_base 10: mod_base = OTHER; note = 2'-O-methylcytidine
  modified_base 11: mod_base = OTHER; note = 2'-O-methyluridine
  modified_base 12: mod_base = OTHER; note = 2'-O-methylguanosine
  modified_base 13: mod_base = OTHER; note = 2'-O-methyluridine
  modified_base 14: mod_base = OTHER; note = 2'-fluoroadenosine
  modified_base 15: mod_base = OTHER; note = 2'-O-methyladenosine
  modified_base 16: mod_base = OTHER; note = 2'-fluoroadenosine
  modified_base 17: mod_base = OTHER; note = 2'-O-methylcytidine
  modified_base 18: mod_base = OTHER; note = 2'-O-methyluridine
  modified_base 19: mod_base = OTHER; note = 2'-O-methylguanosine
  modified_base 20: mod_base = OTHER; note = 2'-O-methylguanosine
  modified_base 21: mod_base = OTHER; note = 2'-O-methylguanosine with phosphorothioate linkage
  modified_base 22: mod_base = OTHER; note = 2'-O-methyladenosine with phosphorothioate linkage
  modified_base 23: mod_base = OTHER; note = 2'-O-methyladenosine
tgtatagacctgtaaactgggaa

SEQ ID NO: 1543 - RNA, 23 nt, synthetic construct
  source 1..23: mol_type = other RNA
  modified_base 1: mod_base = OTHER; note = 5'-(E)-vinylphosphonate 2'-O-methylated uridine with phosphorothioate linkage
  modified_base 2: mod_base = OTHER; note = 2'-fluoroguanosine with phosphorothioate linkage
  modified_base 3: mod_base = OTHER; note = 2'-O-methyluridine
  modified_base 4: mod_base = OTHER; note = 2'-O-methylcytidine
  modified_base 5: mod_base = OTHER; note = 2'-O-methylcytidine
  modified_base 6: mod_base = OTHER; note = 2'-fluoroadenosine
  modified_base 7: mod_base = OTHER; note = 2'-O-methyladenosine
  modified_base 8: mod_base = OTHER; note = 2'-O-methylguanosine
  modified_base 9: mod_base = OTHER; note = 2'-O-methyluridine
  modified_base 10: mod_base = OTHER; note = 2'-O-methyladenosine
  modified_base 11: mod_base = OTHER; note = 2'-O-methyladenosine
  modified_base 12: mod_base = OTHER; note = 2'-O-methylguanosine
  modified_base 13: mod_base = OTHER; note = 2'-O-methyluridine
  modified_base 14: mod_base = OTHER; note = 2'-fluoroadenosine
  modified_base 15: mod_base = OTHER; note = 2'-O-methyladenosine
  modified_base 16: mod_base = OTHER; note = 2'-fluoroguanosine
  modified_base 17: mod_base = OTHER; note = 2'-O-methylcytidine
  modified_base 18: mod_base = OTHER; note = 2'-O-methyluridine
  modified_base 19: mod_base = OTHER; note = 2'-O-methylcytidine
  modified_base 20: mod_base = OTHER; note = 2'-O-methyladenosine
  modified_base 21: mod_base = OTHER; note = 2'-O-methyladenosine with phosphorothioate linkage
  modified_base 22: mod_base = OTHER; note = 2'-O-methyluridine with phosphorothioate linkage
  modified_base 23: mod_base = OTHER; note = 2'-O-methyladenosine
tgtccaagtaagtaagctcaata

SEQ ID NO: 1544 - RNA, 23 nt, synthetic construct
  source 1..23: mol_type = other RNA
  modified_base 1: mod_base = OTHER; note = 5'-(E)-vinylphosphonate 2'-O-methylated uridine with phosphorothioate linkage
  modified_base 2: mod_base = OTHER; note = 2'-fluorouridine with phosphorothioate linkage
  modified_base 3: mod_base = OTHER; note = 2'-O-methylguanosine
  modified_base 4: mod_base = OTHER; note = 2'-O-methylcytidine
  modified_base 5: mod_base = OTHER; note = 2'-O-methylguanosine
  modified_base 6: mod_base = OTHER; note = 2'-fluorouridine
  modified_base 7: mod_base = OTHER; note = 2'-O-methylcytidine
  modified_base 8: mod_base = OTHER; note = 2'-O-methylcytidine
  modified_base 9: mod_base = OTHER; note = 2'-O-methyladenosine
  modified_base 10: mod_base = OTHER; note = 2'-O-methyladenosine
  modified_base 11: mod_base = OTHER; note = 2'-O-methylguanosine
  modified_base 12: mod_base = OTHER; note = 2'-O-methyluridine
  modified_base 13: mod_base = OTHER; note = 2'-O-methyladenosine
  modified_base 14: mod_base = OTHER; note = 2'-fluoroadenosine
  modified_base 15: mod_base = OTHER; note = 2'-O-methylguanosine
  modified_base 16: mod_base = OTHER; note = 2'-fluorouridine
  modified_base 17: mod_base = OTHER; note = 2'-O-methyladenosine
  modified_base 18: mod_base = OTHER; note = 2'-O-methyladenosine
  modified_base 19: mod_base = OTHER; note = 2'-O-methylguanosine
  modified_base 20: mod_base = OTHER; note = 2'-O-methylcytidine
  modified_base 21: mod_base = OTHER; note = 2'-O-methyluridine with phosphorothioate linkage
  modified_base 22: mod_base = OTHER; note = 2'-O-methylcytidine with phosphorothioate linkage
  modified_base 23: mod_base = OTHER; note = 2'-O-methyladenosine
ttgcgtccaagtaagtaagctca

SEQ ID NO: 1545 - RNA, 23 nt, synthetic construct
  source 1..23: mol_type = other RNA
  modified_base 1: mod_base = OTHER; note = 5'-(E)-vinylphosphonate 2'-O-methylated uridine with phosphorothioate linkage
  modified_base 2: mod_base = OTHER; note = 2'-fluorocytidine with phosphorothioate linkage
  modified_base 3: mod_base = OTHER; note = 2'-O-methylguanosine
  modified_base 4: mod_base = OTHER; note = 2'-O-methylcytidine
  modified_base 5: mod_base = OTHER; note = 2'-O-methyluridine
  modified_base 6: mod_base = OTHER; note = 2'-fluorouridine
  modified_base 7: mod_base = OTHER; note = 2'-O-methylguanosine
  modified_base 8: mod_base = OTHER; note = 2'-O-methylcytidine
  modified_base 9: mod_base = OTHER; note = 2'-O-methyladenosine
  modified_base 10: mod_base = OTHER; note = 2'-O-methyladenosine
  modified_base 11: mod_base = OTHER; note = 2'-O-methyluridine
  modified_base 12: mod_base = OTHER; note = 2'-O-methylguanosine
  modified_base 13: mod_base = OTHER; note = 2'-O-methyluridine
  modified_base 14: mod_base = OTHER; note = 2'-fluorouridine
  modified_base 15: mod_base = OTHER; note = 2'-O-methylguanosine
  modified_base 16: mod_base = OTHER; note = 2'-fluorocytidine
  modified_base 17: mod_base = OTHER; note = 2'-O-methylguanosine
  modified_base 18: mod_base = OTHER; note = 2'-O-methyluridine
  modified_base 19: mod_base = OTHER; note = 2'-O-methylcytidine
  modified_base 20: mod_base = OTHER; note = 2'-O-methylcytidine
  modified_base 21: mod_base = OTHER; note = 2'-O-methyladenosine with phosphorothioate linkage
  modified_base 22: mod_base = OTHER; note = 2'-O-methyladenosine with phosphorothioate linkage
  modified_base 23: mod_base = OTHER; note = 2'-O-methylguanosine
tcgcttgcaatgttgcgtccaag

SEQ ID NO: 1546 - RNA, 23 nt, synthetic construct
  source 1..23: mol_type = other RNA
  modified_base 1: mod_base = OTHER; note = 5'-(E)-vinylphosphonate 2'-O-methylated uridine with phosphorothioate linkage
  modified_base 2: mod_base = OTHER; note = 2'-fluoroguanosine with phosphorothioate linkage
  modified_base 3: mod_base = OTHER; note = 2'-O-methylcytidine
  modified_base 4: mod_base = OTHER; note = 2'-O-methylguanosine
  modified_base 5: mod_base = OTHER; note = 2'-O-methylcytidine
  modified_base 6: mod_base = OTHER; note = 2'-fluorouridine
  modified_base 7: mod_base = OTHER; note = 2'-O-methyluridine
  modified_base 8: mod_base = OTHER; note = 2'-O-methylguanosine
  modified_base 9: mod_base = OTHER; note = 2'-O-methylcytidine
  modified_base 10: mod_base = OTHER; note = 2'-O-methyladenosine
  modified_base 11: mod_base = OTHER; note = 2'-O-methyladenosine
  modified_base 12: mod_base = OTHER; note = 2'-O-methyluridine
  modified_base 13: mod_base = OTHER; note = 2'-O-methylguanosine
  modified_base 14: mod_base = OTHER; note = 2'-fluorouridine
  modified_base 15: mod_base = OTHER; note = 2'-O-methyluridine
  modified_base 16: mod_base = OTHER; note = 2'-fluoroguanosine
  modified_base 17: mod_base = OTHER; note = 2'-O-methylcytidine
  modified_base 18: mod_base = OTHER; note = 2'-O-methylguanosine
  modified_base 19: mod_base = OTHER; note = 2'-O-methyluridine
  modified_base 20: mod_base = OTHER; note = 2'-O-methylcytidine
  modified_base 21: mod_base = OTHER; note = 2'-O-methylcytidine with phosphorothioate linkage
  modified_base 22: mod_base = OTHER; note = 2'-O-methyladenosine with phosphorothioate linkage
  modified_base 23: mod_base = OTHER; note = 2'-O-methyladenosine
tgcgcttgcaatgttgcgtccaa

SEQ ID NO: 1547 - RNA, 23 nt, synthetic construct
  source 1..23: mol_type = other RNA
  modified_base 1: mod_base = OTHER; note = 5'-(E)-vinylphosphonate 2'-O-methylated uridine with phosphorothioate linkage
  modified_base 2: mod_base = OTHER; note = 2'-fluoroadenosine with phosphorothioate linkage
  modified_base 3: mod_base = OTHER; note = 2'-O-methylguanosine
  modified_base 4: mod_base = OTHER; note = 2'-O-methylcytidine
  modified_base 5: mod_base = OTHER; note = 2'-O-methylguanosine
  modified_base 6: mod_base = OTHER; note = 2'-fluorocytidine
  modified_base 7: mod_base = OTHER; note = 2'-O-methyluridine
  modified_base 8: mod_base = OTHER; note = 2'-O-methyluridine
  modified_base 9: mod_base = OTHER; note = 2'-O-methylguanosine
  modified_base 10: mod_base = OTHER; note = 2'-O-methylcytidine
  modified_base 11: mod_base = OTHER; note = 2'-O-methyladenosine
  modified_base 12: mod_base = OTHER; note = 2'-O-methyladenosine
  modified_base 13: mod_base = OTHER; note = 2'-O-methyluridine
  modified_base 14: mod_base = OTHER; note = 2'-fluoroguanosine
  modified_base 15: mod_base = OTHER; note = 2'-O-methyluridine
  modified_base 16: mod_base = OTHER; note = 2'-fluorouridine
  modified_base 17: mod_base = OTHER; note = 2'-O-methylguanosine
  modified_base 18: mod_base = OTHER; note = 2'-O-methylcytidine
  modified_base 19: mod_base = OTHER; note = 2'-O-methylguanosine
  modified_base 20: mod_base = OTHER; note = 2'-O-methyluridine
  modified_base 21: mod_base = OTHER; note = 2'-O-methylcytidine with phosphorothioate linkage
  modified_base 22: mod_base = OTHER; note = 2'-O-methylcytidine with phosphorothioate linkage
  modified_base 23: mod_base = OTHER; note = 2'-O-methyladenosine
tagcgcttgcaatgttgcgtcca

SEQ ID NO: 1548 - RNA, 23 nt, synthetic construct
  source 1..23: mol_type = other RNA
  modified_base 1: mod_base = OTHER; note = 5'-(E)-vinylphosphonate 2'-O-methylated uridine with phosphorothioate linkage
  modified_base 2: mod_base = OTHER; note = 2'-fluorocytidine with phosphorothioate linkage
  modified_base 3: mod_base = OTHER; note = 2'-O-methyladenosine
  modified_base 4: mod_base = OTHER; note = 2'-O-methylcytidine
  modified_base 5: mod_base = OTHER; note = 2'-O-methyladenosine
  modified_base 6: mod_base = OTHER; note = 2'-fluoroguanosine
  modified_base 7: mod_base = OTHER; note = 2'-O-methylcytidine
  modified_base 8: mod_base = OTHER; note = 2'-O-methylguanosine
  modified_base 9: mod_base = OTHER; note = 2'-O-methylcytidine
  modified_base 10: mod_base = OTHER; note = 2'-O-methyluridine
  modified_base 11: mod_base = OTHER; note = 2'-O-methyluridine
  modified_base 12: mod_base = OTHER; note = 2'-O-methylguanosine
  modified_base 13: mod_base = OTHER; note = 2'-O-methylcytidine
  modified_base 14: mod_base = OTHER; note = 2'-fluoroadenosine
  modified_base 15: mod_base = OTHER; note = 2'-O-methyladenosine
  modified_base 16: mod_base = OTHER; note = 2'-fluorouridine
  modified_base 17: mod_base = OTHER; note = 2'-O-methylguanosine
  modified_base 18: mod_base = OTHER; note = 2'-O-methyluridine
  modified_base 19: mod_base = OTHER; note = 2'-O-methyluridine
  modified_base 20: mod_base = OTHER; note = 2'-O-methylguanosine
  modified_base 21: mod_base = OTHER; note = 2'-O-methylcytidine with phosphorothioate linkage
  modified_base 22: mod_base = OTHER; note = 2'-O-methylguanosine with phosphorothioate linkage
  modified_base 23: mod_base = OTHER; note = 2'-O-methyluridine
tcacagcgcttgcaatgttgcgt

SEQ ID NO: 1549 - RNA, 23 nt, synthetic construct
  source 1..23: mol_type = other RNA
  modified_base 1: mod_base = OTHER; note = 5'-(E)-vinylphosphonate 2'-O-methylated uridine with phosphorothioate linkage
  modified_base 2: mod_base = OTHER; note = 2'-fluoroguanosine with phosphorothioate linkage
  modified_base 3: mod_base = OTHER; note = 2'-O-methylcytidine
  modified_base 4: mod_base = OTHER; note = 2'-O-methylguanosine
  modified_base 5: mod_base = OTHER; note = 2'-O-methyladenosine
  modified_base 6: mod_base = OTHER; note = 2'-fluoroadenosine
  modified_base 7: mod_base = OTHER; note = 2'-O-methyladenosine
  modified_base 8: mod_base = OTHER; note = 2'-O-methylguanosine
  modified_base 9: mod_base = OTHER; note = 2'-O-methylcytidine
  modified_base 10: mod_base = OTHER; note = 2'-O-methyladenosine
  modified_base 11: mod_base = OTHER; note = 2'-O-methyladenosine
  modified_base 12: mod_base = OTHER; note = 2'-O-methyluridine
  modified_base 13: mod_base = OTHER; note = 2'-O-methylcytidine
  modified_base 14: mod_base = OTHER; note = 2'-fluoroadenosine
  modified_base 15: mod_base = OTHER; note = 2'-O-methyluridine
  modified_base 16: mod_base = OTHER; note = 2'-fluorouridine
  modified_base 17: mod_base = OTHER; note = 2'-O-methylcytidine
  modified_base 18: mod_base = OTHER; note = 2'-O-methyladenosine
  modified_base 19: mod_base = OTHER; note = 2'-O-methyluridine
  modified_base 20: mod_base = OTHER; note = 2'-O-methyluridine
  modified_base 21: mod_base = OTHER; note = 2'-O-methyluridine with phosphorothioate linkage
  modified_base 22: mod_base = OTHER; note = 2'-O-methylcytidine with phosphorothioate linkage
  modified_base 23: mod_base = OTHER; note = 2'-O-methyluridine
tgcgaaagcaatcattcatttct

SEQ ID NO: 1550 - RNA, 23 nt, synthetic construct
  source 1..23: mol_type = other RNA
  modified_base 1: mod_base = OTHER; note = 5'-(E)-vinylphosphonate 2'-O-methylated uridine with phosphorothioate linkage
  modified_base 2: mod_base = OTHER; note = 2'-fluoroadenosine with phosphorothioate linkage
  modified_base 3: mod_base = OTHER; note = 2'-O-methylguanosine
  modified_base 4: mod_base = OTHER; note = 2'-O-methylcytidine
  modified_base 5: mod_base = OTHER; note = 2'-O-methylguanosine
  modified_base 6: mod_base = OTHER; note = 2'-fluoroadenosine
  modified_base 7: mod_base = OTHER; note = 2'-O-methyladenosine
  modified_base 8: mod_base = OTHER; note = 2'-O-methyladenosine
  modified_base 9: mod_base = OTHER; note = 2'-O-methylguanosine
  modified_base 10: mod_base = OTHER; note = 2'-O-methylcytidine
  modified_base 11: mod_base = OTHER; note = 2'-O-methyladenosine
  modified_base 12: mod_base = OTHER; note = 2'-O-methyladenosine
  modified_base 13: mod_base = OTHER; note = 2'-O-methyluridine
  modified_base 14: mod_base = OTHER; note = 2'-fluorocytidine
  modified_base 15: mod_base = OTHER; note = 2'-O-methyladenosine
  modified_base 16: mod_base = OTHER; note = 2'-fluorouridine
  modified_base 17: mod_base = OTHER; note = 2'-O-methyluridine
  modified_base 18: mod_base = OTHER; note = 2'-O-methylcytidine
  modified_base 19: mod_base = OTHER; note = 2'-O-methyladenosine
  modified_base 20: mod_base = OTHER; note = 2'-O-methyluridine
  modified_base 21: mod_base = OTHER; note = 2'-O-methyluridine with phosphorothioate linkage
  modified_base 22: mod_base = OTHER; note = 2'-O-methyluridine with phosphorothioate linkage
  modified_base 23: mod_base = OTHER; note = 2'-O-methylcytidine
tagcgaaagcaatcattcatttc

SEQ ID NO: 1551 - RNA, 23 nt, synthetic construct
  source 1..23: mol_type = other RNA
  modified_base 1: mod_base = OTHER; note = 5'-(E)-vinylphosphonate 2'-O-methylated uridine with phosphorothioate linkage
  modified_base 2: mod_base = OTHER; note = 2'-fluorouridine with phosphorothioate linkage
  modified_base 3: mod_base = OTHER; note = 2'-O-methyladenosine
  modified_base 4: mod_base = OTHER; note = 2'-O-methylguanosine
  modified_base 5: mod_base = OTHER; note = 2'-O-methyladenosine
  modified_base 6: mod_base = OTHER; note = 2'-fluoroadenosine
  modified_base 7: mod_base = OTHER; note = 2'-O-methylguanosine
  modified_base 8: mod_base = OTHER; note = 2'-O-methylcytidine
  modified_base 9: mod_base = OTHER; note = 2'-O-methylguanosine
  modified_base 10: mod_base = OTHER; note = 2'-O-methyladenosine
  modified_base 11: mod_base = OTHER; note = 2'-O-methyladenosine
  modified_base 12: mod_base = OTHER; note = 2'-O-methyladenosine
  modified_base 13: mod_base = OTHER; note = 2'-O-methylguanosine
  modified_base 14: mod_base = OTHER; note = 2'-fluorocytidine
  modified_base 15: mod_base = OTHER; note = 2'-O-methyladenosine
  modified_base 16: mod_base = OTHER; note = 2'-fluoroadenosine
  modified_base 17: mod_base = OTHER; note = 2'-O-methyluridine
  modified_base 18: mod_base = OTHER; note = 2'-O-methylcytidine
  modified_base 19: mod_base = OTHER; note = 2'-O-methyladenosine
  modified_base 20: mod_base = OTHER; note = 2'-O-methyluridine
  modified_base 21: mod_base = OTHER; note = 2'-O-methyluridine with phosphorothioate linkage
  modified_base 22: mod_base = OTHER; note = 2'-O-methylcytidine with phosphorothioate linkage
  modified_base 23: mod_base = OTHER; note = 2'-O-methyladenosine
ttagaagcgaaagcaatcattca

SEQ ID NO: 1552 - RNA, 23 nt, synthetic construct
  source 1..23: mol_type = other RNA
  modified_base 1: mod_base = OTHER; note = 5'-(E)-vinylphosphonate 2'-O-methylated uridine with phosphorothioate linkage
  modified_base 2: mod_base = OTHER; note = 2'-fluoroguanosine with phosphorothioate linkage
  modified_base 3: mod_base = OTHER; note = 2'-O-methyluridine
  modified_base 4: mod_base = OTHER; note = 2'-O-methyladenosine
  modified_base 5: mod_base = OTHER; note = 2'-O-methylguanosine
  modified_base 6: mod_base = OTHER; note = 2'-fluoroadenosine
  modified_base 7: mod_base = OTHER; note = 2'-O-methyladenosine
  modified_base 8: mod_base = OTHER; note = 2'-O-methylguanosine
  modified_base 9: mod_base = OTHER; note = 2'-O-methylcytidine
  modified_base 10: mod_base = OTHER; note = 2'-O-methylguanosine
  modified_base 11: mod_base = OTHER; note = 2'-O-methyladenosine
  modified_base 12: mod_base = OTHER; note = 2'-O-methyladenosine
  modified_base 13: mod_base = OTHER; note = 2'-O-methyladenosine
  modified_base 14: mod_base = OTHER; note = 2'-fluoroguanosine
  modified_base 15: mod_base = OTHER; note = 2'-O-methylcytidine
  modified_base 16: mod_base = OTHER; note = 2'-fluoroadenosine
  modified_base 17: mod_base = OTHER; note = 2'-O-methyladenosine
  modified_base 18: mod_base = OTHER; note = 2'-O-methyluridine
  modified_base 19: mod_base = OTHER; note = 2'-O-methylcytidine
  modified_base 20: mod_base = OTHER; note = 2'-O-methyladenosine
  modified_base 21: mod_base = OTHER; note = 2'-O-methyluridine with phosphorothioate linkage
  modified_base 22: mod_base = OTHER; note = 2'-O-methyluridine with phosphorothioate linkage
  modified_base 23: mod_base = OTHER; note = 2'-O-methylcytidine
tgtagaagcgaaagcaatcattc

SEQ ID NO: 1553 - RNA, 23 nt, synthetic construct
  source 1..23: mol_type = other RNA
  modified_base 1: mod_base = OTHER; note = 5'-(E)-vinylphosphonate 2'-O-methylated uridine with phosphorothioate linkage
  modified_base 2: mod_base = OTHER; note = 2'-fluorouridine with phosphorothioate linkage
  modified_base 3: mod_base = OTHER; note = 2'-O-methylguanosine
  modified_base 4: mod_base = OTHER; note = 2'-O-methyluridine
  modified_base 5: mod_base = OTHER; note = 2'-O-methyladenosine
  modified_base 6: mod_base = OTHER; note = 2'-fluoroguanosine
  modified_base 7: mod_base = OTHER; note = 2'-O-methyladenosine
  modified_base 8: mod_base = OTHER; note = 2'-O-methyladenosine
  modified_base 9: mod_base = OTHER; note = 2'-O-methylguanosine
  modified_base 10: mod_base = OTHER; note = 2'-O-methylcytidine
  modified_base 11: mod_base = OTHER; note = 2'-O-methylguanosine
  modified_base 12: mod_base = OTHER; note = 2'-O-methyladenosine
  modified_base 13: mod_base = OTHER; note = 2'-O-methyladenosine
  modified_base 14: mod_base = OTHER; note = 2'-fluoroadenosine
  modified_base 15: mod_base = OTHER; note = 2'-O-methylguanosine
  modified_base 16: mod_base = OTHER; note = 2'-fluorocytidine
  modified_base 17: mod_base = OTHER; note = 2'-O-methyladenosine
  modified_base 18: mod_base = OTHER; note = 2'-O-methyladenosine
  modified_base 19: mod_base = OTHER; note = 2'-O-methyluridine
  modified_base 20: mod_base = OTHER; note = 2'-O-methylcytidine
  modified_base 21: mod_base = OTHER; note = 2'-O-methyladenosine with phosphorothioate linkage
  modified_base 22: mod_base = OTHER; note = 2'-O-methyluridine with phosphorothioate linkage
  modified_base 23: mod_base = OTHER; note = 2'-O-methyluridine
ttgtagaagcgaaagcaatcatt

SEQ ID NO: 1554 - RNA, 23 nt, synthetic construct
  source 1..23: mol_type = other RNA
  modified_base 1: mod_base = OTHER; note = 5'-(E)-vinylphosphonate 2'-O-methylated uridine with phosphorothioate linkage
  modified_base 2: mod_base = OTHER; note = 2'-fluoroadenosine with phosphorothioate linkage
  modified_base 3: mod_base = OTHER; note = 2'-O-methylguanosine
  modified_base 4: mod_base = OTHER; note = 2'-O-methyladenosine
  modified_base 5: mod_base = OTHER; note = 2'-O-methylcytidine
  modified_base 6: mod_base = OTHER; note = 2'-fluoroadenosine
  modified_base 7: mod_base = OTHER; note = 2'-O-methyladenosine
  modified_base 8: mod_base = OTHER; note = 2'-O-methyluridine
  modified_base 9: mod_base = OTHER; note = 2'-O-methylguanosine
  modified_base 10: mod_base = OTHER; note = 2'-O-methylguanosine
  modified_base 11: mod_base = OTHER; note = 2'-O-methyladenosine
  modified_base 12: mod_base = OTHER; note = 2'-O-methyladenosine
  modified_base 13: mod_base = OTHER; note = 2'-O-methylcytidine
  modified_base 14: mod_base = OTHER; note = 2'-fluorocytidine
  modified_base 15: mod_base = OTHER; note = 2'-O-methylcytidine
  modified_base 16: mod_base = OTHER; note = 2'-fluorouridine
  modified_base 17: mod_base = OTHER; note = 2'-O-methyladenosine
  modified_base 18: mod_base = OTHER; note = 2'-O-methyladenosine
  modified_base 19: mod_base = OTHER; note = 2'-O-methyladenosine
  modified_base 20: mod_base = OTHER; note = 2'-O-methyladenosine
  modified_base 21: mod_base = OTHER; note = 2'-O-methyluridine with phosphorothioate linkage
  modified_base 22: mod_base = OTHER; note = 2'-O-methylguanosine with phosphorothioate linkage
  modified_base 23: mod_base = OTHER; note = 2'-O-methylcytidine
tagacaatggaaccctaaaatgc

SEQ ID NO: 1555 - RNA, 23 nt, synthetic construct
  source 1..23: mol_type = other RNA
  modified_base 1: mod_base = OTHER; note = 5'-(E)-vinylphosphonate 2'-O-methylated uridine with phosphorothioate linkage
  modified_base 2: mod_base = OTHER; note = 2'-fluorouridine with phosphorothioate linkage
  modified_base 3: mod_base = OTHER; note = 2'-O-methylguanosine
  modified_base 4: mod_base = OTHER; note = 2'-O-methyluridine
  modified_base 5: mod_base = OTHER; note = 2'-O-methyladenosine
  modified_base 6: mod_base = OTHER; note = 2'-fluoroadenosine
  modified_base 7: mod_base = OTHER; note = 2'-O-methylcytidine
  modified_base 8: mod_base = OTHER; note = 2'-O-methyladenosine
  modified_base 9: mod_base = OTHER; note = 2'-O-methylcytidine
  modified_base 10: mod_base = OTHER; note = 2'-O-methylcytidine
  modified_base 11: mod_base = OTHER; note = 2'-O-methyladenosine
  modified_base 12: mod_base = OTHER; note = 2'-O-methylcytidine
  modified_base 13: mod_base = OTHER; note = 2'-O-methylcytidine
  modified_base 14: mod_base = OTHER; note = 2'-fluoroadenosine
  modified_base 15: mod_base = OTHER; note = 2'-O-methyladenosine
  modified_base 16: mod_base = OTHER; note = 2'-fluoroguanosine
  modified_base 17: mod_base = OTHER; note = 2'-O-methyladenosine
  modified_base 18: mod_base = OTHER; note = 2'-O-methylcytidine
  modified_base 19: mod_base = OTHER; note = 2'-O-methyladenosine
  modified_base 20: mod_base = OTHER; note = 2'-O-methyladenosine
  modified_base 21: mod_base = OTHER; note = 2'-O-methyluridine with phosphorothioate linkage
  modified_base 22: mod_base = OTHER; note = 2'-O-methylguanosine with phosphorothioate linkage
  modified_base 23: mod_base = OTHER; note = 2'-O-methylguanosine
ttgtaacaccaccaagacaatgg

SEQ ID NO: 1556 - RNA, 23 nt, synthetic construct
  source 1..23: mol_type = other RNA
  modified_base 1: mod_base = OTHER; note = 5'-(E)-vinylphosphonate 2'-O-methylated uridine with phosphorothioate linkage
  modified_base 2: mod_base = OTHER; note = 2'-fluoroguanosine with phosphorothioate linkage
  modified_base 3: mod_base = OTHER; note = 2'-O-methylcytidine
  modified_base 4: mod_base = OTHER; note = 2'-O-methyladenosine
  modified_base 5: mod_base = OTHER; note = 2'-O-methyluridine
  modified_base 6: mod_base = OTHER; note = 2'-fluoroadenosine
  modified_base 7: mod_base = OTHER; note = 2'-O-methylguanosine
  modified_base 8: mod_base = OTHER; note = 2'-O-methyladenosine
  modified_base 9: mod_base = OTHER; note = 2'-O-methyladenosine
  modified_base 10: mod_base = OTHER; note = 2'-O-methyluridine
  modified_base 11: mod_base = OTHER; note = 2'-O-methyluridine
  modified_base 12: mod_base = OTHER; note = 2'-O-methyluridine
  modified_base 13: mod_base = OTHER; note = 2'-O-methylcytidine
  modified_base 14: mod_base = OTHER; note = 2'-fluorocytidine
  modified_base 15: mod_base = OTHER; note = 2'-O-methyladenosine
  modified_base 16: mod_base = OTHER; note = 2'-fluorocytidine
  modified_base 17: mod_base = OTHER; note = 2'-O-methyluridine
  modified_base 18: mod_base = OTHER; note = 2'-O-methyladenosine
  modified_base 19: mod_base = OTHER; note = 2'-O-methylcytidine
  modified_base 20: mod_base = OTHER; note = 2'-O-methylcytidine
  modified_base 21: mod_base = OTHER; note = 2'-O-methyladenosine with phosphorothioate linkage
  modified_base 22: mod_base = OTHER; note = 2'-O-methyluridine with phosphorothioate linkage
  modified_base 23: mod_base = OTHER; note = 2'-O-methyluridine
tgcatagaatttccactaccatt

SEQ ID NO: 1557 - RNA, 23 nt, synthetic construct
  source 1..23: mol_type = other RNA
  modified_base 1: mod_base = OTHER; note = 5'-(E)-vinylphosphonate 2'-O-methylated uridine with phosphorothioate linkage
  modified_base 2: mod_base = OTHER; note = 2'-fluorouridine with phosphorothioate linkage
  modified_base 3: mod_base = OTHER; note = 2'-O-methyluridine
  modified_base 4: mod_base = OTHER; note = 2'-O-methyluridine
  modified_base 5: mod_base = OTHER; note = 2'-O-methyladenosine
  modified_base 6: mod_base = OTHER; note = 2'-fluorocytidine
  modified_base 7: mod_base = OTHER; note = 2'-O-methyladenosine
  modified_base 8: mod_base = OTHER; note = 2'-O-methyladenosine
  modified_base 9: mod_base = OTHER; note = 2'-O-methylcytidine
  modified_base 10: mod_base = OTHER; note = 2'-O-methylcytidine
  modified_base 11: mod_base = OTHER; note = 2'-O-methyluridine
  modified_base 12: mod_base = OTHER; note = 2'-O-methylguanosine
  modified_base 13: mod_base = OTHER; note = 2'-O-methyladenosine
  modified_base 14: mod_base = OTHER; note = 2'-fluoroadenosine
  modified_base 15: mod_base = OTHER; note = 2'-O-methylguanosine
  modified_base 16: mod_base = OTHER; note = 2'-fluoroadenosine
  modified_base 17: mod_base = OTHER; note = 2'-O-methylguanosine
  modified_base 18: mod_base = OTHER; note = 2'-O-methylcytidine
  modified_base 19: mod_base = OTHER; note = 2'-O-methylguanosine
  modified_base 20: mod_base = OTHER; note = 2'-O-methylguanosine
  modified_base 21: mod_base = OTHER; note = 2'-O-methyluridine with phosphorothioate linkage
  modified_base 22: mod_base = OTHER; note = 2'-O-methylguanosine with phosphorothioate linkage
  modified_base 23: mod_base = OTHER; note = 2'-O-methyluridine
ttttacaacctgaagagcggtgt

SEQ ID NO: 1558 - RNA, 23 nt, synthetic construct
  source 1..23: mol_type = other RNA
  modified_base 1: mod_base = OTHER; note = 5'-(E)-vinylphosphonate 2'-O-methylated uridine with phosphorothioate linkage
  modified_base 2: mod_base = OTHER; note = 2'-fluoroadenosine with phosphorothioate linkage
  modified_base 3: mod_base = OTHER; note = 2'-O-methyluridine
  modified_base 4: mod_base = OTHER; note = 2'-O-methyladenosine
  modified_base 5: mod_base = OTHER; note = 2'-O-methylguanosine
  modified_base 6: mod_base = OTHER; note = 2'-fluorouridine
  modified_base 7: mod_base = OTHER; note = 2'-O-methylguanosine
  modified_base 8: mod_base = OTHER; note = 2'-O-methylcytidine
  modified_base 9: mod_base = OTHER; note = 2'-O-methylcytidine
  modified_base 10: mod_base = OTHER; note = 2'-O-methyluridine
  modified_base 11: mod_base = OTHER; note = 2'-O-methyladenosine
  modified_base 12: mod_base = OTHER; note = 2'-O-methyladenosine
  modified_base 13: mod_base = OTHER; note = 2'-O-methylcytidine
  modified_base 14: mod_base = OTHER; note = 2'-fluoroadenosine
  modified_base 15: mod_base = OTHER; note = 2'-O-methylcytidine
  modified_base 16: mod_base = OTHER; note = 2'-fluorouridine
  modified_base 17: mod_base = OTHER; note = 2'-O-methyladenosine
  modified_base 18: mod_base = OTHER; note = 2'-O-methylguanosine
  modified_base 19: mod_base = OTHER; note = 2'-O-methyladenosine
  modified_base 20: mod_base = OTHER; note = 2'-O-methyluridine
  modified_base 21: mod_base = OTHER; note = 2'-O-methylguanosine with phosphorothioate linkage
  modified_base 22: mod_base = OTHER; note = 2'-O-methyladenosine with phosphorothioate linkage
  modified_base 23: mod_base = OTHER; note = 2'-O-methyladenosine
tatagtgcctaacactagatgaa

SEQ ID NO: 1559 - RNA, 23 nt, synthetic construct
  source 1..23: mol_type = other RNA
  modified_base 1: mod_base = OTHER; note = 5'-(E)-vinylphosphonate 2'-O-methylated uridine with phosphorothioate linkage
  modified_base 2: mod_base = OTHER; note = 2'-fluorouridine with phosphorothioate linkage
  modified_base 3: mod_base = OTHER; note = 2'-O-methyladenosine
  modified_base 4: mod_base = OTHER; note = 2'-O-methyluridine
  modified_base 5: mod_base = OTHER; note = 2'-O-methyladenosine
  modified_base 6: mod_base = OTHER; note = 2'-fluoroguanosine
  modified_base 7: mod_base = OTHER; note = 2'-O-methyluridine
  modified_base 8: mod_base = OTHER; note = 2'-O-methylguanosine
  modified_base 9: mod_base = OTHER; note = 2'-O-methylcytidine
  modified_base 10: mod_base = OTHER; note = 2'-O-methylcytidine
  modified_base 11: mod_base = OTHER; note = 2'-O-methyluridine
  modified_base 12: mod_base = OTHER; note = 2'-O-methyladenosine
  modified_base 13: mod_base = OTHER; note = 2'-O-methyladenosine
  modified_base 14: mod_base = OTHER; note = 2'-fluorocytidine
  modified_base 15: mod_base = OTHER; note = 2'-O-methyladenosine
  modified_base 16: mod_base = OTHER; note = 2'-fluorocytidine
  modified_base 17: mod_base = OTHER; note = 2'-O-methyluridine
  modified_base 18: mod_base = OTHER; note = 2'-O-methyladenosine
  modified_base 19: mod_base = OTHER; note = 2'-O-methylguanosine
  modified_base 20: mod_base = OTHER; note = 2'-O-methyladenosine
  modified_base 21: mod_base = OTHER; note = 2'-O-methyluridine with phosphorothioate linkage
  modified_base 22: mod_base = OTHER; note = 2'-O-methylguanosine with phosphorothioate linkage
  modified_base 23: mod_base = OTHER; note = 2'-O-methyladenosine
ttatagtgcctaacactagatga

SEQ ID NO: 1560 - RNA, 23 nt, synthetic construct
  source 1..23: mol_type = other RNA
  modified_base 1: mod_base = OTHER; note = 5'-(E)-vinylphosphonate 2'-O-methylated uridine with phosphorothioate linkage
  modified_base 2: mod_base = OTHER; note = 2'-fluorouridine with phosphorothioate linkage
  modified_base 3: mod_base = OTHER; note = 2'-O-methyladenosine
  modified_base 4: mod_base = OTHER; note = 2'-O-methyladenosine
  modified_base 5: mod_base = OTHER; note = 2'-O-methyladenosine
  modified_base 6: mod_base = OTHER; note = 2'-fluorouridine
  modified_base 7: mod_base = OTHER; note = 2'-O-methyladenosine
  modified_base 8: mod_base = OTHER; note = 2'-O-methylcytidine
  modified_base 9: mod_base = OTHER; note = 2'-O-methyluridine
  modified_base 10: mod_base = OTHER; note = 2'-O-methyladenosine
  modified_base 11: mod_base = OTHER; note = 2'-O-methyluridine
  modified_base 12: mod_base = OTHER; note = 2'-O-methyladenosine
  modified_base 13: mod_base = OTHER; note = 2'-O-methylguanosine
  modified_base 14: mod_base = OTHER; note = 2'-fluorouridine
  modified_base 15: mod_base = OTHER; note = 2'-O-methylguanosine
  modified_base 16: mod_base = OTHER; note = 2'-fluorocytidine
  modified_base 17: mod_base = OTHER; note = 2'-O-methylcytidine
  modified_base 18: mod_base = OTHER; note = 2'-O-methyluridine
  modified_base 19: mod_base = OTHER; note = 2'-O-methyladenosine
  modified_base 20: mod_base = OTHER; note = 2'-O-methyladenosine
  modified_base 21: mod_base = OTHER; note = 2'-O-methylcytidine with phosphorothioate linkage
  modified_base 22: mod_base = OTHER; note = 2'-O-methyladenosine with phosphorothioate linkage
  modified_base 23: mod_base = OTHER; note = 2'-O-methylcytidine
ttaaatactatagtgcctaacac

SEQ ID NO: 1561 - RNA, 23 nt, synthetic construct
  source 1..23: mol_type = other RNA
  modified_base 1: mod_base = OTHER; note = 5'-(E)-vinylphosphonate 2'-O-methylated uridine with phosphorothioate linkage
  modified_base 2: mod_base = OTHER; note = 2'-fluoroadenosine with phosphorothioate linkage
  modified_base 3: mod_base = OTHER; note = 2'-O-methylguanosine
  modified_base 4: mod_base = OTHER; note = 2'-O-methylguanosine
  modified_base 5: mod_base = OTHER; note = 2'-O-methyluridine
  modified_base 6: mod_base = OTHER; note = 2'-fluoroadenosine
  modified_base 7: mod_base = OTHER; note = 2'-O-methylcytidine
  modified_base 8: mod_base = OTHER; note = 2'-O-methyladenosine
  modified_base 9: mod_base = OTHER; note = 2'-O-methyluridine
  modified_base 10: mod_base = OTHER; note = 2'-O-methyluridine
  modified_base 11: mod_base = OTHER; note = 2'-O-methylguanosine
  modified_base 12: mod_base = OTHER; note = 2'-O-methyladenosine
  modified_base 13: mod_base = OTHER; note = 2'-O-methyluridine
  modified_base 14: mod_base = OTHER; note = 2'-fluoroadenosine
  modified_base 15: mod_base = OTHER; note = 2'-O-methylcytidine
  modified_base 16: mod_base = OTHER; note = 2'-fluorocytidine
  modified_base 17: mod_base = OTHER; note = 2'-O-methyluridine
  modified_base 18: mod_base = OTHER; note = 2'-O-methyluridine
  modified_base 19: mod_base = OTHER; note = 2'-O-methyluridine
  modified_base 20: mod_base = OTHER; note = 2'-O-methyluridine
  modified_base 21: mod_base = OTHER; note = 2'-O-methyladenosine with phosphorothioate linkage
  modified_base 22: mod_base = OTHER; note = 2'-O-methyladenosine with phosphorothioate linkage
  modified_base 23: mod_base = OTHER; note = 2'-O-methylguanosine
taggtacattgataccttttaag

SEQ ID NO: 1562 - RNA, 23 nt, synthetic construct
  source 1..23: mol_type = other RNA
  modified_base 1: mod_base = OTHER; note = 5'-(E)-vinylphosphonate 2'-O-methylated uridine with phosphorothioate linkage
  modified_base 2: mod_base = OTHER; note = 2'-fluoroadenosine with phosphorothioate linkage
  modified_base 3: mod_base = OTHER; note = 2'-O-methyluridine
  modified_base 4: mod_base = OTHER; note = 2'-O-methyluridine
  modified_base 5: mod_base = OTHER; note = 2'-O-methyluridine
  modified_base 6: mod_base = OTHER; note = 2'-fluoroguanosine
  modified_base 7: mod_base = OTHER; note = 2'-O-methylcytidine
  modified_base 8: mod_base = OTHER; note = 2'-O-methyladenosine
  modified_base 9: mod_base = OTHER; note = 2'-O-methylcytidine
  modified_base 10: mod_base = OTHER; note = 2'-O-methyluridine
  modified_base 11: mod_base = OTHER; note = 2'-O-methyladenosine
  modified_base 12: mod_base = OTHER; note = 2'-O-methyluridine
  modified_base 13: mod_base = OTHER; note = 2'-O-methyladenosine
  modified_base 14: mod_base = OTHER; note = 2'-fluorouridine
  modified_base 15: mod_base = OTHER; note = 2'-O-methyluridine
  modified_base 16: mod_base = OTHER; note = 2'-fluoroadenosine
  modified_base 17: mod_base = OTHER; note = 2'-O-methyluridine
  modified_base 18: mod_base = OTHER; note = 2'-O-methylcytidine
  modified_base 19: mod_base = OTHER; note = 2'-O-methylcytidine
  modified_base 20: mod_base = OTHER; note = 2'-O-methyluridine
  modified_base 21: mod_base = OTHER; note = 2'-O-methylguanosine with phosphorothioate linkage
  modified_base 22: mod_base = OTHER; note = 2'-O-methylcytidine with phosphorothioate linkage
  modified_base 23: mod_base = OTHER; note = 2'-O-methylcytidine
tatttgcactatattatcctgcc

SEQ ID NO: 1563 - RNA, 23 nt, synthetic construct
  source 1..23: mol_type = other RNA
  modified_base 1: mod_base = OTHER; note = 5'-(E)-vinylphosphonate 2'-O-methylated uridine with phosphorothioate linkage
  modified_base 2: mod_base = OTHER; note = 2'-fluorocytidine with phosphorothioate linkage
  modified_base 3: mod_base = OTHER; note = 2'-O-methylcytidine
  modified_base 4: mod_base = OTHER; note = 2'-O-methylguanosine
  modified_base 5: mod_base = OTHER; note = 2'-O-methylcytidine
  modified_base 6: mod_base = OTHER; note = 2'-fluorocytidine
  modified_base 7: mod_base = OTHER; note = 2'-O-methyladenosine
  modified_base 8: mod_base = OTHER; note = 2'-O-methyluridine
  modified_base 9: mod_base = OTHER; note = 2'-O-methyluridine
  modified_base 10: mod_base = OTHER; note = 2'-O-methyladenosine
  modified_base 11: mod_base = OTHER; note = 2'-O-methyluridine
  modified_base 12: mod_base = OTHER; note = 2'-O-methyladenosine
  modified_base 13: mod_base = OTHER; note = 2'-O-methyluridine
  modified_base 14: mod_base = OTHER; note = 2'-fluoroguanosine
  modified_base 15: mod_base = OTHER; note = 2'-O-methylguanosine
  modified_base 16: mod_base = OTHER; note = 2'-fluorocytidine
  modified_base 17: mod_base = OTHER; note = 2'-O-methyluridine
  modified_base 18: mod_base = OTHER; note = 2'-O-methyluridine
  modified_base 19: mod_base = OTHER; note = 2'-O-methylcytidine
  modified_base 20: mod_base = OTHER; note = 2'-O-methyluridine
  modified_base 21: mod_base = OTHER; note = 2'-O-methylcytidine with phosphorothioate linkage
  modified_base 22: mod_base = OTHER; note = 2'-O-methyladenosine with phosphorothioate linkage
  modified_base 23: mod_base = OTHER; note = 2'-O-methyluridine
tccgccattatatggcttctcat

SEQ ID NO: 1564 - RNA, 23 nt, synthetic construct
  source 1..23: mol_type = other RNA
  modified_base 1: mod_base = OTHER; note = 5'-(E)-vinylphosphonate 2'-O-methylated uridine with phosphorothioate linkage
  modified_base 2: mod_base = OTHER; note = 2'-fluoroadenosine with phosphorothioate linkage
  modified_base 3: mod_base = OTHER; note = 2'-O-methyladenosine
  modified_base 4: mod_base = OTHER; note = 2'-O-methylcytidine
  modified_base 5: mod_base = OTHER; note = 2'-O-methylcytidine
  modified_base 6: mod_base = OTHER; note = 2'-fluoroguanosine
  modified_base 7: mod_base = OTHER; note = 2'-O-methylcytidine
  modified_base 8: mod_base = OTHER; note = 2'-O-methylcytidine
  modified_base 9: mod_base = OTHER; note = 2'-O-methyladenosine
  modified_base 10: mod_base = OTHER; note = 2'-O-methyluridine
  modified_base 11: mod_base = OTHER; note = 2'-O-methyluridine
  modified_base 12: mod_base = OTHER; note = 2'-O-methyladenosine
  modified_base 13: mod_base = OTHER; note = 2'-O-methyluridine
  modified_base 14: mod_base = OTHER; note = 2'-fluoroadenosine
  modified_base 15: mod_base = OTHER; note = 2'-O-methyluridine
  modified_base 16: mod_base = OTHER; note = 2'-fluoroguanosine
  modified_base 17: mod_base = OTHER; note = 2'-O-methylguanosine
  modified_base 18: mod_base = OTHER; note = 2'-O-methylcytidine
  modified_base 19: mod_base = OTHER; note = 2'-O-methyluridine
  modified_base 20: mod_base = OTHER; note = 2'-O-methyluridine
  modified_base 21: mod_base = OTHER; note = 2'-O-methylcytidine with phosphorothioate linkage
  modified_base 22: mod_base = OTHER; note = 2'-O-methyluridine with phosphorothioate linkage
  modified_base 23: mod_base = OTHER; note = 2'-O-methylcytidine
taaccgccattatatggcttctc

SEQ ID NO: 1565 - RNA, 23 nt, synthetic construct
  source 1..23: mol_type = other RNA
  modified_base 1: mod_base = OTHER; note = 5'-(E)-vinylphosphonate 2'-O-methylated uridine with phosphorothioate linkage
  modified_base 2: mod_base = OTHER; note = 2'-fluorouridine with phosphorothioate linkage
  modified_base 3: mod_base = OTHER; note = 2'-O-methyladenosine
  modified_base 4: mod_base = OTHER; note = 2'-O-methyluridine
  modified_base 5: mod_base = OTHER; note = 2'-O-methyluridine
  modified_base 6: mod_base = OTHER; note = 2'-fluoroadenosine
  modified_base 7: mod_base = OTHER; note = 2'-O-methylguanosine
  modified_base 8: mod_base = OTHER; note = 2'-O-methylcytidine
  modified_base 9: mod_base = OTHER; note = 2'-O-methyluridine
  modified_base 10: mod_base = OTHER; note = 2'-O-methyluridine
  modified_base 11: mod_base = OTHER; note = 2'-O-methylguanosine
  modified_base 12: mod_base = OTHER; note = 2'-O-methylcytidine
  modified_base 13: mod_base = OTHER; note = 2'-O-methyladenosine
  modified_base 14: mod_base = OTHER; note = 2'-fluoroguanosine
  modified_base 15: mod_base = OTHER; note = 2'-O-methyluridine
  modified_base 16: mod_base = OTHER; note = 2'-fluoroadenosine
  modified_base 17: mod_base = OTHER; note = 2'-O-methylcytidine
  modified_base 18: mod_base = OTHER; note = 2'-O-methyluridine
  modified_base 19: mod_base = OTHER; note = 2'-O-methylguanosine
  modified_base 20: mod_base = OTHER; note = 2'-O-methylcytidine
  modified_base 21: mod_base = OTHER; note = 2'-O-methyladenosine with phosphorothioate linkage
  modified_base 22: mod_base = OTHER; note = 2'-O-methyluridine with phosphorothioate linkage
  modified_base 23: mod_base = OTHER; note = 2'-O-methyladenosine
ttattagcttgcagtactgcata

SEQ ID NO: 1566 - RNA, 23 nt, synthetic construct
  source 1..23: mol_type = other RNA
  modified_base 1: mod_base = OTHER; note = 5'-(E)-vinylphosphonate 2'-O-methylated uridine with phosphorothioate linkage
  modified_base 2: mod_base = OTHER; note = 2'-fluorocytidine with phosphorothioate linkage
  modified_base 3: mod_base = OTHER; note = 2'-O-methylcytidine
  modified_base 4: mod_base = OTHER; note = 2'-O-methyladenosine
  modified_base 5: mod_base = OTHER; note = 2'-O-methyladenosine
  modified_base 6: mod_base = OTHER; note = 2'-fluorocytidine
  modified_base 7: mod_base = OTHER; note = 2'-O-methylguanosine
  modified_base 8: mod_base = OTHER; note = 2'-O-methyluridine
  modified_base 9: mod_base = OTHER; note = 2'-O-methyluridine
  modified_base 10: mod_base = OTHER; note = 2'-O-methyladenosine
  modified_base 11: mod_base = OTHER; note = 2'-O-methyluridine
  modified_base 12: mod_base = OTHER; note = 2'-O-methyluridine
  modified_base 13: mod_base = OTHER; note = 2'-O-methyladenosine
  modified_base 14: mod_base = OTHER; note = 2'-fluoroguanosine
  modified_base 15: mod_base = OTHER; note = 2'-O-methylcytidine
  modified_base 16: mod_base = OTHER; note = 2'-fluorouridine
  modified_base 17: mod_base = OTHER; note = 2'-O-methyluridine
  modified_base 18: mod_base = OTHER; note = 2'-O-methylguanosine
  modified_base 19: mod_base = OTHER; note = 2'-O-methylcytidine
  modified_base 20: mod_base = OTHER; note = 2'-O-methyladenosine
  modified_base 21: mod_base = OTHER; note = 2'-O-methylguanosine with phosphorothioate linkage
  modified_base 22: mod_base = OTHER; note = 2'-O-methyluridine with phosphorothioate linkage
  modified_base 23: mod_base = OTHER; note = 2'-O-methyladenosine
tccaacgttattagcttgcagta

SEQ ID NO: 1567 - RNA, 23 nt, synthetic construct
  source 1..23: mol_type = other RNA
  modified_base 1: mod_base = OTHER; note = 5'-(E)-vinylphosphonate 2'-O-methylated uridine with phosphorothioate linkage
  modified_base 2: mod_base = OTHER; note = 2'-fluoroadenosine with phosphorothioate linkage
  modified_base 3: mod_base = OTHER; note = 2'-O-methylcytidine
  modified_base 4: mod_base = OTHER; note = 2'-O-methylcytidine
  modified_base 5: mod_base = OTHER; note = 2'-O-methyladenosine
  modified_base 6: mod_base = OTHER; note = 2'-fluoroadenosine
  modified_base 7: mod_base = OTHER; note = 2'-O-methylcytidine
  modified_base 8: mod_base = OTHER; note = 2'-O-methylguanosine
  modified_base 9: mod_base = OTHER; note = 2'-O-methyluridine
  modified_base 10: mod_base = OTHER; note = 2'-O-methyluridine
  modified_base 11: mod_base = OTHER; note = 2'-O-methyladenosine
  modified_base 12: mod_base = OTHER; note = 2'-O-methyluridine
  modified_base 13: mod_base = OTHER; note = 2'-O-methyluridine
  modified_base 14: mod_base = OTHER; note = 2'-fluoroadenosine
  modified_base 15: mod_base = OTHER; note = 2'-O-methylguanosine
  modified_base 16: mod_base = OTHER; note = 2'-fluorocytidine
  modified_base 17: mod_base = OTHER; note = 2'-O-methyluridine
  modified_base 18: mod_base = OTHER; note = 2'-O-methyluridine
  modified_base 19: mod_base = OTHER; note = 2'-O-methylguanosine
  modified_base 20: mod_base = OTHER; note = 2'-O-methylcytidine
  modified_base 21: mod_base = OTHER; note = 2'-O-methyladenosine with phosphorothioate linkage
  modified_base 22: mod_base = OTHER; note = 2'-O-methylguanosine with phosphorothioate linkage
  modified_base 23: mod_base = OTHER; note = 2'-O-methyluridine
taccaacgttattagcttgcagt

SEQ ID NO: 1568 - RNA, 23 nt, synthetic construct
  source 1..23: mol_type = other RNA
  modified_base 1: mod_base = OTHER; note = 5'-(E)-vinylphosphonate 2'-O-methylated uridine with phosphorothioate linkage
  modified_base 2: mod_base = OTHER; note = 2'-fluoroadenosine with phosphorothioate linkage
  modified_base 3: mod_base = OTHER; note = 2'-O-methyladenosine
  modified_base 4: mod_base = OTHER; note = 2'-O-methylcytidine
  modified_base 5: mod_base = OTHER; note = 2'-O-methylcytidine
  modified_base 6: mod_base = OTHER; note = 2'-fluoroadenosine
  modified_base 7: mod_base = OTHER; note = 2'-O-methyladenosine
  modified_base 8: mod_base = OTHER; note = 2'-O-methylcytidine
  modified_base 9: mod_base = OTHER; note = 2'-O-methylguanosine
  modified_base 10: mod_base = OTHER; note = 2'-O-methyluridine
  modified_base 11: mod_base = OTHER; note = 2'-O-methyluridine
  modified_base 12: mod_base = OTHER; note = 2'-O-methyladenosine
  modified_base 13: mod_base = OTHER; note = 2'-O-methyluridine
  modified_base 14: mod_base = OTHER; note = 2'-fluorouridine
  modified_base 15: mod_base = OTHER; note = 2'-O-methyladenosine
  modified_base 16: mod_base = OTHER; note = 2'-fluoroguanosine
  modified_base 17: mod_base = OTHER; note = 2'-O-methylcytidine
  modified_base 18: mod_base = OTHER; note = 2'-O-methyluridine
  modified_base 19: mod_base = OTHER; note = 2'-O-methyluridine
  modified_base 20: mod_base = OTHER; note = 2'-O-methylguanosine
  modified_base 21: mod_base = OTHER; note = 2'-O-methylcytidine with phosphorothioate linkage
  modified_base 22: mod_base = OTHER; note = 2'-O-methyladenosine with phosphorothioate linkage
  modified_base 23: mod_base = OTHER; note = 2'-O-methylguanosine
taaccaacgttattagcttgcag

SEQ ID NO: 1569 - RNA, 23 nt, synthetic construct
  source 1..23: mol_type = other RNA
  modified_base 1: mod_base = OTHER; note = 5'-(E)-vinylphosphonate 2'-O-methylated uridine with phosphorothioate linkage
  modified_base 2: mod_base = OTHER; note = 2'-fluoroadenosine with phosphorothioate linkage
  modified_base 3: mod_base = OTHER; note = 2'-O-methyluridine
  modified_base 4: mod_base = OTHER; note = 2'-O-methyladenosine
  modified_base 5: mod_base = OTHER; note = 2'-O-methyladenosine
  modified_base 6: mod_base = OTHER; note = 2'-fluorocytidine
  modified_base 7: mod_base = OTHER; note = 2'-O-methyladenosine
  modified_base 8: mod_base = OTHER; note = 2'-O-methyladenosine
  modified_base 9: mod_base = OTHER; note = 2'-O-methyladenosine
  modified_base 10: mod_base = OTHER; note = 2'-O-methylcytidine
  modified_base 11: mod_base = OTHER; note = 2'-O-methylcytidine
  modified_base 12: mod_base = OTHER; note = 2'-O-methyladenosine
  modified_base 13: mod_base = OTHER; note = 2'-O-methyladenosine
  modified_base 14: mod_base = OTHER; note = 2'-fluorocytidine
  modified_base 15: mod_base = OTHER; note = 2'-O-methylguanosine
  modified_base 16: mod_base = OTHER; note = 2'-fluorouridine
  modified_base 17: mod_base = OTHER; note = 2'-O-methyluridine
  modified_base 18: mod_base = OTHER; note = 2'-O-methyladenosine
  modified_base 19: mod_base = OTHER; note = 2'-O-methyluridine
  modified_base 20: mod_base = OTHER; note = 2'-O-methyluridine
  modified_base 21: mod_base = OTHER; note = 2'-O-methyladenosine with phosphorothioate linkage
  modified_base 22: mod_base = OTHER; note = 2'-O-methylguanosine with phosphorothioate linkage
  modified_base 23: mod_base = OTHER; note = 2'-O-methylcytidine
tataacaaaccaacgttattagc

SEQ ID NO: 1570 - RNA, 23 nt, synthetic construct
  source 1..23: mol_type = other RNA
  modified_base 1: mod_base = OTHER; note = 5'-(E)-vinylphosphonate 2'-O-methylated uridine with phosphorothioate linkage
  modified_base 2: mod_base = OTHER; note = 2'-fluorouridine with phosphorothioate linkage
  modified_base 3: mod_base = OTHER; note = 2'-O-methyluridine
  modified_base 4: mod_base = OTHER; note = 2'-O-methylguanosine
  modified_base 5: mod_base = OTHER; note = 2'-O-methyladenosine
  modified_base 6: mod_base = OTHER; note = 2'-fluorocytidine
  modified_base 7: mod_base = OTHER; note = 2'-O-methyluridine
  modified_base 8: mod_base = OTHER; note = 2'-O-methyladenosine
  modified_base 9: mod_base = OTHER; note = 2'-O-methyladenosine
  modified_base 10: mod_base = OTHER; note = 2'-O-methyladenosine
  modified_base 11: mod_base = OTHER; note = 2'-O-methylguanosine
  modified_base 12: mod_base = OTHER; note = 2'-O-methylcytidine
  modified_base 13: mod_base = OTHER; note = 2'-O-methylguanosine
  modified_base 14: mod_base = OTHER; note = 2'-fluoroguanosine
  modified_base 15: mod_base = OTHER; note = 2'-O-methylguanosine
  modified_base 16: mod_base = OTHER; note = 2'-fluorocytidine
  modified_base 17: mod_base = OTHER; note = 2'-O-methyluridine
  modified_base 18: mod_base = OTHER; note = 2'-O-methyluridine
  modified_base 19: mod_base = OTHER; note = 2'-O-methyluridine
  modified_base 20: mod_base = OTHER; note = 2'-O-methylcytidine
  modified_base 21: mod_base = OTHER; note = 2'-O-methyluridine with phosphorothioate linkage
  modified_base 22: mod_base = OTHER; note = 2'-O-methylcytidine with phosphorothioate linkage
  modified_base 23: mod_base = OTHER; note = 2'-O-methyluridine
tttgactaaagcgggctttctct

SEQ ID NO: 1571 - RNA, 23 nt, synthetic construct
  source 1..23: mol_type = other RNA
  modified_base 1: mod_base = OTHER; note = 5'-(E)-vinylphosphonate 2'-O-methylated uridine with phosphorothioate linkage
  modified_base 2: mod_base = OTHER; note = 2'-fluoroadenosine with phosphorothioate linkage
  modified_base 3: mod_base = OTHER; note = 2'-O-methyluridine
  modified_base 4: mod_base = OTHER; note = 2'-O-methyluridine
  modified_base 5: mod_base = OTHER; note = 2'-O-methylguanosine
  modified_base 6: mod_base = OTHER; note = 2'-fluoroadenosine
  modified_base 7: mod_base = OTHER; note = 2'-O-methylcytidine
  modified_base 8: mod_base = OTHER; note = 2'-O-methyluridine
  modified_base 9: mod_base = OTHER; note = 2'-O-methyladenosine
  modified_base 10: mod_base = OTHER; note = 2'-O-methyladenosine
  modified_base 11: mod_base = OTHER; note = 2'-O-methyladenosine
  modified_base 12: mod_base = OTHER; note = 2'-O-methylguanosine
  modified_base 13: mod_base = OTHER; note = 2'-O-methylcytidine
  modified_base 14: mod_base = OTHER; note = 2'-fluoroguanosine
  modified_base 15: mod_base = OTHER; note = 2'-O-methylguanosine
  modified_base 16: mod_base = OTHER; note = 2'-fluoroguanosine
  modified_base 17: mod_base = OTHER; note = 2'-O-methylcytidine
  modified_base 18: mod_base = OTHER; note = 2'-O-methyluridine
  modified_base 19: mod_base = OTHER; note = 2'-O-methyluridine
  modified_base 20: mod_base = OTHER; note = 2'-O-methyluridine
  modified_base 21: mod_base = OTHER; note = 2'-O-methylcytidine with phosphorothioate linkage
  modified_base 22: mod_base = OTHER; note = 2'-O-methyluridine with phosphorothioate linkage
  modified_base 23: mod_base = OTHER; note = 2'-O-methylcytidine
tattgactaaagcgggctttctc

SEQ ID NO: 1572 - RNA, 23 nt, synthetic construct
  source 1..23: mol_type = other RNA
  modified_base 1: mod_base = OTHER; note = 5'-(E)-vinylphosphonate 2'-O-methylated uridine with phosphorothioate linkage
  modified_base 2: mod_base = OTHER; note = 2'-fluorouridine with phosphorothioate linkage
  modified_base 3: mod_base = OTHER; note = 2'-O-methyladenosine
  modified_base 4: mod_base = OTHER; note = 2'-O-methyluridine
  modified_base 5: mod_base = OTHER; note = 2'-O-methyluridine
  modified_base 6: mod_base = OTHER; note = 2'-fluoroguanosine
  modified_base 7: mod_base = OTHER; note = 2'-O-methyladenosine
  modified_base 8: mod_base = OTHER; note = 2'-O-methylcytidine
  modified_base 9: mod_base = OTHER; note = 2'-O-methyluridine
  modified_base 10: mod_base = OTHER; note = 2'-O-methyladenosine
  modified_base 11: mod_base = OTHER; note = 2'-O-methyladenosine
  modified_base 12: mod_base = OTHER; note = 2'-O-methyladenosine
  modified_base 13: mod_base = OTHER; note = 2'-O-methylguanosine
  modified_base 14: mod_base = OTHER; note = 2'-fluorocytidine
  modified_base 15: mod_base = OTHER; note = 2'-O-methylguanosine
  modified_base 16: mod_base = OTHER; note = 2'-fluoroguanosine
  modified_base 17: mod_base = OTHER; note = 2'-O-methylguanosine
  modified_base 18: mod_base = OTHER; note = 2'-O-methylcytidine
  modified_base 19: mod_base = OTHER; note = 2'-O-methyluridine
  modified_base 20: mod_base = OTHER; note = 2'-O-methyluridine
  modified_base 21: mod_base = OTHER; note = 2'-O-methyluridine with phosphorothioate linkage
  modified_base 22: mod_base = OTHER; note = 2'-O-methylcytidine with phosphorothioate linkage
  modified_base 23: mod_base = OTHER; note = 2'-O-methyluridine
ttattgactaaagcgggctttct

SEQ ID NO: 1573 - RNA, 23 nt, synthetic construct
  source 1..23: mol_type = other RNA
  modified_base 1: mod_base = OTHER; note = 5'-(E)-vinylphosphonate 2'-O-methylated uridine with phosphorothioate linkage
  modified_base 2: mod_base = OTHER; note = 2'-fluoroadenosine with phosphorothioate linkage
  modified_base 3: mod_base = OTHER; note = 2'-O-methyladenosine
  modified_base 4: mod_base = OTHER; note = 2'-O-methylguanosine
  modified_base 5: mod_base = OTHER; note = 2'-O-methyluridine
  modified_base 6: mod_base = OTHER; note = 2'-fluoroadenosine
  modified_base 7: mod_base = OTHER; note = 2'-O-methyluridine
  modified_base 8: mod_base = OTHER; note = 2'-O-methyluridine
  modified_base 9: mod_base = OTHER; note = 2'-O-methylguanosine
  modified_base 10: mod_base = OTHER; note = 2'-O-methyladenosine
  modified_base 11: mod_base = OTHER; note = 2'-O-methylcytidine
  modified_base 12: mod_base = OTHER; note = 2'-O-methyluridine
  modified_base 13: mod_base = OTHER; note = 2'-O-methyladenosine
  modified_base 14: mod_base = OTHER; note = 2'-fluoroadenosine
  modified_base 15: mod_base = OTHER; note = 2'-O-methyladenosine
  modified_base 16: mod_base = OTHER; note = 2'-fluoroguanosine
  modified_base 17: mod_base = OTHER; note = 2'-O-methylcytidine
  modified_base 18: mod_base = OTHER; note = 2'-O-methylguanosine
  modified_base 19: mod_base = OTHER; note = 2'-O-methylguanosine
  modified_base 20: mod_base = OTHER; note = 2'-O-methylguanosine
  modified_base 21: mod_base = OTHER; note = 2'-O-methylcytidine with phosphorothioate linkage
  modified_base 22: mod_base = OTHER; note = 2'-O-methyluridine with phosphorothioate linkage
  modified_base 23: mod_base = OTHER; note = 2'-O-methyluridine
taagtattgactaaagcgggctt

SEQ ID NO: 1574 - RNA, 23 nt, synthetic construct
  source 1..23: mol_type = other RNA
  modified_base 1: mod_base = OTHER; note = 5'-(E)-vinylphosphonate 2'-O-methylated uridine with phosphorothioate linkage
  modified_base 2: mod_base = OTHER; note = 2'-fluoroadenosine with phosphorothioate linkage
  modified_base 3: mod_base = OTHER; note = 2'-O-methyladenosine
  modified_base 4: mod_base = OTHER; note = 2'-O-methylcytidine
  modified_base 5: mod_base = OTHER; note = 2'-O-methyladenosine
  modified_base 6: mod_base = OTHER; note = 2'-fluoroguanosine
  modified_base 7: mod_base = OTHER; note = 2'-O-methylguanosine
  modified_base 8: mod_base = OTHER; note = 2'-O-methyluridine
  modified_base 9: mod_base = OTHER; note = 2'-O-methyluridine
  modified_base 10: mod_base = OTHER; note = 2'-O-methyladenosine
  modified_base 11: mod_base = OTHER; note = 2'-O-methyladenosine
  modified_base 12: mod_base = OTHER; note = 2'-O-methyluridine
  modified_base 13: mod_base = OTHER; note = 2'-O-methylguanosine
  modified_base 14: mod_base = OTHER; note = 2'-fluorocytidine
  modified_base 15: mod_base = OTHER; note = 2'-O-methyladenosine
  modified_base 16: mod_base = OTHER; note = 2'-fluoroguanosine
  modified_base 17: mod_base = OTHER; note = 2'-O-methyladenosine
  modified_base 18: mod_base = OTHER; note = 2'-O-methylcytidine
  modified_base 19: mod_base = OTHER; note = 2'-O-methyladenosine
  modified_base 20: mod_base = OTHER; note = 2'-O-methyladenosine
  modified_base 21: mod_base = OTHER; note = 2'-O-methylcytidine with phosphorothioate linkage
  modified_base 22: mod_base = OTHER; note = 2'-O-methyluridine with phosphorothioate linkage
  modified_base 23: mod_base = OTHER; note = 2'-O-methylguanosine
taacaggttaatgcagacaactg

SEQ ID NO: 1575 - RNA, 23 nt, synthetic construct
  source 1..23: mol_type = other RNA
  modified_base 1: mod_base = OTHER; note = 5'-(E)-vinylphosphonate 2'-O-methylated uridine with phosphorothioate linkage
  modified_base 2: mod_base = OTHER; note = 2'-fluoroguanosine with phosphorothioate linkage
  modified_base 3: mod_base = OTHER; note = 2'-O-methyladenosine
  modified_base 4: mod_base = OTHER; note = 2'-O-methylcytidine
  modified_base 5: mod_base = OTHER; note = 2'-O-methyladenosine
  modified_base 6: mod_base = OTHER; note = 2'-fluoroadenosine
  modified_base 7: mod_base = OTHER; note = 2'-O-methyladenosine
  modified_base 8: mod_base = OTHER; note = 2'-O-methyladenosine
  modified_base 9: mod_base = OTHER; note = 2'-O-methyluridine
  modified_base 10: mod_base = OTHER; note = 2'-O-methylguanosine
  modified_base 11: mod_base = OTHER; note = 2'-O-methylguanosine
  modified_base 12: mod_base = OTHER; note = 2'-O-methylguanosine
  modified_base 13: mod_base = OTHER; note = 2'-O-methyluridine
  modified_base 14: mod_base = OTHER; note = 2'-fluoroguanosine
  modified_base 15: mod_base = OTHER; note = 2'-O-methyluridine
  modified_base 16: mod_base = OTHER; note = 2'-fluoroadenosine
  modified_base 17: mod_base = OTHER; note = 2'-O-methyluridine
  modified_base 18: mod_base = OTHER; note = 2'-O-methylguanosine
  modified_base 19: mod_base = OTHER; note = 2'-O-methyladenosine
  modified_base 20: mod_base = OTHER; note = 2'-O-methyladenosine
  modified_base 21: mod_base = OTHER; note = 2'-O-methylcytidine with phosphorothioate linkage
  modified_base 22: mod_base = OTHER; note = 2'-O-methyladenosine with phosphorothioate linkage
  modified_base 23: mod_base = OTHER; note = 2'-O-methylguanosine
tgacaaaatgggtgtatgaacag

SEQ ID NO: 1576 - RNA, 23 nt, synthetic construct
  source 1..23: mol_type = other RNA
  modified_base 1: mod_base = OTHER; note = 5'-(E)-vinylphosphonate 2'-O-methylated uridine with phosphorothioate linkage
  modified_base 2: mod_base = OTHER; note = 2'-fluoroguanosine with phosphorothioate linkage
  modified_base 3: mod_base = OTHER; note = 2'-O-methylguanosine
  modified_base 4: mod_base = OTHER; note = 2'-O-methylguanosine
  modified_base 5: mod_base = OTHER; note = 2'-O-methyladenosine
  modified_base 6: mod_base = OTHER; note = 2'-fluorocytidine
  modified_base 7: mod_base = OTHER; note = 2'-O-methyladenosine
  modified_base 8: mod_base = OTHER; note = 2'-O-methyladenosine
  modified_base 9: mod_base = OTHER; note = 2'-O-methyladenosine
  modified_base 10: mod_base = OTHER; note = 2'-O-methyladenosine
  modified_base 11: mod_base = OTHER; note = 2'-O-methyluridine
  modified_base 12: mod_base = OTHER; note = 2'-O-methylguanosine
  modified_base 13: mod_base = OTHER; note = 2'-O-methylguanosine
  modified_base 14: mod_base = OTHER; note = 2'-fluoroguanosine
  modified_base 15: mod_base = OTHER; note = 2'-O-methyluridine
  modified_base 16: mod_base = OTHER; note = 2'-fluoroguanosine
  modified_base 17: mod_base = OTHER; note = 2'-O-methyluridine
  modified_base 18: mod_base = OTHER; note = 2'-O-methyladenosine
  modified_base 19: mod_base = OTHER; note = 2'-O-methyluridine
  modified_base 20: mod_base = OTHER; note = 2'-O-methylguanosine
  modified_base 21: mod_base = OTHER; note = 2'-O-methyladenosine with phosphorothioate linkage
  modified_base 22: mod_base = OTHER; note = 2'-O-methyladenosine with phosphorothioate linkage
  modified_base 23: mod_base = OTHER; note = 2'-O-methylcytidine
tgggacaaaatgggtgtatgaac

SEQ ID NO: 1577 - RNA, 21 nt, synthetic construct
  source 1..21: mol_type = other RNA
tggattaagaatctacttaga

SEQ ID NO: 1578 - RNA, 21 nt, synthetic construct
  source 1..21: mol_type = other RNA
cacaaacggaaacaatgcaat

SEQ ID NO: 1579 - RNA, 21 nt, synthetic construct
  source 1..21: mol_type = other RNA
acattcttatttttatcgaga

SEQ ID NO: 1580 - RNA, 21 nt, synthetic construct
  source 1..21: mol_type = other RNA
gcaaacagccattcaccagtt

SEQ ID NO: 1581 - RNA, 21 nt, synthetic construct
  source 1..21: mol_type = other RNA
atgtacaacttgcaaacagca

SEQ ID NO: 1582 - RNA, 21 nt, synthetic construct
  source 1..21: mol_type = other RNA
aacacgcacagaacactcatt

SEQ ID NO: 1583 - RNA, 21 nt, synthetic construct
  source 1..21: mol_type = other RNA
gctacacatgtacaacttgca

SEQ ID NO: 1584 - RNA, 21 nt, synthetic construct
  source 1..21: mol_type = other RNA
cacatgtacaacttgcaaaca

SEQ ID NO: 1585 - RNA, 21 nt, synthetic construct
  source 1..21: mol_type = other RNA
acttgcaaacagccattcaca

SEQ ID NO: 1586 - RNA, 21 nt, synthetic construct
  source 1..21: mol_type = other RNA
cgcacagaacactcatggata

SEQ ID NO: 1587 - RNA, 21 nt, synthetic construct
  source 1..21: mol_type = other RNA
attcttatttttatcgagcaa

SEQ ID NO: 1588 - RNA, 21 nt, synthetic construct
  source 1..21: mol_type = other RNA
agtgcatggtttctcttgcaa

SEQ ID NO: 1589 - RNA, 21 nt, synthetic construct
  source 1..21: mol_type = other RNA
tcatctagaggaatttgccca

SEQ ID NO: 1590 - RNA, 21 nt, synthetic construct
  source 1..21: mol_type = other RNA
ggcgagaagcataagcgcgga

SEQ ID NO: 1591 - RNA, 21 nt, synthetic construct
  source 1..21: mol_type = other RNA
gtaagatgccttttagcgtga

SEQ ID NO: 1592 - RNA, 21 nt, synthetic construct
  source 1..21: mol_type = other RNA
gggattcatattgcagacaat

SEQ ID NO: 1593 - RNA, 21 nt, synthetic construct
  source 1..21: mol_type = other RNA
attaagaatctacttagaaag

SEQ ID NO: 1594 - RNA, 21 nt, synthetic construct
  source 1..21: mol_type = other RNA
gaaggacgtttacaaatgtga

SEQ ID NO: 1595 - RNA, 21 nt, synthetic construct
  source 1..21: mol_type = other RNA
gtgaaatttgtaagatgcctt

SEQ ID NO: 1596 - RNA, 21 nt, synthetic construct
  source 1..21: mol_type = other RNA
acgttcaaatttcagagcaac

SEQ ID NO: 1597 - RNA, 21 nt, synthetic construct
  source 1..21: mol_type = other RNA
cactcatggattaagaatcta

SEQ ID NO: 1598 - RNA, 21 nt, synthetic construct
  source 1..21: mol_type = other RNA
caacgtcatctagaggaattt

SEQ ID NO: 1599 - RNA, 21 nt, synthetic construct
  source 1..21: mol_type = other RNA
ctctaggagacttagagagct

SEQ ID NO: 1600 - RNA, 21 nt, synthetic construct
  source 1..21: mol_type = other RNA
acagaacactcatggattaag

SEQ ID NO: 1601 - RNA, 21 nt, synthetic construct
  source 1..21: mol_type = other RNA
tgacagggtgctgcggttgaa

SEQ ID NO: 1602 - RNA, 21 nt, synthetic construct
  source 1..21: mol_type = other RNA
tcgagtgttgaataatgatat

SEQ ID NO: 1603 - RNA, 21 nt, synthetic construct
  source 1..21: mol_type = other RNA
atgacgattgtttatcaacgt

SEQ ID NO: 1604 - RNA, 21 nt, synthetic construct
  source 1..21: mol_type = other RNA
atggatttctctaggagactt

SEQ ID NO: 1605 - RNA, 21 nt, synthetic construct
  source 1..21: mol_type = other RNA
ctccaggcagctcaaagatcc

SEQ ID NO: 1606 - RNA, 21 nt, synthetic construct
  source 1..21: mol_type = other RNA
ctgtagcaatctcactgtcca

SEQ ID NO: 1607 - RNA, 21 nt, synthetic construct
  source 1..21: mol_type = other RNA
cgagcacaaacggaaacaatg

SEQ ID NO: 1608 - RNA, 21 nt, synthetic construct
  source 1..21: mol_type = other RNA
tcaacgtcatctagaggaatt

SEQ ID NO: 1609 - RNA, 21 nt, synthetic construct
  source 1..21: mol_type = other RNA
tgcggttgaatccaatggcta

SEQ ID NO: 1610 - RNA, 21 nt, synthetic construct
  source 1..21: mol_type = other RNA
gacgattgtttatcaacgtca

SEQ ID NO: 1611 - RNA, 21 nt, synthetic construct
  source 1..21: mol_type = other RNA
tggagtctccttctttctaac

SEQ ID NO: 1612 - RNA, 21 nt, synthetic construct
  source 1..21: mol_type = other RNA
tgtgaaatttgtaagatgcct

SEQ ID NO: 1613 - RNA, 21 nt, synthetic construct
  source 1..21: mol_type = other RNA
acggctctcccacaattcatc

SEQ ID NO: 1614 - RNA, 21 nt, synthetic construct
  source 1..21: mol_type = other RNA
ggaaagtcttcaagaactgta

SEQ ID NO: 1615 - RNA, 21 nt, synthetic construct
  source 1..21: mol_type = other RNA
tccaggcagctcaaagatccc

SEQ ID NO: 1616 - RNA, 21 nt, synthetic construct
  source 1..21: mol_type = other RNA
ggatgacgattgtttatcaac

SEQ ID NO: 1617 - RNA, 21 nt, synthetic construct
  source 1..21: mol_type = other RNA
ctgcggttgaatccaatggct

SEQ ID NO: 1618 - RNA, 21 nt, synthetic construct
  source 1..21: mol_type = other RNA
tgacgattgtttatcaacgtc

SEQ ID NO: 1619 - RNA, 21 nt, synthetic construct
  source 1..21: mol_type = other RNA
atccaatggctatggagcctc

SEQ ID NO: 1620 - RNA, 21 nt, synthetic construct
  source 1..21: mol_type = other RNA
gccttataaatgcgagctgtg

SEQ ID NO: 1621 - RNA, 21 nt, synthetic construct
  source 1..21: mol_type = other RNA
cacttaagcaaacgggaattc

SEQ ID NO: 1622 - RNA, 21 nt, synthetic construct
  source 1..21: mol_type = other RNA
ggattaagaatctacttagaa

SEQ ID NO: 1623 - RNA, 21 nt, synthetic construct
  source 1..21: mol_type = other RNA
caatctcactgtccacaggag

SEQ ID NO: 1624 - RNA, 21 nt, synthetic construct
  source 1..21: mol_type = other RNA
aacccggctctcccgatgtga

SEQ ID NO: 1625 - RNA, 21 nt, synthetic construct
  source 1..21: mol_type = other RNA
acactcatggattaagaatct

SEQ ID NO: 1626 - RNA, 21 nt, synthetic construct
  source 1..21: mol_type = other RNA
catgacggctctcccacaatt

SEQ ID NO: 1627 - RNA, 21 nt, synthetic construct
  source 1..21: mol_type = other RNA
ggacgtttacaaatgtgaaat

SEQ ID NO: 1628 - RNA, 21 nt, synthetic construct
  source 1..21: mol_type = other RNA
atgacggctctcccacaattc

SEQ ID NO: 1629 - RNA, 21 nt, synthetic construct
  source 1..21: mol_type = other RNA
agcacaaacggaaacaatgca

SEQ ID NO: 1630 - RNA, 21 nt, synthetic construct
  source 1..21: mol_type = other RNA
ctgtgcaactatgcctgtgcc

SEQ ID NO: 1631 - RNA, 21 nt, synthetic construct
  source 1..21: mol_type = other RNA
tcgccgcaagcaaggcaaacc

SEQ ID NO: 1632 - RNA, 21 nt, synthetic construct
  source 1..21: mol_type = other RNA
tcttgcaacacgcacagaaca

SEQ ID NO: 1633 - RNA, 21 nt, synthetic construct
  source 1..21: mol_type = other RNA
acgtcatctagaggaatttgc

SEQ ID NO: 1634 - RNA, 21 nt, synthetic construct
  source 1..21: mol_type = other RNA
tctggagtctccttctttcta

SEQ ID NO: 1635 - RNA, 21 nt, synthetic construct
  source 1..21: mol_type = other RNA
taacccggctctcccgatgtg

SEQ ID NO: 1636 - RNA, 21 nt, synthetic construct
  source 1..21: mol_type = other RNA
agcacttaagcaaacgggaat

SEQ ID NO: 1637 - RNA, 21 nt, synthetic construct
  source 1..21: mol_type = other RNA
aaacggaaacaatgcaatggc

SEQ ID NO: 1638 - RNA, 21 nt, synthetic construct
  source 1..21: mol_type = other RNA
atggattaagaatctacttag

SEQ ID NO: 1639 - RNA, 21 nt, synthetic construct
  source 1..21: mol_type = other RNA
acgtccgcacttgaacttgca

SEQ ID NO: 1640 - RNA, 21 nt, synthetic construct
  source 1..21: mol_type = other RNA
cacatagcagataaacttctg

SEQ ID NO: 1641 - RNA, 21 nt, synthetic construct
  source 1..21: mol_type = other RNA
tgctcagctccatgcagcact

SEQ ID NO: 1642 - RNA, 21 nt, synthetic construct
  source 1..21: mol_type = other RNA
acatagcagataaacttctgc

SEQ ID NO: 1643 - RNA, 21 nt, synthetic construct
  source 1..21: mol_type = other RNA
aacacgcacagaacactcatg

SEQ ID NO: 1644 - RNA, 21 nt, synthetic construct
  source 1..21: mol_type = other RNA
gctgcggttgaatccaatggc

SEQ ID NO: 1645 - RNA, 21 nt, synthetic construct
  source 1..21: mol_type = other RNA
tccgcacttgaacttgcagct

SEQ ID NO: 1646 - RNA, 21 nt, synthetic construct
  source 1..21: mol_type = other RNA
gttgaatccaatggctatgga

SEQ ID NO: 1647 - RNA, 21 nt, synthetic construct
  source 1..21: mol_type = other RNA
aactgtagcaatctcactgtc

SEQ ID NO: 1648 - RNA, 21 nt, synthetic construct
  source 1..21: mol_type = other RNA
ccggctctcccgatgtgaacc

SEQ ID NO: 1649 - RNA, 21 nt, synthetic construct
  source 1..21: mol_type = other RNA
cttccctgcgccatctttgta

SEQ ID NO: 1650 - RNA, 21 nt, synthetic construct
  source 1..21: mol_type = other RNA
aatggcagcctctgcttagaa

SEQ ID NO: 1651 - RNA, 21 nt, synthetic construct
  source 1..21: mol_type = other RNA
caagacgttcaaatttcagag

SEQ ID NO: 1652 - RNA, 21 nt, synthetic construct
  source 1..21: mol_type = other RNA
cccgggcaggcccagctcaaa

SEQ ID NO: 1653 - RNA, 21 nt, synthetic construct
  source 1..21: mol_type = other RNA
cgagctgtgcaactatgcctg

SEQ ID NO: 1654 - RNA, 21 nt, synthetic construct
  source 1..21: mol_type = other RNA
gacagggtgctgcggttgaat

SEQ ID NO: 1655 - RNA, 21 nt, synthetic construct
  source 1..21: mol_type = other RNA
gaatccaatggctatggagcc

SEQ ID NO: 1656 - RNA, 21 nt, synthetic construct
  source 1..21: mol_type = other RNA
tgcaactatgcctgtgcccag

SEQ ID NO: 1657 - RNA, 21 nt, synthetic construct
  source 1..21: mol_type = other RNA
aggccttataaatgcgagctg

SEQ ID NO: 1658 - RNA, 21 nt, synthetic construct
  source 1..21: mol_type = other RNA
atcacccgagtgcctttgaca

SEQ ID NO: 1659 - RNA, 21 nt, synthetic construct
  source 1..21: mol_type = other RNA
cctggccacccatcacccgag

SEQ ID NO: 1660 - RNA, 21 nt, synthetic construct
  source 1..21: mol_type = other RNA
aattcatcttccctgcgccat

SEQ ID NO: 1661 - RNA, 21 nt, synthetic construct
  source 1..21: mol_type = other RNA
ccctgcgccatctttgtatta

SEQ ID NO: 1662 - RNA, 21 nt, synthetic construct
  source 1..21: mol_type = other RNA
ccacccatcacccgagtgcct

SEQ ID NO: 1663 - RNA, 21 nt, synthetic construct
  source 1..21: mol_type = other RNA
tggtttctcttgcaacacgca

SEQ ID NO: 1664 - RNA, 21 nt, synthetic construct
  source 1..21: mol_type = other RNA
ggcctccaggcagctcaaaga

SEQ ID NO: 1665 - RNA, 21 nt, synthetic construct
  source 1..21: mol_type = other RNA
cagccattcaccagtgcatgg

SEQ ID NO: 1666 - RNA, 21 nt, synthetic construct
  source 1..21: mol_type = other RNA
gtctcgccgcaagcaaggcaa

SEQ ID NO: 1667 - RNA, 21 nt, synthetic construct
  source 1..21: mol_type = other RNA
ctttgacagggtgctgcggtt

SEQ ID NO: 1668 - RNA, 21 nt, synthetic construct
  source 1..21: mol_type = other RNA
ttcatcttccctgcgccatct

SEQ ID NO: 1669 - RNA, 21 nt, synthetic construct
  source 1..21: mol_type = other RNA
aaagatgagcccagcagctac

SEQ ID NO: 1670 - RNA, 21 nt, synthetic construct
  source 1..21: mol_type = other RNA
gagtgcctttgacagggtgct

SEQ ID NO: 1671 - RNA, 21 nt, synthetic construct
  source 1..21: mol_type = other RNA
agagggcagacgcagcgacac

SEQ ID NO: 1672 - RNA, 21 nt, synthetic construct
  source 1..21: mol_type = other RNA
atcttccctgcgccatctttg

SEQ ID NO: 1673 - RNA, 21 nt, synthetic construct
  source 1..21: mol_type = other RNA
attcttacagatgatgaacca

SEQ ID NO: 1674 - RNA, 21 nt, synthetic construct
  source 1..21: mol_type = other RNA
gtcaagtccaagtcatgcgag

SEQ ID NO: 1675 - RNA, 21 nt, synthetic construct
  source 1..21: mol_type = other RNA
tcacccgagtgcctttgacag

SEQ ID NO: 1676 - RNA, 21 nt, synthetic construct
  source 1..21: mol_type = other RNA
cgtcatctagaggaatttgcc

SEQ ID NO: 1677 - RNA, 21 nt, synthetic construct
  source 1..21: mol_type = other RNA
gtgcaactatgcctgtgccca

SEQ ID NO: 1678 - RNA, 21 nt, synthetic construct
  source 1..21: mol_type = other RNA
ggctctcccacaattcatctt

SEQ ID NO: 1679 - RNA, 21 nt, synthetic construct
  source 1..21: mol_type = other RNA
taagcaaacgggaattctcgc

SEQ ID NO: 1680 - RNA, 21 nt, synthetic construct
  source 1..21: mol_type = other RNA
ggccctggccacccatcaccc

SEQ ID NO: 1681 - RNA, 21 nt, synthetic construct
  source 1..21: mol_type = other RNA
agaagccacacgggcgaaagg

SEQ ID NO: 1682 - RNA, 21 nt, synthetic construct
  source 1..21: mol_type = other RNA
cccggctctcccgatgtgaac

SEQ ID NO: 1683 - RNA, 21 nt, synthetic construct
  source 1..21: mol_type = other RNA
ggagaagccacacgggcgaaa

SEQ ID NO: 1684 - RNA, 21 nt, synthetic construct
  source 1..21: mol_type = other RNA
tgcaatggcagcctctgctta

SEQ ID NO: 1685 - RNA, 21 nt, synthetic construct
  source 1..21: mol_type = other RNA
gcactcctcggagaacgggag

SEQ ID NO: 1686 - RNA, 21 nt, synthetic construct
  source 1..21: mol_type = other RNA
ttgtttatcaacgtcatctag

SEQ ID NO: 1687 - RNA, 21 nt, synthetic construct
  source 1..21: mol_type = other RNA
cagggtgctgcggttgaatcc

SEQ ID NO: 1688 - RNA, 21 nt, synthetic construct
  source 1..21: mol_type = other RNA
tatcgagcacaaacggaaaca

SEQ ID NO: 1689 - RNA, 21 nt, synthetic construct
  source 1..21: mol_type = other RNA
ctccctcctctgcaatccgcc

SEQ ID NO: 1690 - RNA, 21 nt, synthetic construct
  source 1..21: mol_type = other RNA
gtatcccttcaggactaggtg

SEQ ID NO: 1691 - RNA, 21 nt, synthetic construct
  source 1..21: mol_type = other RNA
tccttctttctaacccggctc

SEQ ID NO: 1692 - RNA, 21 nt, synthetic construct
  source 1..21: mol_type = other RNA
ccatgacggctctcccacaat

SEQ ID NO: 1693 - RNA, 21 nt, synthetic construct
  source 1..21: mol_type = other RNA
tttgacagggtgctgcggttg

SEQ ID NO: 1694 - RNA, 21 nt, synthetic construct
  source 1..21: mol_type = other RNA
gcgggttggtatcccttcagg

SEQ ID NO: 1695 - RNA, 21 nt, synthetic construct
  source 1..21: mol_type = other RNA
tgtgcaactatgcctgtgccc

SEQ ID NO: 1696 - RNA, 21 nt, synthetic construct
  source 1..21: mol_type = other RNA
gtgctgcggttgaatccaatg

SEQ ID NO: 1697 - RNA, 21 nt, synthetic construct
  source 1..21: mol_type = other RNA
cagcacttaagcaaacgggaa

SEQ ID NO: 1698 - RNA, 21 nt, synthetic construct
  source 1..21: mol_type = other RNA
ttgaatccaatggctatggag

SEQ ID NO: 1699 - RNA, 21 nt, synthetic construct
  source 1..21: mol_type = other RNA
ctggcagaagggcgctttcca

SEQ ID NO: 1700 - RNA, 21 nt, synthetic construct
  source 1..21: mol_type = other RNA
ggatgagtgcagaatatgccc

SEQ ID NO: 1701 - RNA, 21 nt, synthetic construct
  source 1..21: mol_type = other RNA
tctccttctttctaacccggc

SEQ ID NO: 1702 - RNA, 21 nt, synthetic construct
  source 1..21: mol_type = other RNA
tgctgcggttgaatccaatgg

SEQ ID NO: 1703 - RNA, 21 nt, synthetic construct
  source 1..21: mol_type = other RNA
ggagtctccttctttctaacc

SEQ ID NO: 1704 - RNA, 21 nt, synthetic construct
  source 1..21: mol_type = other RNA
gccctggccacccatcacccg

SEQ ID NO: 1705 - RNA, 21 nt, synthetic construct
  source 1..21: mol_type = other RNA
cggctctcccacaattcatct

SEQ ID NO: 1706 - RNA, 21 nt, synthetic construct
  source 1..21: mol_type = other RNA
gagaagccacacgggcgaaag

SEQ ID NO: 1707 - RNA, 21 nt, synthetic construct
  source 1..21: mol_type = other RNA
tggccctggccacccatcacc

SEQ ID NO: 1708 - RNA, 21 nt, synthetic construct
  source 1..21: mol_type = other RNA
ataaacttctgcactggaggg

SEQ ID NO: 1709 - RNA, 21 nt, synthetic construct
  source 1..21: mol_type = other RNA
ctaacccggctctcccgatgt

SEQ ID NO: 1710 - RNA, 21 nt, synthetic construct
  source 1..21: mol_type = other RNA
atttctctaggagacttagag

SEQ ID NO: 1711 - RNA, 21 nt, synthetic construct
  source 1..21: mol_type = other RNA
ttctttctaacccggctctcc

SEQ ID NO: 1712 - RNA, 21 nt, synthetic construct
  source 1..21: mol_type = other RNA
ttgacagggtgctgcggttga

SEQ ID NO: 1713 - RNA, 21 nt, synthetic construct
  source 1..21: mol_type = other RNA
agcactcctcggagaacggga

SEQ ID NO: 1714 - RNA, 21 nt, synthetic construct
  source 1..21: mol_type = other RNA
ccctggccacccatcacccga

SEQ ID NO: 1715 - RNA, 21 nt, synthetic construct
  source 1..21: mol_type = other RNA
agcaaacgggaattctcgccc

SEQ ID NO: 1716 - RNA, 21 nt, synthetic construct
  source 1..21: mol_type = other RNA
gctggcagggaacacgtctag

SEQ ID NO: 1717 - RNA, 21 nt, synthetic construct
  source 1..21: mol_type = other RNA
ccctatgcaaaggttactgca

SEQ ID NO: 1718 - RNA, 21 nt, synthetic construct
  source 1..21: mol_type = other RNA
tcatcttccctgcgccatctt

SEQ ID NO: 1719 - RNA, 21 nt, synthetic construct
  source 1..21: mol_type = other RNA
cttctttctaacccggctctc

SEQ ID NO: 1720 - RNA, 21 nt, synthetic construct
  source 1..21: mol_type = other RNA
ccaccaccgagacatcacttg

SEQ ID NO: 1721 - RNA, 21 nt, synthetic construct
  source 1..21: mol_type = other RNA
aaccattccagccaggtagca

SEQ ID NO: 1722 - RNA, 21 nt, synthetic construct
  source 1..21: mol_type = other RNA
tcttccctgcgccatctttgt

SEQ ID NO: 1723 - RNA, 21 nt, synthetic construct
  source 1..21: mol_type = other RNA
ctggccacccatcacccgagt

SEQ ID NO: 1724 - RNA, 21 nt, synthetic construct
  source 1..21: mol_type = other RNA
gagggcagacgcagcgacact

SEQ ID NO: 1725 - RNA, 21 nt, synthetic construct
  source 1..21: mol_type = other RNA
cacaattcatcttccctgcgc

SEQ ID NO: 1726 - RNA, 21 nt, synthetic construct
  source 1..21: mol_type = other RNA
ccatcacccgagtgcctttga

SEQ ID NO: 1727 - RNA, 21 nt, synthetic construct
  source 1..21: mol_type = other RNA
acacgcacagaacactcatgg

SEQ ID NO: 1728 - RNA, 21 nt, synthetic construct
  source 1..21: mol_type = other RNA
gaagccacacgggcgaaaggc

SEQ ID NO: 1729 - RNA, 21 nt, synthetic construct
  source 1..21: mol_type = other RNA
catcacccgagtgcctttgac

SEQ ID NO: 1730 - RNA, 21 nt, synthetic construct
  source 1..21: mol_type = other RNA
tcaagttcgcagggacgtcac

SEQ ID NO: 1731 - RNA, 21 nt, synthetic construct
  source 1..21: mol_type = other RNA
tctaacccggctctcccgatg

SEQ ID NO: 1732 - RNA, 21 nt, synthetic construct
  source 1..21: mol_type = other RNA
gggaagtggagggagcacgcc

SEQ ID NO: 1733 - RNA, 21 nt, synthetic construct
  source 1..21: mol_type = other RNA
ctcgccgcaagcaaggcaaac

SEQ ID NO: 1734 - RNA, 21 nt, synthetic construct
  source 1..21: mol_type = other RNA
gagctggcagggaacacgtct

SEQ ID NO: 1735 - RNA, 21 nt, synthetic construct
  source 1..21: mol_type = other RNA
accagtgcatggtttctcttg

SEQ ID NO: 1736 - RNA, 21 nt, synthetic construct
  source 1..21: mol_type = other RNA
gcatcaagctcgagaaggagt

SEQ ID NO: 1737 - RNA, 21 nt, synthetic construct
  source 1..21: mol_type = other RNA
cttccttagcttcggagactc

SEQ ID NO: 1738 - RNA, 21 nt, synthetic construct
  source 1..21: mol_type = other RNA
gaggatgacgattgtttatca

SEQ ID NO: 1739 - RNA, 21 nt, synthetic construct
  source 1..21: mol_type = other RNA
catccagactcctgacgttca

SEQ ID NO: 1740 - RNA, 21 nt, synthetic construct
  source 1..21: mol_type = other RNA
cagggacacttgcgacgaaga

SEQ ID NO: 1741 - RNA, 21 nt, synthetic construct
  source 1..21: mol_type = other RNA
accaaaggtcattacaacctg

SEQ ID NO: 1742 - RNA, 21 nt, synthetic construct
  source 1..21: mol_type = other RNA
cgttcaaatttcagagcaacc

SEQ ID NO: 1743 - RNA, 21 nt, synthetic construct
  source 1..21: mol_type = other RNA
cagccctatgcaaaggttact

SEQ ID NO: 1744 - RNA, 21 nt, synthetic construct
  source 1..21: mol_type = other RNA
cacagggacacttgcgacgaa

SEQ ID NO: 1745 - RNA, 21 nt, synthetic construct
  source 1..21: mol_type = other RNA
gcatccaatcccgtggaggtt

SEQ ID NO: 1746 - RNA, 21 nt, synthetic construct
  source 1..21: mol_type = other RNA
gcccaacacggagaacgtgta

SEQ ID NO: 1747 - RNA, 21 nt, synthetic construct
  source 1..21: mol_type = other RNA
ccagccacctctccatgggat

SEQ ID NO: 1748 - RNA, 21 nt, synthetic construct
  source 1..21: mol_type = other RNA
ccacctctccatgggattcat

SEQ ID NO: 1749 - RNA, 21 nt, synthetic construct
  source 1..21: mol_type = other RNA
cggcccagccctatgcaaagg

SEQ ID NO: 1750 - RNA, 21 nt, synthetic construct
  source 1..21: mol_type = other RNA
ggcacagtgatcgagtgttga

SEQ ID NO: 1751 - RNA, 21 nt, synthetic construct
  source 1..21: mol_type = other RNA
cctgggcgagaagcataagcg

SEQ ID NO: 1752 - RNA, 21 nt, synthetic construct
  source 1..21: mol_type = other RNA
tcctgacgttcaagttcgcag

SEQ ID NO: 1753 - RNA, 21 nt, synthetic construct
  source 1..21: mol_type = other RNA
gatcgagtgttgaataatgat

SEQ ID NO: 1754 - RNA, 21 nt, synthetic construct
  source 1..21: mol_type = other RNA
acgccagaggatgacgattgt

SEQ ID NO: 1755 - RNA, 21 nt, synthetic construct
  source 1..21: mol_type = other RNA
ggttggcatccaggtcacgcc

SEQ ID NO: 1756 - RNA, 21 nt, synthetic construct
  source 1..21: mol_type = other RNA
gtggccaagttcaagagcgag

SEQ ID NO: 1757 - RNA, 21 nt, synthetic construct
  source 1..21: mol_type = other RNA
tacaagtgcaacctgtgcgac

SEQ ID NO: 1758 - RNA, 21 nt, synthetic construct
  source 1..21: mol_type = other RNA
agatcccttccttagcttcgg

SEQ ID NO: 1759 - RNA, 21 nt, synthetic construct
  source 1..21: mol_type = other RNA
tccagactcctgacgttcaag

SEQ ID NO: 1760 - RNA, 21 nt, synthetic construct
  source 1..21: mol_type = other RNA
gagctggacggagggatctcg

SEQ ID NO: 1761 - RNA, 21 nt, synthetic construct
  source 1..21: mol_type = other RNA
acagggacacttgcgacgaag

SEQ ID NO: 1762 - RNA, 21 nt, synthetic construct
  source 1..21: mol_type = other RNA
ccttccttagcttcggagact

SEQ ID NO: 1763 - RNA, 21 nt, synthetic construct
  source 1..21: mol_type = other RNA
aggtcctgggcgagaagcata

SEQ ID NO: 1764 - RNA, 21 nt, synthetic construct
  source 1..21: mol_type = other RNA
atttcagagcaacctggtggt

SEQ ID NO: 1765 - RNA, 21 nt, synthetic construct
  source 1..21: mol_type = other RNA
agaggatgacgattgtttatc

SEQ ID NO: 1766 - RNA, 21 nt, synthetic construct
  source 1..21: mol_type = other RNA
tggtggccaagttcaagagcg

SEQ ID NO: 1767 - RNA, 21 nt, synthetic construct
  source 1..21: mol_type = other RNA
gccggcccagccctatgcaaa

SEQ ID NO: 1768 - RNA, 21 nt, synthetic construct
  source 1..21: mol_type = other RNA
agccacctctccatgggattc

SEQ ID NO: 1769 - RNA, 21 nt, synthetic construct
  source 1..21: mol_type = other RNA
tctaagcgcatcaagctcgag

SEQ ID NO: 1770 - RNA, 21 nt, synthetic construct
  source 1..21: mol_type = other RNA
agggaacacgtctagcccacc

SEQ ID NO: 1771 - RNA, 21 nt, synthetic construct
  source 1..21: mol_type = other RNA
tgtgggcagtgccagatgaac

SEQ ID NO: 1772 - RNA, 21 nt, synthetic construct
  source 1..21: mol_type = other RNA
gccacctctccatgggattca

SEQ ID NO: 1773 - RNA, 21 nt, synthetic construct
  source 1..21: mol_type = other RNA
ccaacacggagaacgtgtact

SEQ ID NO: 1774 - RNA, 21 nt, synthetic construct
  source 1..21: mol_type = other RNA
aataccaggatcagtatcgag

SEQ ID NO: 1775 - RNA, 21 nt, synthetic construct
  source 1..21: mol_type = other RNA
cctcctcacctgtgggcagtg

SEQ ID NO: 1776 - RNA, 21 nt, synthetic construct
  source 1..21: mol_type = other RNA
cttctctaagcgcatcaagct

SEQ ID NO: 1777 - RNA, 21 nt, synthetic construct
  source 1..21: mol_type = other RNA
gcagtgccagatgaacttccc

SEQ ID NO: 1778 - RNA, 21 nt, synthetic construct
  source 1..21: mol_type = other RNA
gaagacgcacatgcacaaatc

SEQ ID NO: 1779 - RNA, 21 nt, synthetic construct
  source 1..21: mol_type = other RNA
tggcagggaacacgtctagcc

SEQ ID NO: 1780 - RNA, 21 nt, synthetic construct
  source 1..21: mol_type = other RNA
ctatggagcctcccgccatgg

SEQ ID NO: 1781 - RNA, 21 nt, synthetic construct
  source 1..21: mol_type = other RNA
cacgccagaggatgacgattg

SEQ ID NO: 1782 - RNA, 21 nt, synthetic construct
  source 1..21: mol_type = other RNA
ccagccctatgcaaaggttac

SEQ ID NO: 1783 - RNA, 21 nt, synthetic construct
  source 1..21: mol_type = other RNA
ccagaccacggcccgttggga

SEQ ID NO: 1784 - RNA, 21 nt, synthetic construct
  source 1..21: mol_type = other RNA
ctctaagcgcatcaagctcga

SEQ ID NO: 1785 - RNA, 21 nt, synthetic construct
  source 1..21: mol_type = other RNA
ggacacttgcgacgaagactc

SEQ ID NO: 1786 - RNA, 21 nt, synthetic construct
  source 1..21: mol_type = other RNA
gccacagggacacttgcgacg

SEQ ID NO: 1787 - RNA, 21 nt, synthetic construct
  source 1..21: mol_type = other RNA
tcccgtggaggttggcatcca

SEQ ID NO: 1788 - RNA, 21 nt, synthetic construct
  source 1..21: mol_type = other RNA
ctgggcgagaagcataagcgc

SEQ ID NO: 1789 - RNA, 21 nt, synthetic construct
  source 1..21: mol_type = other RNA
caacacggagaacgtgtactc

SEQ ID NO: 1790 - RNA, 21 nt, synthetic construct
  source 1..21: mol_type = other RNA
accacggcccgttgggagctc

SEQ ID NO: 1791 - RNA, 21 nt, synthetic construct
  source 1..21: mol_type = other RNA
tccaggtcacgccagaggatg

SEQ ID NO: 1792 - RNA, 21 nt, synthetic construct
  source 1..21: mol_type = other RNA
tagatgaccaaaggtcattac

SEQ ID NO: 1793 - RNA, 21 nt, synthetic construct
  source 1..21: mol_type = other RNA
gaagcataagcgcggccacct

SEQ ID NO: 1794 - RNA, 21 nt, synthetic construct
  source 1..21: mol_type = other RNA
aagtgcaacctgtgcgaccac

SEQ ID NO: 1795 - RNA, 21 nt, synthetic construct
  source 1..21: mol_type = other RNA
agtgcaacctgtgcgaccacg

SEQ ID NO: 1796 - RNA, 21 nt, synthetic construct
  source 1..21: mol_type = other RNA
cctgcccgacgtcatgcaggg

SEQ ID NO: 1797 - RNA, 21 nt, synthetic construct
  source 1..21: mol_type = other RNA
ctcctgacgttcaagttcgca

SEQ ID NO: 1798 - RNA, 21 nt, synthetic construct
  source 1..21: mol_type = other RNA
gtgcaacctgtgcgaccacgc

SEQ ID NO: 1799 - RNA, 21 nt, synthetic construct
  source 1..21: mol_type = other RNA
ggtcctgggcgagaagcataa

SEQ ID NO: 1800 - RNA, 21 nt, synthetic construct
  source 1..21: mol_type = other RNA
ggccacagggacacttgcgac

SEQ ID NO: 1801 - RNA, 21 nt, synthetic construct
  source 1..21: mol_type = other RNA
agaataccaggatcagtatcg

SEQ ID NO: 1802 - RNA, 21 nt, synthetic construct
  source 1..21: mol_type = other RNA
gaaccagaccacggcccgttg

SEQ ID NO: 1803 - RNA, 21 nt, synthetic construct
  source 1..21: mol_type = other RNA
ggagcctcccgccatggattt

SEQ ID NO: 1804 - RNA, 21 nt, synthetic construct
  source 1..21: mol_type = other RNA
tgaaccagaccacggcccgtt

SEQ ID NO: 1805 - RNA, 21 nt, synthetic construct
  source 1..21: mol_type = other RNA
agccaggtagcaagccgccct

SEQ ID NO: 1806 - RNA, 21 nt, synthetic construct
  source 1..21: mol_type = other RNA
agactcctgacgttcaagttc

SEQ ID NO: 1807 - RNA, 21 nt, synthetic construct
  source 1..21: mol_type = other RNA
tcacgccagaggatgacgatt

SEQ ID NO: 1808 - RNA, 21 nt, synthetic construct
  source 1..21: mol_type = other RNA
gtcacgccagaggatgacgat

SEQ ID NO: 1809 - RNA, 21 nt, synthetic construct
  source 1..21: mol_type = other RNA
tccaatcccgtggaggttggc

SEQ ID NO: 1810 - RNA, 21 nt, synthetic construct
  source 1..21: mol_type = other RNA
cagaccacggcccgttgggag

SEQ ID NO: 1811 - RNA, 21 nt, synthetic construct
  source 1..21: mol_type = other RNA
gccaagttcaagagcgagaac

SEQ ID NO: 1812 - RNA, 21 nt, synthetic construct
  source 1..21: mol_type = other RNA
agatgaccaaaggtcattaca

SEQ ID NO: 1813 - RNA, 21 nt, synthetic construct
  source 1..21: mol_type = other RNA
tcccttccttagcttcggaga

SEQ ID NO: 1814 - RNA, 21 nt, synthetic construct
  source 1..21: mol_type = other RNA
acacgtctagcccaccgctgt

SEQ ID NO: 1815 - RNA, 21 nt, synthetic construct
  source 1..21: mol_type = other RNA
gtggtggccaagttcaagagc

SEQ ID NO: 1816 - RNA, 21 nt, synthetic construct
  source 1..21: mol_type = other RNA
cccttccttagcttcggagac

SEQ ID NO: 1817 - RNA, 21 nt, synthetic construct
  source 1..21: mol_type = other RNA
tgcccaacacggagaacgtgt

SEQ ID NO: 1818 - RNA, 21 nt, synthetic construct
  source 1..21: mol_type = other RNA
gtatcgagagaggcttccggc

SEQ ID NO: 1819 - RNA, 21 nt, synthetic construct
  source 1..21: mol_type = other RNA
cgtctagcccaccgctgtccc

SEQ ID NO: 1820 - RNA, 21 nt, synthetic construct
  source 1..21: mol_type = other RNA
aggttggcatccaggtcacgc

SEQ ID NO: 1821 - RNA, 21 nt, synthetic construct
  source 1..21: mol_type = other RNA
tatggagcctcccgccatgga

SEQ ID NO: 1822 - RNA, 21 nt, synthetic construct
  source 1..21: mol_type = other RNA
aatcccgtggaggttggcatc

SEQ ID NO: 1823 - RNA, 21 nt, synthetic construct
  source 1..21: mol_type = other RNA
ttggcatccaggtcacgccag

SEQ ID NO: 1824 - RNA, 21 nt, synthetic construct
  source 1..21: mol_type = other RNA
cttagcttcggagactccaga

SEQ ID NO: 1825 - RNA, 21 nt, synthetic construct
  source 1..21: mol_type = other RNA
cacgtctagcccaccgctgtc

SEQ ID NO: 1826 - RNA, 21 nt, synthetic construct
  source 1..21: mol_type = other RNA
aaccagaccacggcccgttgg

SEQ ID NO: 1827 - RNA, 21 nt, synthetic construct
  source 1..21: mol_type = other RNA
aacacgtctagcccaccgctg

SEQ ID NO: 1828 - RNA, 21 nt, synthetic construct
  source 1..21: mol_type = other RNA
gtccatccagactcctgacgt

SEQ ID NO: 1829 - RNA, 21 nt, synthetic construct
  source 1..21: mol_type = other RNA
agctggacggagggatctcgg

SEQ ID NO: 1830 - RNA, 21 nt, synthetic construct
  source 1..21: mol_type = other RNA
ctaagcgcatcaagctcgaga

SEQ ID NO: 1831 - RNA, 21 nt, synthetic construct
  source 1..21: mol_type = other RNA
gttggcatccaggtcacgcca

SEQ ID NO: 1832 - RNA, 21 nt, synthetic construct
  source 1..21: mol_type = other RNA
ccaggtagcaagccgcccttc

SEQ ID NO: 1833 - RNA, 21 nt, synthetic construct
  source 1..21: mol_type = other RNA
ccagccaggtagcaagccgcc

SEQ ID NO: 1834 - RNA, 21 nt, synthetic construct
  source 1..21: mol_type = other RNA
agggacacttgcgacgaagac

SEQ ID NO: 1835 - RNA, 21 nt, synthetic construct
  source 1..21: mol_type = other RNA
acaagtgcaacctgtgcgacc

SEQ ID NO: 1836 - RNA, 21 nt, synthetic construct
  source 1..21: mol_type = other RNA
gctggacggagggatctcggg

SEQ ID NO: 1837 - RNA, 21 nt, synthetic construct
  source 1..21: mol_type = other RNA
caaatttcagagcaacctggt

SEQ ID NO: 1838 - RNA, 21 nt, synthetic construct
  source 1..21: mol_type = other RNA
ctgtccatccagactcctgac

SEQ ID NO: 1839 - RNA, 21 nt, synthetic construct
  source 1..21: mol_type = other RNA
atcccgtggaggttggcatcc

SEQ ID NO: 1840 - RNA, 21 nt, synthetic construct
  source 1..21: mol_type = other RNA
tcctgggcgagaagcataagc

SEQ ID NO: 1841 - RNA, 21 nt, synthetic construct
  source 1..21: mol_type = other RNA
tatcgagagaggcttccggcc

SEQ ID NO: 1842 - RNA, 21 nt, synthetic construct
  source 1..21: mol_type = other RNA
ccgacgtcatgcagggcatgg

SEQ ID NO: 1843 - RNA, 21 nt, synthetic construct
  source 1..21: mol_type = other RNA
tgtccatccagactcctgacg

SEQ ID NO: 1844 - RNA, 21 nt, synthetic construct
  source 1..21: mol_type = other RNA
agggccacagggacacttgcg

SEQ ID NO: 1845 - RNA, 21 nt, synthetic construct
  source 1..21: mol_type = other RNA
accagaccacggcccgttggg

SEQ ID NO: 1846 - RNA, 21 nt, synthetic construct
  source 1..21: mol_type = other RNA
gcataagcgcggccacctggc

SEQ ID NO: 1847 - RNA, 21 nt, synthetic construct
  source 1..21: mol_type = other RNA
atggctatggagcctcccgcc

SEQ ID NO: 1848 - RNA, 21 nt, synthetic construct
  source 1..21: mol_type = other RNA
caggaacacatagcagataaa

SEQ ID NO: 1849 - RNA, 21 nt, synthetic construct
  source 1..21: mol_type = other RNA
aggaacacatagcagataaac

SEQ ID NO: 1850 - RNA, 21 nt, synthetic construct
  source 1..21: mol_type = other RNA
ggaacacatagcagataaact

SEQ ID NO: 1851 - RNA, 21 nt, synthetic construct
  source 1..21: mol_type = other RNA
gaacacatagcagataaactt

SEQ ID NO: 1852 - RNA, 21 nt, synthetic construct
  source 1..21: mol_type = other RNA
aacacatagcagataaacttc

SEQ ID NO: 1853 - RNA, 21 nt, synthetic construct
  source 1..21: mol_type = other RNA
cccagcagctacacatgtaca

SEQ ID NO: 1854 - RNA, 21 nt, synthetic construct
  source 1..21: mol_type = other RNA
cagcagctacacatgtacaac

SEQ ID NO: 1855 - RNA, 21 nt, synthetic construct
  source 1..21: mol_type = other RNA
gcagctacacatgtacaactt

SEQ ID NO: 1856 - RNA, 21 nt, synthetic construct
  source 1..21: mol_type = other RNA
agctacacatgtacaacttgc

SEQ ID NO: 1857 - RNA, 21 nt, synthetic construct
  source 1..21: mol_type = other RNA
ctacacatgtacaacttgcaa

SEQ ID NO: 1858 - RNA, 21 nt, synthetic construct
  source 1..21: mol_type = other RNA
tacacatgtacaacttgcaaa

SEQ ID NO: 1859 - RNA, 21 nt, synthetic construct
  source 1..21: mol_type = other RNA
acatgtacaacttgcaaacat

SEQ ID NO: 1860 - RNA, 21 nt, synthetic construct
  source 1..21: mol_type = other RNA
catgtacaacttgcaaacagc

SEQ ID NO: 1861 - RNA, 21 nt, synthetic construct
  source 1..21: mol_type = other RNA
atgtacaacttgcaaacagcc

SEQ ID NO: 1862 - RNA, 21 nt, synthetic construct
  source 1..21: mol_type = other RNA
tgtacaacttgcaaacagcca

SEQ ID NO: 1863 - RNA, 21 nt, synthetic construct
  source 1..21: mol_type = other RNA
gtacaacttgcaaacagccat

SEQ ID NO: 1864 - RNA, 21 nt, synthetic construct
  source 1..21: mol_type = other RNA
tacaacttgcaaacagccatt

SEQ ID NO: 1865 - RNA, 21 nt, synthetic construct
  source 1..21: mol_type = other RNA
acaacttgcaaacagccattc

SEQ ID NO: 1866 - RNA, 21 nt, synthetic construct
  source 1..21: mol_type = other RNA
caacttgcaaacagccattca

SEQ ID NO: 1867 - RNA, 21 nt, synthetic construct
  source 1..21: mol_type = other RNA
aacttgcaaacagccattcac

SEQ ID NO: 1868 - RNA, 21 nt, synthetic construct
  source 1..21: mol_type = other RNA
acttgcaaacagccattcacc

SEQ ID NO: 1869 - RNA, 21 nt, synthetic construct
  source 1..21: mol_type = other RNA
cttgcaaacagccattcacca

SEQ ID NO: 1870 - RNA, 21 nt, synthetic construct
  source 1..21: mol_type = other RNA
ttgcaaacagccattcaccat

SEQ ID NO: 1871 - RNA, 21 nt, synthetic construct
  source 1..21: mol_type = other RNA
tgcaaacagccattcaccagt

SEQ ID NO: 1872 - RNA, 21 nt, synthetic construct
  source 1..21: mol_type = other RNA
gcaaacagccattcaccagtg

SEQ ID NO: 1873 - RNA, 21 nt, synthetic construct
  source 1..21: mol_type = other RNA
caaacagccattcaccagtgc

SEQ ID NO: 1874 - RNA, 21 nt, synthetic construct
  source 1..21: mol_type = other RNA
aaacagccattcaccagtgca

SEQ ID NO: 1875 - RNA, 21 nt, synthetic construct
  source 1..21: mol_type = other RNA
aacagccattcaccagtgcat

SEQ ID NO: 1876 - RNA, 21 nt, synthetic construct
  source 1..21: mol_type = other RNA
acagccattcaccagtgcatt

SEQ ID NO: 1877 - RNA, 21 nt, synthetic construct
  source 1..21: mol_type = other RNA
cagccattcaccagtgcatgt

SEQ ID NO: 1878 - RNA, 21 nt, synthetic construct
  source 1..21: mol_type = other RNA
agccattcaccagtgcatggt

SEQ ID NO: 1879 - RNA, 21 nt, synthetic construct
  source 1..21: mol_type = other RNA
gccattcaccagtgcatggtt

SEQ ID NO: 1880 - RNA, 21 nt, synthetic construct
  source 1..21: mol_type = other RNA
ccattcaccagtgcatggttt

SEQ ID NO: 1881 - RNA, 21 nt, synthetic construct
  source 1..21: mol_type = other RNA
cattcaccagtgcatggtttc

SEQ ID NO: 1882 - RNA, 21 nt, synthetic construct
  source 1..21: mol_type = other RNA
attcaccagtgcatggtttct

SEQ ID NO: 1883 - RNA, 21 nt, synthetic construct
  source 1..21: mol_type = other RNA
ttcaccagtgcatggtttctc

SEQ ID NO: 1884 - RNA, 21 nt, synthetic construct
  source 1..21: mol_type = other RNA
tcaccagtgcatggtttctct

SEQ ID NO: 1885 - RNA, 21 nt, synthetic construct
  source 1..21: mol_type = other RNA
caccagtgcatggtttctctt

SEQ ID NO: 1886 - RNA, 21 nt, synthetic construct
  source 1..21: mol_type = other RNA
accagtgcatggtttctcttt

SEQ ID NO: 1887 - RNA, 21 nt, synthetic construct
  source 1..21: mol_type = other RNA
ggtttctcttgcaacacgcac

SEQ ID NO: 1888 - RNA, 21 nt, synthetic construct
  source 1..21: mol_type = other RNA
gtttctcttgcaacacgcaca

SEQ ID NO: 1889 - RNA, 21 nt, synthetic construct
  source 1..21: mol_type = other RNA
ttctcttgcaacacgcacaga

SEQ ID NO: 1890 - RNA, 21 nt, synthetic construct
  source 1..21: mol_type = other RNA
tctcttgcaacacgcacagaa

SEQ ID NO: 1891 - RNA, 21 nt, synthetic construct
  source 1..21: mol_type = other RNA
cttgcaacacgcacagaacac

SEQ ID NO: 1892 - RNA, 21 nt, synthetic construct
  source 1..21: mol_type = other RNA
ttgcaacacgcacagaacact

SEQ ID NO: 1893 - RNA, 21 nt, synthetic construct
  source 1..21: mol_type = other RNA
gcaacacgcacagaacactca

SEQ ID NO: 1894 - RNA, 21 nt, synthetic construct
  source 1..21: mol_type = other RNA
caacacgcacagaacactcat

SEQ ID NO: 1895 - RNA, 21 nt, synthetic construct
  source 1..21: mol_type = other RNA
acacgcacagaacactcatgt

SEQ ID NO: 1896 - RNA, 21 nt, synthetic construct
  source 1..21: mol_type = other RNA
cacgcacagaacactcatgga

SEQ ID NO: 1897 - RNA, 21 nt, synthetic construct
  source 1..21: mol_type = other RNA
acgcacagaacactcatggat

SEQ ID NO: 1898 - RNA, 21 nt, synthetic construct
  source 1..21: mol_type = other RNA
cgcacagaacactcatggatt

SEQ ID NO: 1899 - RNA, 21 nt, synthetic construct
  source 1..21: mol_type = other RNA
gcacagaacactcatggatta

SEQ ID NO: 1900 - RNA, 21 nt, synthetic construct
  source 1..21: mol_type = other RNA
cacagaacactcatggattaa

SEQ ID NO: 1901 - RNA, 21 nt, synthetic construct
  source 1..21: mol_type = other RNA
acagaacactcatggattaat

SEQ ID NO: 1902 - RNA, 21 nt, synthetic construct
  source 1..21: mol_type = other RNA
cagaacactcatggattaaga

SEQ ID NO: 1903 - RNA, 21 nt, synthetic construct
  source 1..21: mol_type = other RNA
agaacactcatggattaagaa

SEQ ID NO: 1904 - RNA, 21 nt, synthetic construct
  source 1..21: mol_type = other RNA
gaacactcatggattaagaat

SEQ ID NO: 1905 - RNA, 21 nt, synthetic construct
  source 1..21: mol_type = other RNA
aacactcatggattaagaatc

SEQ ID NO: 1906 - RNA, 21 nt, synthetic construct
  source 1..21: mol_type = other RNA
ttaagaatctacttagaaagc

SEQ ID NO: 1907 - RNA, 21 nt, synthetic construct
  source 1..21: mol_type = other RNA
ggttggtatcccttcaggact

SEQ ID NO: 1908 - RNA, 21 nt, synthetic construct
  source 1..21: mol_type = other RNA
gttggtatcccttcaggacta

SEQ ID NO: 1909 - RNA, 21 nt, synthetic construct
  source 1..21: mol_type = other RNA
ttggtatcccttcaggactat

SEQ ID NO: 1910 - RNA, 21 nt, synthetic construct
  source 1..21: mol_type = other RNA
tggtatcccttcaggactagt

SEQ ID NO: 1911 - RNA, 21 nt, synthetic construct
  source 1..21: mol_type = other RNA
ggtatcccttcaggactaggt

SEQ ID NO: 1912 - RNA, 21 nt, synthetic construct
  source 1..21: mol_type = other RNA
atcccttcaggactaggtgca

SEQ ID NO: 1913 - RNA, 21 nt, synthetic construct
  source 1..21: mol_type = other RNA
ccttcaggactaggtgcagaa

SEQ ID NO: 1914 - RNA, 21 nt, synthetic construct
  source 1..21: mol_type = other RNA
ttcaggactaggtgcagaatt

SEQ ID NO: 1915 - RNA, 21 nt, synthetic construct
  source 1..21: mol_type = other RNA
tcaggactaggtgcagaatgt

SEQ ID NO: 1916 - RNA, 21 nt, synthetic construct
  source 1..21: mol_type = other RNA
caggactaggtgcagaatgtc

SEQ ID NO: 1917 - RNA, 21 nt, synthetic construct
  source 1..21: mol_type = other RNA
aggactaggtgcagaatgtcc

SEQ ID NO: 1918 - RNA, 21 nt, synthetic construct
  source 1..21: mol_type = other RNA
ggactaggtgcagaatgtcct

SEQ ID NO: 1919 - RNA, 21 nt, synthetic construct
  source 1..21: mol_type = other RNA
gactaggtgcagaatgtcctt

SEQ ID NO: 1920 - RNA, 21 nt, synthetic construct
  source 1..21: mol_type = other RNA
cacctctccatgggattcata

SEQ ID NO: 1921 - RNA, 21 nt, synthetic construct
  source 1..21: mol_type = other RNA
acctctccatgggattcatat

SEQ ID NO: 1922 - RNA, 21 nt, synthetic construct
  source 1..21: mol_type = other RNA
cctctccatgggattcatatt

SEQ ID NO: 1923 - RNA, 21 nt, synthetic construct
  source 1..21: mol_type = other RNA
ctctccatgggattcatattt

SEQ ID NO: 1924 - RNA, 21 nt, synthetic construct
  source 1..21: mol_type = other RNA
tctccatgggattcatattgc

SEQ ID NO: 1925 - RNA, 21 nt, synthetic construct
  source 1..21: mol_type = other RNA
ctccatgggattcatattgca

SEQ ID NO: 1926 - RNA, 21 nt, synthetic construct
  source 1..21: mol_type = other RNA
tccatgggattcatattgcat

SEQ ID NO: 1927 - RNA, 21 nt, synthetic construct
  source 1..21: mol_type = other RNA
ccatgggattcatattgcaga

SEQ ID NO: 1928 - RNA, 21 nt, synthetic construct
  source 1..21: mol_type = other RNA
catgggattcatattgcagac

SEQ ID NO: 1929 - RNA, 21 nt, synthetic construct
  source 1..21: mol_type = other RNA
atgggattcatattgcagaca

SEQ ID NO: 1930 - RNA, 21 nt, synthetic construct
  source 1..21: mol_type = other RNA
tgggattcatattgcagacaa

SEQ ID NO: 1931 - RNA, 21 nt, synthetic construct
  source 1..21: mol_type = other RNA
ggattcatattgcagacaata

SEQ ID NO: 1932 - RNA, 21 nt, synthetic construct
  source 1..21: mol_type = other RNA
gattcatattgcagacaataa

SEQ ID NO: 1933 - RNA, 21 nt, synthetic construct
  source 1..21: mol_type = other RNA
attcatattgcagacaataac

SEQ ID NO: 1934 - RNA, 21 nt, synthetic construct
  source 1..21: mol_type = other RNA
ttcatattgcagacaataacc

SEQ ID NO: 1935 - RNA, 21 nt, synthetic construct
  source 1..21: mol_type = other RNA
tcatattgcagacaataaccc

SEQ ID NO: 1936 - RNA, 21 nt, synthetic construct
  source 1..21: mol_type = other RNA
ctttaacctgctaagaatacc

SEQ ID NO: 1937 - RNA, 21 nt, synthetic construct
  source 1..21: mol_type = other RNA
tttaacctgctaagaatacca

SEQ ID NO: 1938 - RNA, 21 nt, synthetic construct
  source 1..21: mol_type = other RNA
ttaacctgctaagaataccat

SEQ ID NO: 1939 - RNA, 21 nt, synthetic construct
  source 1..21: mol_type = other RNA
taacctgctaagaataccagt

SEQ ID NO: 1940 - RNA, 21 nt, synthetic construct
  source 1..21: mol_type = other RNA
aacctgctaagaataccagga

SEQ ID NO: 1941 - RNA, 21 nt, synthetic construct
  source 1..21: mol_type = other RNA
acctgctaagaataccaggat

SEQ ID NO: 1942 - RNA, 21 nt, synthetic construct
  source 1..21: mol_type = other RNA
cctgctaagaataccaggatc

SEQ ID NO: 1943 - RNA, 21 nt, synthetic construct
  source 1..21: mol_type = other RNA
ctgctaagaataccaggatca

SEQ ID NO: 1944 - RNA, 21 nt, synthetic construct
  source 1..21: mol_type = other RNA
tgctaagaataccaggatcat

SEQ ID NO: 1945 - RNA, 21 nt, synthetic construct
  source 1..21: mol_type = other RNA
gctaagaataccaggatcagt

SEQ ID NO: 1946 - RNA, 21 nt, synthetic construct
  source 1..21: mol_type = other RNA
ctaagaataccaggatcagta

SEQ ID NO: 1947 - RNA, 21 nt, synthetic construct
  source 1..21: mol_type = other RNA
taagaataccaggatcagtat

SEQ ID NO: 1948 - RNA, 21 nt, synthetic construct
  source 1..21: mol_type = other RNA
aagaataccaggatcagtatc

SEQ ID NO: 1949 - RNA, 21 nt, synthetic construct
  source 1..21: mol_type = other RNA
agaataccaggatcagtatct

SEQ ID NO: 1950 - RNA, 21 nt, synthetic construct
  source 1..21: mol_type = other RNA
gaataccaggatcagtatcga

SEQ ID NO: 1951 - RNA, 21 nt, synthetic construct
  source 1..21: mol_type = other RNA
aataccaggatcagtatcgat

SEQ ID NO: 1952 - RNA, 21 nt, synthetic construct
  source 1..21: mol_type = other RNA
ataccaggatcagtatcgaga

SEQ ID NO: 1953 - RNA, 21 nt, synthetic construct
  source 1..21: mol_type = other RNA
taccaggatcagtatcgagat

SEQ ID NO: 1954 - RNA, 21 nt, synthetic construct
  source 1..21: mol_type = other RNA
accaggatcagtatcgagaga

SEQ ID NO: 1955 - RNA, 21 nt, synthetic construct
  source 1..21: mol_type = other RNA
ccaggatcagtatcgagagat

SEQ ID NO: 1956 - RNA, 21 nt, synthetic construct
  source 1..21: mol_type = other RNA
caggatcagtatcgagagagt

SEQ ID NO: 1957 - RNA, 21 nt, synthetic construct
  source 1..21: mol_type = other RNA
aggatcagtatcgagagaggc

SEQ ID NO: 1958 - RNA, 21 nt, synthetic construct
  source 1..21: mol_type = other RNA
cctggcagaagggcgctttcc

SEQ ID NO: 1959 - RNA, 21 nt, synthetic construct
  source 1..21: mol_type = other RNA
agaagggcgctttccacccac

SEQ ID NO: 1960 - RNA, 21 nt, synthetic construct
  source 1..21: mol_type = other RNA
gaagggcgctttccacccact

SEQ ID NO: 1961 - RNA, 21 nt, synthetic construct
  source 1..21: mol_type = other RNA
ctgtttagtccaccaccgaga

SEQ ID NO: 1962 - RNA, 21 nt, synthetic construct
  source 1..21: mol_type = other RNA
tgtttagtccaccaccgagac

SEQ ID NO: 1963 - RNA, 21 nt, synthetic construct
  source 1..21: mol_type = other RNA
gtttagtccaccaccgagaca

SEQ ID NO: 1964 - RNA, 21 nt, synthetic construct
  source 1..21: mol_type = other RNA
tttagtccaccaccgagacat

SEQ ID NO: 1965 - RNA, 21 nt, synthetic construct
  source 1..21: mol_type = other RNA
ttagtccaccaccgagacatc

SEQ ID NO: 1966 - RNA, 21 nt, synthetic construct
  source 1..21: mol_type = other RNA
tagtccaccaccgagacatca

SEQ ID NO: 1967 - RNA, 21 nt, synthetic construct
  source 1..21: mol_type = other RNA
agtccaccaccgagacatcac

SEQ ID NO: 1968 - RNA, 21 nt, synthetic construct
  source 1..21: mol_type = other RNA
gtccaccaccgagacatcact

SEQ ID NO: 1969 - RNA, 21 nt, synthetic construct
  source 1..21: mol_type = other RNA
ccaccaccgagacatcacttt

SEQ ID NO: 1970 - RNA, 21 nt, synthetic construct
  source 1..21: mol_type = other RNA
caccaccgagacatcacttgt

SEQ ID NO: 1971 - RNA, 21 nt, synthetic construct
  source 1..21: mol_type = other RNA
accaccgagacatcacttgga

SEQ ID NO: 1972 - RNA, 21 nt, synthetic construct
  source 1..21: mol_type = other RNA
ccaccgagacatcacttggac

SEQ ID NO: 1973 - RNA, 21 nt, synthetic construct
  source 1..21: mol_type = other RNA
tgctgcggttgaatccaatgt

SEQ ID NO: 1974 - RNA, 21 nt, synthetic construct
  source 1..21: mol_type = other RNA
agcctcccgccatggatttct

SEQ ID NO: 1975 - RNA, 21 nt, synthetic construct
  source 1..21: mol_type = other RNA
gcctcccgccatggatttctc

SEQ ID NO: 1976 - RNA, 21 nt, synthetic construct
  source 1..21: mol_type = other RNA
ctcccgccatggatttctcta

SEQ ID NO: 1977 - RNA, 21 nt, synthetic construct
  source 1..21: mol_type = other RNA
tcccgccatggatttctctat

SEQ ID NO: 1978 - RNA, 21 nt, synthetic construct
  source 1..21: mol_type = other RNA
cccgccatggatttctctagt

SEQ ID NO: 1979 - RNA, 21 nt, synthetic construct
  source 1..21: mol_type = other RNA
cgccatggatttctctaggat

SEQ ID NO: 1980 - RNA, 21 nt, synthetic construct
  source 1..21: mol_type = other RNA
taggagacttagagagctggc

SEQ ID NO: 1981 - RNA, 21 nt, synthetic construct
  source 1..21: mol_type = other RNA
aggagacttagagagctggca

SEQ ID NO: 1982 - RNA, 21 nt, synthetic construct
  source 1..21: mol_type = other RNA
ggaacacgtctagcccaccgc

SEQ ID NO: 1983 - RNA, 21 nt, synthetic construct
  source 1..21: mol_type = other RNA
cctatgcaaaggttactgcaa

SEQ ID NO: 1984 - RNA, 21 nt, synthetic construct
  source 1..21: mol_type = other RNA
ctatgcaaaggttactgcaac

SEQ ID NO: 1985 - RNA, 21 nt, synthetic construct
  source 1..21: mol_type = other RNA
tatgcaaaggttactgcaacc

SEQ ID NO: 1986 - RNA, 21 nt, synthetic construct
  source 1..21: mol_type = other RNA
tgcaaaggttactgcaaccat

SEQ ID NO: 1987 - RNA, 21 nt, synthetic construct
  source 1..21: mol_type = other RNA
gcaaaggttactgcaaccatt

SEQ ID NO: 1988 - RNA, 21 nt, synthetic construct
  source 1..21: mol_type = other RNA
caaaggttactgcaaccattc

SEQ ID NO: 1989 - RNA, 21 nt, synthetic construct
  source 1..21: mol_type = other RNA
aaaggttactgcaaccattcc

SEQ ID NO: 1990 - RNA, 21 nt, synthetic construct
  source 1..21: mol_type = other RNA
aaggttactgcaaccattcca

SEQ ID NO: 1991 - RNA, 21 nt, synthetic construct
  source 1..21: mol_type = other RNA
aggttactgcaaccattccat

SEQ ID NO: 1992 - RNA, 21 nt, synthetic construct
  source 1..21: mol_type = other RNA
ggttactgcaaccattccagc

SEQ ID NO: 1993 - RNA, 21 nt, synthetic construct
  source 1..21: mol_type = other RNA
tactgcaaccattccagccat

SEQ ID NO: 1994 - RNA, 21 nt, synthetic construct
  source 1..21: mol_type = other RNA
cggtcaagtccaagtcatgct

SEQ ID NO: 1995 - RNA, 21 nt, synthetic construct
  source 1..21: mol_type = other RNA
ggtcaagtccaagtcatgcga

SEQ ID NO: 1996 - RNA, 21 nt, synthetic construct
  source 1..21: mol_type = other RNA
gtcaagtccaagtcatgcgat

SEQ ID NO: 1997 - RNA, 21 nt, synthetic construct
  source 1..21: mol_type = other RNA
tcaagtccaagtcatgcgagt

SEQ ID NO: 1998 - RNA, 21 nt, synthetic construct
  source 1..21: mol_type = other RNA
caagtccaagtcatgcgagtt

SEQ ID NO: 1999 - RNA, 21 nt, synthetic construct
  source 1..21: mol_type = other RNA
aagtccaagtcatgcgagttc

SEQ ID NO: 2000 - RNA, 21 nt, synthetic construct
  source 1..21: mol_type = other RNA
agtccaagtcatgcgagttct

SEQ ID NO: 2001 - RNA, 21 nt, synthetic construct
  source 1..21: mol_type = other RNA
gtccaagtcatgcgagttctt

SEQ ID NO: 2002 - RNA, 21 nt, synthetic construct
  source 1..21: mol_type = other RNA
tccaagtcatgcgagttctgc

SEQ ID NO: 2003 - RNA, 21 nt, synthetic construct
  source 1..21: mol_type = other RNA
ccaagtcatgcgagttctgct

SEQ ID NO: 2004 - RNA, 21 nt, synthetic construct
  source 1..21: mol_type = other RNA
caagtcatgcgagttctgcgt

SEQ ID NO: 2005 - RNA, 21 nt, synthetic construct
  source 1..21: mol_type = other RNA
agtcatgcgagttctgcggca

SEQ ID NO: 2006 - RNA, 21 nt, synthetic construct
  source 1..21: mol_type = other RNA
gtcatgcgagttctgcggcaa

SEQ ID NO: 2007 - RNA, 21 nt, synthetic construct
  source 1..21: mol_type = other RNA
tcatgcgagttctgcggcaat

SEQ ID NO: 2008 - RNA, 21 nt, synthetic construct
  source 1..21: mol_type = other RNA
gcgagttctgcggcaagacgt

SEQ ID NO: 2009 - RNA, 21 nt, synthetic construct
  source 1..21: mol_type = other RNA
cgagttctgcggcaagacgtt

SEQ ID NO: 2010 - RNA, 21 nt, synthetic construct
  source 1..21: mol_type = other RNA
gagttctgcggcaagacgttc

SEQ ID NO: 2011 - RNA, 21 nt, synthetic construct
  source 1..21: mol_type = other RNA
agttctgcggcaagacgttca

SEQ ID NO: 2012 - RNA, 21 nt, synthetic construct
  source 1..21: mol_type = other RNA
gttctgcggcaagacgttcaa

SEQ ID NO: 2013 - RNA, 21 nt, synthetic construct
  source 1..21: mol_type = other RNA
ttctgcggcaagacgttcaaa

SEQ ID NO: 2014 - RNA, 21 nt, synthetic construct
  source 1..21: mol_type = other RNA
tctgcggcaagacgttcaaat

SEQ ID NO: 2015 - RNA, 21 nt, synthetic construct
  source 1..21: mol_type = other RNA
ctgcggcaagacgttcaaatt

SEQ ID NO: 2016 - RNA, 21 nt, synthetic construct
  source 1..21: mol_type = other RNA
tgcggcaagacgttcaaattt

SEQ ID NO: 2017 - RNA, 21 nt, synthetic construct
  source 1..21: mol_type = other RNA
gcggcaagacgttcaaatttc

SEQ ID NO: 2018 - RNA, 21 nt, synthetic construct
  source 1..21: mol_type = other RNA
catgacggtcaagtccgacga

SEQ ID NO: 2019 - RNA, 21 nt, synthetic construct
  source 1..21: mol_type = other RNA
caagtccgtggtggccaagtt

SEQ ID NO: 2020 - RNA, 21 nt, synthetic construct
  source 1..21: mol_type = other RNA
aagtccgtggtggccaagttc

SEQ ID NO: 2021 - RNA, 21 nt, synthetic construct
  source 1..21: mol_type = other RNA
tccgtggtggccaagttcaat

SEQ ID NO: 2022 - RNA, 21 nt, synthetic construct
  source 1..21: mol_type = other RNA
agaggaggacgacgaggaaga

SEQ ID NO: 2023 - RNA, 21 nt, synthetic construct
  source 1..21: mol_type = other RNA
gaggaggacgacgaggaagat

SEQ ID NO: 2024 - RNA, 21 nt, synthetic construct
  source 1..21: mol_type = other RNA
ggagctgacggagagcgagat

SEQ ID NO: 2025 - RNA, 21 nt, synthetic construct
  source 1..21: mol_type = other RNA
agctgacggagagcgagaggt

SEQ ID NO: 2026 - RNA, 21 nt, synthetic construct
  source 1..21: mol_type = other RNA
gctgacggagagcgagagggt

SEQ ID NO: 2027 - RNA, 21 nt, synthetic construct
  source 1..21: mol_type = other RNA
ctgacggagagcgagagggtt

SEQ ID NO: 2028 - RNA, 21 nt, synthetic construct
  source 1..21: mol_type = other RNA
catgcagcacttcagcgaggc

SEQ ID NO: 2029 - RNA, 21 nt, synthetic construct
  source 1..21: mol_type = other RNA
tgcagcacttcagcgaggcct

SEQ ID NO: 2030 - RNA, 21 nt, synthetic construct
  source 1..21: mol_type = other RNA
tcagcgaggccttccaccagt

SEQ ID NO: 2031 - RNA, 21 nt, synthetic construct
  source 1..21: mol_type = other RNA
accgcatagacgatggcactt

SEQ ID NO: 2032 - RNA, 21 nt, synthetic construct
  source 1..21: mol_type = other RNA
cgcatagacgatggcactgtt

SEQ ID NO: 2033 - RNA, 21 nt, synthetic construct
  source 1..21: mol_type = other RNA
catagacgatggcactgttaa

SEQ ID NO: 2034 - RNA, 21 nt, synthetic construct
  source 1..21: mol_type = other RNA
aggcagctcaaagatcccttc

SEQ ID NO: 2035 - RNA, 21 nt, synthetic construct
  source 1..21: mol_type = other RNA
ggcagctcaaagatcccttcc

SEQ ID NO: 2036 - RNA, 21 nt, synthetic construct
  source 1..21: mol_type = other RNA
gcagctcaaagatcccttcct

SEQ ID NO: 2037 - RNA, 21 nt, synthetic construct
  source 1..21: mol_type = other RNA
tcggagactccagacaatcgc

SEQ ID NO: 2038 - RNA, 21 nt, synthetic construct
  source 1..21: mol_type = other RNA
cggagactccagacaatcgcc

SEQ ID NO: 2039 - RNA, 21 nt, synthetic construct
  source 1..21: mol_type = other RNA
ggagactccagacaatcgcct

SEQ ID NO: 2040 - RNA, 21 nt, synthetic construct
  source 1..21: mol_type = other RNA
gagactccagacaatcgcctt

SEQ ID NO: 2041 - RNA, 21 nt, synthetic construct
  source 1..21: mol_type = other RNA
agactccagacaatcgccttt

SEQ ID NO: 2042 - RNA, 21 nt, synthetic construct
  source 1..21: mol_type = other RNA
gactccagacaatcgcctttt

SEQ ID NO: 2043 - RNA, 21 nt, synthetic construct
  source 1..21: mol_type = other RNA
actccagacaatcgccttttt

SEQ ID NO: 2044 - RNA, 21 nt, synthetic construct
  source 1..21: mol_type = other RNA
ctccagacaatcgccttttgc

SEQ ID NO: 2045 - RNA, 21 nt, synthetic construct
  source 1..21: mol_type = other RNA
ccagacaatcgccttttgcct

SEQ ID NO: 2046 - RNA, 21 nt, synthetic construct
  source 1..21: mol_type = other RNA
cagacaatcgccttttgcctc

SEQ ID NO: 2047 - RNA, 21 nt, synthetic construct
  source 1..21: mol_type = other RNA
gacgcagcgacacttgtgagt

SEQ ID NO: 2048 - RNA, 21 nt, synthetic construct
  source 1..21: mol_type = other RNA
cgcagcgacacttgtgagtac

SEQ ID NO: 2049 - RNA, 21 nt, synthetic construct
  source 1..21: mol_type = other RNA
gcagcgacacttgtgagtact

SEQ ID NO: 2050 - RNA, 21 nt, synthetic construct
  source 1..21: mol_type = other RNA
cagcgacacttgtgagtactt

SEQ ID NO: 2051 - RNA, 21 nt, synthetic construct
  source 1..21: mol_type = other RNA
gacacttgtgagtactgtggt

SEQ ID NO: 2052 - RNA, 21 nt, synthetic construct
  source 1..21: mol_type = other RNA
acacttgtgagtactgtggga

SEQ ID NO: 2053 - RNA, 21 nt, synthetic construct
  source 1..21: mol_type = other RNA
cacttgtgagtactgtgggaa

SEQ ID NO: 2054 - RNA, 21 nt, synthetic construct
  source 1..21: mol_type = other RNA
acttgtgagtactgtgggaaa

SEQ ID NO: 2055 - RNA, 21 nt, synthetic construct
  source 1..21: mol_type = other RNA
cttgtgagtactgtgggaaat

SEQ ID NO: 2056 - RNA, 21 nt, synthetic construct
  source 1..21: mol_type = other RNA
ttgtgagtactgtgggaaagt

SEQ ID NO: 2057 - RNA, 21 nt, synthetic construct
  source 1..21: mol_type = other RNA
tgtgagtactgtgggaaagtc

SEQ ID NO: 2058 - RNA, 21 nt, synthetic construct
  source 1..21: mol_type = other RNA
gtgagtactgtgggaaagtct

SEQ ID NO: 2059 - RNA, 21 nt, synthetic construct
  source 1..21: mol_type = other RNA
gtcttcaagaactgtagcaat

SEQ ID NO: 2060 - RNA, 21 nt, synthetic construct
  source 1..21: mol_type = other RNA
tcttcaagaactgtagcaatc

SEQ ID NO: 2061 - RNA, 21 nt, synthetic construct
  source 1..21: mol_type = other RNA
cttcaagaactgtagcaatct

SEQ ID NO: 2062 - RNA, 21 nt, synthetic construct
  source 1..21: mol_type = other RNA
ttcaagaactgtagcaatctc

SEQ ID NO: 2063 - RNA, 21 nt, synthetic construct
  source 1..21: mol_type = other RNA
tcaagaactgtagcaatctca

SEQ ID NO: 2064 - RNA, 21 nt, synthetic construct
  source 1..21: mol_type = other RNA
caagaactgtagcaatctcac

SEQ ID NO: 2065 - RNA, 21 nt, synthetic construct
  source 1..21: mol_type = other RNA
aagaactgtagcaatctcact

SEQ ID NO: 2066 - RNA, 21 nt, synthetic construct
  source 1..21: mol_type = other RNA
gagaagccacacgggcgaaat

SEQ ID NO: 2067 - RNA, 21 nt, synthetic construct
  source 1..21: mol_type = other RNA
agccacacgggcgaaaggcct

SEQ ID NO: 2068 - RNA, 21 nt, synthetic construct
  source 1..21: mol_type = other RNA
gccacacgggcgaaaggcctt

SEQ ID NO: 2069 - RNA, 21 nt, synthetic construct
  source 1..21: mol_type = other RNA
acacgggcgaaaggccttata

SEQ ID NO: 2070 - RNA, 21 nt, synthetic construct
  source 1..21: mol_type = other RNA
cacgggcgaaaggccttataa

SEQ ID NO: 2071 - RNA, 21 nt, synthetic construct
  source 1..21: mol_type = other RNA
acgggcgaaaggccttataaa

SEQ ID NO: 2072 - RNA, 21 nt, synthetic construct
  source 1..21: mol_type = other RNA
cgggcgaaaggccttataaat

SEQ ID NO: 2073 - RNA, 21 nt, synthetic construct
  source 1..21: mol_type = other RNA
gggcgaaaggccttataaatt

SEQ ID NO: 2074 - RNA, 21 nt, synthetic construct
  source 1..21: mol_type = other RNA
ggcgaaaggccttataaatgc

SEQ ID NO: 2075 - RNA, 21 nt, synthetic construct
  source 1..21: mol_type = other RNA
gcgaaaggccttataaatgct

SEQ ID NO: 2076 - RNA, 21 nt, synthetic construct
  source 1..21: mol_type = other RNA
gaaaggccttataaatgcgat

SEQ ID NO: 2077 - RNA, 21 nt, synthetic construct
  source 1..21: mol_type = other RNA
aaaggccttataaatgcgagc

SEQ ID NO: 2078 - RNA, 21 nt, synthetic construct
  source 1..21: mol_type = other RNA
aaggccttataaatgcgagct

SEQ ID NO: 2079 - RNA, 21 nt, synthetic construct
  source 1..21: mol_type = other RNA
aggccttataaatgcgagctt

SEQ ID NO: 2080 - RNA, 21 nt, synthetic construct
  source 1..21: mol_type = other RNA
ggccttataaatgcgagctgt

SEQ ID NO: 2081 - RNA, 21 nt, synthetic construct
  source 1..21: mol_type = other RNA
gccttataaatgcgagctgtt

SEQ ID NO: 2082 - RNA, 21 nt, synthetic construct
  source 1..21: mol_type = other RNA
ccttataaatgcgagctgtgc

SEQ ID NO: 2083 - RNA, 21 nt, synthetic construct
  source 1..21: mol_type = other RNA
cttataaatgcgagctgtgca

SEQ ID NO: 2084 - RNA, 21 nt, synthetic construct
  source 1..21: mol_type = other RNA
ttataaatgcgagctgtgcaa

SEQ ID NO: 2085 - RNA, 21 nt, synthetic construct
  source 1..21: mol_type = other RNA
tataaatgcgagctgtgcaac

SEQ ID NO: 2086 - RNA, 21 nt, synthetic construct
  source 1..21: mol_type = other RNA
ataaatgcgagctgtgcaact

SEQ ID NO: 2087 - RNA, 21 nt, synthetic construct
  source 1..21: mol_type = other RNA
taaatgcgagctgtgcaacta

SEQ ID NO: 2088 - RNA, 21 nt, synthetic construct
  source 1..21: mol_type = other RNA
aaatgcgagctgtgcaactat

SEQ ID NO: 2089 - RNA, 21 nt, synthetic construct
  source 1..21: mol_type = other RNA
aatgcgagctgtgcaactatt

SEQ ID NO: 2090 - RNA, 21 nt, synthetic construct
  source 1..21: mol_type = other RNA
atgcgagctgtgcaactatgc

SEQ ID NO: 2091 - RNA, 21 nt, synthetic construct
  source 1..21: mol_type = other RNA
gcgagctgtgcaactatgcct

SEQ ID NO: 2092 - RNA, 21 nt, synthetic construct
  source 1..21: mol_type = other RNA
gagctgtgcaactatgcctgt

SEQ ID NO: 2093 - RNA, 21 nt, synthetic construct
  source 1..21: mol_type = other RNA
gctgtgcaactatgcctgtgc

SEQ ID NO: 2094 - RNA, 21 nt, synthetic construct
  source 1..21: mol_type = other RNA
gggaaggacgtttacaaatgt

SEQ ID NO: 2095 - RNA, 21 nt, synthetic construct
  source 1..21: mol_type = other RNA
ggaaggacgtttacaaatgtt

SEQ ID NO: 2096 - RNA, 21 nt, synthetic construct
  source 1..21: mol_type = other RNA
ttgtaagatgccttttagcgt

SEQ ID NO: 2097 - RNA, 21 nt, synthetic construct
  source 1..21: mol_type = other RNA
tgtaagatgccttttagcgtt

SEQ ID NO: 2098 - RNA, 21 nt, synthetic construct
  source 1..21: mol_type = other RNA
gtaagatgccttttagcgtgt

SEQ ID NO: 2099 - RNA, 21 nt, synthetic construct
  source 1..21: mol_type = other RNA
taagatgccttttagcgtgta

SEQ ID NO: 2100 - RNA, 21 nt, synthetic construct
  source 1..21: mol_type = other RNA
aagatgccttttagcgtgtac

SEQ ID NO: 2101 - RNA, 21 nt, synthetic construct
  source 1..21: mol_type = other RNA
agatgccttttagcgtgtaca

SEQ ID NO: 2102 - RNA, 21 nt, synthetic construct
  source 1..21: mol_type = other RNA
atgccttttagcgtgtacagt

SEQ ID NO: 2103 - RNA, 21 nt, synthetic construct
  source 1..21: mol_type = other RNA
tgccttttagcgtgtacagta

SEQ ID NO: 2104 - RNA, 21 nt, synthetic construct
  source 1..21: mol_type = other RNA
gccttttagcgtgtacagtac

SEQ ID NO: 2105 - RNA, 21 nt, synthetic construct
  source 1..21: mol_type = other RNA
ccttttagcgtgtacagtacc

SEQ ID NO: 2106 - RNA, 21 nt, synthetic construct
  source 1..21: mol_type = other RNA
cttttagcgtgtacagtaccc

SEQ ID NO: 2107 - RNA, 21 nt, synthetic construct
  source 1..21: mol_type = other RNA
ttttagcgtgtacagtaccct

SEQ ID NO: 2108 - RNA, 21 nt, synthetic construct
  source 1..21: mol_type = other RNA
tttagcgtgtacagtaccctt

SEQ ID NO: 2109 - RNA, 21 nt, synthetic construct
  source 1..21: mol_type = other RNA
ttagcgtgtacagtaccctgt

SEQ ID NO: 2110 - RNA, 21 nt, synthetic construct
  source 1..21: mol_type = other RNA
tagcgtgtacagtaccctgga

SEQ ID NO: 2111 - RNA, 21 nt, synthetic construct
  source 1..21: mol_type = other RNA
agcgtgtacagtaccctggat

SEQ ID NO: 2112 - RNA, 21 nt, synthetic construct
  source 1..21: mol_type = other RNA
gtgtacagtaccctggagaaa

SEQ ID NO: 2113 - RNA, 21 nt, synthetic construct
  source 1..21: mol_type = other RNA
tgtacagtaccctggagaaac

SEQ ID NO: 2114 - RNA, 21 nt, synthetic construct
  source 1..21: mol_type = other RNA
atggcacagtgatcgagtgtt

SEQ ID NO: 2115 - RNA, 21 nt, synthetic construct
  source 1..21: mol_type = other RNA
tggcacagtgatcgagtgttt

SEQ ID NO: 2116 - RNA, 21 nt, synthetic construct
  source 1..21: mol_type = other RNA
cacagtgatcgagtgttgaat

SEQ ID NO: 2117 - RNA, 21 nt, synthetic construct
  source 1..21: mol_type = other RNA
acagtgatcgagtgttgaata

SEQ ID NO: 2118 - RNA, 21 nt, synthetic construct
  source 1..21: mol_type = other RNA
cagtgatcgagtgttgaataa

SEQ ID NO: 2119 - RNA, 21 nt, synthetic construct
  source 1..21: mol_type = other RNA
agtgatcgagtgttgaataat

SEQ ID NO: 2120 - RNA, 21 nt, synthetic construct
  source 1..21: mol_type = other RNA
gtgatcgagtgttgaataatt

SEQ ID NO: 2121 - RNA, 21 nt, synthetic construct
  source 1..21: mol_type = other RNA
gcagggaacacgtctagccca

SEQ ID NO: 2122 - RNA, 21 nt, synthetic construct
  source 1..21: mol_type = other RNA
ttcagagcaacctggtggtgc

SEQ ID NO: 2123 - RNA, 21 nt, synthetic construct
  source 1..21: mol_type = other RNA
atgacggtcaagtccgacgac

SEQ ID NO: 2124 - RNA, 21 nt, synthetic construct
  source 1..21: mol_type = other RNA
tgacggtcaagtccgacgact

SEQ ID NO: 2125 - RNA, 21 nt, synthetic construct
  source 1..21: mol_type = other RNA
acggtcaagtccgacgacggt

SEQ ID NO: 2126 - RNA, 21 nt, synthetic construct
  source 1..21: mol_type = other RNA
caagtccgacgacggtctctc

SEQ ID NO: 2127 - RNA, 21 nt, synthetic construct
  source 1..21: mol_type = other RNA
cgctcaagtccgtggtggcca

SEQ ID NO: 2128 - RNA, 21 nt, synthetic construct
  source 1..21: mol_type = other RNA
tcaagtccgtggtggccaagt

SEQ ID NO: 2129 - RNA, 21 nt, synthetic construct
  source 1..21: mol_type = other RNA
tggtggccaagttcaagagct

SEQ ID NO: 2130 - RNA, 21 nt, synthetic construct
  source 1..21: mol_type = other RNA
ggtggccaagttcaagagcga

SEQ ID NO: 2131 - RNA, 21 nt, synthetic construct
  source 1..21: mol_type = other RNA
aggaggacgacgaggaagagt

SEQ ID NO: 2132 - RNA, 21 nt, synthetic construct
  source 1..21: mol_type = other RNA
gaggacgacgaggaagaggaa

SEQ ID NO: 2133 - RNA, 21 nt, synthetic construct
  source 1..21: mol_type = other RNA
catcaagctcgagaaggagtt

SEQ ID NO: 2134 - RNA, 21 nt, synthetic construct
  source 1..21: mol_type = other RNA
atcaagctcgagaaggagttc

SEQ ID NO: 2135 - RNA, 21 nt, synthetic construct
  source 1..21: mol_type = other RNA
caagctcgagaaggagttcga

SEQ ID NO: 2136 - RNA, 21 nt, synthetic construct
  source 1..21: mol_type = other RNA
tccttagcttcggagactcca

SEQ ID NO: 2137 - RNA, 21 nt, synthetic construct
  source 1..21: mol_type = other RNA
ccttagcttcggagactccat

SEQ ID NO: 2138 - RNA, 21 nt, synthetic construct
  source 1..21: mol_type = other RNA
tagcttcggagactccagaca

SEQ ID NO: 2139 - RNA, 21 nt, synthetic construct
  source 1..21: mol_type = other RNA
agcttcggagactccagacaa

SEQ ID NO: 2140 - RNA, 21 nt, synthetic construct
  source 1..21: mol_type = other RNA
gcttcggagactccagacaat

SEQ ID NO: 2141 - RNA, 21 nt, synthetic construct
  source 1..21: mol_type = other RNA
cttcggagactccagacaatc

SEQ ID NO: 2142 - RNA, 21 nt, synthetic construct
  source 1..21: mol_type = other RNA
ttgcctcctcgtcggagcact

SEQ ID NO: 2143 - RNA, 21 nt, synthetic construct
  source 1..21: mol_type = other RNA
tgcctcctcgtcggagcactc

SEQ ID NO: 2144 - RNA, 21 nt, synthetic construct
  source 1..21: mol_type = other RNA
ggacattcttatttttatcga

SEQ ID NO: 2145 - RNA, 21 nt, synthetic construct
  source 1..21: mol_type = other RNA
gacattcttatttttatcgag

SEQ ID NO: 2146 - RNA, 21 nt, synthetic construct
  source 1..21: mol_type = other RNA
acattcttatttttatcgagc

SEQ ID NO: 2147 - RNA, 21 nt, synthetic construct
  source 1..21: mol_type = other RNA
gctcgataaaaataagaatgt

SEQ ID NO: 2148 - RNA, 21 nt, synthetic construct
  source 1..21: mol_type = other RNA
attcttatttttatcgagcac

SEQ ID NO: 2149 - RNA, 21 nt, synthetic construct
  source 1..21: mol_type = other RNA
ttcttatttttatcgagcaca

SEQ ID NO: 2150 - RNA, 21 nt, synthetic construct
  source 1..21: mol_type = other RNA
tcttatttttatcgagcacaa

SEQ ID NO: 2151 - RNA, 21 nt, synthetic construct
  source 1..21: mol_type = other RNA
cttatttttatcgagcacaaa

SEQ ID NO: 2152 - RNA, 21 nt, synthetic construct
  source 1..21: mol_type = other RNA
ttatttttatcgagcacaaac

SEQ ID NO: 2153 - RNA, 21 nt, synthetic construct
  source 1..21: mol_type = other RNA
tatttttatcgagcacaaacg

SEQ ID NO: 2154 - RNA, 21 nt, synthetic construct
  source 1..21: mol_type = other RNA
atttttatcgagcacaaacgg

SEQ ID NO: 2155 - RNA, 21 nt, synthetic construct
  source 1..21: mol_type = other RNA
tttttatcgagcacaaacgga

SEQ ID NO: 2156 - RNA, 21 nt, synthetic construct
  source 1..21: mol_type = other RNA
ttttatcgagcacaaacggaa

SEQ ID NO: 2157 - RNA, 21 nt, synthetic construct
  source 1..21: mol_type = other RNA
tttatcgagcacaaacggaaa

SEQ ID NO: 2158 - RNA, 21 nt, synthetic construct
  source 1..21: mol_type = other RNA
ttatcgagcacaaacggaaac

SEQ ID NO: 2159 - RNA, 21 nt, synthetic construct
  source 1..21: mol_type = other RNA
tatgccccgcagggtatttgt

SEQ ID NO: 2160 - RNA, 21 nt, synthetic construct
  source 1..21: mol_type = other RNA
cgcagggtatttgtaaagatg

SEQ ID NO: 2161 - RNA, 21 nt, synthetic construct
  source 1..21: mol_type = other RNA
gcagggtatttgtaaagatga

SEQ ID NO: 2162 - RNA, 21 nt, synthetic construct
  source 1..21: mol_type = other RNA
cagggtatttgtaaagatgag

SEQ ID NO: 2163 - RNA, 21 nt, synthetic construct
  source 1..21: mol_type = other RNA
agggtatttgtaaagatgagc

SEQ ID NO: 2164 - RNA, 21 nt, synthetic construct
  source 1..21: mol_type = other RNA
ggtatttgtaaagatgagccc

SEQ ID NO: 2165 - RNA, 21 nt, synthetic construct
  source 1..21: mol_type = other RNA
gtatttgtaaagatgagccca

SEQ ID NO: 2166 - RNA, 21 nt, synthetic construct
  source 1..21: mol_type = other RNA
tatttgtaaagatgagcccag

SEQ ID NO: 2167 - RNA, 21 nt, synthetic construct
  source 1..21: mol_type = other RNA
atttgtaaagatgagcccagc

SEQ ID NO: 2168 - RNA, 21 nt, synthetic construct
  source 1..21: mol_type = other RNA
tttgtaaagatgagcccagca

SEQ ID NO: 2169 - RNA, 21 nt, synthetic construct
  source 1..21: mol_type = other RNA
ttgtaaagatgagcccagcag

SEQ ID NO: 2170 - RNA, 21 nt, synthetic construct
  source 1..21: mol_type = other RNA
tgtaaagatgagcccagcagc

SEQ ID NO: 2171 - RNA, 21 nt, synthetic construct
  source 1..21: mol_type = other RNA
gtaaagatgagcccagcagct

SEQ ID NO: 2172 - RNA, 21 nt, synthetic construct
  source 1..21: mol_type = other RNA
taaagatgagcccagcagcta

SEQ ID NO: 2173 - RNA, 21 nt, synthetic construct
  source 1..21: mol_type = other RNA
aagatgagcccagcagctaca

SEQ ID NO: 2174 - RNA, 21 nt, synthetic construct
  source 1..21: mol_type = other RNA
agatgagcccagcagctacac

SEQ ID NO: 2175 - RNA, 21 nt, synthetic construct
  source 1..21: mol_type = other RNA
gatgagcccagcagctacaca

SEQ ID NO: 2176 - RNA, 21 nt, synthetic construct
  source 1..21: mol_type = other RNA
atgagcccagcagctacacat

SEQ ID NO: 2177 - RNA, 21 nt, synthetic construct
  source 1..21: mol_type = other RNA
tgagcccagcagctacacatg

SEQ ID NO: 2178 - RNA, 21 nt, synthetic construct
  source 1..21: mol_type = other RNA
acacatgtacaacttgcaaac

SEQ ID NO: 2179 - RNA, 21 nt, synthetic construct
  source 1..21: mol_type = other RNA
acatgtacaacttgcaaacag

SEQ ID NO: 2180 - RNA, 21 nt, synthetic construct
  source 1..21: mol_type = other RNA
tgcaacacgcacagaacactc

SEQ ID NO: 2181 - RNA, 21 nt, synthetic construct
  source 1..21: mol_type = other RNA
gtacagtaccctggagaaaca

SEQ ID NO: 2182 - RNA, 21 nt, synthetic construct
  source 1..21: mol_type = other RNA
tacagtaccctggagaaacac

SEQ ID NO: 2183 - RNA, 21 nt, synthetic construct
  source 1..21: mol_type = other RNA
acagtaccctggagaaacaca

SEQ ID NO: 2184 - RNA, 21 nt, synthetic construct
  source 1..21: mol_type = other RNA
cagtaccctggagaaacacat

SEQ ID NO: 2185 - RNA, 21 nt, synthetic construct
  source 1..21: mol_type = other RNA
agtaccctggagaaacacatg

SEQ ID NO: 2186 - RNA, 21 nt, synthetic construct
  source 1..21: mol_type = other RNA
gtaccctggagaaacacatga

SEQ ID NO: 2187 - RNA, 21 nt, synthetic construct
  source 1..21: mol_type = other RNA
taccctggagaaacacatgaa

SEQ ID NO: 2188 - RNA, 21 nt, synthetic construct
  source 1..21: mol_type = other RNA
accctggagaaacacatgaaa

SEQ ID NO: 2189 - RNA, 21 nt, synthetic construct
  source 1..21: mol_type = other RNA
ccctggagaaacacatgaaaa

SEQ ID NO: 2190 - RNA, 21 nt, synthetic construct
  source 1..21: mol_type = other RNA
cctggagaaacacatgaaaaa

SEQ ID NO: 2191 - RNA, 21 nt, synthetic construct
  source 1..21: mol_type = other RNA
ctggagaaacacatgaaaaaa

SEQ ID NO: 2192 - RNA, 21 nt, synthetic construct
  source 1..21: mol_type = other RNA
tggagaaacacatgaaaaaat

SEQ ID NO: 2193 - RNA, 21 nt, synthetic construct
  source 1..21: mol_type = other RNA
ggagaaacacatgaaaaaatg

SEQ ID NO: 2194 - RNA, 21 nt, synthetic construct
  source 1..21: mol_type = other RNA
aaccagaccacggcccgttga

SEQ ID NO: 2195 - RNA, 21 nt, synthetic construct
  source 1..21: mol_type = other RNA
accagaccacggcccgttgga

SEQ ID NO: 2196 - RNA, 21 nt, synthetic construct
  source 1..21: mol_type = other RNA
gacattcttatttttatcgaa

SEQ ID NO: 2197 - RNA, 21 nt, synthetic construct
  source 1..21: mol_type = other RNA
cattcttatttttatcgagca

SEQ ID NO: 2198 - RNA, 21 nt, synthetic construct
  source 1..21: mol_type = other RNA
ttatttttatcgagcacaaaa

SEQ ID NO: 2199 - RNA, 21 nt, synthetic construct
  source 1..21: mol_type = other RNA
tatttttatcgagcacaaaca

SEQ ID NO: 2200 - RNA, 21 nt, synthetic construct
  source 1..21: mol_type = other RNA
atttttatcgagcacaaacga

SEQ ID NO: 2201 - RNA, 21 nt, synthetic construct
  source 1..21: mol_type = other RNA
ttatcgagcacaaacggaaaa

SEQ ID NO: 2202 - RNA, 21 nt, synthetic construct
  source 1..21: mol_type = other RNA
ccttccccttcaccaatcgaa

SEQ ID NO: 2203 - RNA, 21 nt, synthetic construct
  source 1..21: mol_type = other RNA
cttcaccaatcgagatgaaaa

SEQ ID NO: 2204 - RNA, 21 nt, synthetic construct
  source 1..21: mol_type = other RNA
aaagcatccaatcccgtggaa

SEQ ID NO: 2205 - RNA, 21 nt, synthetic construct
  source 1..21: mol_type = other RNA
gcatccaatcccgtggaggta

SEQ ID NO: 2206 - RNA, 21 nt, synthetic construct
  source 1..21: mol_type = other RNA
tcacgccagaggatgacgata

SEQ ID NO: 2207 - RNA, 21 nt, synthetic construct
  source 1..21: mol_type = other RNA
atgacgattgtttatcaacga

SEQ ID NO: 2208 - RNA, 21 nt, synthetic construct
  source 1..21: mol_type = other RNA
tgacgattgtttatcaacgta

SEQ ID NO: 2209 - RNA, 21 nt, synthetic construct
  source 1..21: mol_type = other RNA
ttgtttatcaacgtcatctaa

SEQ ID NO: 2210 - RNA, 21 nt, synthetic construct
  source 1..21: mol_type = other RNA
tatgccccgcagggtatttga

SEQ ID NO: 2211 - RNA, 21 nt, synthetic construct
  source 1..21: mol_type = other RNA
cgcagggtatttgtaaagata

SEQ ID NO: 2212 - RNA, 21 nt, synthetic construct
  source 1..21: mol_type = other RNA
cagggtatttgtaaagatgaa

SEQ ID NO: 2213 - RNA, 21 nt, synthetic construct
  source 1..21: mol_type = other RNA
agggtatttgtaaagatgaga

SEQ ID NO: 2214 - RNA, 21 nt, synthetic construct
  source 1..21: mol_type = other RNA
ggtatttgtaaagatgagcca

SEQ ID NO: 2215 - RNA, 21 nt, synthetic construct
  source 1..21: mol_type = other RNA
tatttgtaaagatgagcccaa

SEQ ID NO: 2216 - RNA, 21 nt, synthetic construct
  source 1..21: mol_type = other RNA
atttgtaaagatgagcccaga

SEQ ID NO: 2217 - RNA, 21 nt, synthetic construct
  source 1..21: mol_type = other RNA
ttgtaaagatgagcccagcaa

SEQ ID NO: 2218 - RNA, 21 nt, synthetic construct
  source 1..21: mol_type = other RNA
tgtaaagatgagcccagcaga

SEQ ID NO: 2219 - RNA, 21 nt, synthetic construct
  source 1..21: mol_type = other RNA
gtaaagatgagcccagcagca

SEQ ID NO: 2220 - RNA, 21 nt, synthetic construct
  source 1..21: mol_type = other RNA
agatgagcccagcagctacaa

SEQ ID NO: 2221 - RNA, 21 nt, synthetic construct
  source 1..21: mol_type = other RNA
atgagcccagcagctacacaa

SEQ ID NO: 2222 - RNA, 21 nt, synthetic construct
  source 1..21: mol_type = other RNA
tgagcccagcagctacacata

SEQ ID NO: 2223 - RNA, 21 nt, synthetic construct
  source 1..21: mol_type = other RNA
acacatgtacaacttgcaaaa

SEQ ID NO: 2224 - RNA, 21 nt, synthetic construct
  source 1..21: mol_type = other RNA
acatgtacaacttgcaaacaa

SEQ ID NO: 2225 - RNA, 21 nt, synthetic construct
  source 1..21: mol_type = other RNA
tgcaacacgcacagaacacta

SEQ ID NO: 2226 - RNA, 21 nt, synthetic construct
  source 1..21: mol_type = other RNA
caacacgcacagaacactcaa

SEQ ID NO: 2227 - RNA, 21 nt, synthetic construct
  source 1..21: mol_type = other RNA
aacacgcacagaacactcata

SEQ ID NO: 2228 - RNA, 21 nt, synthetic construct
  source 1..21: mol_type = other RNA
acacgcacagaacactcatga

SEQ ID NO: 2229 - RNA, 21 nt, synthetic construct
  source 1..21: mol_type = other RNA
ccctgaccccgcgggttggta

SEQ ID NO: 2230 - RNA, 21 nt, synthetic construct
  source 1..21: mol_type = other RNA
ctgaccccgcgggttggtata

SEQ ID NO: 2231 - RNA, 21 nt, synthetic construct
  source 1..21: mol_type = other RNA
gaccccgcgggttggtatcca

SEQ ID NO: 2232 - RNA, 21 nt, synthetic construct
  source 1..21: mol_type = other RNA
accccgcgggttggtatccca

SEQ ID NO: 2233 - RNA, 21 nt, synthetic construct
  source 1..21: mol_type = other RNA
gtatcccttcaggactaggta

SEQ ID NO: 2234 - RNA, 21 nt, synthetic construct
  source 1..21: mol_type = other RNA
cagacaataacccctttaaca

SEQ ID NO: 2235 - RNA, 21 nt, synthetic construct
  source 1..21: mol_type = other RNA
agacaataacccctttaacca

SEQ ID NO: 2236 - RNA, 21 nt, synthetic construct
  source 1..21: mol_type = other RNA
aataccaggatcagtatcgaa

SEQ ID NO: 2237 - RNA, 21 nt, synthetic construct
  source 1..21: mol_type = other RNA
cctgtttagtccaccaccgaa

SEQ ID NO: 2238 - RNA, 21 nt, synthetic construct
  source 1..21: mol_type = other RNA
caagtccaagtcatgcgagta

SEQ ID NO: 2239 - RNA, 21 nt, synthetic construct
  source 1..21: mol_type = other RNA
aagtccaagtcatgcgagtta

SEQ ID NO: 2240 - RNA, 21 nt, synthetic construct
  source 1..21: mol_type = other RNA
gtgcgaccacgcgtgcaccca

SEQ ID NO: 2241 - RNA, 21 nt, synthetic construct
  source 1..21: mol_type = other RNA
ccatgacggtcaagtccgaca

SEQ ID NO: 2242 - RNA, 21 nt, synthetic construct
  source 1..21: mol_type = other RNA
atgacggtcaagtccgacgaa

SEQ ID NO: 2243 - RNA, 21 nt, synthetic construct
  source 1..21: mol_type = other RNA
tgacggtcaagtccgacgaca

SEQ ID NO: 2244 - RNA, 21 nt, synthetic construct
  source 1..21: mol_type = other RNA
gacggtcaagtccgacgacga

SEQ ID NO: 2245 - RNA, 21 nt, synthetic construct
  source 1..21: mol_type = other RNA
acggtcaagtccgacgacgga

SEQ ID NO: 2246 - RNA, 21 nt, synthetic construct
  source 1..21: mol_type = other RNA
cggtcaagtccgacgacggta

SEQ ID NO: 2247 - RNA, 21 nt, synthetic construct
  source 1..21: mol_type = other RNA
ggtcaagtccgacgacggtca

SEQ ID NO: 2248 - RNA, 21 nt, synthetic construct
  source 1..21: mol_type = other RNA
caagtccgacgacggtctcta

SEQ ID NO: 2249 - RNA, 21 nt, synthetic construct
  source 1..21: mol_type = other RNA
agcagcgcgctcaagtccgta

SEQ ID NO: 2250 - RNA, 21 nt, synthetic construct
  source 1..21: mol_type = other RNA
gcagcgcgctcaagtccgtga

SEQ ID NO: 2251 - RNA, 21 nt, synthetic construct
  source 1..21: mol_type = other RNA
gagaacgaccccaacctgata

SEQ ID NO: 2252 - RNA, 21 nt, synthetic construct
  source 1..21: mol_type = other RNA
ctgacggagagcgagagggta

SEQ ID NO: 2253 - RNA, 21 nt, synthetic construct
  source 1..21: mol_type = other RNA
agagcgagagggtggactaca

SEQ ID NO: 2254 - RNA, 21 nt, synthetic construct
  source 1..21: mol_type = other RNA
gcgagagggtggactacggca

SEQ ID NO: 2255 - RNA, 21 nt, synthetic construct
  source 1..21: mol_type = other RNA
cgagagggtggactacggcta

SEQ ID NO: 2256 - RNA, 21 nt, synthetic construct
  source 1..21: mol_type = other RNA
gagggtggactacggcttcga

SEQ ID NO: 2257 - RNA, 21 nt, synthetic construct
  source 1..21: mol_type = other RNA
cacgagaacagctcgcgggga

SEQ ID NO: 2258 - RNA, 21 nt, synthetic construct
  source 1..21: mol_type = other RNA
gggcgagaagcataagcgcga

SEQ ID NO: 2259 - RNA, 21 nt, synthetic construct
  source 1..21: mol_type = other RNA
gagaagcataagcgcggccaa

SEQ ID NO: 2260 - RNA, 21 nt, synthetic construct
  source 1..21: mol_type = other RNA
tgcgacgaagactcggtggca

SEQ ID NO: 2261 - RNA, 21 nt, synthetic construct
  source 1..21: mol_type = other RNA
gactcggtggccggcgagtca

SEQ ID NO: 2262 - RNA, 21 nt, synthetic construct
  source 1..21: mol_type = other RNA
gccggcgagtcggaccgcata

SEQ ID NO: 2263 - RNA, 21 nt, synthetic construct
  source 1..21: mol_type = other RNA
cggcgagtcggaccgcataga

SEQ ID NO: 2264 - RNA, 21 nt, synthetic construct
  source 1..21: mol_type = other RNA
ggcgagtcggaccgcatagaa

SEQ ID NO: 2265 - RNA, 21 nt, synthetic construct
  source 1..21: mol_type = other RNA
gagtcggaccgcatagacgaa

SEQ ID NO: 2266 - RNA, 21 nt, synthetic construct
  source 1..21: mol_type = other RNA
agtcggaccgcatagacgata

SEQ ID NO: 2267 - RNA, 21 nt, synthetic construct
  source 1..21: mol_type = other RNA
gtcggaccgcatagacgatga

SEQ ID NO: 2268 - RNA, 21 nt, synthetic construct
  source 1..21: mol_type = other RNA
gagactccagacaatcgccta

SEQ ID NO: 2269 - RNA, 21 nt, synthetic construct
  source 1..21: mol_type = other RNA
gccttttgcctcctcgtcgga

SEQ ID NO: 2270 - RNA, 21 nt, synthetic construct
  source 1..21: mol_type = other RNA
ctcgtcggagcactcctcgga

SEQ ID NO: 2271 - RNA, 21 nt, synthetic construct
  source 1..21: mol_type = other RNA
cgtcggagcactcctcggaga

SEQ ID NO: 2272 - RNA, 21 nt, synthetic construct
  source 1..21: mol_type = other RNA
gagcactcctcggagaacgga

SEQ ID NO: 2273 - RNA, 21 nt, synthetic construct
  source 1..21: mol_type = other RNA
gagcacgccccatattagtga

SEQ ID NO: 2274 - RNA, 21 nt, synthetic construct
  source 1..21: mol_type = other RNA
agcacgccccatattagtgga

SEQ ID NO: 2275 - RNA, 21 nt, synthetic construct
  source 1..21: mol_type = other RNA
cacgccccatattagtggtca

SEQ ID NO: 2276 - RNA, 21 nt, synthetic construct
  source 1..21: mol_type = other RNA
cccatattagtggtccgggca

SEQ ID NO: 2277 - RNA, 21 nt, synthetic construct
  source 1..21: mol_type = other RNA
tattagtggtccgggcccgga

SEQ ID NO: 2278 - RNA, 21 nt, synthetic construct
  source 1..21: mol_type = other RNA
tttgtaagatgccttttagca

SEQ ID NO: 2279 - RNA, 21 nt, synthetic construct
  source 1..21: mol_type = other RNA
ttgtaagatgccttttagcga

SEQ ID NO: 2280 - RNA, 21 nt, synthetic construct
  source 1..21: mol_type = other RNA
tgtaagatgccttttagcgta

SEQ ID NO: 2281 - RNA, 21 nt, synthetic construct
  source 1..21: mol_type = other RNA
aagatgccttttagcgtgtaa

SEQ ID NO: 2282 - RNA, 21 nt, synthetic construct
  source 1..21: mol_type = other RNA
cttttagcgtgtacagtacca

SEQ ID NO: 2283 - RNA, 21 nt, synthetic construct
  source 1..21: mol_type = other RNA
ttttagcgtgtacagtaccca

SEQ ID NO: 2284 - RNA, 21 nt, synthetic construct
  source 1..21: mol_type = other RNA
tacagtaccctggagaaacaa

SEQ ID NO: 2285 - RNA, 21 nt, synthetic construct
  source 1..21: mol_type = other RNA
cagtaccctggagaaacacaa

SEQ ID NO: 2286 - RNA, 21 nt, synthetic construct
  source 1..21: mol_type = other RNA
agtaccctggagaaacacata

SEQ ID NO: 2287 - RNA, 21 nt, synthetic construct
  source 1..21: mol_type = other RNA
tggagaaacacatgaaaaaaa

SEQ ID NO: 2288 - RNA, 21 nt, synthetic construct
  source 1..21: mol_type = other RNA
ggagaaacacatgaaaaaata

SEQ ID NO: 2289 - RNA, 21 nt, synthetic construct
  source 1..21: mol_type = other RNA
atggcacagtgatcgagtgta

SEQ ID NO: 2290 - RNA, 21 nt, synthetic construct
  source 1..21: mol_type = other RNA
aacagtctttggattaaccca

SEQ ID NO: 2291 - RNA, 21 nt, synthetic construct
  source 1..21: mol_type = other RNA
ggattaaccctctatagacaa

SEQ ID NO: 2292 - RNA, 21 nt, synthetic construct
  source 1..21: mol_type = other RNA
atagacagaatagatagcaca

SEQ ID NO: 2293 - RNA, 21 nt, synthetic construct
  source 1..21: mol_type = other RNA
taataaaccttaggaactaga

SEQ ID NO: 2294 - RNA, 21 nt, synthetic construct
  source 1..21: mol_type = other RNA
atgacccattatgtcctagta

SEQ ID NO: 2295 - RNA, 21 nt, synthetic construct
  source 1..21: mol_type = other RNA
tataccagtataaaagctaca

SEQ ID NO: 2296 - RNA, 21 nt, synthetic construct
  source 1..21: mol_type = other RNA
aaagccctggaacgcaattaa

SEQ ID NO: 2297 - RNA, 21 nt, synthetic construct
  source 1..21: mol_type = other RNA
aattaaatacactagtaagga

SEQ ID NO: 2298 - RNA, 21 nt, synthetic construct
  source 1..21: mol_type = other RNA
attaaatacactagtaaggaa

SEQ ID NO: 2299 - RNA, 21 nt, synthetic construct
  source 1..21: mol_type = other RNA
tatgatttattagcacaacga

SEQ ID NO: 2300 - RNA, 21 nt, synthetic construct
  source 1..21: mol_type = other RNA
atgatttattagcacaacgta

SEQ ID NO: 2301 - RNA, 21 nt, synthetic construct
  source 1..21: mol_type = other RNA
gatttattagcacaacgtgga

SEQ ID NO: 2302 - RNA, 21 nt, synthetic construct
  source 1..21: mol_type = other RNA
atttattagcacaacgtggta

SEQ ID NO: 2303 - RNA, 21 nt, synthetic construct
  source 1..21: mol_type = other RNA
ttattagcacaacgtggtaca

SEQ ID NO: 2304 - RNA, 21 nt, synthetic construct
  source 1..21: mol_type = other RNA
tagcacaacgtggtactatta

SEQ ID NO: 2305 - RNA, 21 nt, synthetic construct
  source 1..21: mol_type = other RNA
ttttttattaagctagcatca

SEQ ID NO: 2306 - RNA, 21 nt, synthetic construct
  source 1..21: mol_type = other RNA
tttattaagctagcatctgca

SEQ ID NO: 2307 - RNA, 21 nt, synthetic construct
  source 1..21: mol_type = other RNA
ttttctctaatcagagataca

SEQ ID NO: 2308 - RNA, 21 nt, synthetic construct
  source 1..21: mol_type = other RNA
gatacagaggttgagtataaa

SEQ ID NO: 2309 - RNA, 21 nt, synthetic construct
  source 1..21: mol_type = other RNA
cagataggacaattaagtgca

SEQ ID NO: 2310 - RNA, 21 nt, synthetic construct
  source 1..21: mol_type = other RNA
gataggacaattaagtgcaca

SEQ ID NO: 2311 - RNA, 21 nt, synthetic construct
  source 1..21: mol_type = other RNA
cccagtttacaggtctataca

SEQ ID NO: 2312 - RNA, 21 nt, synthetic construct
  source 1..21: mol_type = other RNA
ttgagcttacttacttggaca

SEQ ID NO: 2313 - RNA, 21 nt, synthetic construct
  source 1..21: mol_type = other RNA
agcttacttacttggacgcaa

SEQ ID NO: 2314 - RNA, 21 nt, synthetic construct
  source 1..21: mol_type = other RNA
tggacgcaacattgcaagcga

SEQ ID NO: 2315 - RNA, 21 nt, synthetic construct
  source 1..21: mol_type = other RNA
ggacgcaacattgcaagcgca

SEQ ID NO: 2316 - RNA, 21 nt, synthetic construct
  source 1..21: mol_type = other RNA
gacgcaacattgcaagcgcta

SEQ ID NO: 2317 - RNA, 21 nt, synthetic construct
  source 1..21: mol_type = other RNA
gcaacattgcaagcgctgtga

SEQ ID NO: 2318 - RNA, 21 nt, synthetic construct
  source 1..21: mol_type = other RNA
aaatgaatgattgctttcgca

SEQ ID NO: 2319 - RNA, 21 nt, synthetic construct
  source 1..21: mol_type = other RNA
aatgaatgattgctttcgcta

SEQ ID NO: 2320 - RNA, 21 nt, synthetic construct
  source 1..21: mol_type = other RNA
aatgattgctttcgcttctaa

SEQ ID NO: 2321 - RNA, 21 nt, synthetic construct
  source 1..21: mol_type = other RNA
atgattgctttcgcttctaca

SEQ ID NO: 2322 - RNA, 21 nt, synthetic construct
  source 1..21: mol_type = other RNA
tgattgctttcgcttctacaa

SEQ ID NO: 2323 - RNA, 21 nt, synthetic construct
  source 1..21: mol_type = other RNA
attttagggttccattgtcta

SEQ ID NO: 2324 - RNA, 21 nt, synthetic construct
  source 1..21: mol_type = other RNA
attgtcttggtggtgttacaa

SEQ ID NO: 2325 - RNA, 21 nt, synthetic construct
  source 1..21: mol_type = other RNA
tggtagtggaaattctatgca

SEQ ID NO: 2326 - RNA, 21 nt, synthetic construct
  source 1..21: mol_type = other RNA
accgctcttcaggttgtaaaa

SEQ ID NO: 2327 - RNA, 21 nt, synthetic construct
  source 1..21: mol_type = other RNA
catctagtgttaggcactata

SEQ ID NO: 2328 - RNA, 21 nt, synthetic construct
  source 1..21: mol_type = other RNA
atctagtgttaggcactataa

SEQ ID NO: 2329 - RNA, 21 nt, synthetic construct
  source 1..21: mol_type = other RNA
gttaggcactatagtatttaa

SEQ ID NO: 2330 - RNA, 21 nt, synthetic construct
  source 1..21: mol_type = other RNA
taaaaggtatcaatgtaccta

SEQ ID NO: 2331 - RNA, 21 nt, synthetic construct
  source 1..21: mol_type = other RNA
caggataatatagtgcaaata

SEQ ID NO: 2332 - RNA, 21 nt, synthetic construct
  source 1..21: mol_type = other RNA
gagaagccatataatggcgga

SEQ ID NO: 2333 - RNA, 21 nt, synthetic construct
  source 1..21: mol_type = other RNA
gaagccatataatggcggtta

SEQ ID NO: 2334 - RNA, 21 nt, synthetic construct
  source 1..21: mol_type = other RNA
tgcagtactgcaagctaataa

SEQ ID NO: 2335 - RNA, 21 nt, synthetic construct
  source 1..21: mol_type = other RNA
ctgcaagctaataacgttgga

SEQ ID NO: 2336 - RNA, 21 nt, synthetic construct
  source 1..21: mol_type = other RNA
tgcaagctaataacgttggta

SEQ ID NO: 2337 - RNA, 21 nt, synthetic construct
  source 1..21: mol_type = other RNA
gcaagctaataacgttggtta

SEQ ID NO: 2338 - RNA, 21 nt, synthetic construct
  source 1..21: mol_type = other RNA
taataacgttggtttgttata

SEQ ID NO: 2339 - RNA, 21 nt, synthetic construct
  source 1..21: mol_type = other RNA
agaaagcccgctttagtcaaa

SEQ ID NO: 2340 - RNA, 21 nt, synthetic construct
  source 1..21: mol_type = other RNA
gaaagcccgctttagtcaata

SEQ ID NO: 2341 - RNA, 21 nt, synthetic construct
  source 1..21: mol_type = other RNA
aaagcccgctttagtcaataa

SEQ ID NO: 2342 - RNA, 21 nt, synthetic construct
  source 1..21: mol_type = other RNA
gcccgctttagtcaatactta

SEQ ID NO: 2343 - RNA, 21 nt, synthetic construct
  source 1..21: mol_type = other RNA
gttgtctgcattaacctgtta

SEQ ID NO: 2344 - RNA, 21 nt, synthetic construct
  source 1..21: mol_type = other RNA
gttcatacacccattttgtca

SEQ ID NO: 2345 - RNA, 21 nt, synthetic construct
  source 1..21: mol_type = other RNA
tcatacacccattttgtccca

SEQ ID NO: 2346 - RNA, 21 nt, synthetic construct
  source 1..21: mol_type = other RNA
  modified_base 1: mod_base = OTHER; note = 2'-O-methyluridine with phosphorothioate linkage
  modified_base 2: mod_base = OTHER; note = 2'-O-methylguanosine with phosphorothioate linkage
  modified_base 3: mod_base = OTHER; note = 2'-O-methylguanosine
  modified_base 4: mod_base = OTHER; note = 2'-O-methyladenosine
  modified_base 5: mod_base = OTHER; note = 2'-O-methyluridine
  modified_base 6: mod_base = OTHER; note = 2'-O-methyluridine
  modified_base 7: mod_base = OTHER; note = 2'-fluoroadenosine
  modified_base 8: mod_base = OTHER; note = 2'-O-methyladenosine
  modified_base 9: mod_base = OTHER; note = 2'-fluoroguanosine
  modified_base 10: mod_base = OTHER; note = 2'-fluoroadenosine
  modified_base 11: mod_base = OTHER; note = 2'-fluoroadenosine
  modified_base 12: mod_base = OTHER; note = 2'-O-methyluridine
  modified_base 13: mod_base = OTHER; note = 2'-O-methylcytidine
  modified_base 14: mod_base = OTHER; note = 2'-O-methyluridine
  modified_base 15: mod_base = OTHER; note = 2'-O-methyladenosine
  modified_base 16: mod_base = OTHER; note = 2'-fluorocytidine
  modified_base 17: mod_base = OTHER; note = 2'-fluorouridine
  modified_base 18: mod_base = OTHER; note = 2'-O-methyluridine
  modified_base 19: mod_base = OTHER; note = 2'-O-methyladenosine with phosphorothioate linkage
  modified_base 20: mod_base = OTHER; note = 2'-O-methylguanosine with phosphorothioate linkage
  modified_base 21: mod_base = OTHER; note = 2'-O-methyladenosine
tggattaagaatctacttaga

SEQ ID NO: 2347 - RNA, 21 nt, synthetic construct
  source 1..21: mol_type = other RNA
  modified_base 1: mod_base = OTHER; note = 2'-O-methylcytidine with phosphorothioate linkage
  modified_base 2: mod_base = OTHER; note = 2'-O-methyladenosine with phosphorothioate linkage
  modified_base 3: mod_base = OTHER; note = 2'-O-methylcytidine
  modified_base 4: mod_base = OTHER; note = 2'-O-methyladenosine
  modified_base 5: mod_base = OTHER; note = 2'-O-methyladenosine
  modified_base 6: mod_base = OTHER; note = 2'-O-methyladenosine
  modified_base 7: mod_base = OTHER; note = 2'-fluorocytidine
  modified_base 8: mod_base = OTHER; note = 2'-O-methylguanosine
  modified_base 9: mod_base = OTHER; note = 2'-fluoroguanosine
  modified_base 10: mod_base = OTHER; note = 2'-fluoroadenosine
  modified_base 11: mod_base = OTHER; note = 2'-fluoroadenosine
  modified_base 12: mod_base = OTHER; note = 2'-O-methyladenosine
  modified_base 13: mod_base = OTHER; note = 2'-O-methylcytidine
  modified_base 14: mod_base = OTHER; note = 2'-O-methyladenosine
  modified_base 15: mod_base = OTHER; note = 2'-O-methyladenosine
  modified_base 16: mod_base = OTHER; note = 2'-fluorouridine
  modified_base 17: mod_base = OTHER; note = 2'-fluoroguanosine
  modified_base 18: mod_base = OTHER; note = 2'-O-methylcytidine
  modified_base 19: mod_base = OTHER; note = 2'-O-methyladenosine with phosphorothioate linkage
  modified_base 20: mod_base = OTHER; note = 2'-O-methyladenosine with phosphorothioate linkage
  modified_base 21: mod_base = OTHER; note = 2'-O-methyluridine
cacaaacggaaacaatgcaat

SEQ ID NO: 2348 - RNA, 21 nt, synthetic construct
  source 1..21: mol_type = other RNA
  modified_base 1: mod_base = OTHER; note = 2'-O-methyladenosine with phosphorothioate linkage
  modified_base 2: mod_base = OTHER; note = 2'-O-methylcytidine with phosphorothioate linkage
  modified_base 3: mod_base = OTHER; note = 2'-O-methyladenosine
  modified_base 4: mod_base = OTHER; note = 2'-O-methyluridine
  modified_base 5: mod_base = OTHER; note = 2'-O-methyluridine
  modified_base 6: mod_base = OTHER; note = 2'-O-methylcytidine
  modified_base 7: mod_base = OTHER; note = 2'-fluorouridine
  modified_base 8: mod_base = OTHER; note = 2'-O-methyluridine
  modified_base 9: mod_base = OTHER; note = 2'-fluoroadenosine
  modified_base 10: mod_base = OTHER; note = 2'-fluorouridine
  modified_base 11: mod_base = OTHER; note = 2'-fluorouridine
  modified_base 12: mod_base = OTHER; note = 2'-O-methyluridine
  modified_base 13: mod_base = OTHER; note = 2'-O-methyluridine
  modified_base 14: mod_base = OTHER; note = 2'-O-methyluridine
  modified_base 15: mod_base = OTHER; note = 2'-O-methyladenosine
  modified_base 16: mod_base = OTHER; note = 2'-O-methyluridine
  modified_base 17: mod_base = OTHER; note = 2'-O-methylcytidine
  modified_base 18: mod_base = OTHER; note = 2'-O-methylguanosine
  modified_base 19: mod_base = OTHER; note = 2'-O-methyladenosine with phosphorothioate linkage
  modified_base 20: mod_base = OTHER; note = 2'-O-methylguanosine with phosphorothioate linkage
  modified_base 21: mod_base = OTHER; note = 2'-O-methyladenosine
acattcttatttttatcgaga

SEQ ID NO: 2349 - RNA, 21 nt, synthetic construct
  source 1..21: mol_type = other RNA
  modified_base 1: mod_base = OTHER; note = 2'-O-methylguanosine with phosphorothioate linkage
  modified_base 2: mod_base = OTHER; note = 2'-O-methylcytidine with phosphorothioate linkage
  modified_base 3: mod_base = OTHER; note = 2'-O-methyladenosine
  modified_base 4: mod_base = OTHER; note = 2'-O-methyladenosine
  modified_base 5: mod_base = OTHER; note = 2'-O-methyladenosine
  modified_base 6: mod_base = OTHER; note = 2'-O-methylcytidine
  modified_base 7: mod_base = OTHER; note = 2'-fluoroadenosine
  modified_base 8: mod_base = OTHER; note = 2'-O-methylguanosine
  modified_base 9: mod_base = OTHER; note = 2'-fluorocytidine
  modified_base 10: mod_base = OTHER; note = 2'-fluorocytidine
  modified_base 11: mod_base = OTHER; note = 2'-fluoroadenosine
  modified_base 12: mod_base = OTHER; note = 2'-O-methyluridine
  modified_base 13: mod_base = OTHER; note = 2'-O-methyluridine
  modified_base 14: mod_base = OTHER; note = 2'-O-methylcytidine
  modified_base 15: mod_base = OTHER; note = 2'-O-methyladenosine
  modified_base 16: mod_base = OTHER; note = 2'-fluorocytidine
  modified_base 17: mod_base = OTHER; note = 2'-fluorocytidine
  modified_base 18: mod_base = OTHER; note = 2'-O-methyladenosine
  misc_difference 19: note = Any nucleotide (a, g, c, u, t) modified or unmodified with phosphorothioate linkage
  modified_base 20: mod_base = OTHER; note = 2'-O-methyluridine with phosphorothioate linkage
  modified_base 21: mod_base = OTHER; note = 2'-O-methyluridine
gcaaacagccattcaccantt

SEQ ID NO: 2350 - RNA, 21 nt, synthetic construct
  source 1..21: mol_type = other RNA
  modified_base 1: mod_base = OTHER; note = 2'-O-methyladenosine with phosphorothioate linkage
  modified_base 2: mod_base = OTHER; note = 2'-O-methyluridine with phosphorothioate linkage
  modified_base 3: mod_base = OTHER; note = 2'-O-methylguanosine
  modified_base 4: mod_base = OTHER; note = 2'-O-methyluridine
  modified_base 5: mod_base = OTHER; note = 2'-O-methyladenosine
  modified_base 6: mod_base = OTHER; note = 2'-O-methylcytidine
  modified_base 7: mod_base = OTHER; note = 2'-fluoroadenosine
  modified_base 8: mod_base = OTHER; note = 2'-O-methyladenosine
  modified_base 9: mod_base = OTHER; note = 2'-fluorocytidine
  modified_base 10: mod_base = OTHER; note = 2'-fluorouridine
  modified_base 11: mod_base = OTHER; note = 2'-fluorouridine
  modified_base 12: mod_base = OTHER; note = 2'-O-methylguanosine
  modified_base 13: mod_base = OTHER; note = 2'-O-methylcytidine
  modified_base 14: mod_base = OTHER; note = 2'-O-methyladenosine
  modified_base 15: mod_base = OTHER; note = 2'-O-methyladenosine
  modified_base 16: mod_base = OTHER; note = 2'-fluoroadenosine
  modified_base 17: mod_base = OTHER; note = 2'-fluorocytidine
  modified_base 18: mod_base = OTHER; note = 2'-O-methyladenosine
  misc_difference 19: note = Any nucleotide (a, g, c, u, t) modified or unmodified with phosphorothioate linkage
  modified_base 20: mod_base = OTHER; note = 2'-O-methylcytidine with phosphorothioate linkage
  modified_base 21: mod_base = OTHER; note = 2'-O-methyladenosine
atgtacaacttgcaaacanca

SEQ ID NO: 2351 - RNA, 21 nt, synthetic construct
  source 1..21: mol_type = other RNA
  modified_base 1: mod_base = OTHER; note = 2'-O-methyladenosine with phosphorothioate linkage
  modified_base 2: mod_base = OTHER; note = 2'-O-methyladenosine with phosphorothioate linkage
  modified_base 3: mod_base = OTHER; note = 2'-O-methylcytidine
  modified_base 4: mod_base = OTHER; note = 2'-O-methyladenosine
  modified_base 5: mod_base = OTHER; note = 2'-O-methylcytidine
  modified_base 6: mod_base = OTHER; note = 2'-O-methylguanosine
  modified_base 7: mod_base = OTHER; note = 2'-fluorocytidine
  modified_base 8: mod_base = OTHER; note = 2'-O-methyladenosine
  modified_base 9: mod_base = OTHER; note = 2'-fluorocytidine
  modified_base 10: mod_base = OTHER; note = 2'-fluoroadenosine
  modified_base 11: mod_base = OTHER; note = 2'-fluoroguanosine
  modified_base 12: mod_base = OTHER; note = 2'-O-methyladenosine
  modified_base 13: mod_base = OTHER; note = 2'-O-methyladenosine
  modified_base 14: mod_base = OTHER; note = 2'-O-methylcytidine
  modified_base 15: mod_base = OTHER; note = 2'-O-methyladenosine
  modified_base 16: mod_base = OTHER; note = 2'-fluorocytidine
  modified_base 17: mod_base = OTHER; note = 2'-fluorouridine
  modified_base 18: mod_base = OTHER; note = 2'-O-methylcytidine
  modified_base 19: mod_base = OTHER; note = 2'-O-methyladenosine with phosphorothioate linkage
  modified_base 20: mod_base = OTHER; note = 2'-O-methyluridine with phosphorothioate linkage
  modified_base 21: mod_base = OTHER; note = 2'-O-methyluridine
aacacgcacagaacactcatt

SEQ ID NO: 2352 - RNA, 21 nt, synthetic construct
  source 1..21: mol_type = other RNA
  modified_base 1: mod_base = OTHER; note = 2'-O-methylguanosine with phosphorothioate linkage
  modified_base 2: mod_base = OTHER; note = 2'-O-methylcytidine with phosphorothioate linkage
  modified_base 3: mod_base = OTHER; note = 2'-O-methyluridine
  modified_base 4: mod_base = OTHER; note = 2'-O-methyladenosine
  modified_base 5: mod_base = OTHER; note = 2'-O-methylcytidine
  modified_base 6: mod_base = OTHER; note = 2'-O-methyladenosine
  modified_base 7: mod_base = OTHER; note = 2'-fluorocytidine
  modified_base 8: mod_base = OTHER; note = 2'-O-methyladenosine
  modified_base 9: mod_base = OTHER; note = 2'-fluorouridine
  modified_base 10: mod_base = OTHER; note = 2'-fluoroguanosine
  modified_base 11: mod_base = OTHER; note = 2'-fluorouridine
  modified_base 12: mod_base = OTHER; note = 2'-O-methyladenosine
  modified_base 13: mod_base = OTHER; note = 2'-O-methylcytidine
  modified_base 14: mod_base = OTHER; note = 2'-O-methyladenosine
  modified_base 15: mod_base = OTHER; note = 2'-O-methyladenosine
  modified_base 16: mod_base = OTHER; note = 2'-fluorocytidine
  modified_base 17: mod_base = OTHER; note = 2'-fluorouridine
  modified_base 18: mod_base = OTHER; note = 2'-O-methyluridine
  modified_base 19: mod_base = OTHER; note = 2'-O-methylguanosine with phosphorothioate linkage
  modified_base 20: mod_base = OTHER; note = 2'-O-methylcytidine with phosphorothioate linkage
  modified_base 21: mod_base = OTHER; note = 2'-O-methyladenosine
gctacacatgtacaacttgca

SEQ ID NO: 2353 - RNA, 21 nt, synthetic construct
  source 1..21: mol_type = other RNA
  modified_base 1: mod_base = OTHER; note = 2'-O-methylcytidine with phosphorothioate linkage
  modified_base 2: mod_base = OTHER; note = 2'-O-methyladenosine with phosphorothioate linkage
  modified_base 3: mod_base = OTHER; note = 2'-O-methylcytidine
  modified_base 4: mod_base = OTHER; note = 2'-O-methyladenosine
  modified_base 5: mod_base = OTHER; note = 2'-O-methyluridine
  modified_base 6: mod_base = OTHER; note = 2'-O-methylguanosine
  modified_base 7: mod_base = OTHER; note = 2'-fluorouridine
  modified_base 8: mod_base = OTHER; note = 2'-O-methyladenosine
  modified_base 9: mod_base = OTHER; note = 2'-fluorocytidine
  modified_base 10: mod_base = OTHER; note = 2'-fluoroadenosine
  modified_base 11: mod_base = OTHER; note = 2'-fluoroadenosine
  modified_base 12: mod_base = OTHER; note = 2'-O-methylcytidine
  modified_base 13: mod_base = OTHER; note = 2'-O-methyluridine
  modified_base 14: mod_base = OTHER; note = 2'-O-methyluridine
  modified_base 15: mod_base = OTHER; note = 2'-O-methylguanosine
  modified_base 16: mod_base = OTHER; note = 2'-O-methylcytidine
  modified_base 17: mod_base = OTHER; note = 2'-O-methyladenosine
  modified_base 18: mod_base = OTHER; note = 2'-O-methyladenosine
  modified_base 19: mod_base = OTHER; note = 2'-O-methyladenosine with phosphorothioate linkage
  modified_base 20: mod_base = OTHER; note = 2'-O-methylcytidine with phosphorothioate linkage
  modified_base 21: mod_base = OTHER; note = 2'-O-methyladenosine
cacatgtacaacttgcaaaca

SEQ ID NO: 2354 - RNA, 21 nt, synthetic construct
  source 1..21: mol_type = other RNA
  modified_base 1: mod_base = OTHER; note = 2'-O-methyladenosine with phosphorothioate linkage
  modified_base 2: mod_base = OTHER; note = 2'-O-methylcytidine with phosphorothioate linkage
  modified_base 3: mod_base = OTHER; note = 2'-O-methyluridine
  modified_base 4: mod_base = OTHER; note = 2'-O-methyluridine
  modified_base 5: mod_base = OTHER; note = 2'-O-methylguanosine
  modified_base 6: mod_base = OTHER; note = 2'-O-methylcytidine
  modified_base 7: mod_base = OTHER; note = 2'-fluoroadenosine
  modified_base 8: mod_base = OTHER; note = 2'-O-methyladenosine
  modified_base 9: mod_base = OTHER; note = 2'-fluoroadenosine
  modified_base 10: mod_base = OTHER; note = 2'-fluorocytidine
  modified_base 11: mod_base = OTHER; note = 2'-fluoroadenosine
  modified_base 12: mod_base = OTHER; note = 2'-O-methylguanosine
  modified_base 13: mod_base = OTHER; note = 2'-O-methylcytidine
  modified_base 14: mod_base = OTHER; note = 2'-O-methylcytidine
  modified_base 15: mod_base = OTHER; note = 2'-O-methyladenosine
  modified_base 16: mod_base = OTHER; note = 2'-fluorouridine
  modified_base 17: mod_base = OTHER; note = 2'-fluorouridine
  modified_base 18: mod_base = OTHER; note = 2'-O-methylcytidine
  modified_base 19: mod_base = OTHER; note = 2'-O-methyladenosine with phosphorothioate linkage
  modified_base 20: mod_base = OTHER; note = 2'-O-methylcytidine with phosphorothioate linkage
  modified_base 21: mod_base = OTHER; note = 2'-O-methyladenosine
acttgcaaacagccattcaca

SEQ ID NO: 2355 - RNA, 21 nt, synthetic construct
  source 1..21: mol_type = other RNA
  modified_base 1: mod_base = OTHER; note = 2'-O-methylcytidine with phosphorothioate linkage
  modified_base 2: mod_base = OTHER; note = 2'-O-methylguanosine with phosphorothioate linkage
  modified_base 3: mod_base = OTHER; note = 2'-O-methylcytidine
  modified_base 4: mod_base = OTHER; note = 2'-O-methyladenosine
  modified_base 5: mod_base = OTHER; note = 2'-O-methylcytidine
  modified_base 6: mod_base = OTHER; note = 2'-O-methyladenosine
  modified_base 7: mod_base = OTHER; note = 2'-fluoroguanosine
  modified_base 8: mod_base = OTHER; note = 2'-O-methyladenosine
  modified_base 9: mod_base = OTHER; note = 2'-fluoroadenosine
  modified_base 10: mod_base = OTHER; note = 2'-fluorocytidine
  modified_base 11: mod_base = OTHER; note = 2'-fluoroadenosine
  modified_base 12: mod_base = OTHER; note = 2'-O-methylcytidine
  modified_base 13: mod_base = OTHER; note = 2'-O-methyluridine
  modified_base 14: mod_base = OTHER; note = 2'-O-methylcytidine
  modified_base 15: mod_base = OTHER; note = 2'-O-methyladenosine
  modified_base 16: mod_base = OTHER; note = 2'-O-methyluridine
  modified_base 17: mod_base = OTHER; note = 2'-O-methylguanosine
  modified_base 18: mod_base = OTHER; note = 2'-O-methylguanosine
  modified_base 19: mod_base = OTHER; note = 2'-O-methyladenosine with phosphorothioate linkage
  modified_base 20: mod_base = OTHER; note = 2'-O-methyluridine with phosphorothioate linkage
  modified_base 21: mod_base = OTHER; note = 2'-O-methyladenosine
cgcacagaacactcatggata

SEQ ID NO: 2356 - RNA, 21 nt, synthetic construct
  source 1..21: mol_type = other RNA
  modified_base 1: mod_base = OTHER; note = 2'-O-methyladenosine with phosphorothioate linkage
  modified_base 2: mod_base = OTHER; note = 2'-O-methyluridine with phosphorothioate linkage
  modified_base 3: mod_base = OTHER; note = 2'-O-methyluridine
  modified_base 4: mod_base = OTHER; note = 2'-O-methylcytidine
  modified_base 5: mod_base = OTHER; note = 2'-O-methyluridine
  modified_base 6: mod_base = OTHER; note = 2'-O-methyluridine
  modified_base 7: mod_base = OTHER; note = 2'-fluoroadenosine
  modified_base 8: mod_base = OTHER; note = 2'-O-methyluridine
  modified_base 9: mod_base = OTHER; note = 2'-fluorouridine
  modified_base 10: mod_base = OTHER; note = 2'-fluorouridine
  modified_base 11: mod_base = OTHER; note = 2'-fluorouridine
  modified_base 12: mod_base = OTHER; note = 2'-O-methyluridine
  modified_base 13: mod_base = OTHER; note = 2'-O-methyladenosine
  modified_base 14: mod_base = OTHER; note = 2'-O-methyluridine
  modified_base 15: mod_base = OTHER; note = 2'-O-methylcytidine
  modified_base 16: mod_base = OTHER; note = 2'-O-methylguanosine
  modified_base 17: mod_base = OTHER; note = 2'-O-methyladenosine
  modified_base 18: mod_base = OTHER; note = 2'-O-methylguanosine
  modified_base 19: mod_base = OTHER; note = 2'-O-methylcytidine with phosphorothioate linkage
  modified_base 20: mod_base = OTHER; note = 2'-O-methyladenosine with phosphorothioate linkage
  modified_base 21: mod_base = OTHER; note = 2'-O-methyladenosine
attcttatttttatcgagcaa

SEQ ID NO: 2357 - RNA, 21 nt, synthetic construct
  source 1..21: mol_type = other RNA
  modified_base 1: mod_base = OTHER; note = 2'-O-methyladenosine with phosphorothioate linkage
  modified_base 2: mod_base = OTHER; note = 2'-O-methylguanosine with phosphorothioate linkage
  modified_base 3: mod_base = OTHER; note = 2'-O-methyluridine
  modified_base 4: mod_base = OTHER; note = 2'-O-methylguanosine
  modified_base 5: mod_base = OTHER; note = 2'-O-methylcytidine
  modified_base 6: mod_base = OTHER; note = 2'-O-methyladenosine
  modified_base 7: mod_base = OTHER; note = 2'-fluorouridine
  modified_base 8: mod_base = OTHER; note = 2'-O-methylguanosine
  modified_base 9: mod_base = OTHER; note = 2'-fluoroguanosine
  modified_base 10: mod_base = OTHER; note = 2'-fluorouridine
  modified_base 11: mod_base = OTHER; note = 2'-fluorouridine
  modified_base 12: mod_base = OTHER; note = 2'-O-methyluridine
  modified_base 13: mod_base = OTHER; note = 2'-O-methylcytidine
  modified_base 14: mod_base = OTHER; note = 2'-O-methyluridine
  modified_base 15: mod_base = OTHER; note = 2'-O-methylcytidine
  modified_base 16: mod_base = OTHER; note = 2'-fluorouridine
  modified_base 17: mod_base = OTHER; note = 2'-fluorouridine
  misc_difference 18: note = Any nucleotide (a, g, c, u, t) modified or unmodified
  modified_base 19: mod_base = OTHER; note = 2'-O-methylcytidine with phosphorothioate linkage
  modified_base 20: mod_base = OTHER; note = 2'-O-methyladenosine with phosphorothioate linkage
  modified_base 21: mod_base = OTHER; note = 2'-O-methyladenosine
agtgcatggtttctcttncaa

SEQ ID NO: 2358 - RNA, 21 nt, synthetic construct
  source 1..21: mol_type = other RNA
  modified_base 1: mod_base = OTHER; note = 2'-O-methyluridine with phosphorothioate linkage
  modified_base 2: mod_base = OTHER; note = 2'-O-methylcytidine with phosphorothioate linkage
  modified_base 3: mod_base = OTHER; note = 2'-O-methyladenosine
  modified_base 4: mod_base = OTHER; note = 2'-O-methyluridine
  modified_base 5: mod_base = OTHER; note = 2'-O-methylcytidine
  modified_base 6: mod_base = OTHER; note = 2'-O-methyluridine
  modified_base 7: mod_base = OTHER; note = 2'-fluoroadenosine
  modified_base 8: mod_base = OTHER; note = 2'-O-methylguanosine
  modified_base 9: mod_base = OTHER; note = 2'-fluoroadenosine
  modified_base 10: mod_base = OTHER; note = 2'-fluoroguanosine
  modified_base 11: mod_base = OTHER; note = 2'-fluoroguanosine
  modified_base 12: mod_base = OTHER; note = 2'-O-methyladenosine
  modified_base 13: mod_base = OTHER; note = 2'-O-methyladenosine
  modified_base 14: mod_base = OTHER; note = 2'-O-methyluridine
  modified_base 15: mod_base = OTHER; note = 2'-O-methyluridine
  modified_base 16: mod_base = OTHER; note = 2'-O-methyluridine
  modified_base 17: mod_base = OTHER; note = 2'-O-methylguanosine
  modified_base 18: mod_base = OTHER; note = 2'-O-methylcytidine
  modified_base 19: mod_base = OTHER; note = 2'-O-methylcytidine with phosphorothioate linkage
  modified_base 20: mod_base = OTHER; note = 2'-O-methylcytidine with phosphorothioate linkage
  modified_base 21: mod_base = OTHER; note = 2'-O-methyladenosine
tcatctagaggaatttgccca

SEQ ID NO: 2359 - RNA, 21 nt, synthetic construct
  source 1..21: mol_type = other RNA
  modified_base 1: mod_base = OTHER; note = 2'-O-methylguanosine with phosphorothioate linkage
  modified_base 2: mod_base = OTHER; note = 2'-O-methylguanosine with phosphorothioate linkage
  modified_base 3: mod_base = OTHER; note = 2'-O-methylcytidine
  modified_base 4: mod_base = OTHER; note = 2'-O-methylguanosine
  modified_base 5: mod_base = OTHER; note = 2'-O-methyladenosine
  modified_base 6: mod_base = OTHER; note = 2'-O-methylguanosine
  modified_base 7: mod_base = OTHER; note = 2'-fluoroadenosine
  modified_base 8: mod_base = OTHER; note = 2'-O-methyladenosine
  modified_base 9: mod_base = OTHER; note = 2'-fluoroguanosine
  modified_base 10: mod_base = OTHER; note = 2'-fluorocytidine
  modified_base 11: mod_base = OTHER; note = 2'-fluoroadenosine
  modified_base 12: mod_base = OTHER; note = 2'-O-methyluridine
  modified_base 13: mod_base = OTHER; note = 2'-O-methyladenosine
  modified_base 14: mod_base = OTHER; note = 2'-O-methyladenosine
  modified_base 15: mod_base = OTHER; note = 2'-O-methylguanosine
  modified_base 16: mod_base = OTHER; note = 2'-O-methylcytidine
  modified_base 17: mod_base = OTHER; note = 2'-O-methylguanosine
  modified_base 18: mod_base = OTHER; note = 2'-O-methylcytidine
  modified_base 19: mod_base = OTHER; note = 2'-O-methylguanosine with phosphorothioate linkage
  modified_base 20: mod_base = OTHER; note = 2'-O-methylguanosine with phosphorothioate linkage
  modified_base 21: mod_base = OTHER; note = 2'-O-methyladenosine
ggcgagaagcataagcgcgga

SEQ ID NO: 2360 - RNA, 21 nt, synthetic construct
  source 1..21: mol_type = other RNA
  modified_base 1: mod_base = OTHER; note = 2'-O-methylguanosine with phosphorothioate linkage
  modified_base 2: mod_base = OTHER; note = 2'-O-methyluridine with phosphorothioate linkage
  modified_base 3: mod_base = OTHER; note = 2'-O-methyladenosine
  modified_base 4: mod_base = OTHER; note = 2'-O-methyladenosine
  modified_base 5: mod_base = OTHER; note = 2'-O-methylguanosine
  modified_base 6: mod_base = OTHER; note = 2'-O-methyladenosine
  modified_base 7: mod_base = OTHER; note = 2'-fluorouridine
  modified_base 8: mod_base = OTHER; note = 2'-O-methylguanosine
  modified_base 9: mod_base = OTHER; note = 2'-fluorocytidine
  modified_base 10: mod_base = OTHER; note = 2'-fluorocytidine
  modified_base 11: mod_base = OTHER; note = 2'-fluorouridine
  modified_base 12: mod_base = OTHER; note = 2'-O-methyluridine
  modified_base 13: mod_base = OTHER; note = 2'-O-methyluridine
  modified_base 14: mod_base = OTHER; note = 2'-O-methyluridine
  modified_base 15: mod_base = OTHER; note = 2'-O-methyladenosine
  modified_base 16: mod_base = OTHER; note = 2'-O-methylguanosine
  modified_base 17: mod_base = OTHER; note = 2'-O-methylcytidine
  modified_base 18: mod_base = OTHER; note = 2'-O-methylguanosine
  modified_base 19: mod_base = OTHER; note = 2'-O-methyluridine with phosphorothioate linkage
  modified_base 20: mod_base = OTHER; note = 2'-O-methylguanosine with phosphorothioate linkage
  modified_base 21: mod_base = OTHER; note = 2'-O-methyladenosine
gtaagatgccttttagcgtga

SEQ ID NO: 2361 - RNA, 21 nt, synthetic construct
  source 1..21: mol_type = other RNA
  modified_base 1: mod_base = OTHER; note = 2'-O-methylguanosine with phosphorothioate linkage
  modified_base 2: mod_base = OTHER; note = 2'-O-methylguanosine with phosphorothioate linkage
  modified_base 3: mod_base = OTHER; note = 2'-O-methylguanosine
  modified_base 4: mod_base = OTHER; note = 2'-O-methyladenosine
  modified_base 5: mod_base = OTHER; note = 2'-O-methyluridine
  modified_base 6: mod_base = OTHER; note = 2'-O-methyluridine
  modified_base 7: mod_base = OTHER; note = 2'-fluorocytidine
  modified_base 8: mod_base = OTHER; note = 2'-O-methyladenosine
  modified_base 9: mod_base = OTHER; note = 2'-fluorouridine
  modified_base 10: mod_base = OTHER; note = 2'-fluoroadenosine
  modified_base 11: mod_base = OTHER; note = 2'-fluorouridine
  modified_base 12: mod_base = OTHER; note = 2'-O-methyluridine
  modified_base 13: mod_base = OTHER; note = 2'-O-methylguanosine
  modified_base 14: mod_base = OTHER; note = 2'-O-methylcytidine
  modified_base 15: mod_base = OTHER; note = 2'-O-methyladenosine
  modified_base 16: mod_base = OTHER; note = 2'-fluoroguanosine
  modified_base 17: mod_base = OTHER; note = 2'-fluoroadenosine
  modified_base 18: mod_base = OTHER; note = 2'-O-methylcytidine
  modified_base 19: mod_base = OTHER; note = 2'-O-methyladenosine with phosphorothioate linkage
  modified_base 20: mod_base = OTHER; note = 2'-O-methyladenosine with phosphorothioate linkage
  modified_base 21: mod_base = OTHER; note = 2'-O-methyluridine
gggattcatattgcagacaat

SEQ ID NO: 2362 - RNA, 21 nt, synthetic construct
  source 1..21: mol_type = other RNA
  modified_base 1: mod_base = OTHER; note = 2'-O-methyladenosine with phosphorothioate linkage
  modified_base 2: mod_base = OTHER; note = 2'-O-methyluridine with phosphorothioate linkage
  modified_base 3: mod_base = OTHER; note = 2'-fluorouridine
  modified_base 4: mod_base = OTHER; note = 2'-O-methyladenosine
  modified_base 5: mod_base = OTHER; note = 2'-fluoroadenosine
  modified_base 6: mod_base = OTHER; note = 2'-O-methylguanosine
  modified_base 7: mod_base = OTHER; note = 2'-fluoroadenosine
  modified_base 8: mod_base = OTHER; note = 2'-O-methyladenosine
  modified_base 9: mod_base = OTHER; note = 2'-fluorouridine
  modified_base 10: mod_base = OTHER; note = 2'-O-methylcytidine
  modified_base 11: mod_base = OTHER; note = 2'-fluorouridine
  modified_base 12: mod_base = OTHER; note = 2'-O-methyladenosine
  modified_base 13: mod_base = OTHER; note = 2'-fluorocytidine
  modified_base 14: mod_base = OTHER; note = 2'-O-methyluridine
  modified_base 15: mod_base = OTHER; note = 2'-fluorouridine
  modified_base 16: mod_base = OTHER; note = 2'-O-methyladenosine
  modified_base 17: mod_base = OTHER; note = 2'-fluoroguanosine
  modified_base 18: mod_base = OTHER; note = 2'-O-methyladenosine
  modified_base 19: mod_base = OTHER; note = 2'-fluoroadenosine with phosphorothioate linkage
  modified_base 20: mod_base = OTHER; note = 2'-O-methyladenosine with phosphorothioate linkage
  modified_base 21: mod_base = OTHER; note = 2'-O-methylguanosine
attaagaatctacttagaaag

SEQ ID NO: 2363 - RNA, 21 nt, synthetic construct
  source 1..21: mol_type = other RNA
  modified_base 1: mod_base = OTHER; note = 2'-O-methylguanosine with phosphorothioate linkage
  modified_base 2: mod_base = OTHER; note = 2'-O-methyladenosine with phosphorothioate linkage
  modified_base 3: mod_base = OTHER; note = 2'-fluoroadenosine
  modified_base 4: mod_base = OTHER; note = 2'-O-methylguanosine
  modified_base 5: mod_base = OTHER; note = 2'-fluoroguanosine
  modified_base 6: mod_base = OTHER; note = 2'-O-methyladenosine
  modified_base 7: mod_base = OTHER; note = 2'-fluorocytidine
  modified_base 8: mod_base = OTHER; note = 2'-O-methylguanosine
  modified_base 9: mod_base = OTHER; note = 2'-fluorouridine
  modified_base 10: mod_base = OTHER; note = 2'-O-methyluridine
  modified_base 11: mod_base = OTHER; note = 2'-fluorouridine
  modified_base 12: mod_base = OTHER; note = 2'-O-methyladenosine
  modified_base 13: mod_base = OTHER; note = 2'-fluorocytidine
  modified_base 14: mod_base = OTHER; note = 2'-O-methyladenosine
  modified_base 15: mod_base = OTHER; note = 2'-fluoroadenosine
  modified_base 16: mod_base = OTHER; note = 2'-O-methyladenosine
  modified_base 17: mod_base = OTHER; note = 2'-fluorouridine
  modified_base 18: mod_base = OTHER; note = 2'-O-methylguanosine
  modified_base 19: mod_base = OTHER; note = 2'-fluorouridine with phosphorothioate linkage
  modified_base 20: mod_base = OTHER; note = 2'-O-methylguanosine with phosphorothioate linkage
  modified_base 21: mod_base = OTHER; note = 2'-O-methyladenosine
gaaggacgtttacaaatgtga

SEQ ID NO: 2364 - RNA, 21 nt, synthetic construct
  source 1..21: mol_type = other RNA
  modified_base 1: mod_base = OTHER; note = 2'-O-methylguanosine with phosphorothioate linkage
  modified_base 2: mod_base = OTHER; note = 2'-O-methylcytidine with phosphorothioate linkage
  modified_base 3: mod_base = OTHER; note = 2'-fluoroadenosine
  modified_base 4: mod_base = OTHER; note = 2'-O-methylcytidine
  modified_base 5: mod_base = OTHER; note = 2'-fluoroadenosine
  modified_base 6: mod_base = OTHER; note = 2'-O-methylguanosine
  modified_base 7: mod_base = OTHER; note = 2'-fluoroadenosine
  modified_base 8: mod_base = OTHER; note = 2'-O-methyladenosine
  modified_base 9: mod_base = OTHER; note = 2'-fluorocytidine
  modified_base 10: mod_base = OTHER; note = 2'-O-methyladenosine
  modified_base 11: mod_base = OTHER; note = 2'-fluorocytidine
  modified_base 12: mod_base = OTHER; note = 2'-O-methyluridine
  modified_base 13: mod_base = OTHER; note = 2'-fluorocytidine
  modified_base 14: mod_base = OTHER; note = 2'-O-methyladenosine
  modified_base 15: mod_base = OTHER; note = 2'-fluorouridine
  modified_base 16: mod_base = OTHER; note = 2'-O-methylguanosine
  modified_base 17: mod_base = OTHER; note = 2'-fluoroguanosine
  modified_base 18: mod_base = OTHER; note = 2'-O-methyladenosine
  modified_base 19: mod_base = OTHER; note = 2'-fluorouridine with phosphorothioate linkage
  modified_base 20: mod_base = OTHER; note = 2'-O-methyluridine with phosphorothioate linkage
  modified_base 21: mod_base = OTHER; note = 2'-O-methyladenosine
gcacagaacactcatggatta

SEQ ID NO: 2365 - RNA, 21 nt, synthetic construct
  source 1..21: mol_type = other RNA
  modified_base 1: mod_base = OTHER; note = 2'-O-methylguanosine with phosphorothioate linkage
  modified_base 2: mod_base = OTHER; note = 2'-O-methylguanosine with phosphorothioate linkage
  modified_base 3: mod_base = OTHER; note = 2'-fluoroadenosine
  modified_base 4: mod_base = OTHER; note = 2'-O-methylcytidine
  modified_base 5: mod_base = OTHER; note = 2'-fluorouridine
  modified_base 6: mod_base = OTHER; note = 2'-O-methyladenosine
  modified_base 7: mod_base = OTHER; note = 2'-fluoroguanosine
  modified_base 8: mod_base = OTHER; note = 2'-O-methylguanosine
  modified_base 9: mod_base = OTHER; note = 2'-fluorouridine
  modified_base 10: mod_base = OTHER; note = 2'-O-methylguanosine
  modified_base 11: mod_base = OTHER; note = 2'-fluorocytidine
  modified_base 12: mod_base = OTHER; note = 2'-O-methyladenosine
  modified_base 13: mod_base = OTHER; note = 2'-fluoroguanosine
  modified_base 14: mod_base = OTHER; note = 2'-O-methyladenosine
  modified_base 15: mod_base = OTHER; note = 2'-fluoroadenosine
  modified_base 16: mod_base = OTHER; note = 2'-O-methyluridine
  modified_base 17: mod_base = OTHER; note = 2'-fluoroguanosine
  modified_base 18: mod_base = OTHER; note = 2'-O-methyluridine
  modified_base 19: mod_base = OTHER; note = 2'-fluorocytidine with phosphorothioate linkage
  modified_base 20: mod_base = OTHER; note = 2'-O-methylcytidine with phosphorothioate linkage
  modified_base 21: mod_base = OTHER; note = 2'-O-methyluridine
ggactaggtgcagaatgtcct

SEQ ID NO: 2366 - RNA, 21 nt, synthetic construct
  source 1..21: mol_type = other RNA
  modified_base 1: mod_base = OTHER; note = 2'-O-methylguanosine with phosphorothioate linkage
  modified_base 2: mod_base = OTHER; note = 2'-O-methyluridine with phosphorothioate linkage
  modified_base 3: mod_base = OTHER; note = 2'-fluoroguanosine
  modified_base 4: mod_base = OTHER; note = 2'-O-methyladenosine
  modified_base 5: mod_base = OTHER; note = 2'-fluoroadenosine
  modified_base 6: mod_base = OTHER; note = 2'-O-methyladenosine
  modified_base 7: mod_base = OTHER; note = 2'-fluorouridine
  modified_base 8: mod_base = OTHER; note = 2'-O-methyluridine
  modified_base 9: mod_base = OTHER; note = 2'-fluorouridine
  modified_base 10: mod_base = OTHER; note = 2'-O-methylguanosine
  modified_base 11: mod_base = OTHER; note = 2'-fluorouridine
  modified_base 12: mod_base = OTHER; note = 2'-O-methyladenosine
  modified_base 13: mod_base = OTHER; note = 2'-fluoroadenosine
  modified_base 14: mod_base = OTHER; note = 2'-O-methylguanosine
  modified_base 15: mod_base = OTHER; note = 2'-fluoroadenosine
  modified_base 16: mod_base = OTHER; note = 2'-O-methyluridine
  modified_base 17: mod_base = OTHER; note = 2'-fluoroguanosine
  modified_base 18: mod_base = OTHER; note = 2'-O-methylcytidine
  modified_base 19: mod_base = OTHER; note = 2'-fluorocytidine with phosphorothioate linkage
  modified_base 20: mod_base = OTHER; note = 2'-O-methyluridine with phosphorothioate linkage
  modified_base 21: mod_base = OTHER; note = 2'-O-methyluridine
gtgaaatttgtaagatgcctt

SEQ ID NO: 2367 - RNA, 21 nt, synthetic construct
  source 1..21: mol_type = other RNA
  modified_base 1: mod_base = OTHER; note = 2'-O-methyladenosine with phosphorothioate linkage
  modified_base 2: mod_base = OTHER; note = 2'-O-methylcytidine with phosphorothioate linkage
  modified_base 3: mod_base = OTHER; note = 2'-fluoroguanosine
  modified_base 4: mod_base = OTHER; note = 2'-O-methyluridine
  modified_base 5: mod_base = OTHER; note = 2'-fluorouridine
  modified_base 6: mod_base = OTHER; note = 2'-O-methylcytidine
  modified_base 7: mod_base = OTHER; note = 2'-fluoroadenosine
  modified_base 8: mod_base = OTHER; note = 2'-O-methyladenosine
  modified_base 9: mod_base = OTHER; note = 2'-fluoroadenosine
  modified_base 10: mod_base = OTHER; note = 2'-O-methyluridine
  modified_base 11: mod_base = OTHER; note = 2'-fluorouridine
  modified_base 12: mod_base = OTHER; note = 2'-O-methyluridine
  modified_base 13: mod_base = OTHER; note = 2'-fluorocytidine
  modified_base 14: mod_base = OTHER; note = 2'-O-methyladenosine
  modified_base 15: mod_base = OTHER; note = 2'-fluoroguanosine
  modified_base 16: mod_base = OTHER; note = 2'-O-methyladenosine
  modified_base 17: mod_base = OTHER; note = 2'-fluoroguanosine
  modified_base 18: mod_base = OTHER; note = 2'-O-methylcytidine
  modified_base 19: mod_base = OTHER; note = 2'-fluoroadenosine with phosphorothioate linkage
  modified_base 20: mod_base = OTHER; note = 2'-O-methyladenosine with phosphorothioate linkage
  modified_base 21: mod_base = OTHER; note = 2'-O-methylcytidine
acgttcaaatttcagagcaac

SEQ ID NO: 2368 - RNA, 21 nt, synthetic construct
  source 1..21: mol_type = other RNA
  modified_base 1: mod_base = OTHER; note = 2'-O-methylcytidine with phosphorothioate linkage
  modified_base 2: mod_base = OTHER; note = 2'-O-methyladenosine with phosphorothioate linkage
  modified_base 3: mod_base = OTHER; note = 2'-fluorocytidine
  modified_base 4: mod_base = OTHER; note = 2'-O-methyluridine
  modified_base 5: mod_base = OTHER; note = 2'-fluorocytidine
  modified_base 6: mod_base = OTHER; note = 2'-O-methyladenosine
  modified_base 7: mod_base = OTHER; note = 2'-fluorouridine
  modified_base 8: mod_base = OTHER; note = 2'-O-methylguanosine
  modified_base 9: mod_base = OTHER; note = 2'-fluoroguanosine
  modified_base 10: mod_base = OTHER; note = 2'-O-methyladenosine
  modified_base 11: mod_base = OTHER; note = 2'-fluorouridine
  modified_base 12: mod_base = OTHER; note = 2'-O-methyluridine
  modified_base 13: mod_base = OTHER; note = 2'-fluoroadenosine
  modified_base 14: mod_base = OTHER; note = 2'-O-methyladenosine
  modified_base 15: mod_base = OTHER; note = 2'-fluoroguanosine
  modified_base 16: mod_base = OTHER; note = 2'-O-methyladenosine
  modified_base 17: mod_base = OTHER; note = 2'-fluoroadenosine
  modified_base 18: mod_base = OTHER; note = 2'-O-methyluridine
  modified_base 19: mod_base = OTHER; note = 2'-fluorocytidine with phosphorothioate linkage
  modified_base 20: mod_base = OTHER; note = 2'-O-methyluridine with phosphorothioate linkage
  modified_base 21: mod_base = OTHER; note = 2'-O-methyladenosine
cactcatggattaagaatcta

SEQ ID NO: 2369 - RNA, 21 nt, synthetic construct
  source 1..21: mol_type = other RNA
  modified_base 1: mod_base = OTHER; note = 2'-O-methylcytidine with phosphorothioate linkage
  modified_base 2: mod_base = OTHER; note = 2'-O-methyladenosine with phosphorothioate linkage
  modified_base 3: mod_base = OTHER; note = 2'-fluoroadenosine
  modified_base 4: mod_base = OTHER; note = 2'-O-methylcytidine
  modified_base 5: mod_base = OTHER; note = 2'-fluoroguanosine
  modified_base 6: mod_base = OTHER; note = 2'-O-methyluridine
  modified_base 7: mod_base = OTHER; note = 2'-fluorocytidine
  modified_base 8: mod_base = OTHER; note = 2'-O-methyladenosine
  modified_base 9: mod_base = OTHER; note = 2'-fluorouridine
  modified_base 10: mod_base = OTHER; note = 2'-O-methylcytidine
  modified_base 11: mod_base = OTHER; note = 2'-fluorouridine
  modified_base 12: mod_base = OTHER; note = 2'-O-methyladenosine
  modified_base 13: mod_base = OTHER; note = 2'-fluoroguanosine
  modified_base 14: mod_base = OTHER; note = 2'-O-methyladenosine
  modified_base 15: mod_base = OTHER; note = 2'-fluoroguanosine
  modified_base 16: mod_base = OTHER; note = 2'-O-methylguanosine
  modified_base 17: mod_base = OTHER; note = 2'-fluoroadenosine
  modified_base 18: mod_base = OTHER; note = 2'-O-methyladenosine
  modified_base 19: mod_base = OTHER; note = 2'-fluorouridine with phosphorothioate linkage
  modified_base 20: mod_base = OTHER; note = 2'-O-methyluridine with phosphorothioate linkage
  modified_base 21: mod_base = OTHER; note = 2'-O-methyluridine
caacgtcatctagaggaattt

SEQ ID NO: 2370 - RNA, 21 nt, synthetic construct
  source 1..21: mol_type = other RNA
  modified_base 1: mod_base = OTHER; note = 2'-O-methylcytidine with phosphorothioate linkage
  modified_base 2: mod_base = OTHER; note = 2'-O-methyluridine with phosphorothioate linkage
  modified_base 3: mod_base = OTHER; note = 2'-fluorocytidine
  modified_base 4: mod_base = OTHER; note = 2'-O-methyluridine
  modified_base 5: mod_base = OTHER; note = 2'-fluoroadenosine
  modified_base 6: mod_base = OTHER; note = 2'-O-methylguanosine
  modified_base 7: mod_base = OTHER; note = 2'-fluoroguanosine
  modified_base 8: mod_base = OTHER; note = 2'-O-methyladenosine
  modified_base 9: mod_base = OTHER; note = 2'-fluoroguanosine
  modified_base 10: mod_base = OTHER; note = 2'-O-methyladenosine
  modified_base 11: mod_base = OTHER; note = 2'-fluorocytidine
  modified_base 12: mod_base = OTHER; note = 2'-O-methyluridine
  modified_base 13: mod_base = OTHER; note = 2'-fluorouridine
  modified_base 14: mod_base = OTHER; note = 2'-O-methyladenosine
  modified_base 15: mod_base = OTHER; note = 2'-fluoroguanosine
  modified_base 16: mod_base = OTHER; note = 2'-O-methyladenosine
  modified_base 17: mod_base = OTHER; note = 2'-fluoroguanosine
  modified_base 18: mod_base = OTHER; note = 2'-O-methyladenosine
  modified_base 19: mod_base = OTHER; note = 2'-fluoroguanosine with phosphorothioate linkage
  modified_base 20: mod_base = OTHER; note = 2'-O-methylcytidine with phosphorothioate linkage
  modified_base 21: mod_base = OTHER; note = 2'-O-methyluridine
ctctaggagacttagagagct

SEQ ID NO: 2371 - RNA, 21 nt, synthetic construct
  source 1..21: mol_type = other RNA
  modified_base 1: mod_base = OTHER; note = 2'-O-methyladenosine with phosphorothioate linkage
  modified_base 2: mod_base = OTHER; note = 2'-O-methylcytidine with phosphorothioate linkage
  modified_base 3: mod_base = OTHER; note = 2'-fluoroadenosine
  modified_base 4: mod_base = OTHER; note = 2'-O-methylguanosine
  modified_base 5: mod_base = OTHER; note = 2'-fluoroadenosine
  modified_base 6: mod_base = OTHER; note = 2'-O-methyladenosine
  modified_base 7: mod_base = OTHER; note = 2'-fluorocytidine
  modified_base 8: mod_base = OTHER; note = 2'-O-methyladenosine
  modified_base 9: mod_base = OTHER; note = 2'-fluorocytidine
  modified_base 10: mod_base = OTHER; note = 2'-O-methyluridine
  modified_base 11: mod_base = OTHER; note = 2'-fluorocytidine
  modified_base 12: mod_base = OTHER; note = 2'-O-methyladenosine
  modified_base 13: mod_base = OTHER; note = 2'-fluorouridine
  modified_base 14: mod_base = OTHER; note = 2'-O-methylguanosine
  modified_base 15: mod_base = OTHER; note = 2'-fluoroguanosine
  modified_base 16: mod_base = OTHER; note = 2'-O-methyladenosine
  modified_base 17: mod_base = OTHER; note = 2'-fluorouridine
  modified_base 18: mod_base = OTHER; note = 2'-O-methyluridine
  modified_base 19: mod_base = OTHER; note = 2'-fluoroadenosine with phosphorothioate linkage
  modified_base 20: mod_base = OTHER; note = 2'-O-methyladenosine with phosphorothioate linkage
  modified_base 21: mod_base = OTHER; note = 2'-O-methylguanosine
acagaacactcatggattaag

SEQ ID NO: 2372 - RNA, 21 nt, synthetic construct
  source 1..21: mol_type = other RNA
  modified_base 1: mod_base = OTHER; note = 2'-O-methylguanosine with phosphorothioate linkage
  modified_base 2: mod_base = OTHER; note = 2'-O-methylcytidine with phosphorothioate linkage
  modified_base 3: mod_base = OTHER; note = 2'-fluorouridine
  modified_base 4: mod_base = OTHER; note = 2'-O-methyluridine
  modified_base 5: mod_base = OTHER; note = 2'-fluorocytidine
  modified_base 6: mod_base = OTHER; note = 2'-O-methylguanosine
  modified_base 7: mod_base = OTHER; note = 2'-fluoroguanosine
  modified_base 8: mod_base = OTHER; note = 2'-O-methyladenosine
  modified_base 9: mod_base = OTHER; note = 2'-fluoroguanosine
  modified_base 10: mod_base = OTHER; note = 2'-O-methyladenosine
  modified_base 11: mod_base = OTHER; note = 2'-fluorocytidine
  modified_base 12: mod_base = OTHER; note = 2'-O-methyluridine
  modified_base 13: mod_base = OTHER; note = 2'-fluorocytidine
  modified_base 14: mod_base = OTHER; note = 2'-O-methylcytidine
  modified_base 15: mod_base = OTHER; note = 2'-fluoroadenosine
  modified_base 16: mod_base = OTHER; note = 2'-O-methylguanosine
  modified_base 17: mod_base = OTHER; note = 2'-fluoroadenosine
  modified_base 18: mod_base = OTHER; note = 2'-O-methylcytidine
  modified_base 19: mod_base = OTHER; note = 2'-fluoroadenosine with phosphorothioate linkage
  modified_base 20: mod_base = OTHER; note = 2'-O-methyladenosine with phosphorothioate linkage
  modified_base 21: mod_base = OTHER; note = 2'-O-methyluridine
gcttcggagactccagacaat

SEQ ID NO: 2373 - RNA, 21 nt, synthetic construct
  source 1..21: mol_type = other RNA
  modified_base 1: mod_base = OTHER; note = 2'-O-methyladenosine with phosphorothioate linkage
  modified_base 2: mod_base = OTHER; note = 2'-O-methyladenosine with phosphorothioate linkage
  modified_base 3: mod_base = OTHER; note = 2'-fluorocytidine
  modified_base 4: mod_base = OTHER; note = 2'-O-methyladenosine
  modified_base 5: mod_base = OTHER; note = 2'-fluorocytidine
  modified_base 6: mod_base = OTHER; note = 2'-O-methyluridine
  modified_base 7: mod_base = OTHER; note = 2'-fluorocytidine
  modified_base 8: mod_base = OTHER; note = 2'-O-methyladenosine
  modified_base 9: mod_base = OTHER; note = 2'-fluorouridine
  modified_base 10: mod_base = OTHER; note = 2'-O-methylguanosine
  modified_base 11: mod_base = OTHER; note = 2'-fluoroguanosine
  modified_base 12: mod_base = OTHER; note = 2'-O-methyladenosine
  modified_base 13: mod_base = OTHER; note = 2'-fluorouridine
  modified_base 14: mod_base = OTHER; note = 2'-O-methyluridine
  modified_base 15: mod_base = OTHER; note = 2'-fluoroadenosine
  modified_base 16: mod_base = OTHER; note = 2'-O-methyladenosine
  modified_base 17: mod_base = OTHER; note = 2'-fluoroguanosine
  modified_base 18: mod_base = OTHER; note = 2'-O-methyladenosine
  modified_base 19: mod_base = OTHER; note = 2'-fluoroadenosine with phosphorothioate linkage
  modified_base 20: mod_base = OTHER; note = 2'-O-methyluridine with phosphorothioate linkage
  modified_base 21: mod_base = OTHER; note = 2'-O-methylcytidine
aacactcatggattaagaatc

SEQ ID NO: 2374 - RNA, 21 nt, synthetic construct
  source 1..21: mol_type = other RNA
  modified_base 1: mod_base = OTHER; note = 2'-O-methyluridine with phosphorothioate linkage
  modified_base 2: mod_base = OTHER; note = 2'-O-methylguanosine with phosphorothioate linkage
  modified_base 3: mod_base = OTHER; note = 2'-fluoroadenosine
  modified_base 4: mod_base = OTHER; note = 2'-O-methylcytidine
  modified_base 5: mod_base = OTHER; note = 2'-fluoroadenosine
  modified_base 6: mod_base = OTHER; note = 2'-O-methylguanosine
  modified_base 7: mod_base = OTHER; note = 2'-fluoroguanosine
  modified_base 8: mod_base = OTHER; note = 2'-O-methylguanosine
  modified_base 9: mod_base = OTHER; note = 2'-fluorouridine
  modified_base 10: mod_base = OTHER; note = 2'-O-methylguanosine
  modified_base 11: mod_base = OTHER; note = 2'-fluorocytidine
  modified_base 12: mod_base = OTHER; note = 2'-O-methyluridine
  modified_base 13: mod_base = OTHER; note = 2'-fluoroguanosine
  modified_base 14: mod_base = OTHER; note = 2'-O-methylcytidine
  modified_base 15: mod_base = OTHER; note = 2'-fluoroguanosine
  modified_base 16: mod_base = OTHER; note = 2'-O-methylguanosine
  modified_base 17: mod_base = OTHER; note = 2'-fluorouridine
  modified_base 18: mod_base = OTHER; note = 2'-O-methyluridine
  modified_base 19: mod_base = OTHER; note = 2'-fluoroguanosine with phosphorothioate linkage
  modified_base 20: mod_base = OTHER; note = 2'-O-methyladenosine with phosphorothioate linkage
  modified_base 21: mod_base = OTHER; note = 2'-O-methyladenosine
tgacagggtgctgcggttgaa

SEQ ID NO: 2375 - RNA, 21 nt, synthetic construct
  source 1..21: mol_type = other RNA
  modified_base 1: mod_base = OTHER; note = 2'-O-methyluridine with phosphorothioate linkage
  modified_base 2: mod_base = OTHER; note = 2'-O-methylcytidine with phosphorothioate linkage
  modified_base 3: mod_base = OTHER; note = 2'-fluoroguanosine
  modified_base 4: mod_base = OTHER; note = 2'-O-methyladenosine
  modified_base 5: mod_base = OTHER; note = 2'-fluoroguanosine
  modified_base 6: mod_base = OTHER; note = 2'-O-methyluridine
  modified_base 7: mod_base = OTHER; note = 2'-fluoroguanosine
  modified_base 8: mod_base = OTHER; note = 2'-O-methyluridine
  modified_base 9: mod_base = OTHER; note = 2'-fluorouridine
  modified_base 10: mod_base = OTHER; note = 2'-O-methylguanosine
  modified_base 11: mod_base = OTHER; note = 2'-fluoroadenosine
  modified_base 12: mod_base = OTHER; note = 2'-O-methyladenosine
  modified_base 13: mod_base = OTHER; note = 2'-fluorouridine
  modified_base 14: mod_base = OTHER; note = 2'-O-methyladenosine
  modified_base 15: mod_base = OTHER; note = 2'-fluoroadenosine
  modified_base 16: mod_base = OTHER; note = 2'-O-methyluridine
  modified_base 17: mod_base = OTHER; note = 2'-fluoroguanosine
  modified_base 18: mod_base = OTHER; note = 2'-O-methyladenosine
  modified_base 19: mod_base = OTHER; note = 2'-fluorouridine with phosphorothioate linkage
  modified_base 20: mod_base = OTHER; note = 2'-O-methyladenosine with phosphorothioate linkage
  modified_base 21: mod_base = OTHER; note = 2'-O-methyluridine
tcgagtgttgaataatgatat

SEQ ID NO: 2376 - RNA, 21 nt, synthetic construct
  source 1..21: mol_type = other RNA
  modified_base 1: mod_base = OTHER; note = 2'-O-methyladenosine with phosphorothioate linkage
  modified_base 2: mod_base = OTHER; note = 2'-O-methyluridine with phosphorothioate linkage
  modified_base 3: mod_base = OTHER; note = 2'-fluoroguanosine
  modified_base 4: mod_base = OTHER; note = 2'-O-methyladenosine
  modified_base 5: mod_base = OTHER; note = 2'-fluorocytidine
  modified_base 6: mod_base = OTHER; note = 2'-O-methylguanosine
  modified_base 7: mod_base = OTHER; note = 2'-fluoroadenosine
  modified_base 8: mod_base = OTHER; note = 2'-O-methyluridine
  modified_base 9: mod_base = OTHER; note = 2'-fluorouridine
  modified_base 10: mod_base = OTHER; note = 2'-O-methylguanosine
  modified_base 11: mod_base = OTHER; note = 2'-fluorouridine
  modified_base 12: mod_base = OTHER; note = 2'-O-methyluridine
  modified_base 13: mod_base = OTHER; note = 2'-fluorouridine
  modified_base 14: mod_base = OTHER; note = 2'-O-methyladenosine
  modified_base 15: mod_base = OTHER; note = 2'-fluorouridine
  modified_base 16: mod_base = OTHER; note = 2'-O-methylcytidine
  modified_base 17: mod_base = OTHER; note = 2'-fluoroadenosine
  modified_base 18: mod_base = OTHER; note = 2'-O-methyladenosine
  modified_base 19: mod_base = OTHER; note = 2'-fluorocytidine with phosphorothioate linkage
  modified_base 20: mod_base = OTHER; note = 2'-O-methylguanosine with phosphorothioate linkage
  modified_base 21: mod_base = OTHER; note = 2'-O-methyluridine
atgacgattgtttatcaacgt

SEQ ID NO: 2377 - RNA, 21 nt, synthetic construct
  source 1..21: mol_type = other RNA
  modified_base 1: mod_base = OTHER; note = 2'-O-methyladenosine with phosphorothioate linkage
  modified_base 2: mod_base = OTHER; note = 2'-O-methyluridine with phosphorothioate linkage
  modified_base 3: mod_base = OTHER; note = 2'-fluoroguanosine
  modified_base 4: mod_base = OTHER; note = 2'-O-methylguanosine
  modified_base 5: mod_base = OTHER; note = 2'-fluoroadenosine
  modified_base 6: mod_base = OTHER; note = 2'-O-methyluridine
  modified_base 7: mod_base = OTHER; note = 2'-fluorouridine
  modified_base 8: mod_base = OTHER; note = 2'-O-methyluridine
  modified_base 9: mod_base = OTHER; note = 2'-fluorocytidine
  modified_base 10: mod_base = OTHER; note = 2'-O-methyluridine
  modified_base 11: mod_base = OTHER; note = 2'-fluorocytidine
  modified_base 12: mod_base = OTHER; note = 2'-O-methyluridine
  modified_base 13: mod_base = OTHER; note = 2'-fluoroadenosine
  modified_base 14: mod_base = OTHER; note = 2'-O-methylguanosine
  modified_base 15: mod_base = OTHER; note = 2'-fluoroguanosine
  modified_base 16: mod_base = OTHER; note = 2'-O-methyladenosine
  modified_base 17: mod_base = OTHER; note = 2'-fluoroguanosine
  modified_base 18: mod_base = OTHER; note = 2'-O-methyladenosine
  modified_base 19: mod_base = OTHER; note = 2'-fluorocytidine with phosphorothioate linkage
  modified_base 20: mod_base = OTHER; note = 2'-O-methyluridine with phosphorothioate linkage
  modified_base 21: mod_base = OTHER; note = 2'-O-methyluridine
atggatttctctaggagactt

SEQ ID NO: 2378 - RNA, 21 nt, synthetic construct
  source 1..21: mol_type = other RNA
  modified_base 1: mod_base = OTHER; note = 2'-O-methyluridine with phosphorothioate linkage
  modified_base 2: mod_base = OTHER; note = 2'-O-methylguanosine with phosphorothioate linkage
  modified_base 3: mod_base = OTHER; note = 2'-fluorouridine
  modified_base 4: mod_base = OTHER; note = 2'-O-methylguanosine
  modified_base 5: mod_base = OTHER; note = 2'-fluoroadenosine
  modified_base 6: mod_base = OTHER; note = 2'-O-methylguanosine
  modified_base 7: mod_base = OTHER; note = 2'-fluorouridine
  modified_base 8: mod_base = OTHER; note = 2'-O-methyladenosine
  modified_base 9: mod_base = OTHER; note = 2'-fluorocytidine
  modified_base 10: mod_base = OTHER; note = 2'-O-methyluridine
  modified_base 11: mod_base = OTHER; note = 2'-fluoroguanosine
  modified_base 12: mod_base = OTHER; note = 2'-O-methyluridine
  modified_base 13: mod_base = OTHER; note = 2'-fluoroguanosine
  modified_base 14: mod_base = OTHER; note = 2'-O-methylguanosine
  modified_base 15: mod_base = OTHER; note = 2'-fluoroguanosine
  modified_base 16: mod_base = OTHER; note = 2'-O-methyladenosine
  modified_base 17: mod_base = OTHER; note = 2'-fluoroadenosine
  modified_base 18: mod_base = OTHER; note = 2'-O-methyladenosine
  modified_base 19: mod_base = OTHER; note = 2'-fluoroguanosine with phosphorothioate linkage
  modified_base 20: mod_base = OTHER; note = 2'-O-methyluridine with phosphorothioate linkage
  modified_base 21: mod_base = OTHER; note = 2'-O-methylcytidine
tgtgagtactgtgggaaagtc

SEQ ID NO: 2379 - RNA, 21 nt, synthetic construct
  source 1..21: mol_type = other RNA
  modified_base 1: mod_base = OTHER; note = 2'-O-methylcytidine with phosphorothioate linkage
  modified_base 2: mod_base = OTHER; note = 2'-O-methyluridine with phosphorothioate linkage
  modified_base 3: mod_base = OTHER; note = 2'-fluorocytidine
  modified_base 4: mod_base = OTHER; note = 2'-O-methylcytidine
  modified_base 5: mod_base = OTHER; note = 2'-fluoroadenosine
  modified_base 6: mod_base = OTHER; note = 2'-O-methylguanosine
  modified_base 7: mod_base = OTHER; note = 2'-fluoroguanosine
  modified_base 8: mod_base = OTHER; note = 2'-O-methylcytidine
  modified_base 9: mod_base = OTHER; note = 2'-fluoroadenosine
  modified_base 10: mod_base = OTHER; note = 2'-O-methylguanosine
  modified_base 11: mod_base = OTHER; note = 2'-fluorocytidine
  modified_base 12: mod_base = OTHER; note = 2'-O-methyluridine
  modified_base 13: mod_base = OTHER; note = 2'-fluorocytidine
  modified_base 14: mod_base = OTHER; note = 2'-O-methyladenosine
  modified_base 15: mod_base = OTHER; note = 2'-fluoroadenosine
  modified_base 16: mod_base = OTHER; note = 2'-O-methyladenosine
  modified_base 17: mod_base = OTHER; note = 2'-fluoroguanosine
  modified_base 18: mod_base = OTHER; note = 2'-O-methyladenosine
  modified_base 19: mod_base = OTHER; note = 2'-fluorouridine with phosphorothioate linkage
  modified_base 20: mod_base = OTHER; note = 2'-O-methylcytidine with phosphorothioate linkage
  modified_base 21: mod_base = OTHER; note = 2'-O-methylcytidine
ctccaggcagctcaaagatcc

SEQ ID NO: 2380 - RNA, 21 nt, synthetic construct
  source 1..21: mol_type = other RNA
  modified_base 1: mod_base = OTHER; note = 2'-O-methylguanosine with phosphorothioate linkage
  modified_base 2: mod_base = OTHER; note = 2'-O-methylcytidine with phosphorothioate linkage
  modified_base 3: mod_base = OTHER; note = 2'-fluoroadenosine
  modified_base 4: mod_base = OTHER; note = 2'-O-methylguanosine
  modified_base 5: mod_base = OTHER; note = 2'-fluorocytidine
  modified_base 6: mod_base = OTHER; note = 2'-O-methylguanosine
  modified_base 7: mod_base = OTHER; note = 2'-fluoroadenosine
  modified_base 8: mod_base = OTHER; note = 2'-O-methylcytidine
  modified_base 9: mod_base = OTHER; note = 2'-fluoroadenosine
  modified_base 10: mod_base = OTHER; note = 2'-O-methylcytidine
  modified_base 11: mod_base = OTHER; note = 2'-fluorouridine
  modified_base 12: mod_base = OTHER; note = 2'-O-methyluridine
  modified_base 13: mod_base = OTHER; note = 2'-fluoroguanosine
  modified_base 14: mod_base = OTHER; note = 2'-O-methyluridine
  modified_base 15: mod_base = OTHER; note = 2'-fluoroguanosine
  modified_base 16: mod_base = OTHER; note = 2'-O-methyladenosine
  modified_base 17: mod_base = OTHER; note = 2'-fluoroguanosine
  modified_base 18: mod_base = OTHER; note = 2'-O-methyluridine
  modified_base 19: mod_base = OTHER; note = 2'-fluoroadenosine with phosphorothioate linkage
  modified_base 20: mod_base = OTHER; note = 2'-O-methylcytidine with phosphorothioate linkage
  modified_base 21: mod_base = OTHER; note = 2'-O-methyluridine
gcagcgacacttgtgagtact

SEQ ID NO: 2381 - RNA, 21 nt, synthetic construct
  source 1..21: mol_type = other RNA
  modified_base 1: mod_base = OTHER; note = 2'-O-methylcytidine with phosphorothioate linkage
  modified_base 2: mod_base = OTHER; note = 2'-O-methyluridine with phosphorothioate linkage
  modified_base 3: mod_base = OTHER; note = 2'-fluoroguanosine
  modified_base 4: mod_base = OTHER; note = 2'-O-methyluridine
  modified_base 5: mod_base = OTHER; note = 2'-fluoroadenosine
  modified_base 6: mod_base = OTHER; note = 2'-O-methylguanosine
  modified_base 7: mod_base = OTHER; note = 2'-fluorocytidine
  modified_base 8: mod_base = OTHER; note = 2'-O-methyladenosine
  modified_base 9: mod_base = OTHER; note = 2'-fluoroadenosine
  modified_base 10: mod_base = OTHER; note = 2'-O-methyluridine
  modified_base 11: mod_base = OTHER; note = 2'-fluorocytidine
  modified_base 12: mod_base = OTHER; note = 2'-O-methyluridine
  modified_base 13: mod_base = OTHER; note = 2'-fluorocytidine
  modified_base 14: mod_base = OTHER; note = 2'-O-methyladenosine
  modified_base 15: mod_base = OTHER; note = 2'-fluorocytidine
  modified_base 16: mod_base = OTHER; note = 2'-O-methyluridine
  modified_base 17: mod_base = OTHER; note = 2'-fluoroguanosine
  modified_base 18: mod_base = OTHER; note = 2'-O-methyluridine
  modified_base 19: mod_base = OTHER; note = 2'-fluorocytidine with phosphorothioate linkage
  modified_base 20: mod_base = OTHER; note = 2'-O-methylcytidine with phosphorothioate linkage
  modified_base 21: mod_base = OTHER; note = 2'-O-methyladenosine
ctgtagcaatctcactgtcca

SEQ ID NO: 2382 - RNA, 21 nt, synthetic construct
  source 1..21: mol_type = other RNA
  modified_base 1: mod_base = OTHER; note = 2'-O-methyluridine with phosphorothioate linkage
  modified_base 2: mod_base = OTHER; note = 2'-O-methylcytidine with phosphorothioate linkage
  modified_base 3: mod_base = OTHER; note = 2'-fluorouridine
  modified_base 4: mod_base = OTHER; note = 2'-O-methyluridine
  modified_base 5: mod_base = OTHER; note = 2'-fluorocytidine
  modified_base 6: mod_base = OTHER; note = 2'-O-methyladenosine
  modified_base 7: mod_base = OTHER; note = 2'-fluoroadenosine
  modified_base 8: mod_base = OTHER; note = 2'-O-methylguanosine
  modified_base 9: mod_base = OTHER; note = 2'-fluoroadenosine
  modified_base 10: mod_base = OTHER; note = 2'-O-methyladenosine
  modified_base 11: mod_base = OTHER; note = 2'-fluorocytidine
  modified_base 12: mod_base = OTHER; note = 2'-O-methyluridine
  modified_base 13: mod_base = OTHER; note = 2'-fluoroguanosine
  modified_base 14: mod_base = OTHER; note = 2'-O-methyluridine
  modified_base 15: mod_base = OTHER; note = 2'-fluoroadenosine
  modified_base 16: mod_base = OTHER; note = 2'-O-methylguanosine
  modified_base 17: mod_base = OTHER; note = 2'-fluorocytidine
  modified_base 18: mod_base = OTHER; note = 2'-O-methyladenosine
  modified_base 19: mod_base = OTHER; note = 2'-fluoroadenosine with phosphorothioate linkage
  modified_base 20: mod_base = OTHER; note = 2'-O-methyluridine with phosphorothioate linkage
  modified_base 21: mod_base = OTHER; note = 2'-O-methylcytidine
tcttcaagaactgtagcaatc

SEQ ID NO: 2383 - RNA, 21 nt, synthetic construct
  source 1..21: mol_type = other RNA
  modified_base 1: mod_base = OTHER; note = 2'-O-methylcytidine with phosphorothioate linkage
  modified_base 2: mod_base = OTHER; note = 2'-O-methyluridine with phosphorothioate linkage
  modified_base 3: mod_base = OTHER; note = 2'-fluoroguanosine
  modified_base 4: mod_base = OTHER; note = 2'-O-methylcytidine
  modified_base 5: mod_base = OTHER; note = 2'-fluorouridine
  modified_base 6: mod_base = OTHER; note = 2'-O-methyladenosine
  modified_base 7: mod_base = OTHER; note = 2'-fluoroadenosine
  modified_base 8: mod_base = OTHER; note = 2'-O-methylguanosine
  modified_base 9: mod_base = OTHER; note = 2'-fluoroadenosine
  modified_base 10: mod_base = OTHER; note = 2'-O-methyladenosine
  modified_base 11: mod_base = OTHER; note = 2'-fluorouridine
  modified_base 12: mod_base = OTHER; note = 2'-O-methyladenosine
  modified_base 13: mod_base = OTHER; note = 2'-fluorocytidine
  modified_base 14: mod_base = OTHER; note = 2'-O-methylcytidine
  modified_base 15: mod_base = OTHER; note = 2'-fluoroadenosine
  modified_base 16: mod_base = OTHER; note = 2'-O-methylguanosine
  modified_base 17: mod_base = OTHER; note = 2'-fluoroguanosine
  modified_base 18: mod_base = OTHER; note = 2'-O-methyladenosine
  modified_base 19: mod_base = OTHER; note = 2'-fluorouridine with phosphorothioate linkage
  modified_base 20: mod_base = OTHER; note = 2'-O-methylcytidine with phosphorothioate linkage
  modified_base 21: mod_base = OTHER; note = 2'-O-methyladenosine
ctgctaagaataccaggatca

SEQ ID NO: 2384 - RNA, 21 nt, synthetic construct
  source 1..21: mol_type = other RNA
  modified_base 1: mod_base = OTHER; note = 2'-O-methylguanosine with phosphorothioate linkage
  modified_base 2: mod_base = OTHER; note = 2'-O-methylguanosine with phosphorothioate linkage
  modified_base 3: mod_base = OTHER; note = 2'-fluorouridine
  modified_base 4: mod_base = OTHER; note = 2'-O-methyluridine
  modified_base 5: mod_base = OTHER; note = 2'-fluoroguanosine
  modified_base 6: mod_base = OTHER; note = 2'-O-methylguanosine
  modified_base 7: mod_base = OTHER; note = 2'-fluorouridine
  modified_base 8: mod_base = OTHER; note = 2'-O-methyladenosine
  modified_base 9: mod_base = OTHER; note = 2'-fluorouridine
  modified_base 10: mod_base = OTHER; note = 2'-O-methylcytidine
  modified_base 11: mod_base = OTHER; note = 2'-fluorocytidine
  modified_base 12: mod_base = OTHER; note = 2'-O-methylcytidine
  modified_base 13: mod_base = OTHER; note = 2'-fluorouridine
  modified_base 14: mod_base = OTHER; note = 2'-O-methyluridine
  modified_base 15: mod_base = OTHER; note = 2'-fluorocytidine
  modified_base 16: mod_base = OTHER; note = 2'-O-methyladenosine
  modified_base 17: mod_base = OTHER; note = 2'-fluoroguanosine
  modified_base 18: mod_base = OTHER; note = 2'-O-methylguanosine
  modified_base 19: mod_base = OTHER; note = 2'-fluoroadenosine with phosphorothioate linkage
  modified_base 20: mod_base = OTHER; note = 2'-O-methylcytidine with phosphorothioate linkage
  modified_base 21: mod_base = OTHER; note = 2'-O-methyluridine
ggttggtatcccttcaggact

SEQ ID NO: 2385 - RNA, 21 nt, synthetic construct
  source 1..21: mol_type = other RNA
  modified_base 1: mod_base = OTHER; note = 2'-O-methylcytidine with phosphorothioate linkage
  modified_base 2: mod_base = OTHER; note = 2'-O-methylguanosine with phosphorothioate linkage
  modified_base 3: mod_base = OTHER; note = 2'-fluorocytidine
  modified_base 4: mod_base = OTHER; note = 2'-O-methyladenosine
  modified_base 5: mod_base = OTHER; note = 2'-fluoroguanosine
  modified_base 6: mod_base = OTHER; note = 2'-O-methylcytidine
  modified_base 7: mod_base = OTHER; note = 2'-fluoroguanosine
  modified_base 8: mod_base = OTHER; note = 2'-O-methyladenosine
  modified_base 9: mod_base = OTHER; note = 2'-fluorocytidine
  modified_base 10: mod_base = OTHER; note = 2'-O-methyladenosine
  modified_base 11: mod_base = OTHER; note = 2'-fluorocytidine
  modified_base 12: mod_base = OTHER; note = 2'-O-methyluridine
  modified_base 13: mod_base = OTHER; note = 2'-fluorouridine
  modified_base 14: mod_base = OTHER; note = 2'-O-methylguanosine
  modified_base 15: mod_base = OTHER; note = 2'-fluorouridine
  modified_base 16: mod_base = OTHER; note = 2'-O-methylguanosine
  modified_base 17: mod_base = OTHER; note = 2'-fluoroadenosine
  modified_base 18: mod_base = OTHER; note = 2'-O-methylguanosine
  modified_base 19: mod_base = OTHER; note = 2'-fluorouridine with phosphorothioate linkage
  modified_base 20: mod_base = OTHER; note = 2'-O-methyladenosine with phosphorothioate linkage
  modified_base 21: mod_base = OTHER; note = 2'-O-methylcytidine
cgcagcgacacttgtgagtac

SEQ ID NO: 2386 - RNA, 21 nt, synthetic construct
  source 1..21: mol_type = other RNA
  modified_base 1: mod_base = OTHER; note = 2'-O-methylcytidine with phosphorothioate linkage
  modified_base 2: mod_base = OTHER; note = 2'-O-methylguanosine with phosphorothioate linkage
  modified_base 3: mod_base = OTHER; note = 2'-fluoroadenosine
  modified_base 4: mod_base = OTHER; note = 2'-O-methylguanosine
  modified_base 5: mod_base = OTHER; note = 2'-fluorocytidine
  modified_base 6: mod_base = OTHER; note = 2'-O-methyladenosine
  modified_base 7: mod_base = OTHER; note = 2'-fluorocytidine
  modified_base 8: mod_base = OTHER; note = 2'-O-methyladenosine
  modified_base 9: mod_base = OTHER; note = 2'-fluoroadenosine
  modified_base 10: mod_base = OTHER; note = 2'-O-methyladenosine
  modified_base 11: mod_base = OTHER; note = 2'-fluorocytidine
  modified_base 12: mod_base = OTHER; note = 2'-O-methylguanosine
  modified_base 13: mod_base = OTHER; note = 2'-fluoroguanosine
  modified_base 14: mod_base = OTHER; note = 2'-O-methyladenosine
  modified_base 15: mod_base = OTHER; note = 2'-fluoroadenosine
  modified_base 16: mod_base = OTHER; note = 2'-O-methyladenosine
  modified_base 17: mod_base = OTHER; note = 2'-fluorocytidine
  modified_base 18: mod_base = OTHER; note = 2'-O-methyladenosine
  modified_base 19: mod_base = OTHER; note = 2'-fluoroadenosine with phosphorothioate linkage
  modified_base 20: mod_base = OTHER; note = 2'-O-methyluridine with phosphorothioate linkage
  modified_base 21: mod_base = OTHER; note = 2'-O-methylguanosine
cgagcacaaacggaaacaatg

SEQ ID NO: 2387 - RNA, 21 nt, synthetic construct
  source 1..21: mol_type = other RNA
  modified_base 1: mod_base = OTHER; note = 2'-O-methyluridine with phosphorothioate linkage
  modified_base 2: mod_base = OTHER; note = 2'-O-methylcytidine with phosphorothioate linkage
  modified_base 3: mod_base = OTHER; note = 2'-fluoroadenosine
  modified_base 4: mod_base = OTHER; note = 2'-O-methyladenosine
  modified_base 5: mod_base = OTHER; note = 2'-fluorocytidine
  modified_base 6: mod_base = OTHER; note = 2'-O-methylguanosine
  modified_base 7: mod_base = OTHER; note = 2'-fluorouridine
  modified_base 8: mod_base = OTHER; note = 2'-O-methylcytidine
  modified_base 9: mod_base = OTHER; note = 2'-fluoroadenosine
  modified_base 10: mod_base = OTHER; note = 2'-O-methyluridine
  modified_base 11: mod_base = OTHER; note = 2'-fluorocytidine
  modified_base 12: mod_base = OTHER; note = 2'-O-methyluridine
  modified_base 13: mod_base = OTHER; note = 2'-fluoroadenosine
  modified_base 14: mod_base = OTHER; note = 2'-O-methylguanosine
  modified_base 15: mod_base = OTHER; note = 2'-fluoroadenosine
  modified_base 16: mod_base = OTHER; note = 2'-O-methylguanosine
  modified_base 17: mod_base = OTHER; note = 2'-fluoroguanosine
  modified_base 18: mod_base = OTHER; note = 2'-O-methyladenosine
  modified_base 19: mod_base = OTHER; note = 2'-fluoroadenosine with phosphorothioate linkage
  modified_base 20: mod_base = OTHER; note = 2'-O-methyluridine with phosphorothioate linkage
  modified_base 21: mod_base = OTHER; note = 2'-O-methyluridine
tcaacgtcatctagaggaatt

SEQ ID NO: 2388 - RNA, 21 nt, synthetic construct
  source 1..21: mol_type = other RNA
  modified_base 1: mod_base = OTHER; note = 2'-O-methyluridine with phosphorothioate linkage
  modified_base 2: mod_base = OTHER; note = 2'-O-methylguanosine with phosphorothioate linkage
  modified_base 3: mod_base = OTHER; note = 2'-fluorocytidine
  modified_base 4: mod_base = OTHER; note = 2'-O-methylguanosine
  modified_base 5: mod_base = OTHER; note = 2'-fluoroguanosine
  modified_base 6: mod_base = OTHER; note = 2'-O-methyluridine
  modified_base 7: mod_base = OTHER; note = 2'-fluorouridine
  modified_base 8: mod_base = OTHER; note = 2'-O-methylguanosine
  modified_base 9: mod_base = OTHER; note = 2'-fluoroadenosine
  modified_base 10: mod_base = OTHER; note = 2'-O-methyladenosine
  modified_base 11: mod_base = OTHER; note = 2'-fluorouridine
  modified_base 12: mod_base = OTHER; note = 2'-O-methylcytidine
  modified_base 13: mod_base = OTHER; note = 2'-fluorocytidine
  modified_base 14: mod_base = OTHER; note = 2'-O-methyladenosine
  modified_base 15: mod_base = OTHER; note = 2'-fluoroadenosine
  modified_base 16: mod_base = OTHER; note = 2'-O-methyluridine
  modified_base 17: mod_base = OTHER; note = 2'-fluoroguanosine
  modified_base 18: mod_base = OTHER; note = 2'-O-methylguanosine
  modified_base 19: mod_base = OTHER; note = 2'-fluorocytidine with phosphorothioate linkage
  modified_base 20: mod_base = OTHER; note = 2'-O-methyluridine with phosphorothioate linkage
  modified_base 21: mod_base = OTHER; note = 2'-O-methyladenosine
tgcggttgaatccaatggcta

SEQ ID NO: 2389 - RNA, 21 nt, synthetic construct
  source 1..21: mol_type = other RNA
  modified_base 1: mod_base = OTHER; note = 2'-O-methylguanosine with phosphorothioate linkage
  modified_base 2: mod_base = OTHER; note = 2'-O-methyladenosine with phosphorothioate linkage
  modified_base 3: mod_base = OTHER; note = 2'-fluorocytidine
  modified_base 4: mod_base = OTHER; note = 2'-O-methylguanosine
  modified_base 5: mod_base = OTHER; note = 2'-fluoroadenosine
  modified_base 6: mod_base = OTHER; note = 2'-O-methyluridine
  modified_base 7: mod_base = OTHER; note = 2'-fluorouridine
  modified_base 8: mod_base = OTHER; note = 2'-O-methylguanosine
  modified_base 9: mod_base = OTHER; note = 2'-fluorouridine
  modified_base 10: mod_base = OTHER; note = 2'-O-methyluridine
  modified_base 11: mod_base = OTHER; note = 2'-fluorouridine
  modified_base 12: mod_base = OTHER; note = 2'-O-methyladenosine
  modified_base 13: mod_base = OTHER; note = 2'-fluorouridine
  modified_base 14: mod_base = OTHER; note = 2'-O-methylcytidine
  modified_base 15: mod_base = OTHER; note = 2'-fluoroadenosine
  modified_base 16: mod_base = OTHER; note = 2'-O-methyladenosine
  modified_base 17: mod_base = OTHER; note = 2'-fluorocytidine
  modified_base 18: mod_base = OTHER; note = 2'-O-methylguanosine
  modified_base 19: mod_base = OTHER; note = 2'-fluorouridine with phosphorothioate linkage
  modified_base 20: mod_base = OTHER; note = 2'-O-methylcytidine with phosphorothioate linkage
  modified_base 21: mod_base = OTHER; note = 2'-O-methyladenosine
gacgattgtttatcaacgtca

SEQ ID NO: 2390 - RNA, 21 nt, synthetic construct
  source 1..21: mol_type = other RNA
  modified_base 1: mod_base = OTHER; note = 2'-O-methyluridine with phosphorothioate linkage
  modified_base 2: mod_base = OTHER; note = 2'-O-methylguanosine with phosphorothioate linkage
  modified_base 3: mod_base = OTHER; note = 2'-fluoroguanosine
  modified_base 4: mod_base = OTHER; note = 2'-O-methyladenosine
  modified_base 5: mod_base = OTHER; note = 2'-fluoroguanosine
  modified_base 6: mod_base = OTHER; note = 2'-O-methyluridine
  modified_base 7: mod_base = OTHER; note = 2'-fluorocytidine
  modified_base 8: mod_base = OTHER; note = 2'-O-methyluridine
  modified_base 9: mod_base = OTHER; note = 2'-fluorocytidine
  modified_base 10: mod_base = OTHER; note = 2'-O-methylcytidine
  modified_base 11: mod_base = OTHER; note = 2'-fluorouridine
  modified_base 12: mod_base = OTHER; note = 2'-O-methyluridine
  modified_base 13: mod_base = OTHER; note = 2'-fluorocytidine
  modified_base 14: mod_base = OTHER; note = 2'-O-methyluridine
  modified_base 15: mod_base = OTHER; note = 2'-fluorouridine
  modified_base 16: mod_base = OTHER; note = 2'-O-methyluridine
  modified_base 17: mod_base = OTHER; note = 2'-fluorocytidine
  modified_base 18: mod_base = OTHER; note = 2'-O-methyluridine
  modified_base 19: mod_base = OTHER; note = 2'-fluoroadenosine with phosphorothioate linkage
  modified_base 20: mod_base = OTHER; note = 2'-O-methyladenosine with phosphorothioate linkage
  modified_base 21: mod_base = OTHER; note = 2'-O-methylcytidine
tggagtctccttctttctaac

SEQ ID NO: 2391 - RNA, 21 nt, synthetic construct
  source 1..21: mol_type = other RNA
  modified_base 1: mod_base = OTHER; note = 2'-O-methylcytidine with phosphorothioate linkage
  modified_base 2: mod_base = OTHER; note = 2'-O-methylguanosine with phosphorothioate linkage
  modified_base 3: mod_base = OTHER; note = 2'-fluorocytidine
  modified_base 4: mod_base = OTHER; note = 2'-O-methyladenosine
  modified_base 5: mod_base = OTHER; note = 2'-fluorouridine
  modified_base 6: mod_base = OTHER; note = 2'-O-methyladenosine
  modified_base 7: mod_base = OTHER; note = 2'-fluoroguanosine
  modified_base 8: mod_base = OTHER; note = 2'-O-methyladenosine
  modified_base 9: mod_base = OTHER; note = 2'-fluorocytidine
  modified_base 10: mod_base = OTHER; note = 2'-O-methylguanosine
  modified_base 11: mod_base = OTHER; note = 2'-fluoroadenosine
  modified_base 12: mod_base = OTHER; note = 2'-O-methyluridine
  modified_base 13: mod_base = OTHER; note = 2'-fluoroguanosine
  modified_base 14: mod_base = OTHER; note = 2'-O-methylguanosine
  modified_base 15: mod_base = OTHER; note = 2'-fluorocytidine
  modified_base 16: mod_base = OTHER; note = 2'-O-methyladenosine
  modified_base 17: mod_base = OTHER; note = 2'-fluorocytidine
  modified_base 18: mod_base = OTHER; note = 2'-O-methyluridine
  modified_base 19: mod_base = OTHER; note = 2'-fluoroguanosine with phosphorothioate linkage
  modified_base 20: mod_base = OTHER; note = 2'-O-methyluridine with phosphorothioate linkage
  modified_base 21: mod_base = OTHER; note = 2'-O-methyluridine
cgcatagacgatggcactgtt

SEQ ID NO: 2392 - RNA, 21 nt, synthetic construct
  source 1..21: mol_type = other RNA
  modified_base 1: mod_base = OTHER; note = 2'-O-methyluridine with phosphorothioate linkage
  modified_base 2: mod_base = OTHER; note = 2'-O-methylguanosine with phosphorothioate linkage
  modified_base 3: mod_base = OTHER; note = 2'-fluorouridine
  modified_base 4: mod_base = OTHER; note = 2'-O-methylguanosine
  modified_base 5: mod_base = OTHER; note = 2'-fluoroadenosine
  modified_base 6: mod_base = OTHER; note = 2'-O-methyladenosine
  modified_base 7: mod_base = OTHER; note = 2'-fluoroadenosine
  modified_base 8: mod_base = OTHER; note = 2'-O-methyluridine
  modified_base 9: mod_base = OTHER; note = 2'-fluorouridine
  modified_base 10: mod_base = OTHER; note = 2'-O-methyluridine
  modified_base 11: mod_base = OTHER; note = 2'-fluoroguanosine
  modified_base 12: mod_base = OTHER; note = 2'-O-methyluridine
  modified_base 13: mod_base = OTHER; note = 2'-fluoroadenosine
  modified_base 14: mod_base = OTHER; note = 2'-O-methyladenosine
  modified_base 15: mod_base = OTHER; note = 2'-fluoroguanosine
  modified_base 16: mod_base = OTHER; note = 2'-O-methyladenosine
  modified_base 17: mod_base = OTHER; note = 2'-fluorouridine
  modified_base 18: mod_base = OTHER; note = 2'-O-methylguanosine
  modified_base 19: mod_base = OTHER; note = 2'-fluorocytidine with phosphorothioate linkage
  modified_base 20: mod_base = OTHER; note = 2'-O-methylcytidine with phosphorothioate linkage
  modified_base 21: mod_base = OTHER; note = 2'-O-methyluridine
tgtgaaatttgtaagatgcct

SEQ ID NO: 2393 - RNA, 21 nt, synthetic construct
  source 1..21: mol_type = other RNA
  modified_base 1: mod_base = OTHER; note = 2'-O-methylcytidine with phosphorothioate linkage
  modified_base 2: mod_base = OTHER; note = 2'-O-methyladenosine with phosphorothioate linkage
  modified_base 3: mod_base = OTHER; note = 2'-fluoroguanosine
  modified_base 4: mod_base = OTHER; note = 2'-O-methyladenosine
  modified_base 5: mod_base = OTHER; note = 2'-fluoroadenosine
  modified_base 6: mod_base = OTHER; note = 2'-O-methylcytidine
  modified_base 7: mod_base = OTHER; note = 2'-fluoroadenosine
  modified_base 8: mod_base = OTHER; note = 2'-O-methylcytidine
  modified_base 9: mod_base = OTHER; note = 2'-fluorouridine
  modified_base 10: mod_base = OTHER; note = 2'-O-methylcytidine
  modified_base 11: mod_base = OTHER; note = 2'-fluoroadenosine
  modified_base 12: mod_base = OTHER; note = 2'-O-methyluridine
  modified_base 13: mod_base = OTHER; note = 2'-fluoroguanosine
  modified_base 14: mod_base = OTHER; note = 2'-O-methylguanosine
  modified_base 15: mod_base = OTHER; note = 2'-fluoroadenosine
  modified_base 16: mod_base = OTHER; note = 2'-O-methyluridine
  modified_base 17: mod_base = OTHER; note = 2'-fluorouridine
  modified_base 18: mod_base = OTHER; note = 2'-O-methyladenosine
  modified_base 19: mod_base = OTHER; note = 2'-fluoroadenosine with phosphorothioate linkage
  modified_base 20: mod_base = OTHER; note = 2'-O-methylguanosine with phosphorothioate linkage
  modified_base 21: mod_base = OTHER; note = 2'-O-methyladenosine
cagaacactcatggattaaga

SEQ ID NO: 2394 - RNA, 21 nt, synthetic construct
  source 1..21: mol_type = other RNA
  modified_base 1: mod_base = OTHER; note = 2'-O-methyladenosine with phosphorothioate linkage
  modified_base 2: mod_base = OTHER; note = 2'-O-methylcytidine with phosphorothioate linkage
  modified_base 3: mod_base = OTHER; note = 2'-fluoroguanosine
  modified_base 4: mod_base = OTHER; note = 2'-O-methylguanosine
  modified_base 5: mod_base = OTHER; note = 2'-fluorocytidine
  modified_base 6: mod_base = OTHER; note = 2'-O-methyluridine
  modified_base 7: mod_base = OTHER; note = 2'-fluorocytidine
  modified_base 8: mod_base = OTHER; note = 2'-O-methyluridine
  modified_base 9: mod_base = OTHER; note = 2'-fluorocytidine
  modified_base 10: mod_base = OTHER; note = 2'-O-methylcytidine
  modified_base 11: mod_base = OTHER; note = 2'-fluorocytidine
  modified_base 12: mod_base = OTHER; note = 2'-O-methyladenosine
  modified_base 13: mod_base = OTHER; note = 2'-fluorocytidine
  modified_base 14: mod_base = OTHER; note = 2'-O-methyladenosine
  modified_base 15: mod_base = OTHER; note = 2'-fluoroadenosine
  modified_base 16: mod_base = OTHER; note = 2'-O-methyluridine
  modified_base 17: mod_base = OTHER; note = 2'-fluorouridine
  modified_base 18: mod_base = OTHER; note = 2'-O-methylcytidine
  modified_base 19: mod_base = OTHER; note = 2'-fluoroadenosine with phosphorothioate linkage
  modified_base 20: mod_base = OTHER; note = 2'-O-methyluridine with phosphorothioate linkage
  modified_base 21: mod_base = OTHER; note = 2'-O-methylcytidine
acggctctcccacaattcatc

SEQ ID NO: 2395 - RNA, 21 nt, synthetic construct
  source 1..21: mol_type = other RNA
  modified_base 1: mod_base = OTHER; note = 2'-O-methylguanosine with phosphorothioate linkage
  modified_base 2: mod_base = OTHER; note = 2'-O-methylguanosine with phosphorothioate linkage
  modified_base 3: mod_base = OTHER; note = 2'-fluoroadenosine
  modified_base 4: mod_base = OTHER; note = 2'-O-methyladenosine
  modified_base 5: mod_base = OTHER; note = 2'-fluoroadenosine
  modified_base 6: mod_base = OTHER; note = 2'-O-methylguanosine
  modified_base 7: mod_base = OTHER; note = 2'-fluorouridine
  modified_base 8: mod_base = OTHER; note = 2'-O-methylcytidine
  modified_base 9: mod_base = OTHER; note = 2'-fluorouridine
  modified_base 10: mod_base = OTHER; note = 2'-O-methyluridine
  modified_base 11: mod_base = OTHER; note = 2'-fluorocytidine
  modified_base 12: mod_base = OTHER; note = 2'-O-methyladenosine
  modified_base 13: mod_base = OTHER; note = 2'-fluoroadenosine
  modified_base 14: mod_base = OTHER; note = 2'-O-methylguanosine
  modified_base 15: mod_base = OTHER; note = 2'-fluoroadenosine
  modified_base 16: mod_base = OTHER; note = 2'-O-methyladenosine
  modified_base 17: mod_base = OTHER; note = 2'-fluorocytidine
  modified_base 18: mod_base = OTHER; note = 2'-O-methyluridine
  modified_base 19: mod_base = OTHER; note = 2'-fluoroguanosine with phosphorothioate linkage
  modified_base 20: mod_base = OTHER; note = 2'-O-methyluridine with phosphorothioate linkage
  modified_base 21: mod_base = OTHER; note = 2'-O-methyladenosine
ggaaagtcttcaagaactgta

SEQ ID NO: 2396 - RNA, 21 nt, synthetic construct
  source 1..21: mol_type = other RNA
  modified_base 1: mod_base = OTHER; note = 2'-O-methylcytidine with phosphorothioate linkage
  modified_base 2: mod_base = OTHER; note = 2'-O-methyluridine with phosphorothioate linkage
  modified_base 3: mod_base = OTHER; note = 2'-fluorouridine
  modified_base 4: mod_base = OTHER; note = 2'-O-methyladenosine
  modified_base 5: mod_base = OTHER; note = 2'-fluorouridine
  modified_base 6: mod_base = OTHER; note = 2'-O-methyladenosine
  modified_base 7: mod_base = OTHER; note = 2'-fluoroadenosine
  modified_base 8: mod_base = OTHER; note = 2'-O-methyladenosine
  modified_base 9: mod_base = OTHER; note = 2'-fluorouridine
  modified_base 10: mod_base = OTHER; note = 2'-O-methylguanosine
  modified_base 11: mod_base = OTHER; note = 2'-fluorocytidine
  modified_base 12: mod_base = OTHER; note = 2'-O-methylguanosine
  modified_base 13: mod_base = OTHER; note = 2'-fluoroadenosine
  modified_base 14: mod_base = OTHER; note = 2'-O-methylguanosine
  modified_base 15: mod_base = OTHER; note = 2'-fluorocytidine
  modified_base 16: mod_base = OTHER; note = 2'-O-methyluridine
  modified_base 17: mod_base = OTHER; note = 2'-fluoroguanosine
  modified_base 18: mod_base = OTHER; note = 2'-O-methyluridine
  modified_base 19: mod_base = OTHER; note = 2'-fluoroguanosine with phosphorothioate linkage
  modified_base 20: mod_base = OTHER; note = 2'-O-methylcytidine with phosphorothioate linkage
  modified_base 21: mod_base = OTHER; note = 2'-O-methyladenosine
cttataaatgcgagctgtgca

SEQ ID NO: 2397 - RNA, 21 nt, synthetic construct
  source 1..21: mol_type = other RNA
  modified_base 1: mod_base = OTHER; note = 2'-O-methyluridine with phosphorothioate linkage
  modified_base 2: mod_base = OTHER; note = 2'-O-methyluridine with phosphorothioate linkage
  modified_base 3: mod_base = OTHER; note = 2'-fluorocytidine
  modified_base 4: mod_base = OTHER; note = 2'-O-methyladenosine
  modified_base 5: mod_base = OTHER; note = 2'-fluoroadenosine
  modified_base 6: mod_base = OTHER; note = 2'-O-methylguanosine
  modified_base 7: mod_base = OTHER; note = 2'-fluoroadenosine
  modified_base 8: mod_base = OTHER; note = 2'-O-methyladenosine
  modified_base 9: mod_base = OTHER; note = 2'-fluorocytidine
  modified_base 10: mod_base = OTHER; note = 2'-O-methyluridine
  modified_base 11: mod_base = OTHER; note = 2'-fluoroguanosine
  modified_base 12: mod_base = OTHER; note = 2'-O-methyluridine
  modified_base 13: mod_base = OTHER; note = 2'-fluoroadenosine
  modified_base 14: mod_base = OTHER; note = 2'-O-methylguanosine
  modified_base 15: mod_base = OTHER; note = 2'-fluorocytidine
  modified_base 16: mod_base = OTHER; note = 2'-O-methyladenosine
  modified_base 17: mod_base = OTHER; note = 2'-fluoroadenosine
  modified_base 18: mod_base = OTHER; note = 2'-O-methyluridine
  modified_base 19: mod_base = OTHER; note = 2'-fluorocytidine with phosphorothioate linkage
  modified_base 20: mod_base = OTHER; note = 2'-O-methyluridine with phosphorothioate linkage
  modified_base 21: mod_base = OTHER; note = 2'-O-methylcytidine
ttcaagaactgtagcaatctc

SEQ ID NO: 2398 - RNA, 21 nt, synthetic construct
  source 1..21: mol_type = other RNA
  modified_base 1: mod_base = OTHER; note = 2'-O-methyluridine with phosphorothioate linkage
  modified_base 2: mod_base = OTHER; note = 2'-O-methylcytidine with phosphorothioate linkage
  modified_base 3: mod_base = OTHER; note = 2'-fluorocytidine
  modified_base 4: mod_base = OTHER; note = 2'-O-methyladenosine
  modified_base 5: mod_base = OTHER; note = 2'-fluoroguanosine
  modified_base 6: mod_base = OTHER; note = 2'-O-methylguanosine
  modified_base 7: mod_base = OTHER; note = 2'-fluorocytidine
  modified_base 8: mod_base = OTHER; note = 2'-O-methyladenosine
  modified_base 9: mod_base = OTHER; note = 2'-fluoroguanosine
  modified_base 10: mod_base = OTHER; note = 2'-O-methylcytidine
  modified_base 11: mod_base = OTHER; note = 2'-fluorouridine
  modified_base 12: mod_base = OTHER; note = 2'-O-methylcytidine
  modified_base 13: mod_base = OTHER; note = 2'-fluoroadenosine
  modified_base 14: mod_base = OTHER; note = 2'-O-methyladenosine
  modified_base 15: mod_base = OTHER; note = 2'-fluoroadenosine
  modified_base 16: mod_base = OTHER; note = 2'-O-methylguanosine
  modified_base 17: mod_base = OTHER; note = 2'-fluoroadenosine
  modified_base 18: mod_base = OTHER; note = 2'-O-methyluridine
  modified_base 19: mod_base = OTHER; note = 2'-fluorocytidine with phosphorothioate linkage
  modified_base 20: mod_base = OTHER; note = 2'-O-methylcytidine with phosphorothioate linkage
  modified_base 21: mod_base = OTHER; note = 2'-O-methylcytidine
tccaggcagctcaaagatccc

SEQ ID NO: 2399 - RNA, 21 nt, synthetic construct
  source 1..21: mol_type = other RNA
  modified_base 1: mod_base = OTHER; note = 2'-O-methylguanosine with phosphorothioate linkage
  modified_base 2: mod_base = OTHER; note = 2'-O-methylguanosine with phosphorothioate linkage
  modified_base 3: mod_base = OTHER; note = 2'-fluoroadenosine
  modified_base 4: mod_base = OTHER; note = 2'-O-methyluridine
  modified_base 5: mod_base = OTHER; note = 2'-fluoroguanosine
  modified_base 6: mod_base = OTHER; note = 2'-O-methyladenosine
  modified_base 7: mod_base = OTHER; note = 2'-fluorocytidine
  modified_base 8: mod_base = OTHER; note = 2'-O-methylguanosine
  modified_base 9: mod_base = OTHER; note = 2'-fluoroadenosine
  modified_base 10: mod_base = OTHER; note = 2'-O-methyluridine
  modified_base 11: mod_base = OTHER; note = 2'-fluorouridine
  modified_base 12: mod_base = OTHER; note = 2'-O-methylguanosine
  modified_base 13: mod_base = OTHER; note = 2'-fluorouridine
  modified_base 14: mod_base = OTHER; note = 2'-O-methyluridine
  modified_base 15: mod_base = OTHER; note = 2'-fluorouridine
  modified_base 16: mod_base = OTHER; note = 2'-O-methyladenosine
  modified_base 17: mod_base = OTHER; note = 2'-fluorouridine
  modified_base 18: mod_base = OTHER; note = 2'-O-methylcytidine
  modified_base 19: mod_base = OTHER; note = 2'-fluoroadenosine with phosphorothioate linkage
  modified_base 20: mod_base = OTHER; note = 2'-O-methyladenosine with phosphorothioate linkage
  modified_base 21: mod_base = OTHER; note = 2'-O-methylcytidine
ggatgacgattgtttatcaac

SEQ ID NO: 2400 - RNA, 21 nt, synthetic construct
  source 1..21: mol_type = other RNA
  modified_base 1: mod_base = OTHER; note = 2'-O-methylcytidine with phosphorothioate linkage
  modified_base 2: mod_base = OTHER; note = 2'-O-methyluridine with phosphorothioate linkage
  modified_base 3: mod_base = OTHER; note = 2'-fluoroguanosine
  modified_base 4: mod_base = OTHER; note = 2'-O-methylcytidine
  modified_base 5: mod_base = OTHER; note = 2'-fluoroguanosine
  modified_base 6: mod_base = OTHER; note = 2'-O-methylguanosine
  modified_base 7: mod_base = OTHER; note = 2'-fluorouridine
  modified_base 8: mod_base = OTHER; note = 2'-O-methyluridine
  modified_base 9: mod_base = OTHER; note = 2'-fluoroguanosine
  modified_base 10: mod_base = OTHER; note = 2'-O-methyladenosine
  modified_base 11: mod_base = OTHER; note = 2'-fluoroadenosine
  modified_base 12: mod_base = OTHER; note = 2'-O-methyluridine
  modified_base 13: mod_base = OTHER; note = 2'-fluorocytidine
  modified_base 14: mod_base = OTHER; note = 2'-O-methylcytidine
  modified_base 15: mod_base = OTHER; note = 2'-fluoroadenosine
  modified_base 16: mod_base = OTHER; note = 2'-O-methyladenosine
  modified_base 17: mod_base = OTHER; note = 2'-fluorouridine
  modified_base 18: mod_base = OTHER; note = 2'-O-methylguanosine
  modified_base 19: mod_base = OTHER; note = 2'-fluoroguanosine with phosphorothioate linkage
  modified_base 20: mod_base = OTHER; note = 2'-O-methylcytidine with phosphorothioate linkage
  modified_base 21: mod_base = OTHER; note = 2'-O-methyluridine
ctgcggttgaatccaatggct

SEQ ID NO: 2401 - RNA, 21 nt, synthetic construct
  source 1..21: mol_type = other RNA
  modified_base 1: mod_base = OTHER; note = 2'-O-methyluridine with phosphorothioate linkage
  modified_base 2: mod_base = OTHER; note = 2'-O-methylguanosine with phosphorothioate linkage
  modified_base 3: mod_base = OTHER; note = 2'-fluoroadenosine
  modified_base 4: mod_base = OTHER; note = 2'-O-methylcytidine
  modified_base 5: mod_base = OTHER; note = 2'-fluoroguanosine
  modified_base 6: mod_base = OTHER; note = 2'-O-methyladenosine
  modified_base 7: mod_base = OTHER; note = 2'-fluorouridine
  modified_base 8: mod_base = OTHER; note = 2'-O-methyluridine
  modified_base 9: mod_base = OTHER; note = 2'-fluoroguanosine
  modified_base 10: mod_base = OTHER; note = 2'-O-methyluridine
  modified_base 11: mod_base = OTHER; note = 2'-fluorouridine
  modified_base 12: mod_base = OTHER; note = 2'-O-methyluridine
  modified_base 13: mod_base = OTHER; note = 2'-fluoroadenosine
  modified_base 14: mod_base = OTHER; note = 2'-O-methyluridine
  modified_base 15: mod_base = OTHER; note = 2'-fluorocytidine
  modified_base 16: mod_base = OTHER; note = 2'-O-methyladenosine
  modified_base 17: mod_base = OTHER; note = 2'-fluoroadenosine
  modified_base 18: mod_base = OTHER; note = 2'-O-methylcytidine
  modified_base 19: mod_base = OTHER; note = 2'-fluoroguanosine with phosphorothioate linkage
  modified_base 20: mod_base = OTHER; note = 2'-O-methyluridine with phosphorothioate linkage
  modified_base 21: mod_base = OTHER; note = 2'-O-methylcytidine
tgacgattgtttatcaacgtc

SEQ ID NO: 2402 - RNA, 21 nt, synthetic construct
  source 1..21: mol_type = other RNA
  modified_base 1: mod_base = OTHER; note = 2'-O-methylcytidine with phosphorothioate linkage
  modified_base 2: mod_base = OTHER; note = 2'-O-methyluridine with phosphorothioate linkage
  modified_base 3: mod_base = OTHER; note = 2'-fluorouridine
  modified_base 4: mod_base = OTHER; note = 2'-O-methylcytidine
  modified_base 5: mod_base = OTHER; note = 2'-fluoroguanosine
  modified_base 6: mod_base = OTHER; note = 2'-O-methylguanosine
  modified_base 7: mod_base = OTHER; note = 2'-fluoroadenosine
  modified_base 8: mod_base = OTHER; note = 2'-O-methylguanosine
  modified_base 9: mod_base = OTHER; note = 2'-fluoroadenosine
  modified_base 10: mod_base = OTHER; note = 2'-O-methylcytidine
  modified_base 11: mod_base = OTHER; note = 2'-fluorouridine
  modified_base 12: mod_base = OTHER; note = 2'-O-methylcytidine
  modified_base 13: mod_base = OTHER; note = 2'-fluorocytidine
  modified_base 14: mod_base = OTHER; note = 2'-O-methyladenosine
  modified_base 15: mod_base = OTHER; note = 2'-fluoroguanosine
  modified_base 16: mod_base = OTHER; note = 2'-O-methyladenosine
  modified_base 17: mod_base = OTHER; note = 2'-fluorocytidine
  modified_base 18: mod_base = OTHER; note = 2'-O-methyladenosine
  modified_base 19: mod_base = OTHER; note = 2'-fluoroadenosine with phosphorothioate linkage
  modified_base 20: mod_base = OTHER; note = 2'-O-methyluridine with phosphorothioate linkage
  modified_base 21: mod_base = OTHER; note = 2'-O-methylcytidine
cttcggagactccagacaatc

SEQ ID NO: 2403 - RNA, 21 nt, synthetic construct
  source 1..21: mol_type = other RNA
  modified_base 1: mod_base = OTHER; note = 2'-O-methylcytidine with phosphorothioate linkage
  modified_base 2: mod_base = OTHER; note = 2'-O-methyluridine with phosphorothioate linkage
  modified_base 3: mod_base = OTHER; note = 2'-fluorouridine
  modified_base 4: mod_base = OTHER; note = 2'-O-methylcytidine
  modified_base 5: mod_base = OTHER; note = 2'-fluoroadenosine
  modified_base 6: mod_base = OTHER; note = 2'-O-methyladenosine
  modified_base 7: mod_base = OTHER; note = 2'-fluoroguanosine
  modified_base 8: mod_base = OTHER; note = 2'-O-methyladenosine
  modified_base 9: mod_base = OTHER; note = 2'-fluoroadenosine
  modified_base 10: mod_base = OTHER; note = 2'-O-methylcytidine
  modified_base 11: mod_base = OTHER; note = 2'-fluorouridine
  modified_base 12: mod_base = OTHER; note = 2'-O-methylguanosine
  modified_base 13: mod_base = OTHER; note = 2'-fluorouridine
  modified_base 14: mod_base = OTHER; note = 2'-O-methyladenosine
  modified_base 15: mod_base = OTHER; note = 2'-fluoroguanosine
  modified_base 16: mod_base = OTHER; note = 2'-O-methylcytidine
  modified_base 17: mod_base = OTHER; note = 2'-fluoroadenosine
  modified_base 18: mod_base = OTHER; note = 2'-O-methyladenosine
  modified_base 19: mod_base = OTHER; note = 2'-fluorouridine with phosphorothioate linkage
  modified_base 20: mod_base = OTHER; note = 2'-O-methylcytidine with phosphorothioate linkage
  modified_base 21: mod_base = OTHER; note = 2'-O-methyluridine
cttcaagaactgtagcaatct

SEQ ID NO: 2404 - RNA, 21 nt, synthetic construct
  source 1..21: mol_type = other RNA
  modified_base 1: mod_base = OTHER; note = 2'-O-methylguanosine with phosphorothioate linkage
  modified_base 2: mod_base = OTHER; note = 2'-O-methylcytidine with phosphorothioate linkage
  modified_base 3: mod_base = OTHER; note = 2'-fluoroguanosine
  modified_base 4: mod_base = OTHER; note = 2'-O-methyladenosine
  modified_base 5: mod_base = OTHER; note = 2'-fluoroguanosine
  modified_base 6: mod_base = OTHER; note = 2'-O-methylcytidine
  modified_base 7: mod_base = OTHER; note = 2'-fluorouridine
  modified_base 8: mod_base = OTHER; note = 2'-O-methylguanosine
  modified_base 9: mod_base = OTHER; note = 2'-fluorouridine
  modified_base 10: mod_base = OTHER; note = 2'-O-methylguanosine
  modified_base 11: mod_base = OTHER; note = 2'-fluorocytidine
  modified_base 12: mod_base = OTHER; note = 2'-O-methyladenosine
  modified_base 13: mod_base = OTHER; note = 2'-fluoroadenosine
  modified_base 14: mod_base = OTHER; note = 2'-O-methylcytidine
  modified_base 15: mod_base = OTHER; note = 2'-fluorouridine
  modified_base 16: mod_base = OTHER; note = 2'-O-methyladenosine
  modified_base 17: mod_base = OTHER; note = 2'-fluorouridine
  modified_base 18: mod_base = OTHER; note = 2'-O-methylguanosine
  modified_base 19: mod_base = OTHER; note = 2'-fluorocytidine with phosphorothioate linkage
  modified_base 20: mod_base = OTHER; note = 2'-O-methylcytidine with phosphorothioate linkage
  modified_base 21: mod_base = OTHER; note = 2'-O-methyluridine
gcgagctgtgcaactatgcct

SEQ ID NO: 2405 - RNA, 21 nt, synthetic construct
  source 1..21: mol_type = other RNA
  modified_base 1: mod_base = OTHER; note = 2'-O-methyladenosine with phosphorothioate linkage
  modified_base 2: mod_base = OTHER; note = 2'-O-methyluridine with phosphorothioate linkage
  modified_base 3: mod_base = OTHER; note = 2'-fluorocytidine
  modified_base 4: mod_base = OTHER; note = 2'-O-methylcytidine
  modified_base 5: mod_base = OTHER; note = 2'-fluoroadenosine
  modified_base 6: mod_base = OTHER; note = 2'-O-methyladenosine
  modified_base 7: mod_base = OTHER; note = 2'-fluorouridine
  modified_base 8: mod_base = OTHER; note = 2'-O-methylguanosine
  modified_base 9: mod_base = OTHER; note = 2'-fluoroguanosine
  modified_base 10: mod_base = OTHER; note = 2'-O-methylcytidine
  modified_base 11: mod_base = OTHER; note = 2'-fluorouridine
  modified_base 12: mod_base = OTHER; note = 2'-O-methyladenosine
  modified_base 13: mod_base = OTHER; note = 2'-fluorouridine
  modified_base 14: mod_base = OTHER; note = 2'-O-methylguanosine
  modified_base 15: mod_base = OTHER; note = 2'-fluoroguanosine
  modified_base 16: mod_base = OTHER; note = 2'-O-methyladenosine
  modified_base 17: mod_base = OTHER; note = 2'-fluoroguanosine
  modified_base 18: mod_base = OTHER; note = 2'-O-methylcytidine
  modified_base 19: mod_base = OTHER; note = 2'-fluorocytidine with phosphorothioate linkage
  modified_base 20: mod_base = OTHER; note = 2'-O-methyluridine with phosphorothioate linkage
  modified_base 21: mod_base = OTHER; note = 2'-O-methylcytidine
atccaatggctatggagcctc

SEQ ID NO: 2406 - RNA, 21 nt, synthetic construct
  source 1..21: mol_type = other RNA
  modified_base 1: mod_base = OTHER; note = 2'-O-methylguanosine with phosphorothioate linkage
  modified_base 2: mod_base = OTHER; note = 2'-O-methylcytidine with phosphorothioate linkage
  modified_base 3: mod_base = OTHER; note = 2'-fluorocytidine
  modified_base 4: mod_base = OTHER; note = 2'-O-methyluridine
  modified_base 5: mod_base = OTHER; note = 2'-fluorouridine
  modified_base 6: mod_base = OTHER; note = 2'-O-methyladenosine
  modified_base 7: mod_base = OTHER; note = 2'-fluorouridine
  modified_base 8: mod_base = OTHER; note = 2'-O-methyladenosine
  modified_base 9: mod_base = OTHER; note = 2'-fluoroadenosine
  modified_base 10: mod_base = OTHER; note = 2'-O-methyladenosine
  modified_base 11: mod_base = OTHER; note = 2'-fluorouridine
  modified_base 12: mod_base = OTHER; note = 2'-O-methylguanosine
  modified_base 13: mod_base = OTHER; note = 2'-fluorocytidine
  modified_base 14: mod_base = OTHER; note = 2'-O-methylguanosine
  modified_base 15: mod_base = OTHER; note = 2'-fluoroadenosine
  modified_base 16: mod_base = OTHER; note = 2'-O-methylguanosine
  modified_base 17: mod_base = OTHER; note = 2'-fluorocytidine
  modified_base 18: mod_base = OTHER; note = 2'-O-methyluridine
  modified_base 19: mod_base = OTHER; note = 2'-fluoroguanosine with phosphorothioate linkage
  modified_base 20: mod_base = OTHER; note = 2'-O-methyluridine with phosphorothioate linkage
  modified_base 21: mod_base = OTHER; note = 2'-O-methylguanosine
gccttataaatgcgagctgtg

SEQ ID NO: 2407 - RNA, 21 nt, synthetic construct
  source 1..21: mol_type = other RNA
  modified_base 1: mod_base = OTHER; note = 2'-O-methylcytidine with phosphorothioate linkage
  modified_base 2: mod_base = OTHER; note = 2'-O-methyladenosine with phosphorothioate linkage
  modified_base 3: mod_base = OTHER; note = 2'-fluorocytidine
  modified_base 4: mod_base = OTHER; note = 2'-O-methyluridine
  modified_base 5: mod_base = OTHER; note = 2'-fluorouridine
  modified_base 6: mod_base = OTHER; note = 2'-O-methyladenosine
  modified_base 7: mod_base = OTHER; note = 2'-fluoroadenosine
  modified_base 8: mod_base = OTHER; note = 2'-O-methylguanosine
  modified_base 9: mod_base = OTHER; note = 2'-fluorocytidine
  modified_base 10: mod_base = OTHER; note = 2'-O-methyladenosine
  modified_base 11: mod_base = OTHER; note = 2'-fluoroadenosine
  modified_base 12: mod_base = OTHER; note = 2'-O-methyladenosine
  modified_base 13: mod_base = OTHER; note = 2'-fluorocytidine
  modified_base 14: mod_base = OTHER; note = 2'-O-methylguanosine
  modified_base 15: mod_base = OTHER; note = 2'-fluoroguanosine
  modified_base 16: mod_base = OTHER; note = 2'-O-methylguanosine
  modified_base 17: mod_base = OTHER; note = 2'-fluoroadenosine
  modified_base 18: mod_base = OTHER; note = 2'-O-methyladenosine
  modified_base 19: mod_base = OTHER; note = 2'-fluorouridine with phosphorothioate linkage
  modified_base 20: mod_base = OTHER; note = 2'-O-methyluridine with phosphorothioate linkage
  modified_base 21: mod_base = OTHER; note = 2'-O-methylcytidine
cacttaagcaaacgggaattc

SEQ ID NO: 2408 - RNA, 21 nt, synthetic construct
  source 1..21: mol_type = other RNA
  modified_base 1: mod_base = OTHER; note = 2'-O-methylcytidine with phosphorothioate linkage
  modified_base 2: mod_base = OTHER; note = 2'-O-methyladenosine with phosphorothioate linkage
  modified_base 3: mod_base = OTHER; note = 2'-fluoroadenosine
  modified_base 4: mod_base = OTHER; note = 2'-O-methylguanosine
  modified_base 5: mod_base = OTHER; note = 2'-fluorouridine
  modified_base 6: mod_base = OTHER; note = 2'-O-methylcytidine
  modified_base 7: mod_base = OTHER; note = 2'-fluorocytidine
  modified_base 8: mod_base = OTHER; note = 2'-O-methyladenosine
  modified_base 9: mod_base = OTHER; note = 2'-fluoroadenosine
  modified_base 10: mod_base = OTHER; note = 2'-O-methylguanosine
  modified_base 11: mod_base = OTHER; note = 2'-fluorouridine
  modified_base 12: mod_base = OTHER; note = 2'-O-methylcytidine
  modified_base 13: mod_base = OTHER; note = 2'-fluoroadenosine
  modified_base 14: mod_base = OTHER; note = 2'-O-methyluridine
  modified_base 15: mod_base = OTHER; note = 2'-fluoroguanosine
  modified_base 16: mod_base = OTHER; note = 2'-O-methylcytidine
  modified_base 17: mod_base = OTHER; note = 2'-fluoroguanosine
  modified_base 18: mod_base = OTHER; note = 2'-O-methyladenosine
  modified_base 19: mod_base = OTHER; note = 2'-fluoroguanosine with phosphorothioate linkage
  modified_base 20: mod_base = OTHER; note = 2'-O-methyluridine with phosphorothioate linkage
  modified_base 21: mod_base = OTHER; note = 2'-O-methyluridine
caagtccaagtcatgcgagtt

SEQ ID NO: 2409 - RNA, 21 nt, synthetic construct
  source 1..21: mol_type = other RNA
  modified_base 1: mod_base = OTHER; note = 2'-O-methylguanosine with phosphorothioate linkage
  modified_base 2: mod_base = OTHER; note = 2'-O-methylguanosine with phosphorothioate linkage
  modified_base 3: mod_base = OTHER; note = 2'-fluoroadenosine
  modified_base 4: mod_base = OTHER; note = 2'-O-methyluridine
  modified_base 5: mod_base = OTHER; note = 2'-fluorouridine
  modified_base 6: mod_base = OTHER; note = 2'-O-methyladenosine
  modified_base 7: mod_base = OTHER; note = 2'-fluoroadenosine
  modified_base 8: mod_base = OTHER; note = 2'-O-methylguanosine
  modified_base 9: mod_base = OTHER; note = 2'-fluoroadenosine
  modified_base 10: mod_base = OTHER; note = 2'-O-methyladenosine
  modified_base 11: mod_base = OTHER; note = 2'-fluorouridine
  modified_base 12: mod_base = OTHER; note = 2'-O-methylcytidine
  modified_base 13: mod_base = OTHER; note = 2'-fluorouridine
  modified_base 14: mod_base = OTHER; note = 2'-O-methyladenosine
  modified_base 15: mod_base = OTHER; note = 2'-fluorocytidine
  modified_base 16: mod_base = OTHER; note = 2'-O-methyluridine
  modified_base 17: mod_base = OTHER; note = 2'-fluorouridine
  modified_base 18: mod_base = OTHER; note = 2'-O-methyladenosine
  modified_base 19: mod_base = OTHER; note = 2'-fluoroguanosine with phosphorothioate linkage
  modified_base 20: mod_base = OTHER; note = 2'-O-methyladenosine with phosphorothioate linkage
  modified_base 21: mod_base = OTHER; note = 2'-O-methyladenosine
ggattaagaatctacttagaa

SEQ ID NO: 2410 - RNA, 21 nt, synthetic construct
  source 1..21: mol_type = other RNA
  modified_base 1: mod_base = OTHER; note = 2'-O-methylcytidine with phosphorothioate linkage
  modified_base 2: mod_base = OTHER; note = 2'-O-methyladenosine with phosphorothioate linkage
  modified_base 3: mod_base = OTHER; note = 2'-fluoroadenosine
  modified_base 4: mod_base = OTHER; note = 2'-O-methyluridine
  modified_base 5: mod_base = OTHER; note = 2'-fluorocytidine
  modified_base 6: mod_base = OTHER; note = 2'-O-methyluridine
  modified_base 7: mod_base = OTHER; note = 2'-fluorocytidine
  modified_base 8: mod_base = OTHER; note = 2'-O-methyladenosine
  modified_base 9: mod_base = OTHER; note = 2'-fluorocytidine
  modified_base 10: mod_base = OTHER; note = 2'-O-methyluridine
  modified_base 11: mod_base = OTHER; note = 2'-fluoroguanosine
  modified_base 12: mod_base = OTHER; note = 2'-O-methyluridine
  modified_base 13: mod_base = OTHER; note = 2'-fluorocytidine
  modified_base 14: mod_base = OTHER; note = 2'-O-methylcytidine
  modified_base 15: mod_base = OTHER; note = 2'-fluoroadenosine
  modified_base 16: mod_base = OTHER; note = 2'-O-methylcytidine
  modified_base 17: mod_base = OTHER; note = 2'-fluoroadenosine
  modified_base 18: mod_base = OTHER; note = 2'-O-methylguanosine
  modified_base 19: mod_base = OTHER; note = 2'-fluoroguanosine with phosphorothioate linkage
  modified_base 20: mod_base = OTHER; note = 2'-O-methyladenosine with phosphorothioate linkage
  modified_base 21: mod_base = OTHER; note = 2'-O-methylguanosine
caatctcactgtccacaggag

SEQ ID NO: 2411 - RNA, 21 nt, synthetic construct
  source 1..21: mol_type = other RNA
  modified_base 1: mod_base = OTHER; note = 2'-O-methyladenosine with phosphorothioate linkage
  modified_base 2: mod_base = OTHER; note = 2'-O-methyladenosine with phosphorothioate linkage
  modified_base 3: mod_base = OTHER; note = 2'-fluorocytidine
  modified_base 4: mod_base = OTHER; note = 2'-O-methylcytidine
  modified_base 5: mod_base = OTHER; note = 2'-fluorocytidine
  modified_base 6: mod_base = OTHER; note = 2'-O-methylguanosine
  modified_base 7: mod_base = OTHER; note = 2'-fluoroguanosine
  modified_base 8: mod_base = OTHER; note = 2'-O-methylcytidine
  modified_base 9: mod_base = OTHER; note = 2'-fluorouridine
  modified_base 10: mod_base = OTHER; note = 2'-O-methylcytidine
  modified_base 11: mod_base = OTHER; note = 2'-fluorouridine
  modified_base 12: mod_base = OTHER; note = 2'-O-methylcytidine
  modified_base 13: mod_base = OTHER; note = 2'-fluorocytidine
  modified_base 14: mod_base = OTHER; note = 2'-O-methylcytidine
  modified_base 15: mod_base = OTHER; note = 2'-fluoroguanosine
  modified_base 16: mod_base = OTHER; note = 2'-O-methyladenosine
  modified_base 17: mod_base = OTHER; note = 2'-fluorouridine
  modified_base 18: mod_base = OTHER; note = 2'-O-methylguanosine
  modified_base 19: mod_base = OTHER; note = 2'-fluorouridine with phosphorothioate linkage
  modified_base 20: mod_base = OTHER; note = 2'-O-methylguanosine with phosphorothioate linkage
  modified_base 21: mod_base = OTHER; note = 2'-O-methyladenosine
aacccggctctcccgatgtga

SEQ ID NO: 2412 - RNA, 21 nt, synthetic construct
  source 1..21: mol_type = other RNA
  modified_base 1: mod_base = OTHER; note = 2'-O-methyladenosine with phosphorothioate linkage
  modified_base 2: mod_base = OTHER; note = 2'-O-methylcytidine with phosphorothioate linkage
  modified_base 3: mod_base = OTHER; note = 2'-fluoroadenosine
  modified_base 4: mod_base = OTHER; note = 2'-O-methylcytidine
  modified_base 5: mod_base = OTHER; note = 2'-fluorouridine
  modified_base 6: mod_base = OTHER; note = 2'-O-methylcytidine
  modified_base 7: mod_base = OTHER; note = 2'-fluoroadenosine
  modified_base 8: mod_base = OTHER; note = 2'-O-methyluridine
  modified_base 9: mod_base = OTHER; note = 2'-fluoroguanosine
  modified_base 10: mod_base = OTHER; note = 2'-O-methylguanosine
  modified_base 11: mod_base = OTHER; note = 2'-fluoroadenosine
  modified_base 12: mod_base = OTHER; note = 2'-O-methyluridine
  modified_base 13: mod_base = OTHER; note = 2'-fluorouridine
  modified_base 14: mod_base = OTHER; note = 2'-O-methyladenosine
  modified_base 15: mod_base = OTHER; note = 2'-fluoroadenosine
  modified_base 16: mod_base = OTHER; note = 2'-O-methylguanosine
  modified_base 17: mod_base = OTHER; note = 2'-fluoroadenosine
  modified_base 18: mod_base = OTHER; note = 2'-O-methyladenosine
  modified_base 19: mod_base = OTHER; note = 2'-fluorouridine with phosphorothioate linkage
  modified_base 20: mod_base = OTHER; note = 2'-O-methylcytidine with phosphorothioate linkage
  modified_base 21: mod_base = OTHER; note = 2'-O-methyluridine
acactcatggattaagaatct

SEQ ID NO: 2413 - RNA, 21 nt, synthetic construct
  source 1..21: mol_type = other RNA
  modified_base 1: mod_base = OTHER; note = 2'-O-methylcytidine with phosphorothioate linkage
  modified_base 2: mod_base = OTHER; note = 2'-O-methyladenosine with phosphorothioate linkage
  modified_base 3: mod_base = OTHER; note = 2'-fluorouridine
  modified_base 4: mod_base = OTHER; note = 2'-O-methylguanosine
  modified_base 5: mod_base = OTHER; note = 2'-fluoroadenosine
  modified_base 6: mod_base = OTHER; note = 2'-O-methylcytidine
  modified_base 7: mod_base = OTHER; note = 2'-fluoroguanosine
  modified_base 8: mod_base = OTHER; note = 2'-O-methylguanosine
  modified_base 9: mod_base = OTHER; note = 2'-fluorocytidine
  modified_base 10: mod_base = OTHER; note = 2'-O-methyluridine
  modified_base 11: mod_base = OTHER; note = 2'-fluorocytidine
  modified_base 12: mod_base = OTHER; note = 2'-O-methyluridine
  modified_base 13: mod_base = OTHER; note = 2'-fluorocytidine
  modified_base 14: mod_base = OTHER; note = 2'-O-methylcytidine
  modified_base 15: mod_base = OTHER; note = 2'-fluorocytidine
  modified_base 16: mod_base = OTHER; note = 2'-O-methyladenosine
  modified_base 17: mod_base = OTHER; note = 2'-fluorocytidine
  modified_base 18: mod_base = OTHER; note = 2'-O-methyladenosine
  modified_base 19: mod_base = OTHER; note = 2'-fluoroadenosine with phosphorothioate linkage
  modified_base 20: mod_base = OTHER; note = 2'-O-methyluridine with phosphorothioate linkage
  modified_base 21: mod_base = OTHER; note = 2'-O-methyluridine
catgacggctctcccacaatt

SEQ ID NO: 2414 - RNA, 21 nt, synthetic construct
  source 1..21: mol_type = other RNA
  modified_base 1: mod_base = OTHER; note = 2'-O-methylguanosine with phosphorothioate linkage
  modified_base 2: mod_base = OTHER; note = 2'-O-methylguanosine with phosphorothioate linkage
  modified_base 3: mod_base = OTHER; note = 2'-fluoroadenosine
  modified_base 4: mod_base = OTHER; note = 2'-O-methylcytidine
  modified_base 5: mod_base = OTHER; note = 2'-fluoroguanosine
  modified_base 6: mod_base = OTHER; note = 2'-O-methyluridine
  modified_base 7: mod_base = OTHER; note = 2'-fluorouridine
  modified_base 8: mod_base = OTHER; note = 2'-O-methyluridine
  modified_base 9: mod_base = OTHER; note = 2'-fluoroadenosine
  modified_base 10: mod_base = OTHER; note = 2'-O-methylcytidine
  modified_base 11: mod_base = OTHER; note = 2'-fluoroadenosine
  modified_base 12: mod_base = OTHER; note = 2'-O-methyladenosine
  modified_base 13: mod_base = OTHER; note = 2'-fluoroadenosine
  modified_base 14: mod_base = OTHER; note = 2'-O-methyluridine
  modified_base 15: mod_base = OTHER; note = 2'-fluoroguanosine
  modified_base 16: mod_base = OTHER; note = 2'-O-methyluridine
  modified_base 17: mod_base = OTHER; note = 2'-fluoroguanosine
  modified_base 18: mod_base = OTHER; note = 2'-O-methyladenosine
  modified_base 19: mod_base = OTHER; note = 2'-fluoroadenosine with phosphorothioate linkage
  modified_base 20: mod_base = OTHER; note = 2'-O-methyladenosine with phosphorothioate linkage
  modified_base 21: mod_base = OTHER; note = 2'-O-methyluridine
ggacgtttacaaatgtgaaat

SEQ ID NO: 2415 - RNA, 21 nt, synthetic construct
  source 1..21: mol_type = other RNA
  modified_base 1: mod_base = OTHER; note = 2'-O-methyluridine with phosphorothioate linkage
  modified_base 2: mod_base = OTHER; note = 2'-O-methyladenosine with phosphorothioate linkage
  modified_base 3: mod_base = OTHER; note = 2'-fluoroadenosine
  modified_base 4: mod_base = OTHER; note = 2'-O-methylguanosine
  modified_base 5: mod_base = OTHER; note = 2'-fluoroadenosine
  modified_base 6: mod_base = OTHER; note = 2'-O-methyladenosine
  modified_base 7: mod_base = OTHER; note = 2'-fluorouridine
  modified_base 8: mod_base = OTHER; note = 2'-O-methyladenosine
  modified_base 9: mod_base = OTHER; note = 2'-fluorocytidine
  modified_base 10: mod_base = OTHER; note = 2'-O-methylcytidine
  modified_base 11: mod_base = OTHER; note = 2'-fluoroadenosine
  modified_base 12: mod_base = OTHER; note = 2'-O-methylguanosine
  modified_base 13: mod_base = OTHER; note = 2'-fluoroguanosine
  modified_base 14: mod_base = OTHER; note = 2'-O-methyladenosine
  modified_base 15: mod_base = OTHER; note = 2'-fluorouridine
  modified_base 16: mod_base = OTHER; note = 2'-O-methylcytidine
  modified_base 17: mod_base = OTHER; note = 2'-fluoroadenosine
  modified_base 18: mod_base = OTHER; note = 2'-O-methylguanosine
  modified_base 19: mod_base = OTHER; note = 2'-fluorouridine with phosphorothioate linkage
  modified_base 20: mod_base = OTHER; note = 2'-O-methyladenosine with phosphorothioate linkage
  modified_base 21: mod_base = OTHER; note = 2'-O-methyluridine
taagaataccaggatcagtat

SEQ ID NO: 2416 - RNA, 21 nt, synthetic construct
  source 1..21: mol_type = other RNA
  modified_base 1: mod_base = OTHER; note = 2'-O-methyladenosine with phosphorothioate linkage
  modified_base 2: mod_base = OTHER; note = 2'-O-methyluridine with phosphorothioate linkage
  modified_base 3: mod_base = OTHER; note = 2'-fluoroguanosine
  modified_base 4: mod_base = OTHER; note = 2'-O-methyladenosine
  modified_base 5: mod_base = OTHER; note = 2'-fluorocytidine
  modified_base 6: mod_base = OTHER; note = 2'-O-methylguanosine
  modified_base 7: mod_base = OTHER; note = 2'-fluoroguanosine
  modified_base 8: mod_base = OTHER; note = 2'-O-methylcytidine
  modified_base 9: mod_base = OTHER; note = 2'-fluorouridine
  modified_base 10: mod_base = OTHER; note = 2'-O-methylcytidine
  modified_base 11: mod_base = OTHER; note = 2'-fluorouridine
  modified_base 12: mod_base = OTHER; note = 2'-O-methylcytidine
  modified_base 13: mod_base = OTHER; note = 2'-fluorocytidine
  modified_base 14: mod_base = OTHER; note = 2'-O-methylcytidine
  modified_base 15: mod_base = OTHER; note = 2'-fluoroadenosine
  modified_base 16: mod_base = OTHER; note = 2'-O-methylcytidine
  modified_base 17: mod_base = OTHER; note = 2'-fluoroadenosine
  modified_base 18: mod_base = OTHER; note = 2'-O-methyladenosine
  modified_base 19: mod_base = OTHER; note = 2'-fluorouridine with phosphorothioate linkage
  modified_base 20: mod_base = OTHER; note = 2'-O-methyluridine with phosphorothioate linkage
  modified_base 21: mod_base = OTHER; note = 2'-O-methylcytidine
atgacggctctcccacaattc

SEQ ID NO: 2417 - RNA, 21 nt, synthetic construct
  source 1..21: mol_type = other RNA
  modified_base 1: mod_base = OTHER; note = 2'-O-methyladenosine with phosphorothioate linkage
  modified_base 2: mod_base = OTHER; note = 2'-O-methylguanosine with phosphorothioate linkage
  modified_base 3: mod_base = OTHER; note = 2'-fluorocytidine
  modified_base 4: mod_base = OTHER; note = 2'-O-methyladenosine
  modified_base 5: mod_base = OTHER; note = 2'-fluorocytidine
  modified_base 6: mod_base = OTHER; note = 2'-O-methyladenosine
  modified_base 7: mod_base = OTHER; note = 2'-fluoroadenosine
  modified_base 8: mod_base = OTHER; note = 2'-O-methyladenosine
  modified_base 9: mod_base = OTHER; note = 2'-fluorocytidine
  modified_base 10: mod_base = OTHER; note = 2'-O-methylguanosine
  modified_base 11: mod_base = OTHER; note = 2'-fluoroguanosine
  modified_base 12: mod_base = OTHER; note = 2'-O-methyladenosine
  modified_base 13: mod_base = OTHER; note = 2'-fluoroadenosine
  modified_base 14: mod_base = OTHER; note = 2'-O-methyladenosine
  modified_base 15: mod_base = OTHER; note = 2'-fluorocytidine
  modified_base 16: mod_base = OTHER; note = 2'-O-methyladenosine
  modified_base 17: mod_base = OTHER; note = 2'-fluoroadenosine
  modified_base 18: mod_base = OTHER; note = 2'-O-methyluridine
  modified_base 19: mod_base = OTHER; note = 2'-fluoroguanosine with phosphorothioate linkage
  modified_base 20: mod_base = OTHER; note = 2'-O-methylcytidine with phosphorothioate linkage
  modified_base 21: mod_base = OTHER; note = 2'-O-methyladenosine
agcacaaacggaaacaatgca

SEQ ID NO: 2418 - RNA, 21 nt, synthetic construct
  source 1..21: mol_type = other RNA
  modified_base 1: mod_base = OTHER; note = 2'-O-methylguanosine with phosphorothioate linkage
  modified_base 2: mod_base = OTHER; note = 2'-O-methyluridine with phosphorothioate linkage
  modified_base 3: mod_base = OTHER; note = 2'-fluorouridine
  modified_base 4: mod_base = OTHER; note = 2'-O-methyluridine
  modified_base 5: mod_base = OTHER; note = 2'-fluorocytidine
  modified_base 6: mod_base = OTHER; note = 2'-O-methyluridine
  modified_base 7: mod_base = OTHER; note = 2'-fluorocytidine
  modified_base 8: mod_base = OTHER; note = 2'-O-methyluridine
  modified_base 9: mod_base = OTHER; note = 2'-fluorouridine
  modified_base 10: mod_base = OTHER; note = 2'-O-methylguanosine
  modified_base 11: mod_base = OTHER; note = 2'-fluorocytidine
  modified_base 12: mod_base = OTHER; note = 2'-O-methyladenosine
  modified_base 13: mod_base = OTHER; note = 2'-fluoroadenosine
  modified_base 14: mod_base = OTHER; note = 2'-O-methylcytidine
  modified_base 15: mod_base = OTHER; note = 2'-fluoroadenosine
  modified_base 16: mod_base = OTHER; note = 2'-O-methylcytidine
  modified_base 17: mod_base = OTHER; note = 2'-fluoroguanosine
  modified_base 18: mod_base = OTHER; note = 2'-O-methylcytidine
  modified_base 19: mod_base = OTHER; note = 2'-fluoroadenosine with phosphorothioate linkage
  modified_base 20: mod_base = OTHER; note = 2'-O-methylcytidine with phosphorothioate linkage
  modified_base 21: mod_base = OTHER; note = 2'-O-methyladenosine
gtttctcttgcaacacgcaca

SEQ ID NO: 2419 - RNA, 21 nt, synthetic construct
  source 1..21: mol_type = other RNA
  modified_base 1: mod_base = OTHER; note = 2'-O-methylcytidine with phosphorothioate linkage
  modified_base 2: mod_base = OTHER; note = 2'-O-methyluridine with phosphorothioate linkage
  modified_base 3: mod_base = OTHER; note = 2'-fluoroguanosine
  modified_base 4: mod_base = OTHER; note = 2'-O-methyluridine
  modified_base 5: mod_base = OTHER; note = 2'-fluoroguanosine
  modified_base 6: mod_base = OTHER; note = 2'-O-methylcytidine
  modified_base 7: mod_base = OTHER; note = 2'-fluoroadenosine
  modified_base 8: mod_base = OTHER; note = 2'-O-methyladenosine
  modified_base 9: mod_base = OTHER; note = 2'-fluorocytidine
  modified_base 10: mod_base = OTHER; note = 2'-O-methyluridine
  modified_base 11: mod_base = OTHER; note = 2'-fluoroadenosine
  modified_base 12: mod_base = OTHER; note = 2'-O-methyluridine
  modified_base 13: mod_base = OTHER; note = 2'-fluoroguanosine
  modified_base 14: mod_base = OTHER; note = 2'-O-methylcytidine
  modified_base 15: mod_base = OTHER; note = 2'-fluorocytidine
  modified_base 16: mod_base = OTHER; note = 2'-O-methyluridine
  modified_base 17: mod_base = OTHER; note = 2'-fluoroguanosine
  modified_base 18: mod_base = OTHER; note = 2'-O-methyluridine
  modified_base 19: mod_base = OTHER; note = 2'-fluoroguanosine with phosphorothioate linkage
  modified_base 20: mod_base = OTHER; note = 2'-O-methylcytidine with phosphorothioate linkage
  modified_base 21: mod_base = OTHER; note = 2'-O-methylcytidine
ctgtgcaactatgcctgtgcc

SEQ ID NO: 2420 - RNA, 21 nt, synthetic construct
  source 1..21: mol_type = other RNA
  modified_base 1: mod_base = OTHER; note = 2'-O-methyluridine with phosphorothioate linkage
  modified_base 2: mod_base = OTHER; note = 2'-O-methylguanosine with phosphorothioate linkage
  modified_base 3: mod_base = OTHER; note = 2'-fluorocytidine
  modified_base 4: mod_base = OTHER; note = 2'-O-methyladenosine
  modified_base 5: mod_base = OTHER; note = 2'-fluoroadenosine
  modified_base 6: mod_base = OTHER; note = 2'-O-methyladenosine
  modified_base 7: mod_base = OTHER; note = 2'-fluoroguanosine
  modified_base 8: mod_base = OTHER; note = 2'-O-methylguanosine
  modified_base 9: mod_base = OTHER; note = 2'-fluorouridine
  modified_base 10: mod_base = OTHER; note = 2'-O-methyluridine
  modified_base 11: mod_base = OTHER; note = 2'-fluoroadenosine
  modified_base 12: mod_base = OTHER; note = 2'-O-methylcytidine
  modified_base 13: mod_base = OTHER; note = 2'-fluorouridine
  modified_base 14: mod_base = OTHER; note = 2'-O-methylguanosine
  modified_base 15: mod_base = OTHER; note = 2'-fluorocytidine
  modified_base 16: mod_base = OTHER; note = 2'-O-methyladenosine
  modified_base 17: mod_base = OTHER; note = 2'-fluoroadenosine
  modified_base 18: mod_base = OTHER; note = 2'-O-methylcytidine
  modified_base 19: mod_base = OTHER; note = 2'-fluorocytidine with phosphorothioate linkage
  modified_base 20: mod_base = OTHER; note = 2'-O-methyladenosine with phosphorothioate linkage
  modified_base 21: mod_base = OTHER; note = 2'-O-methyluridine
tgcaaaggttactgcaaccat

SEQ ID NO: 2421 - RNA, 21 nt, synthetic construct
  source 1..21: mol_type = other RNA
  modified_base 1: mod_base = OTHER; note = 2'-O-methyluridine with phosphorothioate linkage
  modified_base 2: mod_base = OTHER; note = 2'-O-methylcytidine with phosphorothioate linkage
  modified_base 3: mod_base = OTHER; note = 2'-fluoroguanosine
  modified_base 4: mod_base = OTHER; note = 2'-O-methylcytidine
  modified_base 5: mod_base = OTHER; note = 2'-fluorocytidine
  modified_base 6: mod_base = OTHER; note = 2'-O-methylguanosine
  modified_base 7: mod_base = OTHER; note = 2'-fluorocytidine
  modified_base 8: mod_base = OTHER; note = 2'-O-methyladenosine
  modified_base 9: mod_base = OTHER; note = 2'-fluoroadenosine
  modified_base 10: mod_base = OTHER; note = 2'-O-methylguanosine
  modified_base 11: mod_base = OTHER; note = 2'-fluorocytidine
  modified_base 12: mod_base = OTHER; note = 2'-O-methyladenosine
  modified_base 13: mod_base = OTHER; note = 2'-fluoroadenosine
  modified_base 14: mod_base = OTHER; note = 2'-O-methylguanosine
  modified_base 15: mod_base = OTHER; note = 2'-fluoroguanosine
  modified_base 16: mod_base = OTHER; note = 2'-O-methylcytidine
  modified_base 17: mod_base = OTHER; note = 2'-fluoroadenosine
  modified_base 18: mod_base = OTHER; note = 2'-O-methyladenosine
  modified_base 19: mod_base = OTHER; note = 2'-fluoroadenosine with phosphorothioate linkage
  modified_base 20: mod_base = OTHER; note = 2'-O-methylcytidine with phosphorothioate linkage
  modified_base 21: mod_base = OTHER; note = 2'-O-methylcytidine
tcgccgcaagcaaggcaaacc

SEQ ID NO: 2422 - RNA, 21 nt, synthetic construct
  source 1..21: mol_type = other RNA
  modified_base 1: mod_base = OTHER; note = 2'-O-methylcytidine with phosphorothioate linkage
  modified_base 2: mod_base = OTHER; note = 2'-O-methylcytidine with phosphorothioate linkage
  modified_base 3: mod_base = OTHER; note = 2'-fluorouridine
  modified_base 4: mod_base = OTHER; note = 2'-O-methyluridine
  modified_base 5: mod_base = OTHER; note = 2'-fluorocytidine
  modified_base 6: mod_base = OTHER; note = 2'-O-methyladenosine
  modified_base 7: mod_base = OTHER; note = 2'-fluoroguanosine
  modified_base 8: mod_base = OTHER; note = 2'-O-methylguanosine
  modified_base 9: mod_base = OTHER; note = 2'-fluoroadenosine
  modified_base 10: mod_base = OTHER; note = 2'-O-methylcytidine
  modified_base 11: mod_base = OTHER; note = 2'-fluorouridine
  modified_base 12: mod_base = OTHER; note = 2'-O-methyladenosine
  modified_base 13: mod_base = OTHER; note = 2'-fluoroguanosine
  modified_base 14: mod_base = OTHER; note = 2'-O-methylguanosine
  modified_base 15: mod_base = OTHER; note = 2'-fluorouridine
  modified_base 16: mod_base = OTHER; note = 2'-O-methylguanosine
  modified_base 17: mod_base = OTHER; note = 2'-fluorocytidine
  modified_base 18: mod_base = OTHER; note = 2'-O-methyladenosine
  modified_base 19: mod_base = OTHER; note = 2'-fluoroguanosine with phosphorothioate linkage
  modified_base 20: mod_base = OTHER; note = 2'-O-methyladenosine with phosphorothioate linkage
  modified_base 21: mod_base = OTHER; note = 2'-O-methyladenosine
ccttcaggactaggtgcagaa

SEQ ID NO: 2423 - RNA, 21 nt, synthetic construct
  source 1..21: mol_type = other RNA
  modified_base 1: mod_base = OTHER; note = 2'-O-methyluridine with phosphorothioate linkage
  modified_base 2: mod_base = OTHER; note = 2'-O-methylcytidine with phosphorothioate linkage
  modified_base 3: mod_base = OTHER; note = 2'-fluorouridine
  modified_base 4: mod_base = OTHER; note = 2'-O-methyluridine
  modified_base 5: mod_base = OTHER; note = 2'-fluoroguanosine
  modified_base 6: mod_base = OTHER; note = 2'-O-methylcytidine
  modified_base 7: mod_base = OTHER; note = 2'-fluoroadenosine
  modified_base 8: mod_base = OTHER; note = 2'-O-methyladenosine
  modified_base 9: mod_base = OTHER; note = 2'-fluorocytidine
  modified_base 10: mod_base = OTHER; note = 2'-O-methyladenosine
  modified_base 11: mod_base = OTHER; note = 2'-fluorocytidine
  modified_base 12: mod_base = OTHER; note = 2'-O-methylguanosine
  modified_base 13: mod_base = OTHER; note = 2'-fluorocytidine
  modified_base 14: mod_base = OTHER; note = 2'-O-methyladenosine
  modified_base 15: mod_base = OTHER; note = 2'-fluorocytidine
  modified_base 16: mod_base = OTHER; note = 2'-O-methyladenosine
  modified_base 17: mod_base = OTHER; note = 2'-fluoroguanosine
  modified_base 18: mod_base = OTHER; note = 2'-O-methyladenosine
  modified_base 19: mod_base = OTHER; note = 2'-fluoroadenosine with phosphorothioate linkage
  modified_base 20: mod_base = OTHER; note = 2'-O-methylcytidine with phosphorothioate linkage
  modified_base 21: mod_base = OTHER; note = 2'-O-methyladenosine
tcttgcaacacgcacagaaca

SEQ ID NO: 2424 - RNA, 21 nt, synthetic construct
  source 1..21: mol_type = other RNA
  modified_base 1: mod_base = OTHER; note = 2'-O-methyladenosine with phosphorothioate linkage
  modified_base 2: mod_base = OTHER; note = 2'-O-methylcytidine with phosphorothioate linkage
  modified_base 3: mod_base = OTHER; note = 2'-fluoroguanosine
  modified_base 4: mod_base = OTHER; note = 2'-O-methyluridine
  modified_base 5: mod_base = OTHER; note = 2'-fluorocytidine
  modified_base 6: mod_base = OTHER; note = 2'-O-methyladenosine
  modified_base 7: mod_base = OTHER; note = 2'-fluorouridine
  modified_base 8: mod_base = OTHER; note = 2'-O-methylcytidine
  modified_base 9: mod_base = OTHER; note = 2'-fluorouridine
  modified_base 10: mod_base = OTHER; note = 2'-O-methyladenosine
  modified_base 11: mod_base = OTHER; note = 2'-fluoroguanosine
  modified_base 12: mod_base = OTHER; note = 2'-O-methyladenosine
  modified_base 13: mod_base = OTHER; note = 2'-fluoroguanosine
  modified_base 14: mod_base = OTHER; note = 2'-O-methylguanosine
  modified_base 15: mod_base = OTHER; note = 2'-fluoroadenosine
  modified_base 16: mod_base = OTHER; note = 2'-O-methyladenosine
  modified_base 17: mod_base = OTHER; note = 2'-fluorouridine
  modified_base 18: mod_base = OTHER; note = 2'-O-methyluridine
  modified_base 19: mod_base = OTHER; note = 2'-fluorouridine with phosphorothioate linkage
  modified_base 20: mod_base = OTHER; note = 2'-O-methylguanosine with phosphorothioate linkage
  modified_base 21: mod_base = OTHER; note = 2'-O-methylcytidine
acgtcatctagaggaatttgc

SEQ ID NO: 2425 - RNA, 21 nt, synthetic construct
  source 1..21: mol_type = other RNA
  modified_base 1: mod_base = OTHER; note = 2'-O-methylcytidine with phosphorothioate linkage
  modified_base 2: mod_base = OTHER; note = 2'-O-methyladenosine with phosphorothioate linkage
  modified_base 3: mod_base = OTHER; note = 2'-fluorocytidine
  modified_base 4: mod_base = OTHER; note = 2'-O-methyladenosine
  modified_base 5: mod_base = OTHER; note = 2'-fluoroguanosine
  modified_base 6: mod_base = OTHER; note = 2'-O-methyladenosine
  modified_base 7: mod_base = OTHER; note = 2'-fluoroadenosine
  modified_base 8: mod_base = OTHER; note = 2'-O-methylcytidine
  modified_base 9: mod_base = OTHER; note = 2'-fluoroadenosine
  modified_base 10: mod_base = OTHER; note = 2'-O-methylcytidine
  modified_base 11: mod_base = OTHER; note = 2'-fluorouridine
  modified_base 12: mod_base = OTHER; note = 2'-O-methylcytidine
  modified_base 13: mod_base = OTHER; note = 2'-fluoroadenosine
  modified_base 14: mod_base = OTHER; note = 2'-O-methyluridine
  modified_base 15: mod_base = OTHER; note = 2'-fluoroguanosine
  modified_base 16: mod_base = OTHER; note = 2'-O-methylguanosine
  modified_base 17: mod_base = OTHER; note = 2'-fluoroadenosine
  modified_base 18: mod_base = OTHER; note = 2'-O-methyluridine
  modified_base 19: mod_base = OTHER; note = 2'-fluorouridine with phosphorothioate linkage
  modified_base 20: mod_base = OTHER; note = 2'-O-methyladenosine with phosphorothioate linkage
  modified_base 21: mod_base = OTHER; note = 2'-O-methyladenosine
cacagaacactcatggattaa

SEQ ID NO: 2426 - RNA, 21 nt, synthetic construct
  source 1..21: mol_type = other RNA
  modified_base 1: mod_base = OTHER; note = 2'-O-methyluridine with phosphorothioate linkage
  modified_base 2: mod_base = OTHER; note = 2'-O-methylcytidine with phosphorothioate linkage
  modified_base 3: mod_base = OTHER; note = 2'-fluorouridine
  modified_base 4: mod_base = OTHER; note = 2'-O-methylguanosine
  modified_base 5: mod_base = OTHER; note = 2'-fluoroguanosine
  modified_base 6: mod_base = OTHER; note = 2'-O-methyladenosine
  modified_base 7: mod_base = OTHER; note = 2'-fluoroguanosine
  modified_base 8: mod_base = OTHER; note = 2'-O-methyluridine
  modified_base 9: mod_base = OTHER; note = 2'-fluorocytidine
  modified_base 10: mod_base = OTHER; note = 2'-O-methyluridine
  modified_base 11: mod_base = OTHER; note = 2'-fluorocytidine
  modified_base 12: mod_base = OTHER; note = 2'-O-methylcytidine
  modified_base 13: mod_base = OTHER; note = 2'-fluorouridine
  modified_base 14: mod_base = OTHER; note = 2'-O-methyluridine
  modified_base 15: mod_base = OTHER; note = 2'-fluorocytidine
  modified_base 16: mod_base = OTHER; note = 2'-O-methyluridine
  modified_base 17: mod_base = OTHER; note = 2'-fluorouridine
  modified_base 18: mod_base = OTHER; note = 2'-O-methyluridine
  modified_base 19: mod_base = OTHER; note = 2'-fluorocytidine with phosphorothioate linkage
  modified_base 20: mod_base = OTHER; note = 2'-O-methyluridine with phosphorothioate linkage
  modified_base 21: mod_base = OTHER; note = 2'-O-methyladenosine
tctggagtctccttctttcta

SEQ ID NO: 2427 - RNA, 21 nt, synthetic construct
  source 1..21: mol_type = other RNA
  modified_base 1: mod_base = OTHER; note = 2'-O-methyluridine with phosphorothioate linkage
  modified_base 2: mod_base = OTHER; note = 2'-O-methyladenosine with phosphorothioate linkage
  modified_base 3: mod_base = OTHER; note = 2'-fluoroadenosine
  modified_base 4: mod_base = OTHER; note = 2'-O-methylcytidine
  modified_base 5: mod_base = OTHER; note = 2'-fluorocytidine
  modified_base 6: mod_base = OTHER; note = 2'-O-methylcytidine
  modified_base 7: mod_base = OTHER; note = 2'-fluoroguanosine
  modified_base 8: mod_base = OTHER; note = 2'-O-methylguanosine
  modified_base 9: mod_base = OTHER; note = 2'-fluorocytidine
  modified_base 10: mod_base = OTHER; note = 2'-O-methyluridine
  modified_base 11: mod_base = OTHER; note = 2'-fluorocytidine
  modified_base 12: mod_base = OTHER; note = 2'-O-methyluridine
  modified_base 13: mod_base = OTHER; note = 2'-fluorocytidine
  modified_base 14: mod_base = OTHER; note = 2'-O-methylcytidine
  modified_base 15: mod_base = OTHER; note = 2'-fluorocytidine
  modified_base 16: mod_base = OTHER; note = 2'-O-methylguanosine
  modified_base 17: mod_base = OTHER; note = 2'-fluoroadenosine
  modified_base 18: mod_base = OTHER; note = 2'-O-methyluridine
  modified_base 19: mod_base = OTHER; note = 2'-fluoroguanosine with phosphorothioate linkage
  modified_base 20: mod_base = OTHER; note = 2'-O-methyluridine with phosphorothioate linkage
  modified_base 21: mod_base = OTHER; note = 2'-O-methylguanosine
taacccggctctcccgatgtg

SEQ ID NO: 2428 - RNA, 21 nt, synthetic construct
  source 1..21: mol_type = other RNA
  modified_base 1: mod_base = OTHER; note = 2'-O-methyladenosine with phosphorothioate linkage
  modified_base 2: mod_base = OTHER; note = 2'-O-methylguanosine with phosphorothioate linkage
  modified_base 3: mod_base = OTHER; note = 2'-fluorocytidine
  modified_base 4: mod_base = OTHER; note = 2'-O-methyladenosine
  modified_base 5: mod_base = OTHER; note = 2'-fluorocytidine
  modified_base 6: mod_base = OTHER; note = 2'-O-methyluridine
  modified_base 7: mod_base = OTHER; note = 2'-fluorouridine
  modified_base 8: mod_base = OTHER; note = 2'-O-methyladenosine
  modified_base 9: mod_base = OTHER; note = 2'-fluoroadenosine
  modified_base 10: mod_base = OTHER; note = 2'-O-methylguanosine
  modified_base 11: mod_base = OTHER; note = 2'-fluorocytidine
  modified_base 12: mod_base = OTHER; note = 2'-O-methyladenosine
  modified_base 13: mod_base = OTHER; note = 2'-fluoroadenosine
  modified_base 14: mod_base = OTHER; note = 2'-O-methyladenosine
  modified_base 15: mod_base = OTHER; note = 2'-fluorocytidine
  modified_base 16: mod_base = OTHER; note = 2'-O-methylguanosine
  modified_base 17: mod_base = OTHER; note = 2'-fluoroguanosine
  modified_base 18: mod_base = OTHER; note = 2'-O-methylguanosine
  modified_base 19: mod_base = OTHER; note = 2'-fluoroadenosine with phosphorothioate linkage
  modified_base 20: mod_base = OTHER; note = 2'-O-methyladenosine with phosphorothioate linkage
  modified_base 21: mod_base = OTHER; note = 2'-O-methyluridine
agcacttaagcaaacgggaat

SEQ ID NO: 2429 - RNA, 21 nt, synthetic construct
  source 1..21: mol_type = other RNA
  modified_base 1: mod_base = OTHER; note = 2'-O-methyladenosine with phosphorothioate linkage
  modified_base 2: mod_base = OTHER; note = 2'-O-methyladenosine with phosphorothioate linkage
  modified_base 3: mod_base = OTHER; note = 2'-fluoroadenosine
  modified_base 4: mod_base = OTHER; note = 2'-O-methylcytidine
  modified_base 5: mod_base = OTHER; note = 2'-fluoroguanosine
  modified_base 6: mod_base = OTHER; note = 2'-O-methylguanosine
  modified_base 7: mod_base = OTHER; note = 2'-fluoroadenosine
  modified_base 8: mod_base = OTHER; note = 2'-O-methyladenosine
  modified_base 9: mod_base = OTHER; note = 2'-fluoroadenosine
  modified_base 10: mod_base = OTHER; note = 2'-O-methylcytidine
  modified_base 11: mod_base = OTHER; note = 2'-fluoroadenosine
  modified_base 12: mod_base = OTHER; note = 2'-O-methyladenosine
  modified_base 13: mod_base = OTHER; note = 2'-fluorouridine
  modified_base 14: mod_base = OTHER; note = 2'-O-methylguanosine
  modified_base 15: mod_base = OTHER; note = 2'-fluorocytidine
  modified_base 16: mod_base = OTHER; note = 2'-O-methyladenosine
  modified_base 17: mod_base = OTHER; note = 2'-fluoroadenosine
  modified_base 18: mod_base = OTHER; note = 2'-O-methyluridine
  modified_base 19: mod_base = OTHER; note = 2'-fluoroguanosine with phosphorothioate linkage
  modified_base 20: mod_base = OTHER; note = 2'-O-methylguanosine with phosphorothioate linkage
  modified_base 21: mod_base = OTHER; note = 2'-O-methylcytidine
aaacggaaacaatgcaatggc

SEQ ID NO: 2430 - RNA, 21 nt, synthetic construct
  source 1..21: mol_type = other RNA
  modified_base 1: mod_base = OTHER; note = 2'-O-methyladenosine with phosphorothioate linkage
  modified_base 2: mod_base = OTHER; note = 2'-O-methyluridine with phosphorothioate linkage
  modified_base 3: mod_base = OTHER; note = 2'-fluoroguanosine
  modified_base 4: mod_base = OTHER; note = 2'-O-methylguanosine
  modified_base 5: mod_base = OTHER; note = 2'-fluoroadenosine
  modified_base 6: mod_base = OTHER; note = 2'-O-methyluridine
  modified_base 7: mod_base = OTHER; note = 2'-fluorouridine
  modified_base 8: mod_base = OTHER; note = 2'-O-methyladenosine
  modified_base 9: mod_base = OTHER; note = 2'-fluoroadenosine
  modified_base 10: mod_base = OTHER; note = 2'-O-methylguanosine
  modified_base 11: mod_base = OTHER; note = 2'-fluoroadenosine
  modified_base 12: mod_base = OTHER; note = 2'-O-methyladenosine
  modified_base 13: mod_base = OTHER; note = 2'-fluorouridine
  modified_base 14: mod_base = OTHER; note = 2'-O-methylcytidine
  modified_base 15: mod_base = OTHER; note = 2'-fluorouridine
  modified_base 16: mod_base = OTHER; note = 2'-O-methyladenosine
  modified_base 17: mod_base = OTHER; note = 2'-fluorocytidine
  modified_base 18: mod_base = OTHER; note = 2'-O-methyluridine
  modified_base 19: mod_base = OTHER; note = 2'-fluorouridine with phosphorothioate linkage
  modified_base 20: mod_base = OTHER; note = 2'-O-methyladenosine with phosphorothioate linkage
  modified_base 21: mod_base = OTHER; note = 2'-O-methylguanosine
atggattaagaatctacttag

SEQ ID NO: 2431 - RNA, 21 nt, synthetic construct
  source 1..21: mol_type = other RNA
  modified_base 1: mod_base = OTHER; note = 2'-O-methylcytidine with phosphorothioate linkage
  modified_base 2: mod_base = OTHER; note = 2'-O-methylcytidine with phosphorothioate linkage
  modified_base 3: mod_base = OTHER; note = 2'-fluorouridine
  modified_base 4: mod_base = OTHER; note = 2'-O-methylguanosine
  modified_base 5: mod_base = OTHER; note = 2'-fluorocytidine
  modified_base 6: mod_base = OTHER; note = 2'-O-methyluridine
  modified_base 7: mod_base = OTHER; note = 2'-fluoroadenosine
  modified_base 8: mod_base = OTHER; note = 2'-O-methyladenosine
  modified_base 9: mod_base = OTHER; note = 2'-fluoroguanosine
  modified_base 10: mod_base = OTHER; note = 2'-O-methyladenosine
  modified_base 11: mod_base = OTHER; note = 2'-fluoroadenosine
  modified_base 12: mod_base = OTHER; note = 2'-O-methyluridine
  modified_base 13: mod_base = OTHER; note = 2'-fluoroadenosine
  modified_base 14: mod_base = OTHER; note = 2'-O-methylcytidine
  modified_base 15: mod_base = OTHER; note = 2'-fluorocytidine
  modified_base 16: mod_base = OTHER; note = 2'-O-methyladenosine
  modified_base 17: mod_base = OTHER; note = 2'-fluoroguanosine
  modified_base 18: mod_base = OTHER; note = 2'-O-methylguanosine
  modified_base 19: mod_base = OTHER; note = 2'-fluoroadenosine with phosphorothioate linkage
  modified_base 20: mod_base = OTHER; note = 2'-O-methyluridine with phosphorothioate linkage
  modified_base 21: mod_base = OTHER; note = 2'-O-methylcytidine
cctgctaagaataccaggatc

SEQ ID NO: 2432 - RNA, 21 nt, synthetic construct
  source 1..21: mol_type = other RNA
  modified_base 1: mod_base = OTHER; note = 2'-O-methyladenosine with phosphorothioate linkage
  modified_base 2: mod_base = OTHER; note = 2'-O-methylcytidine with phosphorothioate linkage
  modified_base 3: mod_base = OTHER; note = 2'-fluoroguanosine
  modified_base 4: mod_base = OTHER; note = 2'-O-methyluridine
  modified_base 5: mod_base = OTHER; note = 2'-fluorocytidine
  modified_base 6: mod_base = OTHER; note = 2'-O-methylcytidine
  modified_base 7: mod_base = OTHER; note = 2'-fluoroguanosine
  modified_base 8: mod_base = OTHER; note = 2'-O-methylcytidine
  modified_base 9: mod_base = OTHER; note = 2'-fluoroadenosine
  modified_base 10: mod_base = OTHER; note = 2'-O-methylcytidine
  modified_base 11: mod_base = OTHER; note = 2'-fluorouridine
  modified_base 12: mod_base = OTHER; note = 2'-O-methyluridine
  modified_base 13: mod_base = OTHER; note = 2'-fluoroguanosine
  modified_base 14: mod_base = OTHER; note = 2'-O-methyladenosine
  modified_base 15: mod_base = OTHER; note = 2'-fluoroadenosine
  modified_base 16: mod_base = OTHER; note = 2'-O-methylcytidine
  modified_base 17: mod_base = OTHER; note = 2'-fluorouridine
  modified_base 18: mod_base = OTHER; note = 2'-O-methyluridine
  modified_base 19: mod_base = OTHER; note = 2'-fluoroguanosine with phosphorothioate linkage
  modified_base 20: mod_base = OTHER; note = 2'-O-methylcytidine with phosphorothioate linkage
  modified_base 21: mod_base = OTHER; note = 2'-O-methyladenosine
acgtccgcacttgaacttgca

SEQ ID NO: 2433 - RNA, 21 nt, synthetic construct
  source 1..21: mol_type = other RNA
  modified_base 1: mod_base = OTHER; note = 2'-O-methylcytidine with phosphorothioate linkage
  modified_base 2: mod_base = OTHER; note = 2'-O-methyladenosine with phosphorothioate linkage
  modified_base 3: mod_base = OTHER; note = 2'-fluorocytidine
  modified_base 4: mod_base = OTHER; note = 2'-O-methyladenosine
  modified_base 5: mod_base = OTHER; note = 2'-fluorouridine
  modified_base 6: mod_base = OTHER; note = 2'-O-methyladenosine
  modified_base 7: mod_base = OTHER; note = 2'-fluoroguanosine
  modified_base 8: mod_base = OTHER; note = 2'-O-methylcytidine
  modified_base 9: mod_base = OTHER; note = 2'-fluoroadenosine
  modified_base 10: mod_base = OTHER; note = 2'-O-methylguanosine
  modified_base 11: mod_base = OTHER; note = 2'-fluoroadenosine
  modified_base 12: mod_base = OTHER; note = 2'-O-methyluridine
  modified_base 13: mod_base = OTHER; note = 2'-fluoroadenosine
  modified_base 14: mod_base = OTHER; note = 2'-O-methyladenosine
  modified_base 15: mod_base = OTHER; note = 2'-fluoroadenosine
  modified_base 16: mod_base = OTHER; note = 2'-O-methylcytidine
  modified_base 17: mod_base = OTHER; note = 2'-fluorouridine
  modified_base 18: mod_base = OTHER; note = 2'-O-methyluridine
  modified_base 19: mod_base = OTHER; note = 2'-fluorocytidine with phosphorothioate linkage
  modified_base 20: mod_base = OTHER; note = 2'-O-methyluridine with phosphorothioate linkage
  modified_base 21: mod_base = OTHER; note = 2'-O-methylguanosine
cacatagcagataaacttctg

SEQ ID NO: 2434 - RNA, 21 nt, synthetic construct
  source 1..21: mol_type = other RNA
  modified_base 1: mod_base = OTHER; note = 2'-O-methyluridine with phosphorothioate linkage
  modified_base 2: mod_base = OTHER; note = 2'-O-methylguanosine with phosphorothioate linkage
  modified_base 3: mod_base = OTHER; note = 2'-fluorocytidine
  modified_base 4: mod_base = OTHER; note = 2'-O-methyluridine
  modified_base 5: mod_base = OTHER; note = 2'-fluorocytidine
  modified_base 6: mod_base = OTHER; note = 2'-O-methyladenosine
  modified_base 7: mod_base = OTHER; note = 2'-fluoroguanosine
  modified_base 8: mod_base = OTHER; note = 2'-O-methylcytidine
  modified_base 9: mod_base = OTHER; note = 2'-fluorouridine
  modified_base 10: mod_base = OTHER; note = 2'-O-methylcytidine
  modified_base 11: mod_base = OTHER; note = 2'-fluorocytidine
  modified_base 12: mod_base = OTHER; note = 2'-O-methyladenosine
  modified_base 13: mod_base = OTHER; note = 2'-fluorouridine
  modified_base 14: mod_base = OTHER; note = 2'-O-methylguanosine
  modified_base 15: mod_base = OTHER; note = 2'-fluorocytidine
  modified_base 16: mod_base = OTHER; note = 2'-O-methyladenosine
  modified_base 17: mod_base = OTHER; note = 2'-fluoroguanosine
  modified_base 18: mod_base = OTHER; note = 2'-O-methylcytidine
  modified_base 19: mod_base = OTHER; note = 2'-fluoroadenosine with phosphorothioate linkage
  modified_base 20: mod_base = OTHER; note = 2'-O-methylcytidine with phosphorothioate linkage
  modified_base 21: mod_base = OTHER; note = 2'-O-methyluridine
tgctcagctccatgcagcact

SEQ ID NO: 2435 - RNA, 21 nt, synthetic construct
  source 1..21: mol_type = other RNA
  modified_base 1: mod_base = OTHER; note = 2'-O-methyladenosine with phosphorothioate linkage
  modified_base 2: mod_base = OTHER; note = 2'-O-methylcytidine with phosphorothioate linkage
  modified_base 3: mod_base = OTHER; note = 2'-fluoroadenosine
  modified_base 4: mod_base = OTHER; note = 2'-O-methyluridine
  modified_base 5: mod_base = OTHER; note = 2'-fluoroadenosine
  modified_base 6: mod_base = OTHER; note = 2'-O-methylguanosine
  modified_base 7: mod_base = OTHER; note = 2'-fluorocytidine
  modified_base 8: mod_base = OTHER; note = 2'-O-methyladenosine
  modified_base 9: mod_base = OTHER; note = 2'-fluoroguanosine
  modified_base 10: mod_base = OTHER; note = 2'-O-methyladenosine
  modified_base 11: mod_base = OTHER; note = 2'-fluorouridine
  modified_base 12: mod_base = OTHER; note = 2'-O-methyladenosine
  modified_base 13: mod_base = OTHER; note = 2'-fluoroadenosine
  modified_base 14: mod_base = OTHER; note = 2'-O-methyladenosine
  modified_base 15: mod_base = OTHER; note = 2'-fluorocytidine
  modified_base 16: mod_base = OTHER; note = 2'-O-methyluridine
  modified_base 17: mod_base = OTHER; note = 2'-fluorouridine
  modified_base 18: mod_base = OTHER; note = 2'-O-methylcytidine
  modified_base 19: mod_base = OTHER; note = 2'-fluorouridine with phosphorothioate linkage
  modified_base 20: mod_base = OTHER; note = 2'-O-methylguanosine with phosphorothioate linkage
  modified_base 21: mod_base = OTHER; note = 2'-O-methylcytidine
acatagcagataaacttctgc

SEQ ID NO: 2436 - RNA, 21 nt, synthetic construct
  source 1..21: mol_type = other RNA
  modified_base 1: mod_base = OTHER; note = 2'-O-methyladenosine with phosphorothioate linkage
  modified_base 2: mod_base = OTHER; note = 2'-O-methyladenosine with phosphorothioate linkage
  modified_base 3: mod_base = OTHER; note = 2'-fluorocytidine
  modified_base 4: mod_base = OTHER; note = 2'-O-methyladenosine
  modified_base 5: mod_base = OTHER; note = 2'-fluorocytidine
  modified_base 6: mod_base = OTHER; note = 2'-O-methylguanosine
  modified_base 7: mod_base = OTHER; note = 2'-fluorocytidine
  modified_base 8: mod_base = OTHER; note = 2'-O-methyladenosine
  modified_base 9: mod_base = OTHER; note = 2'-fluorocytidine
  modified_base 10: mod_base = OTHER; note = 2'-O-methyladenosine
  modified_base 11: mod_base = OTHER; note = 2'-fluoroguanosine
  modified_base 12: mod_base = OTHER; note = 2'-O-methyladenosine
  modified_base 13: mod_base = OTHER; note = 2'-fluoroadenosine
  modified_base 14: mod_base = OTHER; note = 2'-O-methylcytidine
  modified_base 15: mod_base = OTHER; note = 2'-fluoroadenosine
  modified_base 16: mod_base = OTHER; note = 2'-O-methylcytidine
  modified_base 17: mod_base = OTHER; note = 2'-fluorouridine
  modified_base 18: mod_base = OTHER; note = 2'-O-methylcytidine
  modified_base 19: mod_base = OTHER; note = 2'-fluoroadenosine with phosphorothioate linkage
  modified_base 20: mod_base = OTHER; note = 2'-O-methyluridine with phosphorothioate linkage
  modified_base 21: mod_base = OTHER; note = 2'-O-methylguanosine
aacacgcacagaacactcatg

SEQ ID NO: 2437 - RNA, 21 nt, synthetic construct
  source 1..21: mol_type = other RNA
  modified_base 1: mod_base = OTHER; note = 2'-O-methylguanosine with phosphorothioate linkage
  modified_base 2: mod_base = OTHER; note = 2'-O-methylcytidine with phosphorothioate linkage
  modified_base 3: mod_base = OTHER; note = 2'-fluorouridine
  modified_base 4: mod_base = OTHER; note = 2'-O-methylguanosine
  modified_base 5: mod_base = OTHER; note = 2'-fluorocytidine
  modified_base 6: mod_base = OTHER; note = 2'-O-methylguanosine
  modified_base 7: mod_base = OTHER; note = 2'-fluoroguanosine
  modified_base 8: mod_base = OTHER; note = 2'-O-methyluridine
  modified_base 9: mod_base = OTHER; note = 2'-fluorouridine
  modified_base 10: mod_base = OTHER; note = 2'-O-methylguanosine
  modified_base 11: mod_base = OTHER; note = 2'-fluoroadenosine
  modified_base 12: mod_base = OTHER; note = 2'-O-methyladenosine
  modified_base 13: mod_base = OTHER; note = 2'-fluorouridine
  modified_base 14: mod_base = OTHER; note = 2'-O-methylcytidine
  modified_base 15: mod_base = OTHER; note = 2'-fluorocytidine
  modified_base 16: mod_base = OTHER; note = 2'-O-methyladenosine
  modified_base 17: mod_base = OTHER; note = 2'-fluoroadenosine
  modified_base 18: mod_base = OTHER; note = 2'-O-methyluridine
  modified_base 19: mod_base = OTHER; note = 2'-fluoroguanosine with phosphorothioate linkage
  modified_base 20: mod_base = OTHER; note = 2'-O-methylguanosine with phosphorothioate linkage
  modified_base 21: mod_base = OTHER; note = 2'-O-methylcytidine
gctgcggttgaatccaatggc

SEQ ID NO: 2438 - RNA, 21 nt, synthetic construct
  source 1..21: mol_type = other RNA
  modified_base 1: mod_base = OTHER; note = 2'-O-methyluridine with phosphorothioate linkage
  modified_base 2: mod_base = OTHER; note = 2'-O-methylcytidine with phosphorothioate linkage
  modified_base 3: mod_base = OTHER; note = 2'-fluorocytidine
  modified_base 4: mod_base = OTHER; note = 2'-O-methylguanosine
  modified_base 5: mod_base = OTHER; note = 2'-fluorocytidine
  modified_base 6: mod_base = OTHER; note = 2'-O-methyladenosine
  modified_base 7: mod_base = OTHER; note = 2'-fluorocytidine
  modified_base 8: mod_base = OTHER; note = 2'-O-methyluridine
  modified_base 9: mod_base = OTHER; note = 2'-fluorouridine
  modified_base 10: mod_base = OTHER; note = 2'-O-methylguanosine
  modified_base 11: mod_base = OTHER; note = 2'-fluoroadenosine
  modified_base 12: mod_base = OTHER; note = 2'-O-methyladenosine
  modified_base 13: mod_base = OTHER; note = 2'-fluorocytidine
  modified_base 14: mod_base = OTHER; note = 2'-O-methyluridine
  modified_base 15: mod_base = OTHER; note = 2'-fluorouridine
  modified_base 16: mod_base = OTHER; note = 2'-O-methylguanosine
  modified_base 17: mod_base = OTHER; note = 2'-fluorocytidine
  modified_base 18: mod_base = OTHER; note = 2'-O-methyladenosine
  modified_base 19: mod_base = OTHER; note = 2'-fluoroguanosine with phosphorothioate linkage
  modified_base 20: mod_base = OTHER; note = 2'-O-methylcytidine with phosphorothioate linkage
  modified_base 21: mod_base = OTHER; note = 2'-O-methyluridine
tccgcacttgaacttgcagct

SEQ ID NO: 2439 - RNA, 21 nt, synthetic construct
  source 1..21: mol_type = other RNA
  modified_base 1: mod_base = OTHER; note = 2'-O-methylguanosine with phosphorothioate linkage
  modified_base 2: mod_base = OTHER; note = 2'-O-methyluridine with phosphorothioate linkage
  modified_base 3: mod_base = OTHER; note = 2'-fluorouridine
  modified_base 4: mod_base = OTHER; note = 2'-O-methylguanosine
  modified_base 5: mod_base = OTHER; note = 2'-fluoroadenosine
  modified_base 6: mod_base = OTHER; note = 2'-O-methyladenosine
  modified_base 7: mod_base = OTHER; note = 2'-fluorouridine
  modified_base 8: mod_base = OTHER; note = 2'-O-methylcytidine
  modified_base 9: mod_base = OTHER; note = 2'-fluorocytidine
  modified_base 10: mod_base = OTHER; note = 2'-O-methyladenosine
  modified_base 11: mod_base = OTHER; note = 2'-fluoroadenosine
  modified_base 12: mod_base = OTHER; note = 2'-O-methyluridine
  modified_base 13: mod_base = OTHER; note = 2'-fluoroguanosine
  modified_base 14: mod_base = OTHER; note = 2'-O-methylguanosine
  modified_base 15: mod_base = OTHER; note = 2'-fluorocytidine
  modified_base 16: mod_base = OTHER; note = 2'-O-methyluridine
  modified_base 17: mod_base = OTHER; note = 2'-fluoroadenosine
  modified_base 18: mod_base = OTHER; note = 2'-O-methyluridine
  modified_base 19: mod_base = OTHER; note = 2'-fluoroguanosine with phosphorothioate linkage
  modified_base 20: mod_base = OTHER; note = 2'-O-methylguanosine with phosphorothioate linkage
  modified_base 21: mod_base = OTHER; note = 2'-O-methyladenosine
gttgaatccaatggctatgga

SEQ ID NO: 2440 - RNA, 21 nt, synthetic construct
  source 1..21: mol_type = other RNA
  modified_base 1: mod_base = OTHER; note = 2'-O-methyladenosine with phosphorothioate linkage
  modified_base 2: mod_base = OTHER; note = 2'-O-methyladenosine with phosphorothioate linkage
  modified_base 3: mod_base = OTHER; note = 2'-fluorocytidine
  modified_base 4: mod_base = OTHER; note = 2'-O-methyluridine
  modified_base 5: mod_base = OTHER; note = 2'-fluoroguanosine
  modified_base 6: mod_base = OTHER; note = 2'-O-methyluridine
  modified_base 7: mod_base = OTHER; note = 2'-fluoroadenosine
  modified_base 8: mod_base = OTHER; note = 2'-O-methylguanosine
  modified_base 9: mod_base = OTHER; note = 2'-fluorocytidine
  modified_base 10: mod_base = OTHER; note = 2'-O-methyladenosine
  modified_base 11: mod_base = OTHER; note = 2'-fluoroadenosine
  modified_base 12: mod_base = OTHER; note = 2'-O-methyluridine
  modified_base 13: mod_base = OTHER; note = 2'-fluorocytidine
  modified_base 14: mod_base = OTHER; note = 2'-O-methyluridine
  modified_base 15: mod_base = OTHER; note = 2'-fluorocytidine
  modified_base 16: mod_base = OTHER; note = 2'-O-methyladenosine
  modified_base 17: mod_base = OTHER; note = 2'-fluorocytidine
  modified_base 18: mod_base = OTHER; note = 2'-O-methyluridine
  modified_base 19: mod_base = OTHER; note = 2'-fluoroguanosine with phosphorothioate linkage
  modified_base 20: mod_base = OTHER; note = 2'-O-methyluridine with phosphorothioate linkage
  modified_base 21: mod_base = OTHER; note = 2'-O-methylcytidine
aactgtagcaatctcactgtc

SEQ ID NO: 2441 - RNA, 21 nt, synthetic construct
  source 1..21: mol_type = other RNA
  modified_base 1: mod_base = OTHER; note = 2'-O-methylcytidine with phosphorothioate linkage
  modified_base 2: mod_base = OTHER; note = 2'-O-methylcytidine with phosphorothioate linkage
  modified_base 3: mod_base = OTHER; note = 2'-fluoroguanosine
  modified_base 4: mod_base = OTHER; note = 2'-O-methylguanosine
  modified_base 5: mod_base = OTHER; note = 2'-fluorocytidine
  modified_base 6: mod_base = OTHER; note = 2'-O-methyluridine
  modified_base 7: mod_base = OTHER; note = 2'-fluorocytidine
  modified_base 8: mod_base = OTHER; note = 2'-O-methyluridine
  modified_base 9: mod_base = OTHER; note = 2'-fluorocytidine
  modified_base 10: mod_base = OTHER; note = 2'-O-methylcytidine
  modified_base 11: mod_base = OTHER; note = 2'-fluorocytidine
  modified_base 12: mod_base = OTHER; note = 2'-O-methylguanosine
  modified_base 13: mod_base = OTHER; note = 2'-fluoroadenosine
  modified_base 14: mod_base = OTHER; note = 2'-O-methyluridine
  modified_base 15: mod_base = OTHER; note = 2'-fluoroguanosine
  modified_base 16: mod_base = OTHER; note = 2'-O-methyluridine
  modified_base 17: mod_base = OTHER; note = 2'-fluoroguanosine
  modified_base 18: mod_base = OTHER; note = 2'-O-methyladenosine
  modified_base 19: mod_base = OTHER; note = 2'-fluoroadenosine with phosphorothioate linkage
  modified_base 20: mod_base = OTHER; note = 2'-O-methylcytidine with phosphorothioate linkage
  modified_base 21: mod_base = OTHER; note = 2'-O-methylcytidine
ccggctctcccgatgtgaacc

SEQ ID NO: 2442 - RNA, 21 nt, synthetic construct
  source 1..21: mol_type = other RNA
  modified_base 1: mod_base = OTHER; note = 2'-O-methylcytidine with phosphorothioate linkage
  modified_base 2: mod_base = OTHER; note = 2'-O-methyluridine with phosphorothioate linkage
  modified_base 3: mod_base = OTHER; note = 2'-fluorouridine
  modified_base 4: mod_base = OTHER; note = 2'-O-methylcytidine
  modified_base 5: mod_base = OTHER; note = 2'-fluorocytidine
  modified_base 6: mod_base = OTHER; note = 2'-O-methylcytidine
  modified_base 7: mod_base = OTHER; note = 2'-fluorouridine
  modified_base 8: mod_base = OTHER; note = 2'-O-methylguanosine
  modified_base 9: mod_base = OTHER; note = 2'-fluorocytidine
  modified_base 10: mod_base = OTHER; note = 2'-O-methylguanosine
  modified_base 11: mod_base = OTHER; note = 2'-fluorocytidine
  modified_base 12: mod_base = OTHER; note = 2'-O-methylcytidine
  modified_base 13: mod_base = OTHER; note = 2'-fluoroadenosine
  modified_base 14: mod_base = OTHER; note = 2'-O-methyluridine
  modified_base 15: mod_base = OTHER; note = 2'-fluorocytidine
  modified_base 16: mod_base = OTHER; note = 2'-O-methyluridine
  modified_base 17: mod_base = OTHER; note = 2'-fluorouridine
  modified_base 18: mod_base = OTHER; note = 2'-O-methyluridine
  modified_base 19: mod_base = OTHER; note = 2'-fluoroguanosine with phosphorothioate linkage
  modified_base 20: mod_base = OTHER; note = 2'-O-methyluridine with phosphorothioate linkage
  modified_base 21: mod_base = OTHER; note = 2'-O-methyladenosine
cttccctgcgccatctttgta

SEQ ID NO: 2443 - RNA, 21 nt, synthetic construct
  source 1..21: mol_type = other RNA
  modified_base 1: mod_base = OTHER; note = 2'-O-methylguanosine with phosphorothioate linkage
  modified_base 2: mod_base = OTHER; note = 2'-O-methylcytidine with phosphorothioate linkage
  modified_base 3: mod_base = OTHER; note = 2'-fluoroadenosine
  modified_base 4: mod_base = OTHER; note = 2'-O-methyladenosine
  modified_base 5: mod_base = OTHER; note = 2'-fluoroadenosine
  modified_base 6: mod_base = OTHER; note = 2'-O-methylcytidine
  modified_base 7: mod_base = OTHER; note = 2'-fluoroadenosine
  modified_base 8: mod_base = OTHER; note = 2'-O-methylguanosine
  modified_base 9: mod_base = OTHER; note = 2'-fluorocytidine
  modified_base 10: mod_base = OTHER; note = 2'-O-methylcytidine
  modified_base 11: mod_base = OTHER; note = 2'-fluoroadenosine
  modified_base 12: mod_base = OTHER; note = 2'-O-methyluridine
  modified_base 13: mod_base = OTHER; note = 2'-fluorouridine
  modified_base 14: mod_base = OTHER; note = 2'-O-methylcytidine
  modified_base 15: mod_base = OTHER; note = 2'-fluoroadenosine
  modified_base 16: mod_base = OTHER; note = 2'-O-methylcytidine
  modified_base 17: mod_base = OTHER; note = 2'-fluorocytidine
  modified_base 18: mod_base = OTHER; note = 2'-O-methyladenosine
  modified_base 19: mod_base = OTHER; note = 2'-fluoroguanosine with phosphorothioate linkage
  modified_base 20: mod_base = OTHER; note = 2'-O-methyluridine with phosphorothioate linkage
  modified_base 21: mod_base = OTHER; note = 2'-O-methylguanosine
gcaaacagccattcaccagtg

SEQ ID NO: 2444 - RNA, 21 nt, synthetic construct
  source 1..21: mol_type = other RNA
  modified_base 1: mod_base = OTHER; note = 2'-O-methyladenosine with phosphorothioate linkage
  modified_base 2: mod_base = OTHER; note = 2'-O-methyladenosine with phosphorothioate linkage
  modified_base 3: mod_base = OTHER; note = 2'-fluorouridine
  modified_base 4: mod_base = OTHER; note = 2'-O-methylguanosine
  modified_base 5: mod_base = OTHER; note = 2'-fluoroguanosine
  modified_base 6: mod_base = OTHER; note = 2'-O-methylcytidine
  modified_base 7: mod_base = OTHER; note = 2'-fluoroadenosine
  modified_base 8: mod_base = OTHER; note = 2'-O-methylguanosine
  modified_base 9: mod_base = OTHER; note = 2'-fluorocytidine
  modified_base 10: mod_base = OTHER; note = 2'-O-methylcytidine
  modified_base 11: mod_base = OTHER; note = 2'-fluorouridine
  modified_base 12: mod_base = OTHER; note = 2'-O-methylcytidine
  modified_base 13: mod_base = OTHER; note = 2'-fluorouridine
  modified_base 14: mod_base = OTHER; note = 2'-O-methylguanosine
  modified_base 15: mod_base = OTHER; note = 2'-fluorocytidine
  modified_base 16: mod_base = OTHER; note = 2'-O-methyluridine
  modified_base 17: mod_base = OTHER; note = 2'-fluorouridine
  modified_base 18: mod_base = OTHER; note = 2'-O-methyladenosine
  modified_base 19: mod_base = OTHER; note = 2'-fluoroguanosine with phosphorothioate linkage
  modified_base 20: mod_base = OTHER; note = 2'-O-methyladenosine with phosphorothioate linkage
  modified_base 21: mod_base = OTHER; note = 2'-O-methyladenosine
aatggcagcctctgcttagaa

SEQ ID NO: 2445 - RNA, 21 nt, synthetic construct
  source 1..21: mol_type = other RNA
  modified_base 1: mod_base = OTHER; note = 2'-O-methylcytidine with phosphorothioate linkage
  modified_base 2: mod_base = OTHER; note = 2'-O-methyladenosine with phosphorothioate linkage
  modified_base 3: mod_base = OTHER; note = 2'-fluoroadenosine
  modified_base 4: mod_base = OTHER; note = 2'-O-methylguanosine
  modified_base 5: mod_base = OTHER; note = 2'-fluoroadenosine
  modified_base 6: mod_base = OTHER; note = 2'-O-methylcytidine
  modified_base 7: mod_base = OTHER; note = 2'-fluoroguanosine
  modified_base 8: mod_base = OTHER; note = 2'-O-methyluridine
  modified_base 9: mod_base = OTHER; note = 2'-fluorouridine
  modified_base 10: mod_base = OTHER; note = 2'-O-methylcytidine
  modified_base 11: mod_base = OTHER; note = 2'-fluoroadenosine
  modified_base 12: mod_base = OTHER; note = 2'-O-methyladenosine
  modified_base 13: mod_base = OTHER; note = 2'-fluoroadenosine
  modified_base 14: mod_base = OTHER; note = 2'-O-methyluridine
  modified_base 15: mod_base = OTHER; note = 2'-fluorouridine
  modified_base 16: mod_base = OTHER; note = 2'-O-methyluridine
  modified_base 17: mod_base = OTHER; note = 2'-fluorocytidine
  modified_base 18: mod_base = OTHER; note = 2'-O-methyladenosine
  modified_base 19: mod_base = OTHER; note = 2'-fluoroguanosine with phosphorothioate linkage
  modified_base 20: mod_base = OTHER; note = 2'-O-methyladenosine with phosphorothioate linkage
  modified_base 21: mod_base = OTHER; note = 2'-O-methylguanosine
caagacgttcaaatttcagag

SEQ ID NO: 2446 - RNA, 21 nt, synthetic construct
  source 1..21: mol_type = other RNA
  modified_base 1: mod_base = OTHER; note = 2'-O-methyluridine with phosphorothioate linkage
  modified_base 2: mod_base = OTHER; note = 2'-O-methylcytidine with phosphorothioate linkage
  modified_base 3: mod_base = OTHER; note = 2'-fluoroguanosine
  modified_base 4: mod_base = OTHER; note = 2'-O-methylguanosine
  modified_base 5: mod_base = OTHER; note = 2'-fluoroadenosine
  modified_base 6: mod_base = OTHER; note = 2'-O-methylguanosine
  modified_base 7: mod_base = OTHER; note = 2'-fluoroadenosine
  modified_base 8: mod_base = OTHER; note = 2'-O-methylcytidine
  modified_base 9: mod_base = OTHER; note = 2'-fluorouridine
  modified_base 10: mod_base = OTHER; note = 2'-O-methylcytidine
  modified_base 11: mod_base = OTHER; note = 2'-fluorocytidine
  modified_base 12: mod_base = OTHER; note = 2'-O-methyladenosine
  modified_base 13: mod_base = OTHER; note = 2'-fluoroguanosine
  modified_base 14: mod_base = OTHER; note = 2'-O-methyladenosine
  modified_base 15: mod_base = OTHER; note = 2'-fluorocytidine
  modified_base 16: mod_base = OTHER; note = 2'-O-methyladenosine
  modified_base 17: mod_base = OTHER; note = 2'-fluoroadenosine
  modified_base 18: mod_base = OTHER; note = 2'-O-methyluridine
  modified_base 19: mod_base = OTHER; note = 2'-fluorocytidine with phosphorothioate linkage
  modified_base 20: mod_base = OTHER; note = 2'-O-methylguanosine with phosphorothioate linkage
  modified_base 21: mod_base = OTHER; note = 2'-O-methylcytidine
tcggagactccagacaatcgc

SEQ ID NO: 2447 - RNA, 21 nt, synthetic construct
  source 1..21: mol_type = other RNA
  modified_base 1: mod_base = OTHER; note = 2'-O-methylcytidine with phosphorothioate linkage
  modified_base 2: mod_base = OTHER; note = 2'-O-methylcytidine with phosphorothioate linkage
  modified_base 3: mod_base = OTHER; note = 2'-fluorocytidine
  modified_base 4: mod_base = OTHER; note = 2'-O-methylguanosine
  modified_base 5: mod_base = OTHER; note = 2'-fluoroguanosine
  modified_base 6: mod_base = OTHER; note = 2'-O-methylguanosine
  modified_base 7: mod_base = OTHER; note = 2'-fluorocytidine
  modified_base 8: mod_base = OTHER; note = 2'-O-methyladenosine
  modified_base 9: mod_base = OTHER; note = 2'-fluoroguanosine
  modified_base 10: mod_base = OTHER; note = 2'-O-methylguanosine
  modified_base 11: mod_base = OTHER; note = 2'-fluorocytidine
  modified_base 12: mod_base = OTHER; note = 2'-O-methylcytidine
  modified_base 13: mod_base = OTHER; note = 2'-fluorocytidine
  modified_base 14: mod_base = OTHER; note = 2'-O-methyladenosine
  modified_base 15: mod_base = OTHER; note = 2'-fluoroguanosine
  modified_base 16: mod_base = OTHER; note = 2'-O-methylcytidine
  modified_base 17: mod_base = OTHER; note = 2'-fluorouridine
  modified_base 18: mod_base = OTHER; note = 2'-O-methylcytidine
  modified_base 19: mod_base = OTHER; note = 2'-fluoroadenosine with phosphorothioate linkage
  modified_base 20: mod_base = OTHER; note = 2'-O-methyladenosine with phosphorothioate linkage
  modified_base 21: mod_base = OTHER; note = 2'-O-methyladenosine
cccgggcaggcccagctcaaa

SEQ ID NO: 2448 - RNA, 21 nt, synthetic construct
  source 1..21: mol_type = other RNA
  modified_base 1: mod_base = OTHER; note = 2'-O-methylcytidine with phosphorothioate linkage
  modified_base 2: mod_base = OTHER; note = 2'-O-methylguanosine with phosphorothioate linkage
  modified_base 3: mod_base = OTHER; note = 2'-fluoroguanosine
  modified_base 4: mod_base = OTHER; note = 2'-O-methyladenosine
  modified_base 5: mod_base = OTHER; note = 2'-fluoroguanosine
  modified_base 6: mod_base = OTHER; note = 2'-O-methyladenosine
  modified_base 7: mod_base = OTHER; note = 2'-fluorocytidine
  modified_base 8: mod_base = OTHER; note = 2'-O-methyluridine
  modified_base 9: mod_base = OTHER; note = 2'-fluorocytidine
  modified_base 10: mod_base = OTHER; note = 2'-O-methylcytidine
  modified_base 11: mod_base = OTHER; note = 2'-fluoroadenosine
  modified_base 12: mod_base = OTHER; note = 2'-O-methylguanosine
  modified_base 13: mod_base = OTHER; note = 2'-fluoroadenosine
  modified_base 14: mod_base = OTHER; note = 2'-O-methylcytidine
  modified_base 15: mod_base = OTHER; note = 2'-fluoroadenosine
  modified_base 16: mod_base = OTHER; note = 2'-O-methyladenosine
  modified_base 17: mod_base = OTHER; note = 2'-fluorouridine
  modified_base 18: mod_base = OTHER; note = 2'-O-methylcytidine
  modified_base 19: mod_base = OTHER; note = 2'-fluoroguanosine with phosphorothioate linkage
  modified_base 20: mod_base = OTHER; note = 2'-O-methylcytidine with phosphorothioate linkage
  modified_base 21: mod_base = OTHER; note = 2'-O-methylcytidine
cggagactccagacaatcgcc

SEQ ID NO: 2449 - RNA, 21 nt, synthetic construct
  source 1..21: mol_type = other RNA
  modified_base 1: mod_base = OTHER; note = 2'-O-methylcytidine with phosphorothioate linkage
  modified_base 2: mod_base = OTHER; note = 2'-O-methylguanosine with phosphorothioate linkage
  modified_base 3: mod_base = OTHER; note = 2'-fluoroadenosine
  modified_base 4: mod_base = OTHER; note = 2'-O-methylguanosine
  modified_base 5: mod_base = OTHER; note = 2'-fluorocytidine
  modified_base 6: mod_base = OTHER; note = 2'-O-methyluridine
  modified_base 7: mod_base = OTHER; note = 2'-fluoroguanosine
  modified_base 8: mod_base = OTHER; note = 2'-O-methyluridine
  modified_base 9: mod_base = OTHER; note = 2'-fluoroguanosine
  modified_base 10: mod_base = OTHER; note = 2'-O-methylcytidine
  modified_base 11: mod_base = OTHER; note = 2'-fluoroadenosine
  modified_base 12: mod_base = OTHER; note = 2'-O-methyladenosine
  modified_base 13: mod_base = OTHER; note = 2'-fluorocytidine
  modified_base 14: mod_base = OTHER; note = 2'-O-methyluridine
  modified_base 15: mod_base = OTHER; note = 2'-fluoroadenosine
  modified_base 16: mod_base = OTHER; note = 2'-O-methyluridine
  modified_base 17: mod_base = OTHER; note = 2'-fluoroguanosine
  modified_base 18: mod_base = OTHER; note = 2'-O-methylcytidine
  modified_base 19: mod_base = OTHER; note = 2'-fluorocytidine with phosphorothioate linkage
  modified_base 20: mod_base = OTHER; note = 2'-O-methyluridine with phosphorothioate linkage
  modified_base 21: mod_base = OTHER; note = 2'-O-methylguanosine
cgagctgtgcaactatgcctg

SEQ ID NO: 2450 - RNA, 21 nt, synthetic construct
  source 1..21: mol_type = other RNA
  modified_base 1: mod_base = OTHER; note = 2'-O-methylguanosine with phosphorothioate linkage
  modified_base 2: mod_base = OTHER; note = 2'-O-methyladenosine with phosphorothioate linkage
  modified_base 3: mod_base = OTHER; note = 2'-fluorocytidine
  modified_base 4: mod_base = OTHER; note = 2'-O-methyladenosine
  modified_base 5: mod_base = OTHER; note = 2'-fluoroguanosine
  modified_base 6: mod_base = OTHER; note = 2'-O-methylguanosine
  modified_base 7: mod_base = OTHER; note = 2'-fluoroguanosine
  modified_base 8: mod_base = OTHER; note = 2'-O-methyluridine
  modified_base 9: mod_base = OTHER; note = 2'-fluoroguanosine
  modified_base 10: mod_base = OTHER; note = 2'-O-methylcytidine
  modified_base 11: mod_base = OTHER; note = 2'-fluorouridine
  modified_base 12: mod_base = OTHER; note = 2'-O-methylguanosine
  modified_base 13: mod_base = OTHER; note = 2'-fluorocytidine
  modified_base 14: mod_base = OTHER; note = 2'-O-methylguanosine
  modified_base 15: mod_base = OTHER; note = 2'-fluoroguanosine
  modified_base 16: mod_base = OTHER; note = 2'-O-methyluridine
  modified_base 17: mod_base = OTHER; note = 2'-fluorouridine
  modified_base 18: mod_base = OTHER; note = 2'-O-methylguanosine
  modified_base 19: mod_base = OTHER; note = 2'-fluoroadenosine with phosphorothioate linkage
  modified_base 20: mod_base = OTHER; note = 2'-O-methyladenosine with phosphorothioate linkage
  modified_base 21: mod_base = OTHER; note = 2'-O-methyluridine
gacagggtgctgcggttgaat

SEQ ID NO: 2451 - RNA, 21 nt, synthetic construct
  source 1..21: mol_type = other RNA
  modified_base 1: mod_base = OTHER; note = 2'-O-methylguanosine with phosphorothioate linkage
  modified_base 2: mod_base = OTHER; note = 2'-O-methylguanosine with phosphorothioate linkage
  modified_base 3: mod_base = OTHER; note = 2'-fluorouridine
  modified_base 4: mod_base = OTHER; note = 2'-O-methylcytidine
  modified_base 5: mod_base = OTHER; note = 2'-fluoroadenosine
  modified_base 6: mod_base = OTHER; note = 2'-O-methyladenosine
  modified_base 7: mod_base = OTHER; note = 2'-fluoroguanosine
  modified_base 8: mod_base = OTHER; note = 2'-O-methyluridine
  modified_base 9: mod_base = OTHER; note = 2'-fluorocytidine
  modified_base 10: mod_base = OTHER; note = 2'-O-methylcytidine
  modified_base 11: mod_base = OTHER; note = 2'-fluoroadenosine
  modified_base 12: mod_base = OTHER; note = 2'-O-methyladenosine
  modified_base 13: mod_base = OTHER; note = 2'-fluoroguanosine
  modified_base 14: mod_base = OTHER; note = 2'-O-methyluridine
  modified_base 15: mod_base = OTHER; note = 2'-fluorocytidine
  modified_base 16: mod_base = OTHER; note = 2'-O-methyladenosine
  modified_base 17: mod_base = OTHER; note = 2'-fluorouridine
  modified_base 18: mod_base = OTHER; note = 2'-O-methylguanosine
  modified_base 19: mod_base = OTHER; note = 2'-fluorocytidine with phosphorothioate linkage
  modified_base 20: mod_base = OTHER; note = 2'-O-methylguanosine with phosphorothioate linkage
  modified_base 21: mod_base = OTHER; note = 2'-O-methyladenosine
ggtcaagtccaagtcatgcga

SEQ ID NO: 2452 - RNA, 21 nt, synthetic construct
  source 1..21: mol_type = other RNA
  modified_base 1: mod_base = OTHER; note = 2'-O-methylguanosine with phosphorothioate linkage
  modified_base 2: mod_base = OTHER; note = 2'-O-methyladenosine with phosphorothioate linkage
  modified_base 3: mod_base = OTHER; note = 2'-fluoroadenosine
  modified_base 4: mod_base = OTHER; note = 2'-O-methyluridine
  modified_base 5: mod_base = OTHER; note = 2'-fluorocytidine
  modified_base 6: mod_base = OTHER; note = 2'-O-methylcytidine
  modified_base 7: mod_base = OTHER; note = 2'-fluoroadenosine
  modified_base 8: mod_base = OTHER; note = 2'-O-methyladenosine
  modified_base 9: mod_base = OTHER; note = 2'-fluorouridine
  modified_base 10: mod_base = OTHER; note = 2'-O-methylguanosine
  modified_base 11: mod_base = OTHER; note = 2'-fluoroguanosine
  modified_base 12: mod_base = OTHER; note = 2'-O-methylcytidine
  modified_base 13: mod_base = OTHER; note = 2'-fluorouridine
  modified_base 14: mod_base = OTHER; note = 2'-O-methyladenosine
  modified_base 15: mod_base = OTHER; note = 2'-fluorouridine
  modified_base 16: mod_base = OTHER; note = 2'-O-methylguanosine
  modified_base 17: mod_base = OTHER; note = 2'-fluoroguanosine
  modified_base 18: mod_base = OTHER; note = 2'-O-methyladenosine
  modified_base 19: mod_base = OTHER; note = 2'-fluoroguanosine with phosphorothioate linkage
  modified_base 20: mod_base = OTHER; note = 2'-O-methylcytidine with phosphorothioate linkage
  modified_base 21: mod_base = OTHER; note = 2'-O-methylcytidine
gaatccaatggctatggagcc

SEQ ID NO: 2453 - RNA, 21 nt, synthetic construct
  source 1..21: mol_type = other RNA
  modified_base 1: mod_base = OTHER; note = 2'-O-methyluridine with phosphorothioate linkage
  modified_base 2: mod_base = OTHER; note = 2'-O-methylguanosine with phosphorothioate linkage
  modified_base 3: mod_base = OTHER; note = 2'-fluorocytidine
  modified_base 4: mod_base = OTHER; note = 2'-O-methyladenosine
  modified_base 5: mod_base = OTHER; note = 2'-fluoroadenosine
  modified_base 6: mod_base = OTHER; note = 2'-O-methylcytidine
  modified_base 7: mod_base = OTHER; note = 2'-fluorouridine
  modified_base 8: mod_base = OTHER; note = 2'-O-methyladenosine
  modified_base 9: mod_base = OTHER; note = 2'-fluorouridine
  modified_base 10: mod_base = OTHER; note = 2'-O-methylguanosine
  modified_base 11: mod_base = OTHER; note = 2'-fluorocytidine
  modified_base 12: mod_base = OTHER; note = 2'-O-methylcytidine
  modified_base 13: mod_base = OTHER; note = 2'-fluorouridine
  modified_base 14: mod_base = OTHER; note = 2'-O-methylguanosine
  modified_base 15: mod_base = OTHER; note = 2'-fluorouridine
  modified_base 16: mod_base = OTHER; note = 2'-O-methylguanosine
  modified_base 17: mod_base = OTHER; note = 2'-fluorocytidine
  modified_base 18: mod_base = OTHER; note = 2'-O-methylcytidine
  modified_base 19: mod_base = OTHER; note = 2'-fluorocytidine with phosphorothioate linkage
  modified_base 20: mod_base = OTHER; note = 2'-O-methyladenosine with phosphorothioate linkage
  modified_base 21: mod_base = OTHER; note = 2'-O-methylguanosine
tgcaactatgcctgtgcccag

SEQ ID NO: 2454 - RNA, 21 nt, synthetic construct
  source 1..21: mol_type = other RNA
  modified_base 1: mod_base = OTHER; note = 2'-O-methyladenosine with phosphorothioate linkage
  modified_base 2: mod_base = OTHER; note = 2'-O-methylguanosine with phosphorothioate linkage
  modified_base 3: mod_base = OTHER; note = 2'-fluoroguanosine
  modified_base 4: mod_base = OTHER; note = 2'-O-methylcytidine
  modified_base 5: mod_base = OTHER; note = 2'-fluorocytidine
  modified_base 6: mod_base = OTHER; note = 2'-O-methyluridine
  modified_base 7: mod_base = OTHER; note = 2'-fluorouridine
  modified_base 8: mod_base = OTHER; note = 2'-O-methyladenosine
  modified_base 9: mod_base = OTHER; note = 2'-fluorouridine
  modified_base 10: mod_base = OTHER; note = 2'-O-methyladenosine
  modified_base 11: mod_base = OTHER; note = 2'-fluoroadenosine
  modified_base 12: mod_base = OTHER; note = 2'-O-methyladenosine
  modified_base 13: mod_base = OTHER; note = 2'-fluorouridine
  modified_base 14: mod_base = OTHER; note = 2'-O-methylguanosine
  modified_base 15: mod_base = OTHER; note = 2'-fluorocytidine
  modified_base 16: mod_base = OTHER; note = 2'-O-methylguanosine
  modified_base 17: mod_base = OTHER; note = 2'-fluoroadenosine
  modified_base 18: mod_base = OTHER; note = 2'-O-methylguanosine
  modified_base 19: mod_base = OTHER; note = 2'-fluorocytidine with phosphorothioate linkage
  modified_base 20: mod_base = OTHER; note = 2'-O-methyluridine with phosphorothioate linkage
  modified_base 21: mod_base = OTHER; note = 2'-O-methylguanosine
aggccttataaatgcgagctg

SEQ ID NO: 2455 - RNA, 21 nt, synthetic construct
  source 1..21: mol_type = other RNA
  modified_base 1: mod_base = OTHER; note = 2'-O-methyladenosine with phosphorothioate linkage
  modified_base 2: mod_base = OTHER; note = 2'-O-methyluridine with phosphorothioate linkage
  modified_base 3: mod_base = OTHER; note = 2'-fluorocytidine
  modified_base 4: mod_base = OTHER; note = 2'-O-methyladenosine
  modified_base 5: mod_base = OTHER; note = 2'-fluorocytidine
  modified_base 6: mod_base = OTHER; note = 2'-O-methylcytidine
  modified_base 7: mod_base = OTHER; note = 2'-fluorocytidine
  modified_base 8: mod_base = OTHER; note = 2'-O-methylguanosine
  modified_base 9: mod_base = OTHER; note = 2'-fluoroadenosine
  modified_base 10: mod_base = OTHER; note = 2'-O-methylguanosine
  modified_base 11: mod_base = OTHER; note = 2'-fluorouridine
  modified_base 12: mod_base = OTHER; note = 2'-O-methylguanosine
  modified_base 13: mod_base = OTHER; note = 2'-fluorocytidine
  modified_base 14: mod_base = OTHER; note = 2'-O-methylcytidine
  modified_base 15: mod_base = OTHER; note = 2'-fluorouridine
  modified_base 16: mod_base = OTHER; note = 2'-O-methyluridine
  modified_base 17: mod_base = OTHER; note = 2'-fluorouridine
  modified_base 18: mod_base = OTHER; note = 2'-O-methylguanosine
  modified_base 19: mod_base = OTHER; note = 2'-fluoroadenosine with phosphorothioate linkage
  modified_base 20: mod_base = OTHER; note = 2'-O-methylcytidine with phosphorothioate linkage
  modified_base 21: mod_base = OTHER; note = 2'-O-methyladenosine
atcacccgagtgcctttgaca

SEQ ID NO: 2456 - RNA, 21 nt, synthetic construct
  source 1..21: mol_type = other RNA
  modified_base 1: mod_base = OTHER; note = 2'-O-methylcytidine with phosphorothioate linkage
  modified_base 2: mod_base = OTHER; note = 2'-O-methylcytidine with phosphorothioate linkage
  modified_base 3: mod_base = OTHER; note = 2'-fluorouridine
  modified_base 4: mod_base = OTHER; note = 2'-O-methylguanosine
  modified_base 5: mod_base = OTHER; note = 2'-fluoroguanosine
  modified_base 6: mod_base = OTHER; note = 2'-O-methylcytidine
  modified_base 7: mod_base = OTHER; note = 2'-fluorocytidine
  modified_base 8: mod_base = OTHER; note = 2'-O-methyladenosine
  modified_base 9: mod_base = OTHER; note = 2'-fluorocytidine
  modified_base 10: mod_base = OTHER; note = 2'-O-methylcytidine
  modified_base 11: mod_base = OTHER; note = 2'-fluorocytidine
  modified_base 12: mod_base = OTHER; note = 2'-O-methyladenosine
  modified_base 13: mod_base = OTHER; note = 2'-fluorouridine
  modified_base 14: mod_base = OTHER; note = 2'-O-methylcytidine
  modified_base 15: mod_base = OTHER; note = 2'-fluoroadenosine
  modified_base 16: mod_base = OTHER; note = 2'-O-methylcytidine
  modified_base 17: mod_base = OTHER; note = 2'-fluorocytidine
  modified_base 18: mod_base = OTHER; note = 2'-O-methylcytidine
  modified_base 19: mod_base = OTHER; note = 2'-fluoroguanosine with phosphorothioate linkage
  modified_base 20: mod_base = OTHER; note = 2'-O-methyladenosine with phosphorothioate linkage
  modified_base 21: mod_base = OTHER; note = 2'-O-methylguanosine
cctggccacccatcacccgag

SEQ ID NO: 2457 - RNA, 21 nt, synthetic construct
  source 1..21: mol_type = other RNA
  modified_base 1: mod_base = OTHER; note = 2'-O-methyladenosine with phosphorothioate linkage
  modified_base 2: mod_base = OTHER; note = 2'-O-methyladenosine with phosphorothioate linkage
  modified_base 3: mod_base = OTHER; note = 2'-fluorouridine
  modified_base 4: mod_base = OTHER; note = 2'-O-methyluridine
  modified_base 5: mod_base = OTHER; note = 2'-fluorocytidine
  modified_base 6: mod_base = OTHER; note = 2'-O-methyladenosine
  modified_base 7: mod_base = OTHER; note = 2'-fluorouridine
  modified_base 8: mod_base = OTHER; note = 2'-O-methylcytidine
  modified_base 9: mod_base = OTHER; note = 2'-fluorouridine
  modified_base 10: mod_base = OTHER; note = 2'-O-methyluridine
  modified_base 11: mod_base = OTHER; note = 2'-fluorocytidine
  modified_base 12: mod_base = OTHER; note = 2'-O-methylcytidine
  modified_base 13: mod_base = OTHER; note = 2'-fluorocytidine
  modified_base 14: mod_base = OTHER; note = 2'-O-methyluridine
  modified_base 15: mod_base = OTHER; note = 2'-fluoroguanosine
  modified_base 16: mod_base = OTHER; note = 2'-O-methylcytidine
  modified_base 17: mod_base = OTHER; note = 2'-fluoroguanosine
  modified_base 18: mod_base = OTHER; note = 2'-O-methylcytidine
  modified_base 19: mod_base = OTHER; note = 2'-fluorocytidine with phosphorothioate linkage
  modified_base 20: mod_base = OTHER; note = 2'-O-methyladenosine with phosphorothioate linkage
  modified_base 21: mod_base = OTHER; note = 2'-O-methyluridine
aattcatcttccctgcgccat

SEQ ID NO: 2458 - RNA, 21 nt, synthetic construct
  source 1..21: mol_type = other RNA
  modified_base 1: mod_base = OTHER; note = 2'-O-methylcytidine with phosphorothioate linkage
  modified_base 2: mod_base = OTHER; note = 2'-O-methylcytidine with phosphorothioate linkage
  modified_base 3: mod_base = OTHER; note = 2'-fluorocytidine
  modified_base 4: mod_base = OTHER; note = 2'-O-methyluridine
  modified_base 5: mod_base = OTHER; note = 2'-fluoroguanosine
  modified_base 6: mod_base = OTHER; note = 2'-O-methylcytidine
  modified_base 7: mod_base = OTHER; note = 2'-fluoroguanosine
  modified_base 8: mod_base = OTHER; note = 2'-O-methylcytidine
  modified_base 9: mod_base = OTHER; note = 2'-fluorocytidine
  modified_base 10: mod_base = OTHER; note = 2'-O-methyladenosine
  modified_base 11: mod_base = OTHER; note = 2'-fluorouridine
  modified_base 12: mod_base = OTHER; note = 2'-O-methylcytidine
  modified_base 13: mod_base = OTHER; note = 2'-fluorouridine
  modified_base 14: mod_base = OTHER; note = 2'-O-methyluridine
  modified_base 15: mod_base = OTHER; note = 2'-fluorouridine
  modified_base 16: mod_base = OTHER; note = 2'-O-methylguanosine
  modified_base 17: mod_base = OTHER; note = 2'-fluorouridine
  modified_base 18: mod_base = OTHER; note = 2'-O-methyladenosine
  modified_base 19: mod_base = OTHER; note = 2'-fluorouridine with phosphorothioate linkage
  modified_base 20: mod_base = OTHER; note = 2'-O-methyluridine with phosphorothioate linkage
  modified_base 21: mod_base = OTHER; note = 2'-O-methyladenosine
ccctgcgccatctttgtatta

SEQ ID NO: 2459 - RNA, 21 nt, synthetic construct
  source 1..21: mol_type = other RNA
  modified_base 1: mod_base = OTHER; note = 2'-O-methylcytidine with phosphorothioate linkage
  modified_base 2: mod_base = OTHER; note = 2'-O-methylcytidine with phosphorothioate linkage
  modified_base 3: mod_base = OTHER; note = 2'-fluoroadenosine
  modified_base 4: mod_base = OTHER; note = 2'-O-methylcytidine
  modified_base 5: mod_base = OTHER; note = 2'-fluorocytidine
  modified_base 6: mod_base = OTHER; note = 2'-O-methylcytidine
  modified_base 7: mod_base = OTHER; note = 2'-fluoroadenosine
  modified_base 8: mod_base = OTHER; note = 2'-O-methyluridine
  modified_base 9: mod_base = OTHER; note = 2'-fluorocytidine
  modified_base 10: mod_base = OTHER; note = 2'-O-methyladenosine
  modified_base 11: mod_base = OTHER; note = 2'-fluorocytidine
  modified_base 12: mod_base = OTHER; note = 2'-O-methylcytidine
  modified_base 13: mod_base = OTHER; note = 2'-fluorocytidine
  modified_base 14: mod_base = OTHER; note = 2'-O-methylguanosine
  modified_base 15: mod_base = OTHER; note = 2'-fluoroadenosine
  modified_base 16: mod_base = OTHER; note = 2'-O-methylguanosine
  modified_base 17: mod_base = OTHER; note = 2'-fluorouridine
  modified_base 18: mod_base = OTHER; note = 2'-O-methylguanosine
  modified_base 19: mod_base = OTHER; note = 2'-fluorocytidine with phosphorothioate linkage
  modified_base 20: mod_base = OTHER; note = 2'-O-methylcytidine with phosphorothioate linkage
  modified_base 21: mod_base = OTHER; note = 2'-O-methyluridine
ccacccatcacccgagtgcct

SEQ ID NO: 2460 - RNA, 21 nt, synthetic construct
  source 1..21: mol_type = other RNA
  modified_base 1: mod_base = OTHER; note = 2'-O-methyluridine with phosphorothioate linkage
  modified_base 2: mod_base = OTHER; note = 2'-O-methylguanosine with phosphorothioate linkage
  modified_base 3: mod_base = OTHER; note = 2'-fluoroguanosine
  modified_base 4: mod_base = OTHER; note = 2'-O-methyluridine
  modified_base 5: mod_base = OTHER; note = 2'-fluorouridine
  modified_base 6: mod_base = OTHER; note = 2'-O-methyluridine
  modified_base 7: mod_base = OTHER; note = 2'-fluorocytidine
  modified_base 8: mod_base = OTHER; note = 2'-O-methyluridine
  modified_base 9: mod_base = OTHER; note = 2'-fluorocytidine
  modified_base 10: mod_base = OTHER; note = 2'-O-methyluridine
  modified_base 11: mod_base = OTHER; note = 2'-fluorouridine
  modified_base 12: mod_base = OTHER; note = 2'-O-methylguanosine
  modified_base 13: mod_base = OTHER; note = 2'-fluorocytidine
  modified_base 14: mod_base = OTHER; note = 2'-O-methyladenosine
  modified_base 15: mod_base = OTHER; note = 2'-fluoroadenosine
  modified_base 16: mod_base = OTHER; note = 2'-O-methylcytidine
  modified_base 17: mod_base = OTHER; note = 2'-fluoroadenosine
  modified_base 18: mod_base = OTHER; note = 2'-O-methylcytidine
  modified_base 19: mod_base = OTHER; note = 2'-fluoroguanosine with phosphorothioate linkage
  modified_base 20: mod_base = OTHER; note = 2'-O-methylcytidine with phosphorothioate linkage
  modified_base 21: mod_base = OTHER; note = 2'-O-methyladenosine
tggtttctcttgcaacacgca

SEQ ID NO: 2461 - RNA, 21 nt, synthetic construct
  source 1..21: mol_type = other RNA
  modified_base 1: mod_base = OTHER; note = 2'-O-methylguanosine with phosphorothioate linkage
  modified_base 2: mod_base = OTHER; note = 2'-O-methylguanosine with phosphorothioate linkage
  modified_base 3: mod_base = OTHER; note = 2'-fluorocytidine
  modified_base 4: mod_base = OTHER; note = 2'-O-methylcytidine
  modified_base 5: mod_base = OTHER; note = 2'-fluorouridine
  modified_base 6: mod_base = OTHER; note = 2'-O-methylcytidine
  modified_base 7: mod_base = OTHER; note = 2'-fluorocytidine
  modified_base 8: mod_base = OTHER; note = 2'-O-methyladenosine
  modified_base 9: mod_base = OTHER; note = 2'-fluoroguanosine
  modified_base 10: mod_base = OTHER; note = 2'-O-methylguanosine
  modified_base 11: mod_base = OTHER; note = 2'-fluorocytidine
  modified_base 12: mod_base = OTHER; note = 2'-O-methyladenosine
  modified_base 13: mod_base = OTHER; note = 2'-fluoroguanosine
  modified_base 14: mod_base = OTHER; note = 2'-O-methylcytidine
  modified_base 15: mod_base = OTHER; note = 2'-fluorouridine
  modified_base 16: mod_base = OTHER; note = 2'-O-methylcytidine
  modified_base 17: mod_base = OTHER; note = 2'-fluoroadenosine
  modified_base 18: mod_base = OTHER; note = 2'-O-methyladenosine
  modified_base 19: mod_base = OTHER; note = 2'-fluoroadenosine with phosphorothioate linkage
  modified_base 20: mod_base = OTHER; note = 2'-O-methylguanosine with phosphorothioate linkage
  modified_base 21: mod_base = OTHER; note = 2'-O-methyladenosine
ggcctccaggcagctcaaaga

SEQ ID NO: 2462 - RNA, 21 nt, synthetic construct
  source 1..21: mol_type = other RNA
  modified_base 1: mod_base = OTHER; note = 2'-O-methylcytidine with phosphorothioate linkage
  modified_base 2: mod_base = OTHER; note = 2'-O-methyladenosine with phosphorothioate linkage
  modified_base 3: mod_base = OTHER; note = 2'-fluoroguanosine
  modified_base 4: mod_base = OTHER; note = 2'-O-methylcytidine
  modified_base 5: mod_base = OTHER; note = 2'-fluorocytidine
  modified_base 6: mod_base = OTHER; note = 2'-O-methyladenosine
  modified_base 7: mod_base = OTHER; note = 2'-fluorouridine
  modified_base 8: mod_base = OTHER; note = 2'-O-methyluridine
  modified_base 9: mod_base = OTHER; note = 2'-fluorocytidine
  modified_base 10: mod_base = OTHER; note = 2'-O-methyladenosine
  modified_base 11: mod_base = OTHER; note = 2'-fluorocytidine
  modified_base 12: mod_base = OTHER; note = 2'-O-methylcytidine
  modified_base 13: mod_base = OTHER; note = 2'-fluoroadenosine
  modified_base 14: mod_base = OTHER; note = 2'-O-methylguanosine
  modified_base 15: mod_base = OTHER; note = 2'-fluorouridine
  modified_base 16: mod_base = OTHER; note = 2'-O-methylguanosine
  modified_base 17: mod_base = OTHER; note = 2'-fluorocytidine
  modified_base 18: mod_base = OTHER; note = 2'-O-methyladenosine
  modified_base 19: mod_base = OTHER; note = 2'-fluorouridine with phosphorothioate linkage
  modified_base 20: mod_base = OTHER; note = 2'-O-methylguanosine with phosphorothioate linkage
  modified_base 21: mod_base = OTHER; note = 2'-O-methylguanosine
cagccattcaccagtgcatgg

SEQ ID NO: 2463 - RNA, 21 nt, synthetic construct
  source 1..21: mol_type = other RNA
  modified_base 1: mod_base = OTHER; note = 2'-O-methylguanosine with phosphorothioate linkage
  modified_base 2: mod_base = OTHER; note = 2'-O-methyluridine with phosphorothioate linkage
  modified_base 3: mod_base = OTHER; note = 2'-fluorocytidine
  modified_base 4: mod_base = OTHER; note = 2'-O-methyluridine
  modified_base 5: mod_base = OTHER; note = 2'-fluorocytidine
  modified_base 6: mod_base = OTHER; note = 2'-O-methylguanosine
  modified_base 7: mod_base = OTHER; note = 2'-fluorocytidine
  modified_base 8: mod_base = OTHER; note = 2'-O-methylcytidine
  modified_base 9: mod_base = OTHER; note = 2'-fluoroguanosine
  modified_base 10: mod_base = OTHER; note = 2'-O-methylcytidine
  modified_base 11: mod_base = OTHER; note = 2'-fluoroadenosine
  modified_base 12: mod_base = OTHER; note = 2'-O-methyladenosine
  modified_base 13: mod_base = OTHER; note = 2'-fluoroguanosine
  modified_base 14: mod_base = OTHER; note = 2'-O-methylcytidine
  modified_base 15: mod_base = OTHER; note = 2'-fluoroadenosine
  modified_base 16: mod_base = OTHER; note = 2'-O-methyladenosine
  modified_base 17: mod_base = OTHER; note = 2'-fluoroguanosine
  modified_base 18: mod_base = OTHER; note = 2'-O-methylguanosine
  modified_base 19: mod_base = OTHER; note = 2'-fluorocytidine with phosphorothioate linkage
  modified_base 20: mod_base = OTHER; note = 2'-O-methyladenosine with phosphorothioate linkage
  modified_base 21: mod_base = OTHER; note = 2'-O-methyladenosine
gtctcgccgcaagcaaggcaa

SEQ ID NO: 2464 - RNA, 21 nt, synthetic construct
  source 1..21: mol_type = other RNA
  modified_base 1: mod_base = OTHER; note = 2'-O-methylcytidine with phosphorothioate linkage
  modified_base 2: mod_base = OTHER; note = 2'-O-methyladenosine with phosphorothioate linkage
  modified_base 3: mod_base = OTHER; note = 2'-fluoroadenosine
  modified_base 4: mod_base = OTHER; note = 2'-O-methyladenosine
  modified_base 5: mod_base = OTHER; note = 2'-fluoroguanosine
  modified_base 6: mod_base = OTHER; note = 2'-O-methylguanosine
  modified_base 7: mod_base = OTHER; note = 2'-fluorouridine
  modified_base 8: mod_base = OTHER; note = 2'-O-methyluridine
  modified_base 9: mod_base = OTHER; note = 2'-fluoroadenosine
  modified_base 10: mod_base = OTHER; note = 2'-O-methylcytidine
  modified_base 11: mod_base = OTHER; note = 2'-fluorouridine
  modified_base 12: mod_base = OTHER; note = 2'-O-methylguanosine
  modified_base 13: mod_base = OTHER; note = 2'-fluorocytidine
  modified_base 14: mod_base = OTHER; note = 2'-O-methyladenosine
  modified_base 15: mod_base = OTHER; note = 2'-fluoroadenosine
  modified_base 16: mod_base = OTHER; note = 2'-O-methylcytidine
  modified_base 17: mod_base = OTHER; note = 2'-fluorocytidine
  modified_base 18: mod_base = OTHER; note = 2'-O-methyladenosine
  modified_base 19: mod_base = OTHER; note = 2'-fluorouridine with phosphorothioate linkage
  modified_base 20: mod_base = OTHER; note = 2'-O-methyluridine with phosphorothioate linkage
  modified_base 21: mod_base = OTHER; note = 2'-O-methylcytidine
caaaggttactgcaaccattc

SEQ ID NO: 2465 - RNA, 21 nt, synthetic construct
  source 1..21: mol_type = other RNA
  modified_base 1: mod_base = OTHER; note = 2'-O-methylcytidine with phosphorothioate linkage
  modified_base 2: mod_base = OTHER; note = 2'-O-methyluridine with phosphorothioate linkage
  modified_base 3: mod_base = OTHER; note = 2'-fluorouridine
  modified_base 4: mod_base = OTHER; note = 2'-O-methyluridine
  modified_base 5: mod_base = OTHER; note = 2'-fluoroguanosine
  modified_base 6: mod_base = OTHER; note = 2'-O-methyladenosine
  modified_base 7: mod_base = OTHER; note = 2'-fluorocytidine
  modified_base 8: mod_base = OTHER; note = 2'-O-methyladenosine
  modified_base 9: mod_base = OTHER; note = 2'-fluoroguanosine
  modified_base 10: mod_base = OTHER; note = 2'-O-methylguanosine
  modified_base 11: mod_base = OTHER; note = 2'-fluoroguanosine
  modified_base 12: mod_base = OTHER; note = 2'-O-methyluridine
  modified_base 13: mod_base = OTHER; note = 2'-fluoroguanosine
  modified_base 14: mod_base = OTHER; note = 2'-O-methylcytidine
  modified_base 15: mod_base = OTHER; note = 2'-fluorouridine
  modified_base 16: mod_base = OTHER; note = 2'-O-methylguanosine
  modified_base 17: mod_base = OTHER; note = 2'-fluorocytidine
  modified_base 18: mod_base = OTHER; note = 2'-O-methylguanosine
  modified_base 19: mod_base = OTHER; note = 2'-fluoroguanosine with phosphorothioate linkage
  modified_base 20: mod_base = OTHER; note = 2'-O-methyluridine with phosphorothioate linkage
  modified_base 21: mod_base = OTHER; note = 2'-O-methyluridine
ctttgacagggtgctgcggtt

SEQ ID NO: 2466 - RNA, 21 nt, synthetic construct
  source 1..21: mol_type = other RNA
  modified_base 1: mod_base = OTHER; note = 2'-O-methyluridine with phosphorothioate linkage
  modified_base 2: mod_base = OTHER; note = 2'-O-methyluridine with phosphorothioate linkage
  modified_base 3: mod_base = OTHER; note = 2'-fluorocytidine
  modified_base 4: mod_base = OTHER; note = 2'-O-methyladenosine
  modified_base 5: mod_base = OTHER; note = 2'-fluorouridine
  modified_base 6: mod_base = OTHER; note = 2'-O-methylcytidine
  modified_base 7: mod_base = OTHER; note = 2'-fluorouridine
  modified_base 8: mod_base = OTHER; note = 2'-O-methyluridine
  modified_base 9: mod_base = OTHER; note = 2'-fluorocytidine
  modified_base 10: mod_base = OTHER; note = 2'-O-methylcytidine
  modified_base 11: mod_base = OTHER; note = 2'-fluorocytidine
  modified_base 12: mod_base = OTHER; note = 2'-O-methyluridine
  modified_base 13: mod_base = OTHER; note = 2'-fluoroguanosine
  modified_base 14: mod_base = OTHER; note = 2'-O-methylcytidine
  modified_base 15: mod_base = OTHER; note = 2'-fluoroguanosine
  modified_base 16: mod_base = OTHER; note = 2'-O-methylcytidine
  modified_base 17: mod_base = OTHER; note = 2'-fluorocytidine
  modified_base 18: mod_base = OTHER; note = 2'-O-methyladenosine
  modified_base 19: mod_base = OTHER; note = 2'-fluorouridine with phosphorothioate linkage
  modified_base 20: mod_base = OTHER; note = 2'-O-methylcytidine with phosphorothioate linkage
  modified_base 21: mod_base = OTHER; note = 2'-O-methyluridine
ttcatcttccctgcgccatct

SEQ ID NO: 2467 - RNA, 21 nt, synthetic construct
  source 1..21: mol_type = other RNA
  modified_base 1: mod_base = OTHER; note = 2'-O-methylguanosine with phosphorothioate linkage
  modified_base 2: mod_base = OTHER; note = 2'-O-methylguanosine with phosphorothioate linkage
  modified_base 3: mod_base = OTHER; note = 2'-fluorouridine
  modified_base 4: mod_base = OTHER; note = 2'-O-methyladenosine
  modified_base 5: mod_base = OTHER; note = 2'-fluorouridine
  modified_base 6: mod_base = OTHER; note = 2'-O-methylcytidine
  modified_base 7: mod_base = OTHER; note = 2'-fluorocytidine
  modified_base 8: mod_base = OTHER; note = 2'-O-methylcytidine
  modified_base 9: mod_base = OTHER; note = 2'-fluorouridine
  modified_base 10: mod_base = OTHER; note = 2'-O-methyluridine
  modified_base 11: mod_base = OTHER; note = 2'-fluorocytidine
  modified_base 12: mod_base = OTHER; note = 2'-O-methyladenosine
  modified_base 13: mod_base = OTHER; note = 2'-fluoroguanosine
  modified_base 14: mod_base = OTHER; note = 2'-O-methylguanosine
  modified_base 15: mod_base = OTHER; note = 2'-fluoroadenosine
  modified_base 16: mod_base = OTHER; note = 2'-O-methylcytidine
  modified_base 17: mod_base = OTHER; note = 2'-fluorouridine
  modified_base 18: mod_base = OTHER; note = 2'-O-methyladenosine
  modified_base 19: mod_base = OTHER; note = 2'-fluoroguanosine with phosphorothioate linkage
  modified_base 20: mod_base = OTHER; note = 2'-O-methylguanosine with phosphorothioate linkage
  modified_base 21: mod_base = OTHER; note = 2'-O-methyluridine
ggtatcccttcaggactaggt

SEQ ID NO: 2468 - RNA, 21 nt, synthetic construct
  source 1..21: mol_type = other RNA
  modified_base 1: mod_base = OTHER; note = 2'-O-methylguanosine with phosphorothioate linkage
  modified_base 2: mod_base = OTHER; note = 2'-O-methylcytidine with phosphorothioate linkage
  modified_base 3: mod_base = OTHER; note = 2'-fluorouridine
  modified_base 4: mod_base = OTHER; note = 2'-O-methylguanosine
  modified_base 5: mod_base = OTHER; note = 2'-fluorouridine
  modified_base 6: mod_base = OTHER; note = 2'-O-methylguanosine
  modified_base 7: mod_base = OTHER; note = 2'-fluorocytidine
  modified_base 8: mod_base = OTHER; note = 2'-O-methyladenosine
  modified_base 9: mod_base = OTHER; note = 2'-fluoroadenosine
  modified_base 10: mod_base = OTHER; note = 2'-O-methylcytidine
  modified_base 11: mod_base = OTHER; note = 2'-fluorouridine
  modified_base 12: mod_base = OTHER; note = 2'-O-methyladenosine
  modified_base 13: mod_base = OTHER; note = 2'-fluorouridine
  modified_base 14: mod_base = OTHER; note = 2'-O-methylguanosine
  modified_base 15: mod_base = OTHER; note = 2'-fluorocytidine
  modified_base 16: mod_base = OTHER; note = 2'-O-methylcytidine
  modified_base 17: mod_base = OTHER; note = 2'-fluorouridine
  modified_base 18: mod_base = OTHER; note = 2'-O-methylguanosine
  modified_base 19: mod_base = OTHER; note = 2'-fluorouridine with phosphorothioate linkage
  modified_base 20: mod_base = OTHER; note = 2'-O-methylguanosine with phosphorothioate linkage
  modified_base 21: mod_base = OTHER; note = 2'-O-methylcytidine
gctgtgcaactatgcctgtgc

SEQ ID NO: 2469 - RNA, 21 nt, synthetic construct
  source 1..21: mol_type = other RNA
  modified_base 1: mod_base = OTHER; note = 2'-O-methyladenosine with phosphorothioate linkage
  modified_base 2: mod_base = OTHER; note = 2'-O-methyladenosine with phosphorothioate linkage
  modified_base 3: mod_base = OTHER; note = 2'-fluoroadenosine
  modified_base 4: mod_base = OTHER; note = 2'-O-methylguanosine
  modified_base 5: mod_base = OTHER; note = 2'-fluoroadenosine
  modified_base 6: mod_base = OTHER; note = 2'-O-methyluridine
  modified_base 7: mod_base = OTHER; note = 2'-fluoroguanosine
  modified_base 8: mod_base = OTHER; note = 2'-O-methyladenosine
  modified_base 9: mod_base = OTHER; note = 2'-fluoroguanosine
  modified_base 10: mod_base = OTHER; note = 2'-O-methylcytidine
  modified_base 11: mod_base = OTHER; note = 2'-fluorocytidine
  modified_base 12: mod_base = OTHER; note = 2'-O-methylcytidine
  modified_base 13: mod_base = OTHER; note = 2'-fluoroadenosine
  modified_base 14: mod_base = OTHER; note = 2'-O-methylguanosine
  modified_base 15: mod_base = OTHER; note = 2'-fluorocytidine
  modified_base 16: mod_base = OTHER; note = 2'-O-methyladenosine
  modified_base 17: mod_base = OTHER; note = 2'-fluoroguanosine
  modified_base 18: mod_base = OTHER; note = 2'-O-methylcytidine
  modified_base 19: mod_base = OTHER; note = 2'-fluorouridine with phosphorothioate linkage
  modified_base 20: mod_base = OTHER; note = 2'-O-methyladenosine with phosphorothioate linkage
  modified_base 21: mod_base = OTHER; note = 2'-O-methylcytidine
aaagatgagcccagcagctac

SEQ ID NO: 2470 - RNA, 21 nt, synthetic construct
  source 1..21: mol_type = other RNA
  modified_base 1: mod_base = OTHER; note = 2'-O-methylguanosine with phosphorothioate linkage
  modified_base 2: mod_base = OTHER; note = 2'-O-methyladenosine with phosphorothioate linkage
  modified_base 3: mod_base = OTHER; note = 2'-fluoroguanosine
  modified_base 4: mod_base = OTHER; note = 2'-O-methyluridine
  modified_base 5: mod_base = OTHER; note = 2'-fluoroguanosine
  modified_base 6: mod_base = OTHER; note = 2'-O-methylcytidine
  modified_base 7: mod_base = OTHER; note = 2'-fluorocytidine
  modified_base 8: mod_base = OTHER; note = 2'-O-methyluridine
  modified_base 9: mod_base = OTHER; note = 2'-fluorouridine
  modified_base 10: mod_base = OTHER; note = 2'-O-methyluridine
  modified_base 11: mod_base = OTHER; note = 2'-fluoroguanosine
  modified_base 12: mod_base = OTHER; note = 2'-O-methyladenosine
  modified_base 13: mod_base = OTHER; note = 2'-fluorocytidine
  modified_base 14: mod_base = OTHER; note = 2'-O-methyladenosine
  modified_base 15: mod_base = OTHER; note = 2'-fluoroguanosine
  modified_base 16: mod_base = OTHER; note = 2'-O-methylguanosine
  modified_base 17: mod_base = OTHER; note = 2'-fluoroguanosine
  modified_base 18: mod_base = OTHER; note = 2'-O-methyluridine
  modified_base 19: mod_base = OTHER; note = 2'-fluoroguanosine with phosphorothioate linkage
  modified_base 20: mod_base = OTHER; note = 2'-O-methylcytidine with phosphorothioate linkage
  modified_base 21: mod_base = OTHER; note = 2'-O-methyluridine
gagtgcctttgacagggtgct

SEQ ID NO: 2471 - RNA, 21 nt, synthetic construct
  source 1..21: mol_type = other RNA
  modified_base 1: mod_base = OTHER; note = 2'-O-methyladenosine with phosphorothioate linkage
  modified_base 2: mod_base = OTHER; note = 2'-O-methylguanosine with phosphorothioate linkage
  modified_base 3: mod_base = OTHER; note = 2'-fluoroadenosine
  modified_base 4: mod_base = OTHER; note = 2'-O-methylguanosine
  modified_base 5: mod_base = OTHER; note = 2'-fluoroguanosine
  modified_base 6: mod_base = OTHER; note = 2'-O-methylguanosine
  modified_base 7: mod_base = OTHER; note = 2'-fluorocytidine
  modified_base 8: mod_base = OTHER; note = 2'-O-methyladenosine
  modified_base 9: mod_base = OTHER; note = 2'-fluoroguanosine
  modified_base 10: mod_base = OTHER; note = 2'-O-methyladenosine
  modified_base 11: mod_base = OTHER; note = 2'-fluorocytidine
  modified_base 12: mod_base = OTHER; note = 2'-O-methylguanosine
  modified_base 13: mod_base = OTHER; note = 2'-fluorocytidine
  modified_base 14: mod_base = OTHER; note = 2'-O-methyladenosine
  modified_base 15: mod_base = OTHER; note = 2'-fluoroguanosine
  modified_base 16: mod_base = OTHER; note = 2'-O-methylcytidine
  modified_base 17: mod_base = OTHER; note = 2'-fluoroguanosine
  modified_base 18: mod_base = OTHER; note = 2'-O-methyladenosine
  modified_base 19: mod_base = OTHER; note = 2'-fluorocytidine with phosphorothioate linkage
  modified_base 20: mod_base = OTHER; note = 2'-O-methyladenosine with phosphorothioate linkage
  modified_base 21: mod_base = OTHER; note = 2'-O-methylcytidine
agagggcagacgcagcgacac

SEQ ID NO: 2472 - RNA, 21 nt, synthetic construct
  source 1..21: mol_type = other RNA
  modified_base 1: mod_base = OTHER; note = 2'-O-methyladenosine with phosphorothioate linkage
  modified_base 2: mod_base = OTHER; note = 2'-O-methyluridine with phosphorothioate linkage
  modified_base 3: mod_base = OTHER; note = 2'-fluorocytidine
  modified_base 4: mod_base = OTHER; note = 2'-O-methyluridine
  modified_base 5: mod_base = OTHER; note = 2'-fluorouridine
  modified_base 6: mod_base = OTHER; note = 2'-O-methylcytidine
  modified_base 7: mod_base = OTHER; note = 2'-fluorocytidine
  modified_base 8: mod_base = OTHER; note = 2'-O-methylcytidine
  modified_base 9: mod_base = OTHER; note = 2'-fluorouridine
  modified_base 10: mod_base = OTHER; note = 2'-O-methylguanosine
  modified_base 11: mod_base = OTHER; note = 2'-fluorocytidine
  modified_base 12: mod_base = OTHER; note = 2'-O-methylguanosine
  modified_base 13: mod_base = OTHER; note = 2'-fluorocytidine
  modified_base 14: mod_base = OTHER; note = 2'-O-methylcytidine
  modified_base 15: mod_base = OTHER; note = 2'-fluoroadenosine
  modified_base 16: mod_base = OTHER; note = 2'-O-methyluridine
  modified_base 17: mod_base = OTHER; note = 2'-fluorocytidine
  modified_base 18: mod_base = OTHER; note = 2'-O-methyluridine
  modified_base 19: mod_base = OTHER; note = 2'-fluorouridine with phosphorothioate linkage
  modified_base 20: mod_base = OTHER; note = 2'-O-methyluridine with phosphorothioate linkage
  modified_base 21: mod_base = OTHER; note = 2'-O-methylguanosine
atcttccctgcgccatctttg

SEQ ID NO: 2473 - RNA, 21 nt, synthetic construct
  source 1..21: mol_type = other RNA
  modified_base 1: mod_base = OTHER; note = 2'-O-methyladenosine with phosphorothioate linkage
  modified_base 2: mod_base = OTHER; note = 2'-O-methyluridine with phosphorothioate linkage
  modified_base 3: mod_base = OTHER; note = 2'-fluorouridine
  modified_base 4: mod_base = OTHER; note = 2'-O-methylcytidine
  modified_base 5: mod_base = OTHER; note = 2'-fluorouridine
  modified_base 6: mod_base = OTHER; note = 2'-O-methyluridine
  modified_base 7: mod_base = OTHER; note = 2'-fluoroadenosine
  modified_base 8: mod_base = OTHER; note = 2'-O-methylcytidine
  modified_base 9: mod_base = OTHER; note = 2'-fluoroadenosine
  modified_base 10: mod_base = OTHER; note = 2'-O-methylguanosine
  modified_base 11: mod_base = OTHER; note = 2'-fluoroadenosine
  modified_base 12: mod_base = OTHER; note = 2'-O-methyluridine
  modified_base 13: mod_base = OTHER; note = 2'-fluoroguanosine
  modified_base 14: mod_base = OTHER; note = 2'-O-methyladenosine
  modified_base 15: mod_base = OTHER; note = 2'-fluorouridine
  modified_base 16: mod_base = OTHER; note = 2'-O-methylguanosine
  modified_base 17: mod_base = OTHER; note = 2'-fluoroadenosine
  modified_base 18: mod_base = OTHER; note = 2'-O-methyladenosine
  modified_base 19: mod_base = OTHER; note = 2'-fluorocytidine with phosphorothioate linkage
  modified_base 20: mod_base = OTHER; note = 2'-O-methylcytidine with phosphorothioate linkage
  modified_base 21: mod_base = OTHER; note = 2'-O-methyladenosine
attcttacagatgatgaacca

SEQ ID NO: 2474 - RNA, 21 nt, synthetic construct
  source 1..21: mol_type = other RNA
  modified_base 1: mod_base = OTHER; note = 2'-O-methylcytidine with phosphorothioate linkage
  modified_base 2: mod_base = OTHER; note = 2'-O-methylcytidine with phosphorothioate linkage
  modified_base 3: mod_base = OTHER; note = 2'-fluorouridine
  modified_base 4: mod_base = OTHER; note = 2'-O-methyladenosine
  modified_base 5: mod_base = OTHER; note = 2'-fluorouridine
  modified_base 6: mod_base = OTHER; note = 2'-O-methylguanosine
  modified_base 7: mod_base = OTHER; note = 2'-fluorocytidine
  modified_base 8: mod_base = OTHER; note = 2'-O-methyladenosine
  modified_base 9: mod_base = OTHER; note = 2'-fluoroadenosine
  modified_base 10: mod_base = OTHER; note = 2'-O-methyladenosine
  modified_base 11: mod_base = OTHER; note = 2'-fluoroguanosine
  modified_base 12: mod_base = OTHER; note = 2'-O-methylguanosine
  modified_base 13: mod_base = OTHER; note = 2'-fluorouridine
  modified_base 14: mod_base = OTHER; note = 2'-O-methyluridine
  modified_base 15: mod_base = OTHER; note = 2'-fluoroadenosine
  modified_base 16: mod_base = OTHER; note = 2'-O-methylcytidine
  modified_base 17: mod_base = OTHER; note = 2'-fluorouridine
  modified_base 18: mod_base = OTHER; note = 2'-O-methylguanosine
  modified_base 19: mod_base = OTHER; note = 2'-fluorocytidine with phosphorothioate linkage
  modified_base 20: mod_base = OTHER; note = 2'-O-methyladenosine with phosphorothioate linkage
  modified_base 21: mod_base = OTHER; note = 2'-O-methyladenosine
cctatgcaaaggttactgcaa

SEQ ID NO: 2475 - RNA, 21 nt, synthetic construct
  source 1..21: mol_type = other RNA
  modified_base 1: mod_base = OTHER; note = 2'-O-methylguanosine with phosphorothioate linkage
  modified_base 2: mod_base = OTHER; note = 2'-O-methyluridine with phosphorothioate linkage
  modified_base 3: mod_base = OTHER; note = 2'-fluorocytidine
  modified_base 4: mod_base = OTHER; note = 2'-O-methyladenosine
  modified_base 5: mod_base = OTHER; note = 2'-fluoroadenosine
  modified_base 6: mod_base = OTHER; note = 2'-O-methylguanosine
  modified_base 7: mod_base = OTHER; note = 2'-fluorouridine
  modified_base 8: mod_base = OTHER; note = 2'-O-methylcytidine
  modified_base 9: mod_base = OTHER; note = 2'-fluorocytidine
  modified_base 10: mod_base = OTHER; note = 2'-O-methyladenosine
  modified_base 11: mod_base = OTHER; note = 2'-fluoroadenosine
  modified_base 12: mod_base = OTHER; note = 2'-O-methylguanosine
  modified_base 13: mod_base = OTHER; note = 2'-fluorouridine
  modified_base 14: mod_base = OTHER; note = 2'-O-methylcytidine
  modified_base 15: mod_base = OTHER; note = 2'-fluoroadenosine
  modified_base 16: mod_base = OTHER; note = 2'-O-methyluridine
  modified_base 17: mod_base = OTHER; note = 2'-fluoroguanosine
  modified_base 18: mod_base = OTHER; note = 2'-O-methylcytidine
  modified_base 19: mod_base = OTHER; note = 2'-fluoroguanosine with phosphorothioate linkage
  modified_base 20: mod_base = OTHER; note = 2'-O-methyladenosine with phosphorothioate linkage
  modified_base 21: mod_base = OTHER; note = 2'-O-methylguanosine
gtcaagtccaagtcatgcgag

SEQ ID NO: 2476 - RNA, 21 nt, synthetic construct
  source 1..21: mol_type = other RNA
  modified_base 1: mod_base = OTHER; note = 2'-O-methyluridine with phosphorothioate linkage
  modified_base 2: mod_base = OTHER; note = 2'-O-methylcytidine with phosphorothioate linkage
  modified_base 3: mod_base = OTHER; note = 2'-fluoroadenosine
  modified_base 4: mod_base = OTHER; note = 2'-O-methylcytidine
  modified_base 5: mod_base = OTHER; note = 2'-fluorocytidine
  modified_base 6: mod_base = OTHER; note = 2'-O-methylcytidine
  modified_base 7: mod_base = OTHER; note = 2'-fluoroguanosine
  modified_base 8: mod_base = OTHER; note = 2'-O-methyladenosine
  modified_base 9: mod_base = OTHER; note = 2'-fluoroguanosine
  modified_base 10: mod_base = OTHER; note = 2'-O-methyluridine
  modified_base 11: mod_base = OTHER; note = 2'-fluoroguanosine
  modified_base 12: mod_base = OTHER; note = 2'-O-methylcytidine
  modified_base 13: mod_base = OTHER; note = 2'-fluorocytidine
  modified_base 14: mod_base = OTHER; note = 2'-O-methyluridine
  modified_base 15: mod_base = OTHER; note = 2'-fluorouridine
  modified_base 16: mod_base = OTHER; note = 2'-O-methyluridine
  modified_base 17: mod_base = OTHER; note = 2'-fluoroguanosine
  modified_base 18: mod_base = OTHER; note = 2'-O-methyladenosine
  modified_base 19: mod_base = OTHER; note = 2'-fluorocytidine with phosphorothioate linkage
  modified_base 20: mod_base = OTHER; note = 2'-O-methyladenosine with phosphorothioate linkage
  modified_base 21: mod_base = OTHER; note = 2'-O-methylguanosine
tcacccgagtgcctttgacag

SEQ ID NO: 2477 - RNA, 21 nt, synthetic construct
  source 1..21: mol_type = other RNA
  modified_base 1: mod_base = OTHER; note = 2'-O-methylguanosine with phosphorothioate linkage
  modified_base 2: mod_base = OTHER; note = 2'-O-methyluridine with phosphorothioate linkage
  modified_base 3: mod_base = OTHER; note = 2'-fluorocytidine
  modified_base 4: mod_base = OTHER; note = 2'-O-methylcytidine
  modified_base 5: mod_base = OTHER; note = 2'-fluoroadenosine
  modified_base 6: mod_base = OTHER; note = 2'-O-methylcytidine
  modified_base 7: mod_base = OTHER; note = 2'-fluorocytidine
  modified_base 8: mod_base = OTHER; note = 2'-O-methyladenosine
  modified_base 9: mod_base = OTHER; note = 2'-fluorocytidine
  modified_base 10: mod_base = OTHER; note = 2'-O-methylcytidine
  modified_base 11: mod_base = OTHER; note = 2'-fluoroguanosine
  modified_base 12: mod_base = OTHER; note = 2'-O-methyladenosine
  modified_base 13: mod_base = OTHER; note = 2'-fluoroguanosine
  modified_base 14: mod_base = OTHER; note = 2'-O-methyladenosine
  modified_base 15: mod_base = OTHER; note = 2'-fluorocytidine
  modified_base 16: mod_base = OTHER; note = 2'-O-methyladenosine
  modified_base 17: mod_base = OTHER; note = 2'-fluorouridine
  modified_base 18: mod_base = OTHER; note = 2'-O-methylcytidine
  modified_base 19: mod_base = OTHER; note = 2'-fluoroadenosine with phosphorothioate linkage
  modified_base 20: mod_base = OTHER; note = 2'-O-methylcytidine with phosphorothioate linkage
  modified_base 21: mod_base = OTHER; note = 2'-O-methyluridine
gtccaccaccgagacatcact

SEQ ID NO: 2478 - RNA, 21 nt, synthetic construct
  source 1..21: mol_type = other RNA
  modified_base 1: mod_base = OTHER; note = 2'-O-methylcytidine with phosphorothioate linkage
  modified_base 2: mod_base = OTHER; note = 2'-O-methylguanosine with phosphorothioate linkage
  modified_base 3: mod_base = OTHER; note = 2'-fluorouridine
  modified_base 4: mod_base = OTHER; note = 2'-O-methylcytidine
  modified_base 5: mod_base = OTHER; note = 2'-fluoroadenosine
  modified_base 6: mod_base = OTHER; note = 2'-O-methyluridine
  modified_base 7: mod_base = OTHER; note = 2'-fluorocytidine
  modified_base 8: mod_base = OTHER; note = 2'-O-methyluridine
  modified_base 9: mod_base = OTHER; note = 2'-fluoroadenosine
  modified_base 10: mod_base = OTHER; note = 2'-O-methylguanosine
  modified_base 11: mod_base = OTHER; note = 2'-fluoroadenosine
  modified_base 12: mod_base = OTHER; note = 2'-O-methylguanosine
  modified_base 13: mod_base = OTHER; note = 2'-fluoroguanosine
  modified_base 14: mod_base = OTHER; note = 2'-O-methyladenosine
  modified_base 15: mod_base = OTHER; note = 2'-fluoroadenosine
  modified_base 16: mod_base = OTHER; note = 2'-O-methyluridine
  modified_base 17: mod_base = OTHER; note = 2'-fluorouridine
  modified_base 18: mod_base = OTHER; note = 2'-O-methyluridine
  modified_base 19: mod_base = OTHER; note = 2'-fluoroguanosine with phosphorothioate linkage
  modified_base 20: mod_base = OTHER; note = 2'-O-methylcytidine with phosphorothioate linkage
  modified_base 21: mod_base = OTHER; note = 2'-O-methylcytidine
cgtcatctagaggaatttgcc

SEQ ID NO: 2479 - RNA, 21 nt, synthetic construct
  source 1..21: mol_type = other RNA
  modified_base 1: mod_base = OTHER; note = 2'-O-methylguanosine with phosphorothioate linkage
  modified_base 2: mod_base = OTHER; note = 2'-O-methyluridine with phosphorothioate linkage
  modified_base 3: mod_base = OTHER; note = 2'-fluoroguanosine
  modified_base 4: mod_base = OTHER; note = 2'-O-methylcytidine
  modified_base 5: mod_base = OTHER; note = 2'-fluoroadenosine
  modified_base 6: mod_base = OTHER; note = 2'-O-methyladenosine
  modified_base 7: mod_base = OTHER; note = 2'-fluorocytidine
  modified_base 8: mod_base = OTHER; note = 2'-O-methyluridine
  modified_base 9: mod_base = OTHER; note = 2'-fluoroadenosine
  modified_base 10: mod_base = OTHER; note = 2'-O-methyluridine
  modified_base 11: mod_base = OTHER; note = 2'-fluoroguanosine
  modified_base 12: mod_base = OTHER; note = 2'-O-methylcytidine
  modified_base 13: mod_base = OTHER; note = 2'-fluorocytidine
  modified_base 14: mod_base = OTHER; note = 2'-O-methyluridine
  modified_base 15: mod_base = OTHER; note = 2'-fluoroguanosine
  modified_base 16: mod_base = OTHER; note = 2'-O-methyluridine
  modified_base 17: mod_base = OTHER; note = 2'-fluoroguanosine
  modified_base 18: mod_base = OTHER; note = 2'-O-methylcytidine
  modified_base 19: mod_base = OTHER; note = 2'-fluorocytidine with phosphorothioate linkage
  modified_base 20: mod_base = OTHER; note = 2'-O-methylcytidine with phosphorothioate linkage
  modified_base 21: mod_base = OTHER; note = 2'-O-methyladenosine
gtgcaactatgcctgtgccca

SEQ ID NO: 2480 - RNA, 21 nt, synthetic construct
  source 1..21: mol_type = other RNA
  modified_base 1: mod_base = OTHER; note = 2'-O-methylguanosine with phosphorothioate linkage
  modified_base 2: mod_base = OTHER; note = 2'-O-methylguanosine with phosphorothioate linkage
  modified_base 3: mod_base = OTHER; note = 2'-fluorocytidine
  modified_base 4: mod_base = OTHER; note = 2'-O-methyluridine
  modified_base 5: mod_base = OTHER; note = 2'-fluorocytidine
  modified_base 6: mod_base = OTHER; note = 2'-O-methyluridine
  modified_base 7: mod_base = OTHER; note = 2'-fluorocytidine
  modified_base 8: mod_base = OTHER; note = 2'-O-methylcytidine
  modified_base 9: mod_base = OTHER; note = 2'-fluorocytidine
  modified_base 10: mod_base = OTHER; note = 2'-O-methyladenosine
  modified_base 11: mod_base = OTHER; note = 2'-fluorocytidine
  modified_base 12: mod_base = OTHER; note = 2'-O-methyladenosine
  modified_base 13: mod_base = OTHER; note = 2'-fluoroadenosine
  modified_base 14: mod_base = OTHER; note = 2'-O-methyluridine
  modified_base 15: mod_base = OTHER; note = 2'-fluorouridine
  modified_base 16: mod_base = OTHER; note = 2'-O-methylcytidine
  modified_base 17: mod_base = OTHER; note = 2'-fluoroadenosine
  modified_base 18: mod_base = OTHER; note = 2'-O-methyluridine
  modified_base 19: mod_base = OTHER; note = 2'-fluorocytidine with phosphorothioate linkage
  modified_base 20: mod_base = OTHER; note = 2'-O-methyluridine with phosphorothioate linkage
  modified_base 21: mod_base = OTHER; note = 2'-O-methyluridine
ggctctcccacaattcatctt

SEQ ID NO: 2481 - RNA, 21 nt, synthetic construct
  source 1..21: mol_type = other RNA
  modified_base 1: mod_base = OTHER; note = 2'-O-methyluridine with phosphorothioate linkage
  modified_base 2: mod_base = OTHER; note = 2'-O-methyladenosine with phosphorothioate linkage
  modified_base 3: mod_base = OTHER; note = 2'-fluoroadenosine
  modified_base 4: mod_base = OTHER; note = 2'-O-methylguanosine
  modified_base 5: mod_base = OTHER; note = 2'-fluorocytidine
  modified_base 6: mod_base = OTHER; note = 2'-O-methyladenosine
  modified_base 7: mod_base = OTHER; note = 2'-fluoroadenosine
  modified_base 8: mod_base = OTHER; note = 2'-O-methyladenosine
  modified_base 9: mod_base = OTHER; note = 2'-fluorocytidine
  modified_base 10: mod_base = OTHER; note = 2'-O-methylguanosine
  modified_base 11: mod_base = OTHER; note = 2'-fluoroguanosine
  modified_base 12: mod_base = OTHER; note = 2'-O-methylguanosine
  modified_base 13: mod_base = OTHER; note = 2'-fluoroadenosine
  modified_base 14: mod_base = OTHER; note = 2'-O-methyladenosine
  modified_base 15: mod_base = OTHER; note = 2'-fluorouridine
  modified_base 16: mod_base = OTHER; note = 2'-O-methyluridine
  modified_base 17: mod_base = OTHER; note = 2'-fluorocytidine
  modified_base 18: mod_base = OTHER; note = 2'-O-methyluridine
  modified_base 19: mod_base = OTHER; note = 2'-fluorocytidine with phosphorothioate linkage
  modified_base 20: mod_base = OTHER; note = 2'-O-methylguanosine with phosphorothioate linkage
  modified_base 21: mod_base = OTHER; note = 2'-O-methylcytidine
taagcaaacgggaattctcgc

SEQ ID NO: 2482 - RNA, 21 nt, synthetic construct
  source 1..21: mol_type = other RNA
  modified_base 1: mod_base = OTHER; note = 2'-O-methylguanosine with phosphorothioate linkage
  modified_base 2: mod_base = OTHER; note = 2'-O-methylguanosine with phosphorothioate linkage
  modified_base 3: mod_base = OTHER; note = 2'-fluorocytidine
  modified_base 4: mod_base = OTHER; note = 2'-O-methylcytidine
  modified_base 5: mod_base = OTHER; note = 2'-fluorocytidine
  modified_base 6: mod_base = OTHER; note = 2'-O-methyluridine
  modified_base 7: mod_base = OTHER; note = 2'-fluoroguanosine
  modified_base 8: mod_base = OTHER; note = 2'-O-methylguanosine
  modified_base 9: mod_base = OTHER; note = 2'-fluorocytidine
  modified_base 10: mod_base = OTHER; note = 2'-O-methylcytidine
  modified_base 11: mod_base = OTHER; note = 2'-fluoroadenosine
  modified_base 12: mod_base = OTHER; note = 2'-O-methylcytidine
  modified_base 13: mod_base = OTHER; note = 2'-fluorocytidine
  modified_base 14: mod_base = OTHER; note = 2'-O-methylcytidine
  modified_base 15: mod_base = OTHER; note = 2'-fluoroadenosine
  modified_base 16: mod_base = OTHER; note = 2'-O-methyluridine
  modified_base 17: mod_base = OTHER; note = 2'-fluorocytidine
  modified_base 18: mod_base = OTHER; note = 2'-O-methyladenosine
  modified_base 19: mod_base = OTHER; note = 2'-fluorocytidine with phosphorothioate linkage
  modified_base 20: mod_base = OTHER; note = 2'-O-methylcytidine with phosphorothioate linkage
  modified_base 21: mod_base = OTHER; note = 2'-O-methylcytidine
ggccctggccacccatcaccc

SEQ ID NO: 2483 - RNA, 21 nt, synthetic construct
  source 1..21: mol_type = other RNA
  modified_base 1: mod_base = OTHER; note = 2'-O-methyladenosine with phosphorothioate linkage
  modified_base 2: mod_base = OTHER; note = 2'-O-methylguanosine with phosphorothioate linkage
  modified_base 3: mod_base = OTHER; note = 2'-fluoroadenosine
  modified_base 4: mod_base = OTHER; note = 2'-O-methyladenosine
  modified_base 5: mod_base = OTHER; note = 2'-fluoroguanosine
  modified_base 6: mod_base = OTHER; note = 2'-O-methylcytidine
  modified_base 7: mod_base = OTHER; note = 2'-fluorocytidine
  modified_base 8: mod_base = OTHER; note = 2'-O-methyladenosine
  modified_base 9: mod_base = OTHER; note = 2'-fluorocytidine
  modified_base 10: mod_base = OTHER; note = 2'-O-methyladenosine
  modified_base 11: mod_base = OTHER; note = 2'-fluorocytidine
  modified_base 12: mod_base = OTHER; note = 2'-O-methylguanosine
  modified_base 13: mod_base = OTHER; note = 2'-fluoroguanosine
  modified_base 14: mod_base = OTHER; note = 2'-O-methylguanosine
  modified_base 15: mod_base = OTHER; note = 2'-fluorocytidine
  modified_base 16: mod_base = OTHER; note = 2'-O-methylguanosine
  modified_base 17: mod_base = OTHER; note = 2'-fluoroadenosine
  modified_base 18: mod_base = OTHER; note = 2'-O-methyladenosine
  modified_base 19: mod_base = OTHER; note = 2'-fluoroadenosine with phosphorothioate linkage
  modified_base 20: mod_base = OTHER; note = 2'-O-methylguanosine with phosphorothioate linkage
  modified_base 21: mod_base = OTHER; note = 2'-O-methylguanosine
agaagccacacgggcgaaagg

SEQ ID NO: 2484 - RNA, 21 nt, synthetic construct
  source 1..21: mol_type = other RNA
  modified_base 1: mod_base = OTHER; note = 2'-O-methylcytidine with phosphorothioate linkage
  modified_base 2: mod_base = OTHER; note = 2'-O-methylcytidine with phosphorothioate linkage
  modified_base 3: mod_base = OTHER; note = 2'-fluorocytidine
  modified_base 4: mod_base = OTHER; note = 2'-O-methylguanosine
  modified_base 5: mod_base = OTHER; note = 2'-fluoroguanosine
  modified_base 6: mod_base = OTHER; note = 2'-O-methylcytidine
  modified_base 7: mod_base = OTHER; note = 2'-fluorouridine
  modified_base 8: mod_base = OTHER; note = 2'-O-methylcytidine
  modified_base 9: mod_base = OTHER; note = 2'-fluorouridine
  modified_base 10: mod_base = OTHER; note = 2'-O-methylcytidine
  modified_base 11: mod_base = OTHER; note = 2'-fluorocytidine
  modified_base 12: mod_base = OTHER; note = 2'-O-methylcytidine
  modified_base 13: mod_base = OTHER; note = 2'-fluoroguanosine
  modified_base 14: mod_base = OTHER; note = 2'-O-methyladenosine
  modified_base 15: mod_base = OTHER; note = 2'-fluorouridine
  modified_base 16: mod_base = OTHER; note = 2'-O-methylguanosine
  modified_base 17: mod_base = OTHER; note = 2'-fluorouridine
  modified_base 18: mod_base = OTHER; note = 2'-O-methylguanosine
  modified_base 19: mod_base = OTHER; note = 2'-fluoroadenosine with phosphorothioate linkage
  modified_base 20: mod_base = OTHER; note = 2'-O-methyladenosine with phosphorothioate linkage
  modified_base 21: mod_base = OTHER; note = 2'-O-methylcytidine
cccggctctcccgatgtgaac

SEQ ID NO: 2485 - RNA, 21 nt, synthetic construct
  source 1..21: mol_type = other RNA
  modified_base 1: mod_base = OTHER; note = 2'-O-methylguanosine with phosphorothioate linkage
  modified_base 2: mod_base = OTHER; note = 2'-O-methylguanosine with phosphorothioate linkage
  modified_base 3: mod_base = OTHER; note = 2'-fluoroadenosine
  modified_base 4: mod_base = OTHER; note = 2'-O-methylguanosine
  modified_base 5: mod_base = OTHER; note = 2'-fluoroadenosine
  modified_base 6: mod_base = OTHER; note = 2'-O-methyladenosine
  modified_base 7: mod_base = OTHER; note = 2'-fluoroguanosine
  modified_base 8: mod_base = OTHER; note = 2'-O-methylcytidine
  modified_base 9: mod_base = OTHER; note = 2'-fluorocytidine
  modified_base 10: mod_base = OTHER; note = 2'-O-methyladenosine
  modified_base 11: mod_base = OTHER; note = 2'-fluorocytidine
  modified_base 12: mod_base = OTHER; note = 2'-O-methyladenosine
  modified_base 13: mod_base = OTHER; note = 2'-fluorocytidine
  modified_base 14: mod_base = OTHER; note = 2'-O-methylguanosine
  modified_base 15: mod_base = OTHER; note = 2'-fluoroguanosine
  modified_base 16: mod_base = OTHER; note = 2'-O-methylguanosine
  modified_base 17: mod_base = OTHER; note = 2'-fluorocytidine
  modified_base 18: mod_base = OTHER; note = 2'-O-methylguanosine
  modified_base 19: mod_base = OTHER; note = 2'-fluoroadenosine with phosphorothioate linkage
  modified_base 20: mod_base = OTHER; note = 2'-O-methyladenosine with phosphorothioate linkage
  modified_base 21: mod_base = OTHER; note = 2'-O-methyladenosine
ggagaagccacacgggcgaaa

SEQ ID NO: 2486 - RNA, 21 nt, synthetic construct
  source 1..21: mol_type = other RNA
  modified_base 1: mod_base = OTHER; note = 2'-O-methyluridine with phosphorothioate linkage
  modified_base 2: mod_base = OTHER; note = 2'-O-methylguanosine with phosphorothioate linkage
  modified_base 3: mod_base = OTHER; note = 2'-fluorocytidine
  modified_base 4: mod_base = OTHER; note = 2'-O-methyladenosine
  modified_base 5: mod_base = OTHER; note = 2'-fluoroadenosine
  modified_base 6: mod_base = OTHER; note = 2'-O-methyluridine
  modified_base 7: mod_base = OTHER; note = 2'-fluoroguanosine
  modified_base 8: mod_base = OTHER; note = 2'-O-methylguanosine
  modified_base 9: mod_base = OTHER; note = 2'-fluorocytidine
  modified_base 10: mod_base = OTHER; note = 2'-O-methyladenosine
  modified_base 11: mod_base = OTHER; note = 2'-fluoroguanosine
  modified_base 12: mod_base = OTHER; note = 2'-O-methylcytidine
  modified_base 13: mod_base = OTHER; note = 2'-fluorocytidine
  modified_base 14: mod_base = OTHER; note = 2'-O-methyluridine
  modified_base 15: mod_base = OTHER; note = 2'-fluorocytidine
  modified_base 16: mod_base = OTHER; note = 2'-O-methyluridine
  modified_base 17: mod_base = OTHER; note = 2'-fluoroguanosine
  modified_base 18: mod_base = OTHER; note = 2'-O-methylcytidine
  modified_base 19: mod_base = OTHER; note = 2'-fluorouridine with phosphorothioate linkage
  modified_base 20: mod_base = OTHER; note = 2'-O-methyluridine with phosphorothioate linkage
  modified_base 21: mod_base = OTHER; note = 2'-O-methyladenosine
tgcaatggcagcctctgctta

SEQ ID NO: 2487 - RNA, 21 nt, synthetic construct
  source 1..21: mol_type = other RNA
  modified_base 1: mod_base = OTHER; note = 2'-O-methylguanosine with phosphorothioate linkage
  modified_base 2: mod_base = OTHER; note = 2'-O-methylcytidine with phosphorothioate linkage
  modified_base 3: mod_base = OTHER; note = 2'-fluoroadenosine
  modified_base 4: mod_base = OTHER; note = 2'-O-methylcytidine
  modified_base 5: mod_base = OTHER; note = 2'-fluorouridine
  modified_base 6: mod_base = OTHER; note = 2'-O-methylcytidine
  modified_base 7: mod_base = OTHER; note = 2'-fluorocytidine
  modified_base 8: mod_base = OTHER; note = 2'-O-methyluridine
  modified_base 9: mod_base = OTHER; note = 2'-fluorocytidine
  modified_base 10: mod_base = OTHER; note = 2'-O-methylguanosine
  modified_base 11: mod_base = OTHER; note = 2'-fluoroguanosine
  modified_base 12: mod_base = OTHER; note = 2'-O-methyladenosine
  modified_base 13: mod_base = OTHER; note = 2'-fluoroguanosine
  modified_base 14: mod_base = OTHER; note = 2'-O-methyladenosine
  modified_base 15: mod_base = OTHER; note = 2'-fluoroadenosine
  modified_base 16: mod_base = OTHER; note = 2'-O-methylcytidine
  modified_base 17: mod_base = OTHER; note = 2'-fluoroguanosine
  modified_base 18: mod_base = OTHER; note = 2'-O-methylguanosine
  modified_base 19: mod_base = OTHER; note = 2'-fluoroguanosine with phosphorothioate linkage
  modified_base 20: mod_base = OTHER; note = 2'-O-methyladenosine with phosphorothioate linkage
  modified_base 21: mod_base = OTHER; note = 2'-O-methylguanosine
gcactcctcggagaacgggag

SEQ ID NO: 2488 - RNA, 21 nt, synthetic construct
  source 1..21: mol_type = other RNA
  modified_base 1: mod_base = OTHER; note = 2'-O-methyluridine with phosphorothioate linkage
  modified_base 2: mod_base = OTHER; note = 2'-O-methyluridine with phosphorothioate linkage
  modified_base 3: mod_base = OTHER; note = 2'-fluoroguanosine
  modified_base 4: mod_base = OTHER; note = 2'-O-methyluridine
  modified_base 5: mod_base = OTHER; note = 2'-fluorouridine
  modified_base 6: mod_base = OTHER; note = 2'-O-methyluridine
  modified_base 7: mod_base = OTHER; note = 2'-fluoroadenosine
  modified_base 8: mod_base = OTHER; note = 2'-O-methyluridine
  modified_base 9: mod_base = OTHER; note = 2'-fluorocytidine
  modified_base 10: mod_base = OTHER; note = 2'-O-methyladenosine
  modified_base 11: mod_base = OTHER; note = 2'-fluoroadenosine
  modified_base 12: mod_base = OTHER; note = 2'-O-methylcytidine
  modified_base 13: mod_base = OTHER; note = 2'-fluoroguanosine
  modified_base 14: mod_base = OTHER; note = 2'-O-methyluridine
  modified_base 15: mod_base = OTHER; note = 2'-fluorocytidine
  modified_base 16: mod_base = OTHER; note = 2'-O-methyladenosine
  modified_base 17: mod_base = OTHER; note = 2'-fluorouridine
  modified_base 18: mod_base = OTHER; note = 2'-O-methylcytidine
  modified_base 19: mod_base = OTHER; note = 2'-fluorouridine with phosphorothioate linkage
  modified_base 20: mod_base = OTHER; note = 2'-O-methyladenosine with phosphorothioate linkage
  modified_base 21: mod_base = OTHER; note = 2'-O-methylguanosine
ttgtttatcaacgtcatctag

SEQ ID NO: 2489 - RNA, 21 nt, synthetic construct
  source 1..21: mol_type = other RNA
  modified_base 1: mod_base = OTHER; note = 2'-O-methylcytidine with phosphorothioate linkage
  modified_base 2: mod_base = OTHER; note = 2'-O-methyladenosine with phosphorothioate linkage
  modified_base 3: mod_base = OTHER; note = 2'-fluoroguanosine
  modified_base 4: mod_base = OTHER; note = 2'-O-methylguanosine
  modified_base 5: mod_base = OTHER; note = 2'-fluoroguanosine
  modified_base 6: mod_base = OTHER; note = 2'-O-methyluridine
  modified_base 7: mod_base = OTHER; note = 2'-fluoroguanosine
  modified_base 8: mod_base = OTHER; note = 2'-O-methylcytidine
  modified_base 9: mod_base = OTHER; note = 2'-fluorouridine
  modified_base 10: mod_base = OTHER; note = 2'-O-methylguanosine
  modified_base 11: mod_base = OTHER; note = 2'-fluorocytidine
  modified_base 12: mod_base = OTHER; note = 2'-O-methylguanosine
  modified_base 13: mod_base = OTHER; note = 2'-fluoroguanosine
  modified_base 14: mod_base = OTHER; note = 2'-O-methyluridine
  modified_base 15: mod_base = OTHER; note = 2'-fluorouridine
  modified_base 16: mod_base = OTHER; note = 2'-O-methylguanosine
  modified_base 17: mod_base = OTHER; note = 2'-fluoroadenosine
  modified_base 18: mod_base = OTHER; note = 2'-O-methyladenosine
  modified_base 19: mod_base = OTHER; note = 2'-fluorouridine with phosphorothioate linkage
  modified_base 20: mod_base = OTHER; note = 2'-O-methylcytidine with phosphorothioate linkage
  modified_base 21: mod_base = OTHER; note = 2'-O-methylcytidine
cagggtgctgcggttgaatcc

SEQ ID NO: 2490 - RNA, 21 nt, synthetic construct
  source 1..21: mol_type = other RNA
  modified_base 1: mod_base = OTHER; note = 2'-O-methyluridine with phosphorothioate linkage
  modified_base 2: mod_base = OTHER; note = 2'-O-methyladenosine with phosphorothioate linkage
  modified_base 3: mod_base = OTHER; note = 2'-fluorouridine
  modified_base 4: mod_base = OTHER; note = 2'-O-methylcytidine
  modified_base 5: mod_base = OTHER; note = 2'-fluoroguanosine
  modified_base 6: mod_base = OTHER; note = 2'-O-methyladenosine
  modified_base 7: mod_base = OTHER; note = 2'-fluoroguanosine
  modified_base 8: mod_base = OTHER; note = 2'-O-methylcytidine
  modified_base 9: mod_base = OTHER; note = 2'-fluoroadenosine
  modified_base 10: mod_base = OTHER; note = 2'-O-methylcytidine
  modified_base 11: mod_base = OTHER; note = 2'-fluoroadenosine
  modified_base 12: mod_base = OTHER; note = 2'-O-methyladenosine
  modified_base 13: mod_base = OTHER; note = 2'-fluoroadenosine
  modified_base 14: mod_base = OTHER; note = 2'-O-methylcytidine
  modified_base 15: mod_base = OTHER; note = 2'-fluoroguanosine
  modified_base 16: mod_base = OTHER; note = 2'-O-methylguanosine
  modified_base 17: mod_base = OTHER; note = 2'-fluoroadenosine
  modified_base 18: mod_base = OTHER; note = 2'-O-methyladenosine
  modified_base 19: mod_base = OTHER; note = 2'-fluoroadenosine with phosphorothioate linkage
  modified_base 20: mod_base = OTHER; note = 2'-O-methylcytidine with phosphorothioate linkage
  modified_base 21: mod_base = OTHER; note = 2'-O-methyladenosine
tatcgagcacaaacggaaaca

SEQ ID NO: 2491 - RNA, 21 nt, synthetic construct
  source 1..21: mol_type = other RNA
  modified_base 1: mod_base = OTHER; note = 2'-O-methylcytidine with phosphorothioate linkage
  modified_base 2: mod_base = OTHER; note = 2'-O-methyluridine with phosphorothioate linkage
  modified_base 3: mod_base = OTHER; note = 2'-fluorocytidine
  modified_base 4: mod_base = OTHER; note = 2'-O-methylcytidine
  modified_base 5: mod_base = OTHER; note = 2'-fluorocytidine
  modified_base 6: mod_base = OTHER; note = 2'-O-methyluridine
  modified_base 7: mod_base = OTHER; note = 2'-fluorocytidine
  modified_base 8: mod_base = OTHER; note = 2'-O-methylcytidine
  modified_base 9: mod_base = OTHER; note = 2'-fluorouridine
  modified_base 10: mod_base = OTHER; note = 2'-O-methylcytidine
  modified_base 11: mod_base = OTHER; note = 2'-fluorouridine
  modified_base 12: mod_base = OTHER; note = 2'-O-methylguanosine
  modified_base 13: mod_base = OTHER; note = 2'-fluorocytidine
  modified_base 14: mod_base = OTHER; note = 2'-O-methyladenosine
  modified_base 15: mod_base = OTHER; note = 2'-fluoroadenosine
  modified_base 16: mod_base = OTHER; note = 2'-O-methyluridine
  modified_base 17: mod_base = OTHER; note = 2'-fluorocytidine
  modified_base 18: mod_base = OTHER; note = 2'-O-methylcytidine
  modified_base 19: mod_base = OTHER; note = 2'-fluoroguanosine with phosphorothioate linkage
  modified_base 20: mod_base = OTHER; note = 2'-O-methylcytidine with phosphorothioate linkage
  modified_base 21: mod_base = OTHER; note = 2'-O-methylcytidine
ctccctcctctgcaatccgcc

SEQ ID NO: 2492 - RNA, 21 nt, synthetic construct
  source 1..21: mol_type = other RNA
  modified_base 1: mod_base = OTHER; note = 2'-O-methylcytidine with phosphorothioate linkage
  modified_base 2: mod_base = OTHER; note = 2'-O-methyladenosine with phosphorothioate linkage
  modified_base 3: mod_base = OTHER; note = 2'-fluoroadenosine
  modified_base 4: mod_base = OTHER; note = 2'-O-methylguanosine
  modified_base 5: mod_base = OTHER; note = 2'-fluoroadenosine
  modified_base 6: mod_base = OTHER; note = 2'-O-methyladenosine
  modified_base 7: mod_base = OTHER; note = 2'-fluorocytidine
  modified_base 8: mod_base = OTHER; note = 2'-O-methyluridine
  modified_base 9: mod_base = OTHER; note = 2'-fluoroguanosine
  modified_base 10: mod_base = OTHER; note = 2'-O-methyluridine
  modified_base 11: mod_base = OTHER; note = 2'-fluoroadenosine
  modified_base 12: mod_base = OTHER; note = 2'-O-methylguanosine
  modified_base 13: mod_base = OTHER; note = 2'-fluorocytidine
  modified_base 14: mod_base = OTHER; note = 2'-O-methyladenosine
  modified_base 15: mod_base = OTHER; note = 2'-fluoroadenosine
  modified_base 16: mod_base = OTHER; note = 2'-O-methyluridine
  modified_base 17: mod_base = OTHER; note = 2'-fluorocytidine
  modified_base 18: mod_base = OTHER; note = 2'-O-methyluridine
  modified_base 19: mod_base = OTHER; note = 2'-fluorocytidine with phosphorothioate linkage
  modified_base 20: mod_base = OTHER; note = 2'-O-methyladenosine with phosphorothioate linkage
  modified_base 21: mod_base = OTHER; note = 2'-O-methylcytidine
caagaactgtagcaatctcac

SEQ ID NO: 2493 - RNA, 21 nt, synthetic construct
  source 1..21: mol_type = other RNA
  modified_base 1: mod_base = OTHER; note = 2'-O-methyladenosine with phosphorothioate linkage
  modified_base 2: mod_base = OTHER; note = 2'-O-methyladenosine with phosphorothioate linkage
  modified_base 3: mod_base = OTHER; note = 2'-fluoroguanosine
  modified_base 4: mod_base = OTHER; note = 2'-O-methyluridine
  modified_base 5: mod_base = OTHER; note = 2'-fluorocytidine
  modified_base 6: mod_base = OTHER; note = 2'-O-methylcytidine
  modified_base 7: mod_base = OTHER; note = 2'-fluoroadenosine
  modified_base 8: mod_base = OTHER; note = 2'-O-methyladenosine
  modified_base 9: mod_base = OTHER; note = 2'-fluoroguanosine
  modified_base 10: mod_base = OTHER; note = 2'-O-methyluridine
  modified_base 11: mod_base = OTHER; note = 2'-fluorocytidine
  modified_base 12: mod_base = OTHER; note = 2'-O-methyladenosine
  modified_base 13: mod_base = OTHER; note = 2'-fluorouridine
  modified_base 14: mod_base = OTHER; note = 2'-O-methylguanosine
  modified_base 15: mod_base = OTHER; note = 2'-fluorocytidine
  modified_base 16: mod_base = OTHER; note = 2'-O-methylguanosine
  modified_base 17: mod_base = OTHER; note = 2'-fluoroadenosine
  modified_base 18: mod_base = OTHER; note = 2'-O-methylguanosine
  modified_base 19: mod_base = OTHER; note = 2'-fluorouridine with phosphorothioate linkage
  modified_base 20: mod_base = OTHER; note = 2'-O-methyluridine with phosphorothioate linkage
  modified_base 21: mod_base = OTHER; note = 2'-O-methylcytidine
aagtccaagtcatgcgagttc

SEQ ID NO: 2494 - RNA, 21 nt, synthetic construct
  source 1..21: mol_type = other RNA
  modified_base 1: mod_base = OTHER; note = 2'-O-methylguanosine with phosphorothioate linkage
  modified_base 2: mod_base = OTHER; note = 2'-O-methyluridine with phosphorothioate linkage
  modified_base 3: mod_base = OTHER; note = 2'-fluoroadenosine
  modified_base 4: mod_base = OTHER; note = 2'-O-methyluridine
  modified_base 5: mod_base = OTHER; note = 2'-fluorocytidine
  modified_base 6: mod_base = OTHER; note = 2'-O-methylcytidine
  modified_base 7: mod_base = OTHER; note = 2'-fluorocytidine
  modified_base 8: mod_base = OTHER; note = 2'-O-methyluridine
  modified_base 9: mod_base = OTHER; note = 2'-fluorouridine
  modified_base 10: mod_base = OTHER; note = 2'-O-methylcytidine
  modified_base 11: mod_base = OTHER; note = 2'-fluoroadenosine
  modified_base 12: mod_base = OTHER; note = 2'-O-methylguanosine
  modified_base 13: mod_base = OTHER; note = 2'-fluoroguanosine
  modified_base 14: mod_base = OTHER; note = 2'-O-methyladenosine
  modified_base 15: mod_base = OTHER; note = 2'-fluorocytidine
  modified_base 16: mod_base = OTHER; note = 2'-O-methyluridine
  modified_base 17: mod_base = OTHER; note = 2'-fluoroadenosine
  modified_base 18: mod_base = OTHER; note = 2'-O-methylguanosine
  modified_base 19: mod_base = OTHER; note = 2'-fluoroguanosine with phosphorothioate linkage
  modified_base 20: mod_base = OTHER; note = 2'-O-methyluridine with phosphorothioate linkage
  modified_base 21: mod_base = OTHER; note = 2'-O-methylguanosine
gtatcccttcaggactaggtg

SEQ ID NO: 2495 - RNA, 21 nt, synthetic construct
  source 1..21: mol_type = other RNA
  modified_base 1: mod_base = OTHER; note = 2'-O-methyluridine with phosphorothioate linkage
  modified_base 2: mod_base = OTHER; note = 2'-O-methylcytidine with phosphorothioate linkage
  modified_base 3: mod_base = OTHER; note = 2'-fluorocytidine
  modified_base 4: mod_base = OTHER; note = 2'-O-methyluridine
  modified_base 5: mod_base = OTHER; note = 2'-fluorouridine
  modified_base 6: mod_base = OTHER; note = 2'-O-methylcytidine
  modified_base 7: mod_base = OTHER; note = 2'-fluorouridine
  modified_base 8: mod_base = OTHER; note = 2'-O-methyluridine
  modified_base 9: mod_base = OTHER; note = 2'-fluorouridine
  modified_base 10: mod_base = OTHER; note = 2'-O-methylcytidine
  modified_base 11: mod_base = OTHER; note = 2'-fluorouridine
  modified_base 12: mod_base = OTHER; note = 2'-O-methyladenosine
  modified_base 13: mod_base = OTHER; note = 2'-fluoroadenosine
  modified_base 14: mod_base = OTHER; note = 2'-O-methylcytidine
  modified_base 15: mod_base = OTHER; note = 2'-fluorocytidine
  modified_base 16: mod_base = OTHER; note = 2'-O-methylcytidine
  modified_base 17: mod_base = OTHER; note = 2'-fluoroguanosine
  modified_base 18: mod_base = OTHER; note = 2'-O-methylguanosine
  modified_base 19: mod_base = OTHER; note = 2'-fluorocytidine with phosphorothioate linkage
  modified_base 20: mod_base = OTHER; note = 2'-O-methyluridine with phosphorothioate linkage
  modified_base 21: mod_base = OTHER; note = 2'-O-methylcytidine
tccttctttctaacccggctc

SEQ ID NO: 2496 - RNA, 21 nt, synthetic construct
  source 1..21: mol_type = other RNA
  modified_base 1: mod_base = OTHER; note = 2'-O-methylcytidine with phosphorothioate linkage
  modified_base 2: mod_base = OTHER; note = 2'-O-methylcytidine with phosphorothioate linkage
  modified_base 3: mod_base = OTHER; note = 2'-fluoroadenosine
  modified_base 4: mod_base = OTHER; note = 2'-O-methyluridine
  modified_base 5: mod_base = OTHER; note = 2'-fluoroguanosine
  modified_base 6: mod_base = OTHER; note = 2'-O-methyladenosine
  modified_base 7: mod_base = OTHER; note = 2'-fluorocytidine
  modified_base 8: mod_base = OTHER; note = 2'-O-methylguanosine
  modified_base 9: mod_base = OTHER; note = 2'-fluoroguanosine
  modified_base 10: mod_base = OTHER; note = 2'-O-methylcytidine
  modified_base 11: mod_base = OTHER; note = 2'-fluorouridine
  modified_base 12: mod_base = OTHER; note = 2'-O-methylcytidine
  modified_base 13: mod_base = OTHER; note = 2'-fluorouridine
  modified_base 14: mod_base = OTHER; note = 2'-O-methylcytidine
  modified_base 15: mod_base = OTHER; note = 2'-fluorocytidine
  modified_base 16: mod_base = OTHER; note = 2'-O-methylcytidine
  modified_base 17: mod_base = OTHER; note = 2'-fluoroadenosine
  modified_base 18: mod_base = OTHER; note = 2'-O-methylcytidine
  modified_base 19: mod_base = OTHER; note = 2'-fluoroadenosine with phosphorothioate linkage
  modified_base 20: mod_base = OTHER; note = 2'-O-methyladenosine with phosphorothioate linkage
  modified_base 21: mod_base = OTHER; note = 2'-O-methyluridine
ccatgacggctctcccacaat

SEQ ID NO: 2497 - RNA, 21 nt, synthetic construct
  source 1..21: mol_type = other RNA
  modified_base 1: mod_base = OTHER; note = 2'-O-methyluridine with phosphorothioate linkage
  modified_base 2: mod_base = OTHER; note = 2'-O-methyluridine with phosphorothioate linkage
  modified_base 3: mod_base = OTHER; note = 2'-fluorouridine
  modified_base 4: mod_base = OTHER; note = 2'-O-methylguanosine
  modified_base 5: mod_base = OTHER; note = 2'-fluoroadenosine
  modified_base 6: mod_base = OTHER; note = 2'-O-methylcytidine
  modified_base 7: mod_base = OTHER; note = 2'-fluoroadenosine
  modified_base 8: mod_base = OTHER; note = 2'-O-methylguanosine
  modified_base 9: mod_base = OTHER; note = 2'-fluoroguanosine
  modified_base 10: mod_base = OTHER; note = 2'-O-methylguanosine
  modified_base 11: mod_base = OTHER; note = 2'-fluorouridine
  modified_base 12: mod_base = OTHER; note = 2'-O-methylguanosine
  modified_base 13: mod_base = OTHER; note = 2'-fluorocytidine
  modified_base 14: mod_base = OTHER; note = 2'-O-methyluridine
  modified_base 15: mod_base = OTHER; note = 2'-fluoroguanosine
  modified_base 16: mod_base = OTHER; note = 2'-O-methylcytidine
  modified_base 17: mod_base = OTHER; note = 2'-fluoroguanosine
  modified_base 18: mod_base = OTHER; note = 2'-O-methylguanosine
  modified_base 19: mod_base = OTHER; note = 2'-fluorouridine with phosphorothioate linkage
  modified_base 20: mod_base = OTHER; note = 2'-O-methyluridine with phosphorothioate linkage
  modified_base 21: mod_base = OTHER; note = 2'-O-methylguanosine
tttgacagggtgctgcggttg

SEQ ID NO: 2498 - RNA, 21 nt, synthetic construct
  source 1..21: mol_type = other RNA
  modified_base 1: mod_base = OTHER; note = 2'-O-methylguanosine with phosphorothioate linkage
  modified_base 2: mod_base = OTHER; note = 2'-O-methylcytidine with phosphorothioate linkage
  modified_base 3: mod_base = OTHER; note = 2'-fluoroguanosine
  modified_base 4: mod_base = OTHER; note = 2'-O-methylguanosine
  modified_base 5: mod_base = OTHER; note = 2'-fluoroguanosine
  modified_base 6: mod_base = OTHER; note = 2'-O-methyluridine
  modified_base 7: mod_base = OTHER; note = 2'-fluorouridine
  modified_base 8: mod_base = OTHER; note = 2'-O-methylguanosine
  modified_base 9: mod_base = OTHER; note = 2'-fluoroguanosine
  modified_base 10: mod_base = OTHER; note = 2'-O-methyluridine
  modified_base 11: mod_base = OTHER; note = 2'-fluoroadenosine
  modified_base 12: mod_base = OTHER; note = 2'-O-methyluridine
  modified_base 13: mod_base = OTHER; note = 2'-fluorocytidine
  modified_base 14: mod_base = OTHER; note = 2'-O-methylcytidine
  modified_base 15: mod_base = OTHER; note = 2'-fluorocytidine
  modified_base 16: mod_base = OTHER; note = 2'-O-methyluridine
  modified_base 17: mod_base = OTHER; note = 2'-fluorouridine
  modified_base 18: mod_base = OTHER; note = 2'-O-methylcytidine
  modified_base 19: mod_base = OTHER; note = 2'-fluoroadenosine with phosphorothioate linkage
  modified_base 20: mod_base = OTHER; note = 2'-O-methylguanosine with phosphorothioate linkage
  modified_base 21: mod_base = OTHER; note = 2'-O-methylguanosine
gcgggttggtatcccttcagg

SEQ ID NO: 2499 - RNA, 21 nt, synthetic construct
  source 1..21: mol_type = other RNA
  modified_base 1: mod_base = OTHER; note = 2'-O-methyluridine with phosphorothioate linkage
  modified_base 2: mod_base = OTHER; note = 2'-O-methylguanosine with phosphorothioate linkage
  modified_base 3: mod_base = OTHER; note = 2'-fluorouridine
  modified_base 4: mod_base = OTHER; note = 2'-O-methylguanosine
  modified_base 5: mod_base = OTHER; note = 2'-fluorocytidine
  modified_base 6: mod_base = OTHER; note = 2'-O-methyladenosine
  modified_base 7: mod_base = OTHER; note = 2'-fluoroadenosine
  modified_base 8: mod_base = OTHER; note = 2'-O-methylcytidine
  modified_base 9: mod_base = OTHER; note = 2'-fluorouridine
  modified_base 10: mod_base = OTHER; note = 2'-O-methyladenosine
  modified_base 11: mod_base = OTHER; note = 2'-fluorouridine
  modified_base 12: mod_base = OTHER; note = 2'-O-methylguanosine
  modified_base 13: mod_base = OTHER; note = 2'-fluorocytidine
  modified_base 14: mod_base = OTHER; note = 2'-O-methylcytidine
  modified_base 15: mod_base = OTHER; note = 2'-fluorouridine
  modified_base 16: mod_base = OTHER; note = 2'-O-methylguanosine
  modified_base 17: mod_base = OTHER; note = 2'-fluorouridine
  modified_base 18: mod_base = OTHER; note = 2'-O-methylguanosine
  modified_base 19: mod_base = OTHER; note = 2'-fluorocytidine with phosphorothioate linkage
  modified_base 20: mod_base = OTHER; note = 2'-O-methylcytidine with phosphorothioate linkage
  modified_base 21: mod_base = OTHER; note = 2'-O-methylcytidine
tgtgcaactatgcctgtgccc

SEQ ID NO: 2500 - RNA, 21 nt, synthetic construct
  source 1..21: mol_type = other RNA
  modified_base 1: mod_base = OTHER; note = 2'-O-methylguanosine with phosphorothioate linkage
  modified_base 2: mod_base = OTHER; note = 2'-O-methyluridine with phosphorothioate linkage
  modified_base 3: mod_base = OTHER; note = 2'-fluoroguanosine
  modified_base 4: mod_base = OTHER; note = 2'-O-methylcytidine
  modified_base 5: mod_base = OTHER; note = 2'-fluorouridine
  modified_base 6: mod_base = OTHER; note = 2'-O-methylguanosine
  modified_base 7: mod_base = OTHER; note = 2'-fluorocytidine
  modified_base 8: mod_base = OTHER; note = 2'-O-methylguanosine
  modified_base 9: mod_base = OTHER; note = 2'-fluoroguanosine
  modified_base 10: mod_base = OTHER; note = 2'-O-methyluridine
  modified_base 11: mod_base = OTHER; note = 2'-fluorouridine
  modified_base 12: mod_base = OTHER; note = 2'-O-methylguanosine
  modified_base 13: mod_base = OTHER; note = 2'-fluoroadenosine
  modified_base 14: mod_base = OTHER; note = 2'-O-methyladenosine
  modified_base 15: mod_base = OTHER; note = 2'-fluorouridine
  modified_base 16: mod_base = OTHER; note = 2'-O-methylcytidine
  modified_base 17: mod_base = OTHER; note = 2'-fluorocytidine
  modified_base 18: mod_base = OTHER; note = 2'-O-methyladenosine
  modified_base 19: mod_base = OTHER; note = 2'-fluoroadenosine with phosphorothioate linkage
  modified_base 20: mod_base = OTHER; note = 2'-O-methyluridine with phosphorothioate linkage
  modified_base 21: mod_base = OTHER; note = 2'-O-methylguanosine
gtgctgcggttgaatccaatg

SEQ ID NO: 2501 - RNA, 21 nt, synthetic construct
  source 1..21: mol_type = other RNA
  modified_base 1: mod_base = OTHER; note = 2'-O-methylcytidine with phosphorothioate linkage
  modified_base 2: mod_base = OTHER; note = 2'-O-methyladenosine with phosphorothioate linkage
  modified_base 3: mod_base = OTHER; note = 2'-fluoroguanosine
  modified_base 4: mod_base = OTHER; note = 2'-O-methylcytidine
  modified_base 5: mod_base = OTHER; note = 2'-fluoroadenosine
  modified_base 6: mod_base = OTHER; note = 2'-O-methylcytidine
  modified_base 7: mod_base = OTHER; note = 2'-fluorouridine
  modified_base 8: mod_base = OTHER; note = 2'-O-methyluridine
  modified_base 9: mod_base = OTHER; note = 2'-fluoroadenosine
  modified_base 10: mod_base = OTHER; note = 2'-O-methyladenosine
  modified_base 11: mod_base = OTHER; note = 2'-fluoroguanosine
  modified_base 12: mod_base = OTHER; note = 2'-O-methylcytidine
  modified_base 13: mod_base = OTHER; note = 2'-fluoroadenosine
  modified_base 14: mod_base = OTHER; note = 2'-O-methyladenosine
  modified_base 15: mod_base = OTHER; note = 2'-fluoroadenosine
  modified_base 16: mod_base = OTHER; note = 2'-O-methylcytidine
  modified_base 17: mod_base = OTHER; note = 2'-fluoroguanosine
  modified_base 18: mod_base = OTHER; note = 2'-O-methylguanosine
  modified_base 19: mod_base = OTHER; note = 2'-fluoroguanosine with phosphorothioate linkage
  modified_base 20: mod_base = OTHER; note = 2'-O-methyladenosine with phosphorothioate linkage
  modified_base 21: mod_base = OTHER; note = 2'-O-methyladenosine
cagcacttaagcaaacgggaa

SEQ ID NO: 2502 - RNA, 21 nt, synthetic construct
  source 1..21: mol_type = other RNA
  modified_base 1: mod_base = OTHER; note = 2'-O-methyluridine with phosphorothioate linkage
  modified_base 2: mod_base = OTHER; note = 2'-O-methyluridine with phosphorothioate linkage
  modified_base 3: mod_base = OTHER; note = 2'-fluoroguanosine
  modified_base 4: mod_base = OTHER; note = 2'-O-methyladenosine
  modified_base 5: mod_base = OTHER; note = 2'-fluoroadenosine
  modified_base 6: mod_base = OTHER; note = 2'-O-methyluridine
  modified_base 7: mod_base = OTHER; note = 2'-fluorocytidine
  modified_base 8: mod_base = OTHER; note = 2'-O-methylcytidine
  modified_base 9: mod_base = OTHER; note = 2'-fluoroadenosine
  modified_base 10: mod_base = OTHER; note = 2'-O-methyladenosine
  modified_base 11: mod_base = OTHER; note = 2'-fluorouridine
  modified_base 12: mod_base = OTHER; note = 2'-O-methylguanosine
  modified_base 13: mod_base = OTHER; note = 2'-fluoroguanosine
  modified_base 14: mod_base = OTHER; note = 2'-O-methylcytidine
  modified_base 15: mod_base = OTHER; note = 2'-fluorouridine
  modified_base 16: mod_base = OTHER; note = 2'-O-methyladenosine
  modified_base 17: mod_base = OTHER; note = 2'-fluorouridine
  modified_base 18: mod_base = OTHER; note = 2'-O-methylguanosine
  modified_base 19: mod_base = OTHER; note = 2'-fluoroguanosine with phosphorothioate linkage
  modified_base 20: mod_base = OTHER; note = 2'-O-methyladenosine with phosphorothioate linkage
  modified_base 21: mod_base = OTHER; note = 2'-O-methylguanosine
ttgaatccaatggctatggag

SEQ ID NO: 2503 - RNA, 21 nt, synthetic construct
  source 1..21: mol_type = other RNA
  modified_base 1: mod_base = OTHER; note = 2'-O-methyladenosine with phosphorothioate linkage
  modified_base 2: mod_base = OTHER; note = 2'-O-methyladenosine with phosphorothioate linkage
  modified_base 3: mod_base = OTHER; note = 2'-fluoroguanosine
  modified_base 4: mod_base = OTHER; note = 2'-O-methyladenosine
  modified_base 5: mod_base = OTHER; note = 2'-fluoroadenosine
  modified_base 6: mod_base = OTHER; note = 2'-O-methylcytidine
  modified_base 7: mod_base = OTHER; note = 2'-fluorouridine
  modified_base 8: mod_base = OTHER; note = 2'-O-methylguanosine
  modified_base 9: mod_base = OTHER; note = 2'-fluorouridine
  modified_base 10: mod_base = OTHER; note = 2'-O-methyladenosine
  modified_base 11: mod_base = OTHER; note = 2'-fluoroguanosine
  modified_base 12: mod_base = OTHER; note = 2'-O-methylcytidine
  modified_base 13: mod_base = OTHER; note = 2'-fluoroadenosine
  modified_base 14: mod_base = OTHER; note = 2'-O-methyladenosine
  modified_base 15: mod_base = OTHER; note = 2'-fluorouridine
  modified_base 16: mod_base = OTHER; note = 2'-O-methylcytidine
  modified_base 17: mod_base = OTHER; note = 2'-fluorouridine
  modified_base 18: mod_base = OTHER; note = 2'-O-methylcytidine
  modified_base 19: mod_base = OTHER; note = 2'-fluoroadenosine with phosphorothioate linkage
  modified_base 20: mod_base = OTHER; note = 2'-O-methylcytidine with phosphorothioate linkage
  modified_base 21: mod_base = OTHER; note = 2'-O-methyluridine
aagaactgtagcaatctcact

SEQ ID NO: 2504 - RNA, 21 nt, synthetic construct
  source 1..21: mol_type = other RNA
  modified_base 1: mod_base = OTHER; note = 2'-O-methyladenosine with phosphorothioate linkage
  modified_base 2: mod_base = OTHER; note = 2'-O-methyluridine with phosphorothioate linkage
  modified_base 3: mod_base = OTHER; note = 2'-fluorouridine
  modified_base 4: mod_base = OTHER; note = 2'-O-methylcytidine
  modified_base 5: mod_base = OTHER; note = 2'-fluoroadenosine
  modified_base 6: mod_base = OTHER; note = 2'-O-methylcytidine
  modified_base 7: mod_base = OTHER; note = 2'-fluorocytidine
  modified_base 8: mod_base = OTHER; note = 2'-O-methyladenosine
  modified_base 9: mod_base = OTHER; note = 2'-fluoroguanosine
  modified_base 10: mod_base = OTHER; note = 2'-O-methyluridine
  modified_base 11: mod_base = OTHER; note = 2'-fluoroguanosine
  modified_base 12: mod_base = OTHER; note = 2'-O-methylcytidine
  modified_base 13: mod_base = OTHER; note = 2'-fluoroadenosine
  modified_base 14: mod_base = OTHER; note = 2'-O-methyluridine
  modified_base 15: mod_base = OTHER; note = 2'-fluoroguanosine
  modified_base 16: mod_base = OTHER; note = 2'-O-methylguanosine
  modified_base 17: mod_base = OTHER; note = 2'-fluorouridine
  modified_base 18: mod_base = OTHER; note = 2'-O-methyluridine
  modified_base 19: mod_base = OTHER; note = 2'-fluorouridine with phosphorothioate linkage
  modified_base 20: mod_base = OTHER; note = 2'-O-methylcytidine with phosphorothioate linkage
  modified_base 21: mod_base = OTHER; note = 2'-O-methyluridine
attcaccagtgcatggtttct

SEQ ID NO: 2505 - RNA, 21 nt, synthetic construct
  source 1..21: mol_type = other RNA
  modified_base 1: mod_base = OTHER; note = 2'-O-methylcytidine with phosphorothioate linkage
  modified_base 2: mod_base = OTHER; note = 2'-O-methyluridine with phosphorothioate linkage
  modified_base 3: mod_base = OTHER; note = 2'-fluoroguanosine
  modified_base 4: mod_base = OTHER; note = 2'-O-methylguanosine
  modified_base 5: mod_base = OTHER; note = 2'-fluorocytidine
  modified_base 6: mod_base = OTHER; note = 2'-O-methyladenosine
  modified_base 7: mod_base = OTHER; note = 2'-fluoroguanosine
  modified_base 8: mod_base = OTHER; note = 2'-O-methyladenosine
  modified_base 9: mod_base = OTHER; note = 2'-fluoroadenosine
  modified_base 10: mod_base = OTHER; note = 2'-O-methylguanosine
  modified_base 11: mod_base = OTHER; note = 2'-fluoroguanosine
  modified_base 12: mod_base = OTHER; note = 2'-O-methylguanosine
  modified_base 13: mod_base = OTHER; note = 2'-fluorocytidine
  modified_base 14: mod_base = OTHER; note = 2'-O-methylguanosine
  modified_base 15: mod_base = OTHER; note = 2'-fluorocytidine
  modified_base 16: mod_base = OTHER; note = 2'-O-methyluridine
  modified_base 17: mod_base = OTHER; note = 2'-fluorouridine
  modified_base 18: mod_base = OTHER; note = 2'-O-methyluridine
  modified_base 19: mod_base = OTHER; note = 2'-fluorocytidine with phosphorothioate linkage
  modified_base 20: mod_base = OTHER; note = 2'-O-methylcytidine with phosphorothioate linkage
  modified_base 21: mod_base = OTHER; note = 2'-O-methyladenosine
ctggcagaagggcgctttcca

SEQ ID NO: 2506 - RNA, 21 nt, synthetic construct
  source 1..21: mol_type = other RNA
  modified_base 1: mod_base = OTHER; note = 2'-O-methylguanosine with phosphorothioate linkage
  modified_base 2: mod_base = OTHER; note = 2'-O-methylguanosine with phosphorothioate linkage
  modified_base 3: mod_base = OTHER; note = 2'-fluoroadenosine
  modified_base 4: mod_base = OTHER; note = 2'-O-methyluridine
  modified_base 5: mod_base = OTHER; note = 2'-fluoroguanosine
  modified_base 6: mod_base = OTHER; note = 2'-O-methyladenosine
  modified_base 7: mod_base = OTHER; note = 2'-fluoroguanosine
  modified_base 8: mod_base = OTHER; note = 2'-O-methyluridine
  modified_base 9: mod_base = OTHER; note = 2'-fluoroguanosine
  modified_base 10: mod_base = OTHER; note = 2'-O-methylcytidine
  modified_base 11: mod_base = OTHER; note = 2'-fluoroadenosine
  modified_base 12: mod_base = OTHER; note = 2'-O-methylguanosine
  modified_base 13: mod_base = OTHER; note = 2'-fluoroadenosine
  modified_base 14: mod_base = OTHER; note = 2'-O-methyladenosine
  modified_base 15: mod_base = OTHER; note = 2'-fluorouridine
  modified_base 16: mod_base = OTHER; note = 2'-O-methyladenosine
  modified_base 17: mod_base = OTHER; note = 2'-fluorouridine
  modified_base 18: mod_base = OTHER; note = 2'-O-methylguanosine
  modified_base 19: mod_base = OTHER; note = 2'-fluorocytidine with phosphorothioate linkage
  modified_base 20: mod_base = OTHER; note = 2'-O-methylcytidine with phosphorothioate linkage
  modified_base 21: mod_base = OTHER; note = 2'-O-methylcytidine
ggatgagtgcagaatatgccc

SEQ ID NO: 2507 - RNA, 21 nt, synthetic construct
  source 1..21: mol_type = other RNA
  modified_base 1: mod_base = OTHER; note = 2'-O-methyluridine with phosphorothioate linkage
  modified_base 2: mod_base = OTHER; note = 2'-O-methylcytidine with phosphorothioate linkage
  modified_base 3: mod_base = OTHER; note = 2'-fluorouridine
  modified_base 4: mod_base = OTHER; note = 2'-O-methylcytidine
  modified_base 5: mod_base = OTHER; note = 2'-fluorocytidine
  modified_base 6: mod_base = OTHER; note = 2'-O-methyluridine
  modified_base 7: mod_base = OTHER; note = 2'-fluorouridine
  modified_base 8: mod_base = OTHER; note = 2'-O-methylcytidine
  modified_base 9: mod_base = OTHER; note = 2'-fluorouridine
  modified_base 10: mod_base = OTHER; note = 2'-O-methyluridine
  modified_base 11: mod_base = OTHER; note = 2'-fluorouridine
  modified_base 12: mod_base = OTHER; note = 2'-O-methylcytidine
  modified_base 13: mod_base = OTHER; note = 2'-fluorouridine
  modified_base 14: mod_base = OTHER; note = 2'-O-methyladenosine
  modified_base 15: mod_base = OTHER; note = 2'-fluoroadenosine
  modified_base 16: mod_base = OTHER; note = 2'-O-methylcytidine
  modified_base 17: mod_base = OTHER; note = 2'-fluorocytidine
  modified_base 18: mod_base = OTHER; note = 2'-O-methylcytidine
  modified_base 19: mod_base = OTHER; note = 2'-fluoroguanosine with phosphorothioate linkage
  modified_base 20: mod_base = OTHER; note = 2'-O-methylguanosine with phosphorothioate linkage
  modified_base 21: mod_base = OTHER; note = 2'-O-methylcytidine
tctccttctttctaacccggc

SEQ ID NO: 2508 - RNA, 21 nt, synthetic construct
  source 1..21: mol_type = other RNA
  modified_base 1: mod_base = OTHER; note = 2'-O-methyluridine with phosphorothioate linkage
  modified_base 2: mod_base = OTHER; note = 2'-O-methylguanosine with phosphorothioate linkage
  modified_base 3: mod_base = OTHER; note = 2'-fluorocytidine
  modified_base 4: mod_base = OTHER; note = 2'-O-methyluridine
  modified_base 5: mod_base = OTHER; note = 2'-fluoroguanosine
  modified_base 6: mod_base = OTHER; note = 2'-O-methylcytidine
  modified_base 7: mod_base = OTHER; note = 2'-fluoroguanosine
  modified_base 8: mod_base = OTHER; note = 2'-O-methylguanosine
  modified_base 9: mod_base = OTHER; note = 2'-fluorouridine
  modified_base 10: mod_base = OTHER; note = 2'-O-methyluridine
  modified_base 11: mod_base = OTHER; note = 2'-fluoroguanosine
  modified_base 12: mod_base = OTHER; note = 2'-O-methyladenosine
  modified_base 13: mod_base = OTHER; note = 2'-fluoroadenosine
  modified_base 14: mod_base = OTHER; note = 2'-O-methyluridine
  modified_base 15: mod_base = OTHER; note = 2'-fluorocytidine
  modified_base 16: mod_base = OTHER; note = 2'-O-methylcytidine
  modified_base 17: mod_base = OTHER; note = 2'-fluoroadenosine
  modified_base 18: mod_base = OTHER; note = 2'-O-methyladenosine
  modified_base 19: mod_base = OTHER; note = 2'-fluorouridine with phosphorothioate linkage
  modified_base 20: mod_base = OTHER; note = 2'-O-methylguanosine with phosphorothioate linkage
  modified_base 21: mod_base = OTHER; note = 2'-O-methylguanosine
tgctgcggttgaatccaatgg

SEQ ID NO: 2509 - RNA, 21 nt, synthetic construct
  source 1..21: mol_type = other RNA
  modified_base 1: mod_base = OTHER; note = 2'-O-methylguanosine with phosphorothioate linkage
  modified_base 2: mod_base = OTHER; note = 2'-O-methylguanosine with phosphorothioate linkage
  modified_base 3: mod_base = OTHER; note = 2'-fluoroadenosine
  modified_base 4: mod_base = OTHER; note = 2'-O-methylguanosine
  modified_base 5: mod_base = OTHER; note = 2'-fluorouridine
  modified_base 6: mod_base = OTHER; note = 2'-O-methylcytidine
  modified_base 7: mod_base = OTHER; note = 2'-fluorouridine
  modified_base 8: mod_base = OTHER; note = 2'-O-methylcytidine
  modified_base 9: mod_base = OTHER; note = 2'-fluorocytidine
  modified_base 10: mod_base = OTHER; note = 2'-O-methyluridine
  modified_base 11: mod_base = OTHER; note = 2'-fluorouridine
  modified_base 12: mod_base = OTHER; note = 2'-O-methylcytidine
  modified_base 13: mod_base = OTHER; note = 2'-fluorouridine
  modified_base 14: mod_base = OTHER; note = 2'-O-methyluridine
  modified_base 15: mod_base = OTHER; note = 2'-fluorouridine
  modified_base 16: mod_base = OTHER; note = 2'-O-methylcytidine
  modified_base 17: mod_base = OTHER; note = 2'-fluorouridine
  modified_base 18: mod_base = OTHER; note = 2'-O-methyladenosine
  modified_base 19: mod_base = OTHER; note = 2'-fluoroadenosine with phosphorothioate linkage
  modified_base 20: mod_base = OTHER; note = 2'-O-methylcytidine with phosphorothioate linkage
  modified_base 21: mod_base = OTHER; note = 2'-O-methylcytidine
ggagtctccttctttctaacc

SEQ ID NO: 2510 - RNA, 21 nt, synthetic construct
  source 1..21: mol_type = other RNA
  modified_base 1: mod_base = OTHER; note = 2'-O-methylguanosine with phosphorothioate linkage
  modified_base 2: mod_base = OTHER; note = 2'-O-methylcytidine with phosphorothioate linkage
  modified_base 3: mod_base = OTHER; note = 2'-fluorocytidine
  modified_base 4: mod_base = OTHER; note = 2'-O-methylcytidine
  modified_base 5: mod_base = OTHER; note = 2'-fluorouridine
  modified_base 6: mod_base = OTHER; note = 2'-O-methylguanosine
  modified_base 7: mod_base = OTHER; note = 2'-fluoroguanosine
  modified_base 8: mod_base = OTHER; note = 2'-O-methylcytidine
  modified_base 9: mod_base = OTHER; note = 2'-fluorocytidine
  modified_base 10: mod_base = OTHER; note = 2'-O-methyladenosine
  modified_base 11: mod_base = OTHER; note = 2'-fluorocytidine
  modified_base 12: mod_base = OTHER; note = 2'-O-methylcytidine
  modified_base 13: mod_base = OTHER; note = 2'-fluorocytidine
  modified_base 14: mod_base = OTHER; note = 2'-O-methyladenosine
  modified_base 15: mod_base = OTHER; note = 2'-fluorouridine
  modified_base 16: mod_base = OTHER; note = 2'-O-methylcytidine
  modified_base 17: mod_base = OTHER; note = 2'-fluoroadenosine
  modified_base 18: mod_base = OTHER; note = 2'-O-methylcytidine
  modified_base 19: mod_base = OTHER; note = 2'-fluorocytidine with phosphorothioate linkage
  modified_base 20: mod_base = OTHER; note = 2'-O-methylcytidine with phosphorothioate linkage
  modified_base 21: mod_base = OTHER; note = 2'-O-methylguanosine
gccctggccacccatcacccg

SEQ ID NO: 2511 - RNA, 21 nt, synthetic construct
  source 1..21: mol_type = other RNA
  modified_base 1: mod_base = OTHER; note = 2'-O-methylcytidine with phosphorothioate linkage
  modified_base 2: mod_base = OTHER; note = 2'-O-methylguanosine with phosphorothioate linkage
  modified_base 3: mod_base = OTHER; note = 2'-fluoroguanosine
  modified_base 4: mod_base = OTHER; note = 2'-O-methylcytidine
  modified_base 5: mod_base = OTHER; note = 2'-fluorouridine
  modified_base 6: mod_base = OTHER; note = 2'-O-methylcytidine
  modified_base 7: mod_base = OTHER; note = 2'-fluorouridine
  modified_base 8: mod_base = OTHER; note = 2'-O-methylcytidine
  modified_base 9: mod_base = OTHER; note = 2'-fluorocytidine
  modified_base 10: mod_base = OTHER; note = 2'-O-methylcytidine
  modified_base 11: mod_base = OTHER; note = 2'-fluoroadenosine
  modified_base 12: mod_base = OTHER; note = 2'-O-methylcytidine
  modified_base 13: mod_base = OTHER; note = 2'-fluoroadenosine
  modified_base 14: mod_base = OTHER; note = 2'-O-methyladenosine
  modified_base 15: mod_base = OTHER; note = 2'-fluorouridine
  modified_base 16: mod_base = OTHER; note = 2'-O-methyluridine
  modified_base 17: mod_base = OTHER; note = 2'-fluorocytidine
  modified_base 18: mod_base = OTHER; note = 2'-O-methyladenosine
  modified_base 19: mod_base = OTHER; note = 2'-fluorouridine with phosphorothioate linkage
  modified_base 20: mod_base = OTHER; note = 2'-O-methylcytidine with phosphorothioate linkage
  modified_base 21: mod_base = OTHER; note = 2'-O-methyluridine
cggctctcccacaattcatct

SEQ ID NO: 2512 - RNA, 21 nt, synthetic construct
  source 1..21: mol_type = other RNA
  modified_base 1: mod_base = OTHER; note = 2'-O-methylguanosine with phosphorothioate linkage
  modified_base 2: mod_base = OTHER; note = 2'-O-methyladenosine with phosphorothioate linkage
  modified_base 3: mod_base = OTHER; note = 2'-fluoroguanosine
  modified_base 4: mod_base = OTHER; note = 2'-O-methyladenosine
  modified_base 5: mod_base = OTHER; note = 2'-fluoroadenosine
  modified_base 6: mod_base = OTHER; note = 2'-O-methylguanosine
  modified_base 7: mod_base = OTHER; note = 2'-fluorocytidine
  modified_base 8: mod_base = OTHER; note = 2'-O-methylcytidine
  modified_base 9: mod_base = OTHER; note = 2'-fluoroadenosine
  modified_base 10: mod_base = OTHER; note = 2'-O-methylcytidine
  modified_base 11: mod_base = OTHER; note = 2'-fluoroadenosine
  modified_base 12: mod_base = OTHER; note = 2'-O-methylcytidine
  modified_base 13: mod_base = OTHER; note = 2'-fluoroguanosine
  modified_base 14: mod_base = OTHER; note = 2'-O-methylguanosine
  modified_base 15: mod_base = OTHER; note = 2'-fluoroguanosine
  modified_base 16: mod_base = OTHER; note = 2'-O-methylcytidine
  modified_base 17: mod_base = OTHER; note = 2'-fluoroguanosine
  modified_base 18: mod_base = OTHER; note = 2'-O-methyladenosine
  modified_base 19: mod_base = OTHER; note = 2'-fluoroadenosine with phosphorothioate linkage
  modified_base 20: mod_base = OTHER; note = 2'-O-methyladenosine with phosphorothioate linkage
  modified_base 21: mod_base = OTHER; note = 2'-O-methylguanosine
gagaagccacacgggcgaaag

SEQ ID NO: 2513 - RNA, 21 nt, synthetic construct
  source 1..21: mol_type = other RNA
  modified_base 1: mod_base = OTHER; note = 2'-O-methylguanosine with phosphorothioate linkage
  modified_base 2: mod_base = OTHER; note = 2'-O-methyluridine with phosphorothioate linkage
  modified_base 3: mod_base = OTHER; note = 2'-fluorouridine
  modified_base 4: mod_base = OTHER; note = 2'-O-methyluridine
  modified_base 5: mod_base = OTHER; note = 2'-fluoroadenosine
  modified_base 6: mod_base = OTHER; note = 2'-O-methylguanosine
  modified_base 7: mod_base = OTHER; note = 2'-fluorouridine
  modified_base 8: mod_base = OTHER; note = 2'-O-methylcytidine
  modified_base 9: mod_base = OTHER; note = 2'-fluorocytidine
  modified_base 10: mod_base = OTHER; note = 2'-O-methyladenosine
  modified_base 11: mod_base = OTHER; note = 2'-fluorocytidine
  modified_base 12: mod_base = OTHER; note = 2'-O-methylcytidine
  modified_base 13: mod_base = OTHER; note = 2'-fluoroadenosine
  modified_base 14: mod_base = OTHER; note = 2'-O-methylcytidine
  modified_base 15: mod_base = OTHER; note = 2'-fluorocytidine
  modified_base 16: mod_base = OTHER; note = 2'-O-methylguanosine
  modified_base 17: mod_base = OTHER; note = 2'-fluoroadenosine
  modified_base 18: mod_base = OTHER; note = 2'-O-methylguanosine
  modified_base 19: mod_base = OTHER; note = 2'-fluoroadenosine with phosphorothioate linkage
  modified_base 20: mod_base = OTHER; note = 2'-O-methylcytidine with phosphorothioate linkage
  modified_base 21: mod_base = OTHER; note = 2'-O-methyladenosine
gtttagtccaccaccgagaca

SEQ ID NO: 2514 - RNA, 21 nt, synthetic construct
  source 1..21: mol_type = other RNA
  modified_base 1: mod_base = OTHER; note = 2'-O-methyluridine with phosphorothioate linkage
  modified_base 2: mod_base = OTHER; note = 2'-O-methylguanosine with phosphorothioate linkage
  modified_base 3: mod_base = OTHER; note = 2'-fluoroguanosine
  modified_base 4: mod_base = OTHER; note = 2'-O-methylcytidine
  modified_base 5: mod_base = OTHER; note = 2'-fluorocytidine
  modified_base 6: mod_base = OTHER; note = 2'-O-methylcytidine
  modified_base 7: mod_base = OTHER; note = 2'-fluorouridine
  modified_base 8: mod_base = OTHER; note = 2'-O-methylguanosine
  modified_base 9: mod_base = OTHER; note = 2'-fluoroguanosine
  modified_base 10: mod_base = OTHER; note = 2'-O-methylcytidine
  modified_base 11: mod_base = OTHER; note = 2'-fluorocytidine
  modified_base 12: mod_base = OTHER; note = 2'-O-methyladenosine
  modified_base 13: mod_base = OTHER; note = 2'-fluorocytidine
  modified_base 14: mod_base = OTHER; note = 2'-O-methylcytidine
  modified_base 15: mod_base = OTHER; note = 2'-fluorocytidine
  modified_base 16: mod_base = OTHER; note = 2'-O-methyladenosine
  modified_base 17: mod_base = OTHER; note = 2'-fluorouridine
  modified_base 18: mod_base = OTHER; note = 2'-O-methylcytidine
  modified_base 19: mod_base = OTHER; note = 2'-fluoroadenosine with phosphorothioate linkage
  modified_base 20: mod_base = OTHER; note = 2'-O-methylcytidine with phosphorothioate linkage
  modified_base 21: mod_base = OTHER; note = 2'-O-methylcytidine
tggccctggccacccatcacc

SEQ ID NO: 2515 - RNA, 21 nt, synthetic construct
  source 1..21: mol_type = other RNA
  modified_base 1: mod_base = OTHER; note = 2'-O-methyladenosine with phosphorothioate linkage
  modified_base 2: mod_base = OTHER; note = 2'-O-methyluridine with phosphorothioate linkage
  modified_base 3: mod_base = OTHER; note = 2'-fluoroadenosine
  modified_base 4: mod_base = OTHER; note = 2'-O-methyladenosine
  modified_base 5: mod_base = OTHER; note = 2'-fluoroadenosine
  modified_base 6: mod_base = OTHER; note = 2'-O-methylcytidine
  modified_base 7: mod_base = OTHER; note = 2'-fluorouridine
  modified_base 8: mod_base = OTHER; note = 2'-O-methyluridine
  modified_base 9: mod_base = OTHER; note = 2'-fluorocytidine
  modified_base 10: mod_base = OTHER; note = 2'-O-methyluridine
  modified_base 11: mod_base = OTHER; note = 2'-fluoroguanosine
  modified_base 12: mod_base = OTHER; note = 2'-O-methylcytidine
  modified_base 13: mod_base = OTHER; note = 2'-fluoroadenosine
  modified_base 14: mod_base = OTHER; note = 2'-O-methylcytidine
  modified_base 15: mod_base = OTHER; note = 2'-fluorouridine
  modified_base 16: mod_base = OTHER; note = 2'-O-methylguanosine
  modified_base 17: mod_base = OTHER; note = 2'-fluoroguanosine
  modified_base 18: mod_base = OTHER; note = 2'-O-methyladenosine
  modified_base 19: mod_base = OTHER; note = 2'-fluoroguanosine with phosphorothioate linkage
  modified_base 20: mod_base = OTHER; note = 2'-O-methylguanosine with phosphorothioate linkage
  modified_base 21: mod_base = OTHER; note = 2'-O-methylguanosine
ataaacttctgcactggaggg

SEQ ID NO: 2516 - RNA, 21 nt, synthetic construct
  source 1..21: mol_type = other RNA
  modified_base 1: mod_base = OTHER; note = 2'-O-methylcytidine with phosphorothioate linkage
  modified_base 2: mod_base = OTHER; note = 2'-O-methyluridine with phosphorothioate linkage
  modified_base 3: mod_base = OTHER; note = 2'-fluoroadenosine
  modified_base 4: mod_base = OTHER; note = 2'-O-methyladenosine
  modified_base 5: mod_base = OTHER; note = 2'-fluorocytidine
  modified_base 6: mod_base = OTHER; note = 2'-O-methylcytidine
  modified_base 7: mod_base = OTHER; note = 2'-fluorocytidine
  modified_base 8: mod_base = OTHER; note = 2'-O-methylguanosine
  modified_base 9: mod_base = OTHER; note = 2'-fluoroguanosine
  modified_base 10: mod_base = OTHER; note = 2'-O-methylcytidine
  modified_base 11: mod_base = OTHER; note = 2'-fluorouridine
  modified_base 12: mod_base = OTHER; note = 2'-O-methylcytidine
  modified_base 13: mod_base = OTHER; note = 2'-fluorouridine
  modified_base 14: mod_base = OTHER; note = 2'-O-methylcytidine
  modified_base 15: mod_base = OTHER; note = 2'-fluorocytidine
  modified_base 16: mod_base = OTHER; note = 2'-O-methylcytidine
  modified_base 17: mod_base = OTHER; note = 2'-fluoroguanosine
  modified_base 18: mod_base = OTHER; note = 2'-O-methyladenosine
  modified_base 19: mod_base = OTHER; note = 2'-fluorouridine with phosphorothioate linkage
  modified_base 20: mod_base = OTHER; note = 2'-O-methylguanosine with phosphorothioate linkage
  modified_base 21: mod_base = OTHER; note = 2'-O-methyluridine
ctaacccggctctcccgatgt

SEQ ID NO: 2517 - RNA, 21 nt, synthetic construct
  source 1..21: mol_type = other RNA
  modified_base 1: mod_base = OTHER; note = 2'-O-methylguanosine with phosphorothioate linkage
  modified_base 2: mod_base = OTHER; note = 2'-O-methyladenosine with phosphorothioate linkage
  modified_base 3: mod_base = OTHER; note = 2'-fluoroadenosine
  modified_base 4: mod_base = OTHER; note = 2'-O-methylcytidine
  modified_base 5: mod_base = OTHER; note = 2'-fluoroadenosine
  modified_base 6: mod_base = OTHER; note = 2'-O-methylcytidine
  modified_base 7: mod_base = OTHER; note = 2'-fluorouridine
  modified_base 8: mod_base = OTHER; note = 2'-O-methylcytidine
  modified_base 9: mod_base = OTHER; note = 2'-fluoroadenosine
  modified_base 10: mod_base = OTHER; note = 2'-O-methyluridine
  modified_base 11: mod_base = OTHER; note = 2'-fluoroguanosine
  modified_base 12: mod_base = OTHER; note = 2'-O-methylguanosine
  modified_base 13: mod_base = OTHER; note = 2'-fluoroadenosine
  modified_base 14: mod_base = OTHER; note = 2'-O-methyluridine
  modified_base 15: mod_base = OTHER; note = 2'-fluorouridine
  modified_base 16: mod_base = OTHER; note = 2'-O-methyladenosine
  modified_base 17: mod_base = OTHER; note = 2'-fluoroadenosine
  modified_base 18: mod_base = OTHER; note = 2'-O-methylguanosine
  modified_base 19: mod_base = OTHER; note = 2'-fluoroadenosine with phosphorothioate linkage
  modified_base 20: mod_base = OTHER; note = 2'-O-methyladenosine with phosphorothioate linkage
  modified_base 21: mod_base = OTHER; note = 2'-O-methyluridine
gaacactcatggattaagaat

SEQ ID NO: 2518 - RNA, 21 nt, synthetic construct
  source 1..21: mol_type = other RNA
  modified_base 1: mod_base = OTHER; note = 2'-O-methyluridine with phosphorothioate linkage
  modified_base 2: mod_base = OTHER; note = 2'-O-methyluridine with phosphorothioate linkage
  modified_base 3: mod_base = OTHER; note = 2'-fluoroadenosine
  modified_base 4: mod_base = OTHER; note = 2'-O-methyluridine
  modified_base 5: mod_base = OTHER; note = 2'-fluoroadenosine
  modified_base 6: mod_base = OTHER; note = 2'-O-methyladenosine
  modified_base 7: mod_base = OTHER; note = 2'-fluoroadenosine
  modified_base 8: mod_base = OTHER; note = 2'-O-methyluridine
  modified_base 9: mod_base = OTHER; note = 2'-fluoroguanosine
  modified_base 10: mod_base = OTHER; note = 2'-O-methylcytidine
  modified_base 11: mod_base = OTHER; note = 2'-fluoroguanosine
  modified_base 12: mod_base = OTHER; note = 2'-O-methyladenosine
  modified_base 13: mod_base = OTHER; note = 2'-fluoroguanosine
  modified_base 14: mod_base = OTHER; note = 2'-O-methylcytidine
  modified_base 15: mod_base = OTHER; note = 2'-fluorouridine
  modified_base 16: mod_base = OTHER; note = 2'-O-methylguanosine
  modified_base 17: mod_base = OTHER; note = 2'-fluorouridine
  modified_base 18: mod_base = OTHER; note = 2'-O-methylguanosine
  modified_base 19: mod_base = OTHER; note = 2'-fluorocytidine with phosphorothioate linkage
  modified_base 20: mod_base = OTHER; note = 2'-O-methyladenosine with phosphorothioate linkage
  modified_base 21: mod_base = OTHER; note = 2'-O-methyladenosine
ttataaatgcgagctgtgcaa

SEQ ID NO: 2519 - RNA, 21 nt, synthetic construct
  source 1..21: mol_type = other RNA
  modified_base 1: mod_base = OTHER; note = 2'-O-methyladenosine with phosphorothioate linkage
  modified_base 2: mod_base = OTHER; note = 2'-O-methyluridine with phosphorothioate linkage
  modified_base 3: mod_base = OTHER; note = 2'-fluorouridine
  modified_base 4: mod_base = OTHER; note = 2'-O-methyluridine
  modified_base 5: mod_base = OTHER; note = 2'-fluorocytidine
  modified_base 6: mod_base = OTHER; note = 2'-O-methyluridine
  modified_base 7: mod_base = OTHER; note = 2'-fluorocytidine
  modified_base 8: mod_base = OTHER; note = 2'-O-methyluridine
  modified_base 9: mod_base = OTHER; note = 2'-fluoroadenosine
  modified_base 10: mod_base = OTHER; note = 2'-O-methylguanosine
  modified_base 11: mod_base = OTHER; note = 2'-fluoroguanosine
  modified_base 12: mod_base = OTHER; note = 2'-O-methyladenosine
  modified_base 13: mod_base = OTHER; note = 2'-fluoroguanosine
  modified_base 14: mod_base = OTHER; note = 2'-O-methyladenosine
  modified_base 15: mod_base = OTHER; note = 2'-fluorocytidine
  modified_base 16: mod_base = OTHER; note = 2'-O-methyluridine
  modified_base 17: mod_base = OTHER; note = 2'-fluorouridine
  modified_base 18: mod_base = OTHER; note = 2'-O-methyladenosine
  modified_base 19: mod_base = OTHER; note = 2'-fluoroguanosine with phosphorothioate linkage
  modified_base 20: mod_base = OTHER; note = 2'-O-methyladenosine with phosphorothioate linkage
  modified_base 21: mod_base = OTHER; note = 2'-O-methylguanosine
atttctctaggagacttagag

SEQ ID NO: 2520 - RNA, 21 nt, synthetic construct
  source 1..21: mol_type = other RNA
  modified_base 1: mod_base = OTHER; note = 2'-O-methyluridine with phosphorothioate linkage
  modified_base 2: mod_base = OTHER; note = 2'-O-methyluridine with phosphorothioate linkage
  modified_base 3: mod_base = OTHER; note = 2'-fluorocytidine
  modified_base 4: mod_base = OTHER; note = 2'-O-methyluridine
  modified_base 5: mod_base = OTHER; note = 2'-fluorouridine
  modified_base 6: mod_base = OTHER; note = 2'-O-methyluridine
  modified_base 7: mod_base = OTHER; note = 2'-fluorocytidine
  modified_base 8: mod_base = OTHER; note = 2'-O-methyluridine
  modified_base 9: mod_base = OTHER; note = 2'-fluoroadenosine
  modified_base 10: mod_base = OTHER; note = 2'-O-methyladenosine
  modified_base 11: mod_base = OTHER; note = 2'-fluorocytidine
  modified_base 12: mod_base = OTHER; note = 2'-O-methylcytidine
  modified_base 13: mod_base = OTHER; note = 2'-fluorocytidine
  modified_base 14: mod_base = OTHER; note = 2'-O-methylguanosine
  modified_base 15: mod_base = OTHER; note = 2'-fluoroguanosine
  modified_base 16: mod_base = OTHER; note = 2'-O-methylcytidine
  modified_base 17: mod_base = OTHER; note = 2'-fluorouridine
  modified_base 18: mod_base = OTHER; note = 2'-O-methylcytidine
  modified_base 19: mod_base = OTHER; note = 2'-fluorouridine with phosphorothioate linkage
  modified_base 20: mod_base = OTHER; note = 2'-O-methylcytidine with phosphorothioate linkage
  modified_base 21: mod_base = OTHER; note = 2'-O-methylcytidine
ttctttctaacccggctctcc

SEQ ID NO: 2521 - RNA, 21 nt, synthetic construct
  source 1..21: mol_type = other RNA
  modified_base 1: mod_base = OTHER; note = 2'-O-methyluridine with phosphorothioate linkage
  modified_base 2: mod_base = OTHER; note = 2'-O-methyluridine with phosphorothioate linkage
  modified_base 3: mod_base = OTHER; note = 2'-fluoroguanosine
  modified_base 4: mod_base = OTHER; note = 2'-O-methyladenosine
  modified_base 5: mod_base = OTHER; note = 2'-fluorocytidine
  modified_base 6: mod_base = OTHER; note = 2'-O-methyladenosine
  modified_base 7: mod_base = OTHER; note = 2'-fluoroguanosine
  modified_base 8: mod_base = OTHER; note = 2'-O-methylguanosine
  modified_base 9: mod_base = OTHER; note = 2'-fluoroguanosine
  modified_base 10: mod_base = OTHER; note = 2'-O-methyluridine
  modified_base 11: mod_base = OTHER; note = 2'-fluoroguanosine
  modified_base 12: mod_base = OTHER; note = 2'-O-methylcytidine
  modified_base 13: mod_base = OTHER; note = 2'-fluorouridine
  modified_base 14: mod_base = OTHER; note = 2'-O-methylguanosine
  modified_base 15: mod_base = OTHER; note = 2'-fluorocytidine
  modified_base 16: mod_base = OTHER; note = 2'-O-methylguanosine
  modified_base 17: mod_base = OTHER; note = 2'-fluoroguanosine
  modified_base 18: mod_base = OTHER; note = 2'-O-methyluridine
  modified_base 19: mod_base = OTHER; note = 2'-fluorouridine with phosphorothioate linkage
  modified_base 20: mod_base = OTHER; note = 2'-O-methylguanosine with phosphorothioate linkage
  modified_base 21: mod_base = OTHER; note = 2'-O-methyladenosine
ttgacagggtgctgcggttga

SEQ ID NO: 2522 - RNA, 21 nt, synthetic construct
  source 1..21: mol_type = other RNA
  modified_base 1: mod_base = OTHER; note = 2'-O-methyladenosine with phosphorothioate linkage
  modified_base 2: mod_base = OTHER; note = 2'-O-methylguanosine with phosphorothioate linkage
  modified_base 3: mod_base = OTHER; note = 2'-fluorocytidine
  modified_base 4: mod_base = OTHER; note = 2'-O-methyladenosine
  modified_base 5: mod_base = OTHER; note = 2'-fluorocytidine
  modified_base 6: mod_base = OTHER; note = 2'-O-methyluridine
  modified_base 7: mod_base = OTHER; note = 2'-fluorocytidine
  modified_base 8: mod_base = OTHER; note = 2'-O-methylcytidine
  modified_base 9: mod_base = OTHER; note = 2'-fluorouridine
  modified_base 10: mod_base = OTHER; note = 2'-O-methylcytidine
  modified_base 11: mod_base = OTHER; note = 2'-fluoroguanosine
  modified_base 12: mod_base = OTHER; note = 2'-O-methylguanosine
  modified_base 13: mod_base = OTHER; note = 2'-fluoroadenosine
  modified_base 14: mod_base = OTHER; note = 2'-O-methylguanosine
  modified_base 15: mod_base = OTHER; note = 2'-fluoroadenosine
  modified_base 16: mod_base = OTHER; note = 2'-O-methyladenosine
  modified_base 17: mod_base = OTHER; note = 2'-fluorocytidine
  modified_base 18: mod_base = OTHER; note = 2'-O-methylguanosine
  modified_base 19: mod_base = OTHER; note = 2'-fluoroguanosine with phosphorothioate linkage
  modified_base 20: mod_base = OTHER; note = 2'-O-methylguanosine with phosphorothioate linkage
  modified_base 21: mod_base = OTHER; note = 2'-O-methyladenosine
agcactcctcggagaacggga

SEQ ID NO: 2523 - RNA, 21 nt, synthetic construct
  source 1..21: mol_type = other RNA
  modified_base 1: mod_base = OTHER; note = 2'-O-methyluridine with phosphorothioate linkage
  modified_base 2: mod_base = OTHER; note = 2'-O-methylcytidine with phosphorothioate linkage
  modified_base 3: mod_base = OTHER; note = 2'-fluorouridine
  modified_base 4: mod_base = OTHER; note = 2'-O-methylcytidine
  modified_base 5: mod_base = OTHER; note = 2'-fluorouridine
  modified_base 6: mod_base = OTHER; note = 2'-O-methyluridine
  modified_base 7: mod_base = OTHER; note = 2'-fluoroguanosine
  modified_base 8: mod_base = OTHER; note = 2'-O-methylcytidine
  modified_base 9: mod_base = OTHER; note = 2'-fluoroadenosine
  modified_base 10: mod_base = OTHER; note = 2'-O-methyladenosine
  modified_base 11: mod_base = OTHER; note = 2'-fluorocytidine
  modified_base 12: mod_base = OTHER; note = 2'-O-methyladenosine
  modified_base 13: mod_base = OTHER; note = 2'-fluorocytidine
  modified_base 14: mod_base = OTHER; note = 2'-O-methylguanosine
  modified_base 15: mod_base = OTHER; note = 2'-fluorocytidine
  modified_base 16: mod_base = OTHER; note = 2'-O-methyladenosine
  modified_base 17: mod_base = OTHER; note = 2'-fluorocytidine
  modified_base 18: mod_base = OTHER; note = 2'-O-methyladenosine
  modified_base 19: mod_base = OTHER; note = 2'-fluoroguanosine with phosphorothioate linkage
  modified_base 20: mod_base = OTHER; note = 2'-O-methyladenosine with phosphorothioate linkage
  modified_base 21: mod_base = OTHER; note = 2'-O-methyladenosine
tctcttgcaacacgcacagaa

SEQ ID NO: 2524 - RNA, 21 nt, synthetic construct
  source 1..21: mol_type = other RNA
  modified_base 1: mod_base = OTHER; note = 2'-O-methylcytidine with phosphorothioate linkage
  modified_base 2: mod_base = OTHER; note = 2'-O-methylcytidine with phosphorothioate linkage
  modified_base 3: mod_base = OTHER; note = 2'-fluorocytidine
  modified_base 4: mod_base = OTHER; note = 2'-O-methyluridine
  modified_base 5: mod_base = OTHER; note = 2'-fluoroguanosine
  modified_base 6: mod_base = OTHER; note = 2'-O-methylguanosine
  modified_base 7: mod_base = OTHER; note = 2'-fluorocytidine
  modified_base 8: mod_base = OTHER; note = 2'-O-methylcytidine
  modified_base 9: mod_base = OTHER; note = 2'-fluoroadenosine
  modified_base 10: mod_base = OTHER; note = 2'-O-methylcytidine
  modified_base 11: mod_base = OTHER; note = 2'-fluorocytidine
  modified_base 12: mod_base = OTHER; note = 2'-O-methylcytidine
  modified_base 13: mod_base = OTHER; note = 2'-fluoroadenosine
  modified_base 14: mod_base = OTHER; note = 2'-O-methyluridine
  modified_base 15: mod_base = OTHER; note = 2'-fluorocytidine
  modified_base 16: mod_base = OTHER; note = 2'-O-methyladenosine
  modified_base 17: mod_base = OTHER; note = 2'-fluorocytidine
  modified_base 18: mod_base = OTHER; note = 2'-O-methylcytidine
  modified_base 19: mod_base = OTHER; note = 2'-fluorocytidine with phosphorothioate linkage
  modified_base 20: mod_base = OTHER; note = 2'-O-methylguanosine with phosphorothioate linkage
  modified_base 21: mod_base = OTHER; note = 2'-O-methyladenosine
ccctggccacccatcacccga

SEQ ID NO: 2525 - RNA, 21 nt, synthetic construct
  source 1..21: mol_type = other RNA
  modified_base 1: mod_base = OTHER; note = 2'-O-methyladenosine with phosphorothioate linkage
  modified_base 2: mod_base = OTHER; note = 2'-O-methylguanosine with phosphorothioate linkage
  modified_base 3: mod_base = OTHER; note = 2'-fluorocytidine
  modified_base 4: mod_base = OTHER; note = 2'-O-methyladenosine
  modified_base 5: mod_base = OTHER; note = 2'-fluoroadenosine
  modified_base 6: mod_base = OTHER; note = 2'-O-methyladenosine
  modified_base 7: mod_base = OTHER; note = 2'-fluorocytidine
  modified_base 8: mod_base = OTHER; note = 2'-O-methylguanosine
  modified_base 9: mod_base = OTHER; note = 2'-fluoroguanosine
  modified_base 10: mod_base = OTHER; note = 2'-O-methylguanosine
  modified_base 11: mod_base = OTHER; note = 2'-fluoroadenosine
  modified_base 12: mod_base = OTHER; note = 2'-O-methyladenosine
  modified_base 13: mod_base = OTHER; note = 2'-fluorouridine
  modified_base 14: mod_base = OTHER; note = 2'-O-methyluridine
  modified_base 15: mod_base = OTHER; note = 2'-fluorocytidine
  modified_base 16: mod_base = OTHER; note = 2'-O-methyluridine
  modified_base 17: mod_base = OTHER; note = 2'-fluorocytidine
  modified_base 18: mod_base = OTHER; note = 2'-O-methylguanosine
  modified_base 19: mod_base = OTHER; note = 2'-fluorocytidine with phosphorothioate linkage
  modified_base 20: mod_base = OTHER; note = 2'-O-methylcytidine with phosphorothioate linkage
  modified_base 21: mod_base = OTHER; note = 2'-O-methylcytidine
agcaaacgggaattctcgccc

SEQ ID NO: 2526 - RNA, 21 nt, synthetic construct
  source 1..21: mol_type = other RNA
  modified_base 1: mod_base = OTHER; note = 2'-O-methylguanosine with phosphorothioate linkage
  modified_base 2: mod_base = OTHER; note = 2'-O-methylcytidine with phosphorothioate linkage
  modified_base 3: mod_base = OTHER; note = 2'-fluorouridine
  modified_base 4: mod_base = OTHER; note = 2'-O-methylguanosine
  modified_base 5: mod_base = OTHER; note = 2'-fluoroguanosine
  modified_base 6: mod_base = OTHER; note = 2'-O-methylcytidine
  modified_base 7: mod_base = OTHER; note = 2'-fluoroadenosine
  modified_base 8: mod_base = OTHER; note = 2'-O-methylguanosine
  modified_base 9: mod_base = OTHER; note = 2'-fluoroguanosine
  modified_base 10: mod_base = OTHER; note = 2'-O-methylguanosine
  modified_base 11: mod_base = OTHER; note = 2'-fluoroadenosine
  modified_base 12: mod_base = OTHER; note = 2'-O-methyladenosine
  modified_base 13: mod_base = OTHER; note = 2'-fluorocytidine
  modified_base 14: mod_base = OTHER; note = 2'-O-methyladenosine
  modified_base 15: mod_base = OTHER; note = 2'-fluorocytidine
  modified_base 16: mod_base = OTHER; note = 2'-O-methylguanosine
  modified_base 17: mod_base = OTHER; note = 2'-fluorouridine
  modified_base 18: mod_base = OTHER; note = 2'-O-methylcytidine
  modified_base 19: mod_base = OTHER; note = 2'-fluorouridine with phosphorothioate linkage
  modified_base 20: mod_base = OTHER; note = 2'-O-methyladenosine with phosphorothioate linkage
  modified_base 21: mod_base = OTHER; note = 2'-O-methylguanosine
gctggcagggaacacgtctag

SEQ ID NO: 2527 - RNA, 21 nt, synthetic construct
  source 1..21: mol_type = other RNA
  modified_base 1: mod_base = OTHER; note = 2'-O-methylguanosine with phosphorothioate linkage
  modified_base 2: mod_base = OTHER; note = 2'-O-methyladenosine with phosphorothioate linkage
  modified_base 3: mod_base = OTHER; note = 2'-fluoroguanosine
  modified_base 4: mod_base = OTHER; note = 2'-O-methyladenosine
  modified_base 5: mod_base = OTHER; note = 2'-fluorocytidine
  modified_base 6: mod_base = OTHER; note = 2'-O-methyluridine
  modified_base 7: mod_base = OTHER; note = 2'-fluorocytidine
  modified_base 8: mod_base = OTHER; note = 2'-O-methylcytidine
  modified_base 9: mod_base = OTHER; note = 2'-fluoroadenosine
  modified_base 10: mod_base = OTHER; note = 2'-O-methylguanosine
  modified_base 11: mod_base = OTHER; note = 2'-fluoroadenosine
  modified_base 12: mod_base = OTHER; note = 2'-O-methylcytidine
  modified_base 13: mod_base = OTHER; note = 2'-fluoroadenosine
  modified_base 14: mod_base = OTHER; note = 2'-O-methyladenosine
  modified_base 15: mod_base = OTHER; note = 2'-fluorouridine
  modified_base 16: mod_base = OTHER; note = 2'-O-methylcytidine
  modified_base 17: mod_base = OTHER; note = 2'-fluoroguanosine
  modified_base 18: mod_base = OTHER; note = 2'-O-methylcytidine
  modified_base 19: mod_base = OTHER; note = 2'-fluorocytidine with phosphorothioate linkage
  modified_base 20: mod_base = OTHER; note = 2'-O-methyluridine with phosphorothioate linkage
  modified_base 21: mod_base = OTHER; note = 2'-O-methyluridine
gagactccagacaatcgcctt

SEQ ID NO: 2528 - RNA, 21 nt, synthetic construct
  source 1..21: mol_type = other RNA
  modified_base 1: mod_base = OTHER; note = 2'-O-methylcytidine with phosphorothioate linkage
  modified_base 2: mod_base = OTHER; note = 2'-O-methylcytidine with phosphorothioate linkage
  modified_base 3: mod_base = OTHER; note = 2'-fluorocytidine
  modified_base 4: mod_base = OTHER; note = 2'-O-methyluridine
  modified_base 5: mod_base = OTHER; note = 2'-fluoroadenosine
  modified_base 6: mod_base = OTHER; note = 2'-O-methyluridine
  modified_base 7: mod_base = OTHER; note = 2'-fluoroguanosine
  modified_base 8: mod_base = OTHER; note = 2'-O-methylcytidine
  modified_base 9: mod_base = OTHER; note = 2'-fluoroadenosine
  modified_base 10: mod_base = OTHER; note = 2'-O-methyladenosine
  modified_base 11: mod_base = OTHER; note = 2'-fluoroadenosine
  modified_base 12: mod_base = OTHER; note = 2'-O-methylguanosine
  modified_base 13: mod_base = OTHER; note = 2'-fluoroguanosine
  modified_base 14: mod_base = OTHER; note = 2'-O-methyluridine
  modified_base 15: mod_base = OTHER; note = 2'-fluorouridine
  modified_base 16: mod_base = OTHER; note = 2'-O-methyladenosine
  modified_base 17: mod_base = OTHER; note = 2'-fluorocytidine
  modified_base 18: mod_base = OTHER; note = 2'-O-methyluridine
  modified_base 19: mod_base = OTHER; note = 2'-fluoroguanosine with phosphorothioate linkage
  modified_base 20: mod_base = OTHER; note = 2'-O-methylcytidine with phosphorothioate linkage
  modified_base 21: mod_base = OTHER; note = 2'-O-methyladenosine
ccctatgcaaaggttactgca

SEQ ID NO: 2529 - RNA, 21 nt, synthetic construct
  source 1..21: mol_type = other RNA
  modified_base 1: mod_base = OTHER; note = 2'-O-methyladenosine with phosphorothioate linkage
  modified_base 2: mod_base = OTHER; note = 2'-O-methyladenosine with phosphorothioate linkage
  modified_base 3: mod_base = OTHER; note = 2'-fluoroguanosine
  modified_base 4: mod_base = OTHER; note = 2'-O-methyladenosine
  modified_base 5: mod_base = OTHER; note = 2'-fluoroadenosine
  modified_base 6: mod_base = OTHER; note = 2'-O-methyluridine
  modified_base 7: mod_base = OTHER; note = 2'-fluoroadenosine
  modified_base 8: mod_base = OTHER; note = 2'-O-methylcytidine
  modified_base 9: mod_base = OTHER; note = 2'-fluorocytidine
  modified_base 10: mod_base = OTHER; note = 2'-O-methyladenosine
  modified_base 11: mod_base = OTHER; note = 2'-fluoroguanosine
  modified_base 12: mod_base = OTHER; note = 2'-O-methylguanosine
  modified_base 13: mod_base = OTHER; note = 2'-fluoroadenosine
  modified_base 14: mod_base = OTHER; note = 2'-O-methyluridine
  modified_base 15: mod_base = OTHER; note = 2'-fluorocytidine
  modified_base 16: mod_base = OTHER; note = 2'-O-methyladenosine
  modified_base 17: mod_base = OTHER; note = 2'-fluoroguanosine
  modified_base 18: mod_base = OTHER; note = 2'-O-methyluridine
  modified_base 19: mod_base = OTHER; note = 2'-fluoroadenosine with phosphorothioate linkage
  modified_base 20: mod_base = OTHER; note = 2'-O-methyluridine with phosphorothioate linkage
  modified_base 21: mod_base = OTHER; note = 2'-O-methylcytidine
aagaataccaggatcagtatc

SEQ ID NO: 2530 - RNA, 21 nt, synthetic construct
  source 1..21: mol_type = other RNA
  modified_base 1: mod_base = OTHER; note = 2'-O-methyluridine with phosphorothioate linkage
  modified_base 2: mod_base = OTHER; note = 2'-O-methylcytidine with phosphorothioate linkage
  modified_base 3: mod_base = OTHER; note = 2'-fluoroadenosine
  modified_base 4: mod_base = OTHER; note = 2'-O-methyluridine
  modified_base 5: mod_base = OTHER; note = 2'-fluorocytidine
  modified_base 6: mod_base = OTHER; note = 2'-O-methyluridine
  modified_base 7: mod_base = OTHER; note = 2'-fluorouridine
  modified_base 8: mod_base = OTHER; note = 2'-O-methylcytidine
  modified_base 9: mod_base = OTHER; note = 2'-fluorocytidine
  modified_base 10: mod_base = OTHER; note = 2'-O-methylcytidine
  modified_base 11: mod_base = OTHER; note = 2'-fluorouridine
  modified_base 12: mod_base = OTHER; note = 2'-O-methylguanosine
  modified_base 13: mod_base = OTHER; note = 2'-fluorocytidine
  modified_base 14: mod_base = OTHER; note = 2'-O-methylguanosine
  modified_base 15: mod_base = OTHER; note = 2'-fluorocytidine
  modified_base 16: mod_base = OTHER; note = 2'-O-methylcytidine
  modified_base 17: mod_base = OTHER; note = 2'-fluoroadenosine
  modified_base 18: mod_base = OTHER; note = 2'-O-methyluridine
  modified_base 19: mod_base = OTHER; note = 2'-fluorocytidine with phosphorothioate linkage
  modified_base 20: mod_base = OTHER; note = 2'-O-methyluridine with phosphorothioate linkage
  modified_base 21: mod_base = OTHER; note = 2'-O-methyluridine
tcatcttccctgcgccatctt

SEQ ID NO: 2531 - RNA, 21 nt, synthetic construct
  source 1..21: mol_type = other RNA
  modified_base 1: mod_base = OTHER; note = 2'-O-methylcytidine with phosphorothioate linkage
  modified_base 2: mod_base = OTHER; note = 2'-O-methyluridine with phosphorothioate linkage
  modified_base 3: mod_base = OTHER; note = 2'-fluorouridine
  modified_base 4: mod_base = OTHER; note = 2'-O-methylcytidine
  modified_base 5: mod_base = OTHER; note = 2'-fluorouridine
  modified_base 6: mod_base = OTHER; note = 2'-O-methyluridine
  modified_base 7: mod_base = OTHER; note = 2'-fluorouridine
  modified_base 8: mod_base = OTHER; note = 2'-O-methylcytidine
  modified_base 9: mod_base = OTHER; note = 2'-fluorouridine
  modified_base 10: mod_base = OTHER; note = 2'-O-methyladenosine
  modified_base 11: mod_base = OTHER; note = 2'-fluoroadenosine
  modified_base 12: mod_base = OTHER; note = 2'-O-methylcytidine
  modified_base 13: mod_base = OTHER; note = 2'-fluorocytidine
  modified_base 14: mod_base = OTHER; note = 2'-O-methylcytidine
  modified_base 15: mod_base = OTHER; note = 2'-fluoroguanosine
  modified_base 16: mod_base = OTHER; note = 2'-O-methylguanosine
  modified_base 17: mod_base = OTHER; note = 2'-fluorocytidine
  modified_base 18: mod_base = OTHER; note = 2'-O-methyluridine
  modified_base 19: mod_base = OTHER; note = 2'-fluorocytidine with phosphorothioate linkage
  modified_base 20: mod_base = OTHER; note = 2'-O-methyluridine with phosphorothioate linkage
  modified_base 21: mod_base = OTHER; note = 2'-O-methylcytidine
cttctttctaacccggctctc

SEQ ID NO: 2532 - RNA, 21 nt, synthetic construct
  source 1..21: mol_type = other RNA
  modified_base 1: mod_base = OTHER; note = 2'-O-methylcytidine with phosphorothioate linkage
  modified_base 2: mod_base = OTHER; note = 2'-O-methylcytidine with phosphorothioate linkage
  modified_base 3: mod_base = OTHER; note = 2'-fluoroadenosine
  modified_base 4: mod_base = OTHER; note = 2'-O-methylcytidine
  modified_base 5: mod_base = OTHER; note = 2'-fluorocytidine
  modified_base 6: mod_base = OTHER; note = 2'-O-methyladenosine
  modified_base 7: mod_base = OTHER; note = 2'-fluorocytidine
  modified_base 8: mod_base = OTHER; note = 2'-O-methylcytidine
  modified_base 9: mod_base = OTHER; note = 2'-fluoroguanosine
  modified_base 10: mod_base = OTHER; note = 2'-O-methyladenosine
  modified_base 11: mod_base = OTHER; note = 2'-fluoroguanosine
  modified_base 12: mod_base = OTHER; note = 2'-O-methyladenosine
  modified_base 13: mod_base = OTHER; note = 2'-fluorocytidine
  modified_base 14: mod_base = OTHER; note = 2'-O-methyladenosine
  modified_base 15: mod_base = OTHER; note = 2'-fluorouridine
  modified_base 16: mod_base = OTHER; note = 2'-O-methylcytidine
  modified_base 17: mod_base = OTHER; note = 2'-fluoroadenosine
  modified_base 18: mod_base = OTHER; note = 2'-O-methylcytidine
  modified_base 19: mod_base = OTHER; note = 2'-fluorouridine with phosphorothioate linkage
  modified_base 20: mod_base = OTHER; note = 2'-O-methyluridine with phosphorothioate linkage
  modified_base 21: mod_base = OTHER; note = 2'-O-methylguanosine
ccaccaccgagacatcacttg

SEQ ID NO: 2533 - RNA, 21 nt, synthetic construct
  source 1..21: mol_type = other RNA
  modified_base 1: mod_base = OTHER; note = 2'-O-methyladenosine with phosphorothioate linkage
  modified_base 2: mod_base = OTHER; note = 2'-O-methyladenosine with phosphorothioate linkage
  modified_base 3: mod_base = OTHER; note = 2'-fluorocytidine
  modified_base 4: mod_base = OTHER; note = 2'-O-methylcytidine
  modified_base 5: mod_base = OTHER; note = 2'-fluoroadenosine
  modified_base 6: mod_base = OTHER; note = 2'-O-methyluridine
  modified_base 7: mod_base = OTHER; note = 2'-fluorouridine
  modified_base 8: mod_base = OTHER; note = 2'-O-methylcytidine
  modified_base 9: mod_base = OTHER; note = 2'-fluorocytidine
  modified_base 10: mod_base = OTHER; note = 2'-O-methyladenosine
  modified_base 11: mod_base = OTHER; note = 2'-fluoroguanosine
  modified_base 12: mod_base = OTHER; note = 2'-O-methylcytidine
  modified_base 13: mod_base = OTHER; note = 2'-fluorocytidine
  modified_base 14: mod_base = OTHER; note = 2'-O-methyladenosine
  modified_base 15: mod_base = OTHER; note = 2'-fluoroguanosine
  modified_base 16: mod_base = OTHER; note = 2'-O-methylguanosine
  modified_base 17: mod_base = OTHER; note = 2'-fluorouridine
  modified_base 18: mod_base = OTHER; note = 2'-O-methyladenosine
  modified_base 19: mod_base = OTHER; note = 2'-fluoroguanosine with phosphorothioate linkage
  modified_base 20: mod_base = OTHER; note = 2'-O-methylcytidine with phosphorothioate linkage
  modified_base 21: mod_base = OTHER; note = 2'-O-methyladenosine
aaccattccagccaggtagca

SEQ ID NO: 2534 - RNA, 21 nt, synthetic construct
  source 1..21: mol_type = other RNA
  modified_base 1: mod_base = OTHER; note = 2'-O-methyluridine with phosphorothioate linkage
  modified_base 2: mod_base = OTHER; note = 2'-O-methylcytidine with phosphorothioate linkage
  modified_base 3: mod_base = OTHER; note = 2'-fluorouridine
  modified_base 4: mod_base = OTHER; note = 2'-O-methyluridine
  modified_base 5: mod_base = OTHER; note = 2'-fluorocytidine
  modified_base 6: mod_base = OTHER; note = 2'-O-methylcytidine
  modified_base 7: mod_base = OTHER; note = 2'-fluorocytidine
  modified_base 8: mod_base = OTHER; note = 2'-O-methyluridine
  modified_base 9: mod_base = OTHER; note = 2'-fluoroguanosine
  modified_base 10: mod_base = OTHER; note = 2'-O-methylcytidine
  modified_base 11: mod_base = OTHER; note = 2'-fluoroguanosine
  modified_base 12: mod_base = OTHER; note = 2'-O-methylcytidine
  modified_base 13: mod_base = OTHER; note = 2'-fluorocytidine
  modified_base 14: mod_base = OTHER; note = 2'-O-methyladenosine
  modified_base 15: mod_base = OTHER; note = 2'-fluorouridine
  modified_base 16: mod_base = OTHER; note = 2'-O-methylcytidine
  modified_base 17: mod_base = OTHER; note = 2'-fluorouridine
  modified_base 18: mod_base = OTHER; note = 2'-O-methyluridine
  modified_base 19: mod_base = OTHER; note = 2'-fluorouridine with phosphorothioate linkage
  modified_base 20: mod_base = OTHER; note = 2'-O-methylguanosine with phosphorothioate linkage
  modified_base 21: mod_base = OTHER; note = 2'-O-methyluridine
tcttccctgcgccatctttgt

SEQ ID NO: 2535 - RNA, 21 nt, synthetic construct
  source 1..21: mol_type = other RNA
  modified_base 1: mod_base = OTHER; note = 2'-O-methylcytidine with phosphorothioate linkage
  modified_base 2: mod_base = OTHER; note = 2'-O-methyluridine with phosphorothioate linkage
  modified_base 3: mod_base = OTHER; note = 2'-fluoroguanosine
  modified_base 4: mod_base = OTHER; note = 2'-O-methylguanosine
  modified_base 5: mod_base = OTHER; note = 2'-fluorocytidine
  modified_base 6: mod_base = OTHER; note = 2'-O-methylcytidine
  modified_base 7: mod_base = OTHER; note = 2'-fluoroadenosine
  modified_base 8: mod_base = OTHER; note = 2'-O-methylcytidine
  modified_base 9: mod_base = OTHER; note = 2'-fluorocytidine
  modified_base 10: mod_base = OTHER; note = 2'-O-methylcytidine
  modified_base 11: mod_base = OTHER; note = 2'-fluoroadenosine
  modified_base 12: mod_base = OTHER; note = 2'-O-methyluridine
  modified_base 13: mod_base = OTHER; note = 2'-fluorocytidine
  modified_base 14: mod_base = OTHER; note = 2'-O-methyladenosine
  modified_base 15: mod_base = OTHER; note = 2'-fluorocytidine
  modified_base 16: mod_base = OTHER; note = 2'-O-methylcytidine
  modified_base 17: mod_base = OTHER; note = 2'-fluorocytidine
  modified_base 18: mod_base = OTHER; note = 2'-O-methylguanosine
  modified_base 19: mod_base = OTHER; note = 2'-fluoroadenosine with phosphorothioate linkage
  modified_base 20: mod_base = OTHER; note = 2'-O-methylguanosine with phosphorothioate linkage
  modified_base 21: mod_base = OTHER; note = 2'-O-methyluridine
ctggccacccatcacccgagt

SEQ ID NO: 2536 - RNA, 21 nt, synthetic construct
  source 1..21: mol_type = other RNA
  modified_base 1: mod_base = OTHER; note = 2'-O-methylguanosine with phosphorothioate linkage
  modified_base 2: mod_base = OTHER; note = 2'-O-methyladenosine with phosphorothioate linkage
  modified_base 3: mod_base = OTHER; note = 2'-fluoroguanosine
  modified_base 4: mod_base = OTHER; note = 2'-O-methylguanosine
  modified_base 5: mod_base = OTHER; note = 2'-fluoroguanosine
  modified_base 6: mod_base = OTHER; note = 2'-O-methylcytidine
  modified_base 7: mod_base = OTHER; note = 2'-fluoroadenosine
  modified_base 8: mod_base = OTHER; note = 2'-O-methylguanosine
  modified_base 9: mod_base = OTHER; note = 2'-fluoroadenosine
  modified_base 10: mod_base = OTHER; note = 2'-O-methylcytidine
  modified_base 11: mod_base = OTHER; note = 2'-fluoroguanosine
  modified_base 12: mod_base = OTHER; note = 2'-O-methylcytidine
  modified_base 13: mod_base = OTHER; note = 2'-fluoroadenosine
  modified_base 14: mod_base = OTHER; note = 2'-O-methylguanosine
  modified_base 15: mod_base = OTHER; note = 2'-fluorocytidine
  modified_base 16: mod_base = OTHER; note = 2'-O-methylguanosine
  modified_base 17: mod_base = OTHER; note = 2'-fluoroadenosine
  modified_base 18: mod_base = OTHER; note = 2'-O-methylcytidine
  modified_base 19: mod_base = OTHER; note = 2'-fluoroadenosine with phosphorothioate linkage
  modified_base 20: mod_base = OTHER; note = 2'-O-methylcytidine with phosphorothioate linkage
  modified_base 21: mod_base = OTHER; note = 2'-O-methyluridine
gagggcagacgcagcgacact

SEQ ID NO: 2537 - RNA, 21 nt, synthetic construct
  source 1..21: mol_type = other RNA
  modified_base 1: mod_base = OTHER; note = 2'-O-methylcytidine with phosphorothioate linkage
  modified_base 2: mod_base = OTHER; note = 2'-O-methyladenosine with phosphorothioate linkage
  modified_base 3: mod_base = OTHER; note = 2'-fluorocytidine
  modified_base 4: mod_base = OTHER; note = 2'-O-methyladenosine
  modified_base 5: mod_base = OTHER; note = 2'-fluoroadenosine
  modified_base 6: mod_base = OTHER; note = 2'-O-methyluridine
  modified_base 7: mod_base = OTHER; note = 2'-fluorouridine
  modified_base 8: mod_base = OTHER; note = 2'-O-methylcytidine
  modified_base 9: mod_base = OTHER; note = 2'-fluoroadenosine
  modified_base 10: mod_base = OTHER; note = 2'-O-methyluridine
  modified_base 11: mod_base = OTHER; note = 2'-fluorocytidine
  modified_base 12: mod_base = OTHER; note = 2'-O-methyluridine
  modified_base 13: mod_base = OTHER; note = 2'-fluorouridine
  modified_base 14: mod_base = OTHER; note = 2'-O-methylcytidine
  modified_base 15: mod_base = OTHER; note = 2'-fluorocytidine
  modified_base 16: mod_base = OTHER; note = 2'-O-methylcytidine
  modified_base 17: mod_base = OTHER; note = 2'-fluorouridine
  modified_base 18: mod_base = OTHER; note = 2'-O-methylguanosine
  modified_base 19: mod_base = OTHER; note = 2'-fluorocytidine with phosphorothioate linkage
  modified_base 20: mod_base = OTHER; note = 2'-O-methylguanosine with phosphorothioate linkage
  modified_base 21: mod_base = OTHER; note = 2'-O-methylcytidine
cacaattcatcttccctgcgc

SEQ ID NO: 2538 - RNA, 21 nt, synthetic construct
  source 1..21: mol_type = other RNA
  modified_base 1: mod_base = OTHER; note = 2'-O-methylcytidine with phosphorothioate linkage
  modified_base 2: mod_base = OTHER; note = 2'-O-methylcytidine with phosphorothioate linkage
  modified_base 3: mod_base = OTHER; note = 2'-fluoroadenosine
  modified_base 4: mod_base = OTHER; note = 2'-O-methyluridine
  modified_base 5: mod_base = OTHER; note = 2'-fluorocytidine
  modified_base 6: mod_base = OTHER; note = 2'-O-methyladenosine
  modified_base 7: mod_base = OTHER; note = 2'-fluorocytidine
  modified_base 8: mod_base = OTHER; note = 2'-O-methylcytidine
  modified_base 9: mod_base = OTHER; note = 2'-fluorocytidine
  modified_base 10: mod_base = OTHER; note = 2'-O-methylguanosine
  modified_base 11: mod_base = OTHER; note = 2'-fluoroadenosine
  modified_base 12: mod_base = OTHER; note = 2'-O-methylguanosine
  modified_base 13: mod_base = OTHER; note = 2'-fluorouridine
  modified_base 14: mod_base = OTHER; note = 2'-O-methylguanosine
  modified_base 15: mod_base = OTHER; note = 2'-fluorocytidine
  modified_base 16: mod_base = OTHER; note = 2'-O-methylcytidine
  modified_base 17: mod_base = OTHER; note = 2'-fluorouridine
  modified_base 18: mod_base = OTHER; note = 2'-O-methyluridine
  modified_base 19: mod_base = OTHER; note = 2'-fluorouridine with phosphorothioate linkage
  modified_base 20: mod_base = OTHER; note = 2'-O-methylguanosine with phosphorothioate linkage
  modified_base 21: mod_base = OTHER; note = 2'-O-methyladenosine
ccatcacccgagtgcctttga

SEQ ID NO: 2539 - RNA, 21 nt, synthetic construct
  source 1..21: mol_type = other RNA
  modified_base 1: mod_base = OTHER; note = 2'-O-methyladenosine with phosphorothioate linkage
  modified_base 2: mod_base = OTHER; note = 2'-O-methylcytidine with phosphorothioate linkage
  modified_base 3: mod_base = OTHER; note = 2'-fluoroadenosine
  modified_base 4: mod_base = OTHER; note = 2'-O-methylcytidine
  modified_base 5: mod_base = OTHER; note = 2'-fluoroguanosine
  modified_base 6: mod_base = OTHER; note = 2'-O-methylcytidine
  modified_base 7: mod_base = OTHER; note = 2'-fluoroadenosine
  modified_base 8: mod_base = OTHER; note = 2'-O-methylcytidine
  modified_base 9: mod_base = OTHER; note = 2'-fluoroadenosine
  modified_base 10: mod_base = OTHER; note = 2'-O-methylguanosine
  modified_base 11: mod_base = OTHER; note = 2'-fluoroadenosine
  modified_base 12: mod_base = OTHER; note = 2'-O-methyladenosine
  modified_base 13: mod_base = OTHER; note = 2'-fluorocytidine
  modified_base 14: mod_base = OTHER; note = 2'-O-methyladenosine
  modified_base 15: mod_base = OTHER; note = 2'-fluorocytidine
  modified_base 16: mod_base = OTHER; note = 2'-O-methyluridine
  modified_base 17: mod_base = OTHER; note = 2'-fluorocytidine
  modified_base 18: mod_base = OTHER; note = 2'-O-methyladenosine
  modified_base 19: mod_base = OTHER; note = 2'-fluorouridine with phosphorothioate linkage
  modified_base 20: mod_base = OTHER; note = 2'-O-methylguanosine with phosphorothioate linkage
  modified_base 21: mod_base = OTHER; note = 2'-O-methylguanosine
acacgcacagaacactcatgg

SEQ ID NO: 2540 - RNA, 21 nt, synthetic construct
  source 1..21: mol_type = other RNA
  modified_base 1: mod_base = OTHER; note = 2'-O-methylguanosine with phosphorothioate linkage
  modified_base 2: mod_base = OTHER; note = 2'-O-methyladenosine with phosphorothioate linkage
  modified_base 3: mod_base = OTHER; note = 2'-fluoroadenosine
  modified_base 4: mod_base = OTHER; note = 2'-O-methylguanosine
  modified_base 5: mod_base = OTHER; note = 2'-fluorocytidine
  modified_base 6: mod_base = OTHER; note = 2'-O-methylcytidine
  modified_base 7: mod_base = OTHER; note = 2'-fluoroadenosine
  modified_base 8: mod_base = OTHER; note = 2'-O-methylcytidine
  modified_base 9: mod_base = OTHER; note = 2'-fluoroadenosine
  modified_base 10: mod_base = OTHER; note = 2'-O-methylcytidine
  modified_base 11: mod_base = OTHER; note = 2'-fluoroguanosine
  modified_base 12: mod_base = OTHER; note = 2'-O-methylguanosine
  modified_base 13: mod_base = OTHER; note = 2'-fluoroguanosine
  modified_base 14: mod_base = OTHER; note = 2'-O-methylcytidine
  modified_base 15: mod_base = OTHER; note = 2'-fluoroguanosine
  modified_base 16: mod_base = OTHER; note = 2'-O-methyladenosine
  modified_base 17: mod_base = OTHER; note = 2'-fluoroadenosine
  modified_base 18: mod_base = OTHER; note = 2'-O-methyladenosine
  modified_base 19: mod_base = OTHER; note = 2'-fluoroguanosine with phosphorothioate linkage
  modified_base 20: mod_base = OTHER; note = 2'-O-methylguanosine with phosphorothioate linkage
  modified_base 21: mod_base = OTHER; note = 2'-O-methylcytidine
gaagccacacgggcgaaaggc

SEQ ID NO: 2541 - RNA, 21 nt, synthetic construct
  source 1..21: mol_type = other RNA
  modified_base 1: mod_base = OTHER; note = 2'-O-methylcytidine with phosphorothioate linkage
  modified_base 2: mod_base = OTHER; note = 2'-O-methyladenosine with phosphorothioate linkage
  modified_base 3: mod_base = OTHER; note = 2'-fluorouridine
  modified_base 4: mod_base = OTHER; note = 2'-O-methylcytidine
  modified_base 5: mod_base = OTHER; note = 2'-fluoroadenosine
  modified_base 6: mod_base = OTHER; note = 2'-O-methylcytidine
  modified_base 7: mod_base = OTHER; note = 2'-fluorocytidine
  modified_base 8: mod_base = OTHER; note = 2'-O-methylcytidine
  modified_base 9: mod_base = OTHER; note = 2'-fluoroguanosine
  modified_base 10: mod_base = OTHER; note = 2'-O-methyladenosine
  modified_base 11: mod_base = OTHER; note = 2'-fluoroguanosine
  modified_base 12: mod_base = OTHER; note = 2'-O-methyluridine
  modified_base 13: mod_base = OTHER; note = 2'-fluoroguanosine
  modified_base 14: mod_base = OTHER; note = 2'-O-methylcytidine
  modified_base 15: mod_base = OTHER; note = 2'-fluorocytidine
  modified_base 16: mod_base = OTHER; note = 2'-O-methyluridine
  modified_base 17: mod_base = OTHER; note = 2'-fluorouridine
  modified_base 18: mod_base = OTHER; note = 2'-O-methyluridine
  modified_base 19: mod_base = OTHER; note = 2'-fluoroguanosine with phosphorothioate linkage
  modified_base 20: mod_base = OTHER; note = 2'-O-methyladenosine with phosphorothioate linkage
  modified_base 21: mod_base = OTHER; note = 2'-O-methylcytidine
catcacccgagtgcctttgac

SEQ ID NO: 2542 - RNA, 21 nt, synthetic construct
  source 1..21: mol_type = other RNA
  modified_base 1: mod_base = OTHER; note = 2'-O-methyluridine with phosphorothioate linkage
  modified_base 2: mod_base = OTHER; note = 2'-O-methylcytidine with phosphorothioate linkage
  modified_base 3: mod_base = OTHER; note = 2'-fluoroadenosine
  modified_base 4: mod_base = OTHER; note = 2'-O-methyladenosine
  modified_base 5: mod_base = OTHER; note = 2'-fluoroguanosine
  modified_base 6: mod_base = OTHER; note = 2'-O-methyluridine
  modified_base 7: mod_base = OTHER; note = 2'-fluorouridine
  modified_base 8: mod_base = OTHER; note = 2'-O-methylcytidine
  modified_base 9: mod_base = OTHER; note = 2'-fluoroguanosine
  modified_base 10: mod_base = OTHER; note = 2'-O-methylcytidine
  modified_base 11: mod_base = OTHER; note = 2'-fluoroadenosine
  modified_base 12: mod_base = OTHER; note = 2'-O-methylguanosine
  modified_base 13: mod_base = OTHER; note = 2'-fluoroguanosine
  modified_base 14: mod_base = OTHER; note = 2'-O-methylguanosine
  modified_base 15: mod_base = OTHER; note = 2'-fluoroadenosine
  modified_base 16: mod_base = OTHER; note = 2'-O-methylcytidine
  modified_base 17: mod_base = OTHER; note = 2'-fluoroguanosine
  modified_base 18: mod_base = OTHER; note = 2'-O-methyluridine
  modified_base 19: mod_base = OTHER; note = 2'-fluorocytidine with phosphorothioate linkage
  modified_base 20: mod_base = OTHER; note = 2'-O-methyladenosine with phosphorothioate linkage
  modified_base 21: mod_base = OTHER; note = 2'-O-methylcytidine
tcaagttcgcagggacgtcac

SEQ ID NO: 2543 - RNA, 21 nt, synthetic construct
  source 1..21: mol_type = other RNA
  modified_base 1: mod_base = OTHER; note = 2'-O-methyluridine with phosphorothioate linkage
  modified_base 2: mod_base = OTHER; note = 2'-O-methylcytidine with phosphorothioate linkage
  modified_base 3: mod_base = OTHER; note = 2'-fluorouridine
  modified_base 4: mod_base = OTHER; note = 2'-O-methyladenosine
  modified_base 5: mod_base = OTHER; note = 2'-fluoroadenosine
  modified_base 6: mod_base = OTHER; note = 2'-O-methylcytidine
  modified_base 7: mod_base = OTHER; note = 2'-fluorocytidine
  modified_base 8: mod_base = OTHER; note = 2'-O-methylcytidine
  modified_base 9: mod_base = OTHER; note = 2'-fluoroguanosine
  modified_base 10: mod_base = OTHER; note = 2'-O-methylguanosine
  modified_base 11: mod_base = OTHER; note = 2'-fluorocytidine
  modified_base 12: mod_base = OTHER; note = 2'-O-methyluridine
  modified_base 13: mod_base = OTHER; note = 2'-fluorocytidine
  modified_base 14: mod_base = OTHER; note = 2'-O-methyluridine
  modified_base 15: mod_base = OTHER; note = 2'-fluorocytidine
  modified_base 16: mod_base = OTHER; note = 2'-O-methylcytidine
  modified_base 17: mod_base = OTHER; note = 2'-fluorocytidine
  modified_base 18: mod_base = OTHER; note = 2'-O-methylguanosine
  modified_base 19: mod_base = OTHER; note = 2'-fluoroadenosine with phosphorothioate linkage
  modified_base 20: mod_base = OTHER; note = 2'-O-methyluridine with phosphorothioate linkage
  modified_base 21: mod_base = OTHER; note = 2'-O-methylguanosine
tctaacccggctctcccgatg

SEQ ID NO: 2544 - RNA, 21 nt, synthetic construct
  source 1..21: mol_type = other RNA
  modified_base 1: mod_base = OTHER; note = 2'-O-methylguanosine with phosphorothioate linkage
  modified_base 2: mod_base = OTHER; note = 2'-O-methylguanosine with phosphorothioate linkage
  modified_base 3: mod_base = OTHER; note = 2'-fluoroguanosine
  modified_base 4: mod_base = OTHER; note = 2'-O-methyladenosine
  modified_base 5: mod_base = OTHER; note = 2'-fluoroadenosine
  modified_base 6: mod_base = OTHER; note = 2'-O-methylguanosine
  modified_base 7: mod_base = OTHER; note = 2'-fluorouridine
  modified_base 8: mod_base = OTHER; note = 2'-O-methylguanosine
  modified_base 9: mod_base = OTHER; note = 2'-fluoroguanosine
  modified_base 10: mod_base = OTHER; note = 2'-O-methyladenosine
  modified_base 11: mod_base = OTHER; note = 2'-fluoroguanosine
  modified_base 12: mod_base = OTHER; note = 2'-O-methylguanosine
  modified_base 13: mod_base = OTHER; note = 2'-fluoroguanosine
  modified_base 14: mod_base = OTHER; note = 2'-O-methyladenosine
  modified_base 15: mod_base = OTHER; note = 2'-fluoroguanosine
  modified_base 16: mod_base = OTHER; note = 2'-O-methylcytidine
  modified_base 17: mod_base = OTHER; note = 2'-fluoroadenosine
  modified_base 18: mod_base = OTHER; note = 2'-O-methylcytidine
  modified_base 19: mod_base = OTHER; note = 2'-fluoroguanosine with phosphorothioate linkage
  modified_base 20: mod_base = OTHER; note = 2'-O-methylcytidine with phosphorothioate linkage
  modified_base 21: mod_base = OTHER; note = 2'-O-methylcytidine
gggaagtggagggagcacgcc

SEQ ID NO: 2545 - RNA, 21 nt, synthetic construct
  source 1..21: mol_type = other RNA
  modified_base 1: mod_base = OTHER; note = 2'-O-methylcytidine with phosphorothioate linkage
  modified_base 2: mod_base = OTHER; note = 2'-O-methylcytidine with phosphorothioate linkage
  modified_base 3: mod_base = OTHER; note = 2'-fluorouridine
  modified_base 4: mod_base = OTHER; note = 2'-O-methylguanosine
  modified_base 5: mod_base = OTHER; note = 2'-fluoroguanosine
  modified_base 6: mod_base = OTHER; note = 2'-O-methylcytidine
  modified_base 7: mod_base = OTHER; note = 2'-fluoroadenosine
  modified_base 8: mod_base = OTHER; note = 2'-O-methylguanosine
  modified_base 9: mod_base = OTHER; note = 2'-fluoroadenosine
  modified_base 10: mod_base = OTHER; note = 2'-O-methyladenosine
  modified_base 11: mod_base = OTHER; note = 2'-fluoroguanosine
  modified_base 12: mod_base = OTHER; note = 2'-O-methylguanosine
  modified_base 13: mod_base = OTHER; note = 2'-fluoroguanosine
  modified_base 14: mod_base = OTHER; note = 2'-O-methylcytidine
  modified_base 15: mod_base = OTHER; note = 2'-fluoroguanosine
  modified_base 16: mod_base = OTHER; note = 2'-O-methylcytidine
  modified_base 17: mod_base = OTHER; note = 2'-fluorouridine
  modified_base 18: mod_base = OTHER; note = 2'-O-methyluridine
  modified_base 19: mod_base = OTHER; note = 2'-fluorouridine with phosphorothioate linkage
  modified_base 20: mod_base = OTHER; note = 2'-O-methylcytidine with phosphorothioate linkage
  modified_base 21: mod_base = OTHER; note = 2'-O-methylcytidine
cctggcagaagggcgctttcc

SEQ ID NO: 2546 - RNA, 21 nt, synthetic construct
  source 1..21: mol_type = other RNA
  modified_base 1: mod_base = OTHER; note = 2'-O-methylcytidine with phosphorothioate linkage
  modified_base 2: mod_base = OTHER; note = 2'-O-methyluridine with phosphorothioate linkage
  modified_base 3: mod_base = OTHER; note = 2'-fluorocytidine
  modified_base 4: mod_base = OTHER; note = 2'-O-methylguanosine
  modified_base 5: mod_base = OTHER; note = 2'-fluorocytidine
  modified_base 6: mod_base = OTHER; note = 2'-O-methylcytidine
  modified_base 7: mod_base = OTHER; note = 2'-fluoroguanosine
  modified_base 8: mod_base = OTHER; note = 2'-O-methylcytidine
  modified_base 9: mod_base = OTHER; note = 2'-fluoroadenosine
  modified_base 10: mod_base = OTHER; note = 2'-O-methyladenosine
  modified_base 11: mod_base = OTHER; note = 2'-fluoroguanosine
  modified_base 12: mod_base = OTHER; note = 2'-O-methylcytidine
  modified_base 13: mod_base = OTHER; note = 2'-fluoroadenosine
  modified_base 14: mod_base = OTHER; note = 2'-O-methyladenosine
  modified_base 15: mod_base = OTHER; note = 2'-fluoroguanosine
  modified_base 16: mod_base = OTHER; note = 2'-O-methylguanosine
  modified_base 17: mod_base = OTHER; note = 2'-fluorocytidine
  modified_base 18: mod_base = OTHER; note = 2'-O-methyladenosine
  modified_base 19: mod_base = OTHER; note = 2'-fluoroadenosine with phosphorothioate linkage
  modified_base 20: mod_base = OTHER; note = 2'-O-methyladenosine with phosphorothioate linkage
  modified_base 21: mod_base = OTHER; note = 2'-O-methylcytidine
ctcgccgcaagcaaggcaaac

SEQ ID NO: 2547 - RNA, 21 nt, synthetic construct
  source 1..21: mol_type = other RNA
  modified_base 1: mod_base = OTHER; note = 2'-O-methylguanosine with phosphorothioate linkage
  modified_base 2: mod_base = OTHER; note = 2'-O-methyladenosine with phosphorothioate linkage
  modified_base 3: mod_base = OTHER; note = 2'-fluoroguanosine
  modified_base 4: mod_base = OTHER; note = 2'-O-methylcytidine
  modified_base 5: mod_base = OTHER; note = 2'-fluorouridine
  modified_base 6: mod_base = OTHER; note = 2'-O-methylguanosine
  modified_base 7: mod_base = OTHER; note = 2'-fluoroguanosine
  modified_base 8: mod_base = OTHER; note = 2'-O-methylcytidine
  modified_base 9: mod_base = OTHER; note = 2'-fluoroadenosine
  modified_base 10: mod_base = OTHER; note = 2'-O-methylguanosine
  modified_base 11: mod_base = OTHER; note = 2'-fluoroguanosine
  modified_base 12: mod_base = OTHER; note = 2'-O-methylguanosine
  modified_base 13: mod_base = OTHER; note = 2'-fluoroadenosine
  modified_base 14: mod_base = OTHER; note = 2'-O-methyladenosine
  modified_base 15: mod_base = OTHER; note = 2'-fluorocytidine
  modified_base 16: mod_base = OTHER; note = 2'-O-methyladenosine
  modified_base 17: mod_base = OTHER; note = 2'-fluorocytidine
  modified_base 18: mod_base = OTHER; note = 2'-O-methylguanosine
  modified_base 19: mod_base = OTHER; note = 2'-fluorouridine with phosphorothioate linkage
  modified_base 20: mod_base = OTHER; note = 2'-O-methylcytidine with phosphorothioate linkage
  modified_base 21: mod_base = OTHER; note = 2'-O-methyluridine
gagctggcagggaacacgtct

SEQ ID NO: 2548 - RNA, 21 nt, synthetic construct
  source 1..21: mol_type = other RNA
  modified_base 1: mod_base = OTHER; note = 2'-O-methyladenosine with phosphorothioate linkage
  modified_base 2: mod_base = OTHER; note = 2'-O-methylcytidine with phosphorothioate linkage
  modified_base 3: mod_base = OTHER; note = 2'-fluorocytidine
  modified_base 4: mod_base = OTHER; note = 2'-O-methyladenosine
  modified_base 5: mod_base = OTHER; note = 2'-fluoroguanosine
  modified_base 6: mod_base = OTHER; note = 2'-O-methyluridine
  modified_base 7: mod_base = OTHER; note = 2'-fluoroguanosine
  modified_base 8: mod_base = OTHER; note = 2'-O-methylcytidine
  modified_base 9: mod_base = OTHER; note = 2'-fluoroadenosine
  modified_base 10: mod_base = OTHER; note = 2'-O-methyluridine
  modified_base 11: mod_base = OTHER; note = 2'-fluoroguanosine
  modified_base 12: mod_base = OTHER; note = 2'-O-methylguanosine
  modified_base 13: mod_base = OTHER; note = 2'-fluorouridine
  modified_base 14: mod_base = OTHER; note = 2'-O-methyluridine
  modified_base 15: mod_base = OTHER; note = 2'-fluorouridine
  modified_base 16: mod_base = OTHER; note = 2'-O-methylcytidine
  modified_base 17: mod_base = OTHER; note = 2'-fluorouridine
  modified_base 18: mod_base = OTHER; note = 2'-O-methylcytidine
  modified_base 19: mod_base = OTHER; note = 2'-fluorouridine with phosphorothioate linkage
  modified_base 20: mod_base = OTHER; note = 2'-O-methyluridine with phosphorothioate linkage
  modified_base 21: mod_base = OTHER; note = 2'-O-methylguanosine
accagtgcatggtttctcttg

SEQ ID NO: 2549 - RNA, 21 nt, synthetic construct
  source 1..21: mol_type = other RNA
  modified_base 1: mod_base = OTHER; note = 2'-O-methylguanosine with phosphorothioate linkage
  modified_base 2: mod_base = OTHER; note = 2'-O-methylcytidine with phosphorothioate linkage
  modified_base 3: mod_base = OTHER; note = 2'-fluoroadenosine
  modified_base 4: mod_base = OTHER; note = 2'-O-methyluridine
  modified_base 5: mod_base = OTHER; note = 2'-fluorocytidine
  modified_base 6: mod_base = OTHER; note = 2'-O-methyladenosine
  modified_base 7: mod_base = OTHER; note = 2'-fluoroadenosine
  modified_base 8: mod_base = OTHER; note = 2'-O-methylguanosine
  modified_base 9: mod_base = OTHER; note = 2'-fluorocytidine
  modified_base 10: mod_base = OTHER; note = 2'-O-methyluridine
  modified_base 11: mod_base = OTHER; note = 2'-fluorocytidine
  modified_base 12: mod_base = OTHER; note = 2'-O-methylguanosine
  modified_base 13: mod_base = OTHER; note = 2'-fluoroadenosine
  modified_base 14: mod_base = OTHER; note = 2'-O-methylguanosine
  modified_base 15: mod_base = OTHER; note = 2'-fluoroadenosine
  modified_base 16: mod_base = OTHER; note = 2'-O-methyladenosine
  modified_base 17: mod_base = OTHER; note = 2'-fluoroguanosine
  modified_base 18: mod_base = OTHER; note = 2'-O-methylguanosine
  modified_base 19: mod_base = OTHER; note = 2'-fluoroadenosine with phosphorothioate linkage
  modified_base 20: mod_base = OTHER; note = 2'-O-methylguanosine with phosphorothioate linkage
  modified_base 21: mod_base = OTHER; note = 2'-O-methyluridine
gcatcaagctcgagaaggagt

SEQ ID NO: 2550 - RNA, 21 nt, synthetic construct
  source 1..21: mol_type = other RNA
  modified_base 1: mod_base = OTHER; note = 2'-O-methylcytidine with phosphorothioate linkage
  modified_base 2: mod_base = OTHER; note = 2'-O-methyluridine with phosphorothioate linkage
  modified_base 3: mod_base = OTHER; note = 2'-fluorouridine
  modified_base 4: mod_base = OTHER; note = 2'-O-methylcytidine
  modified_base 5: mod_base = OTHER; note = 2'-fluorocytidine
  modified_base 6: mod_base = OTHER; note = 2'-O-methyluridine
  modified_base 7: mod_base = OTHER; note = 2'-fluorouridine
  modified_base 8: mod_base = OTHER; note = 2'-O-methyladenosine
  modified_base 9: mod_base = OTHER; note = 2'-fluoroguanosine
  modified_base 10: mod_base = OTHER; note = 2'-O-methylcytidine
  modified_base 11: mod_base = OTHER; note = 2'-fluorouridine
  modified_base 12: mod_base = OTHER; note = 2'-O-methyluridine
  modified_base 13: mod_base = OTHER; note = 2'-fluorocytidine
  modified_base 14: mod_base = OTHER; note = 2'-O-methylguanosine
  modified_base 15: mod_base = OTHER; note = 2'-fluoroguanosine
  modified_base 16: mod_base = OTHER; note = 2'-O-methyladenosine
  modified_base 17: mod_base = OTHER; note = 2'-fluoroguanosine
  modified_base 18: mod_base = OTHER; note = 2'-O-methyladenosine
  modified_base 19: mod_base = OTHER; note = 2'-fluorocytidine with phosphorothioate linkage
  modified_base 20: mod_base = OTHER; note = 2'-O-methyluridine with phosphorothioate linkage
  modified_base 21: mod_base = OTHER; note = 2'-O-methylcytidine
cttccttagcttcggagactc

SEQ ID NO: 2551 - RNA, 21 nt, synthetic construct
  source 1..21: mol_type = other RNA
  modified_base 1: mod_base = OTHER; note = 2'-O-methylguanosine with phosphorothioate linkage
  modified_base 2: mod_base = OTHER; note = 2'-O-methyladenosine with phosphorothioate linkage
  modified_base 3: mod_base = OTHER; note = 2'-fluoroguanosine
  modified_base 4: mod_base = OTHER; note = 2'-O-methylguanosine
  modified_base 5: mod_base = OTHER; note = 2'-fluoroadenosine
  modified_base 6: mod_base = OTHER; note = 2'-O-methyluridine
  modified_base 7: mod_base = OTHER; note = 2'-fluoroguanosine
  modified_base 8: mod_base = OTHER; note = 2'-O-methyladenosine
  modified_base 9: mod_base = OTHER; note = 2'-fluorocytidine
  modified_base 10: mod_base = OTHER; note = 2'-O-methylguanosine
  modified_base 11: mod_base = OTHER; note = 2'-fluoroadenosine
  modified_base 12: mod_base = OTHER; note = 2'-O-methyluridine
  modified_base 13: mod_base = OTHER; note = 2'-fluorouridine
  modified_base 14: mod_base = OTHER; note = 2'-O-methylguanosine
  modified_base 15: mod_base = OTHER; note = 2'-fluorouridine
  modified_base 16: mod_base = OTHER; note = 2'-O-methyluridine
  modified_base 17: mod_base = OTHER; note = 2'-fluorouridine
  modified_base 18: mod_base = OTHER; note = 2'-O-methyladenosine
  modified_base 19: mod_base = OTHER; note = 2'-fluorouridine with phosphorothioate linkage
  modified_base 20: mod_base = OTHER; note = 2'-O-methylcytidine with phosphorothioate linkage
  modified_base 21: mod_base = OTHER; note = 2'-O-methyladenosine
gaggatgacgattgtttatca

SEQ ID NO: 2552 - RNA, 21 nt, synthetic construct
  source 1..21: mol_type = other RNA
  modified_base 1: mod_base = OTHER; note = 2'-O-methylcytidine with phosphorothioate linkage
  modified_base 2: mod_base = OTHER; note = 2'-O-methyladenosine with phosphorothioate linkage
  modified_base 3: mod_base = OTHER; note = 2'-fluorouridine
  modified_base 4: mod_base = OTHER; note = 2'-O-methylcytidine
  modified_base 5: mod_base = OTHER; note = 2'-fluorocytidine
  modified_base 6: mod_base = OTHER; note = 2'-O-methyladenosine
  modified_base 7: mod_base = OTHER; note = 2'-fluoroguanosine
  modified_base 8: mod_base = OTHER; note = 2'-O-methyladenosine
  modified_base 9: mod_base = OTHER; note = 2'-fluorocytidine
  modified_base 10: mod_base = OTHER; note = 2'-O-methyluridine
  modified_base 11: mod_base = OTHER; note = 2'-fluorocytidine
  modified_base 12: mod_base = OTHER; note = 2'-O-methylcytidine
  modified_base 13: mod_base = OTHER; note = 2'-fluorouridine
  modified_base 14: mod_base = OTHER; note = 2'-O-methylguanosine
  modified_base 15: mod_base = OTHER; note = 2'-fluoroadenosine
  modified_base 16: mod_base = OTHER; note = 2'-O-methylcytidine
  modified_base 17: mod_base = OTHER; note = 2'-fluoroguanosine
  modified_base 18: mod_base = OTHER; note = 2'-O-methyluridine
  modified_base 19: mod_base = OTHER; note = 2'-fluorouridine with phosphorothioate linkage
  modified_base 20: mod_base = OTHER; note = 2'-O-methylcytidine with phosphorothioate linkage
  modified_base 21: mod_base = OTHER; note = 2'-O-methyladenosine
catccagactcctgacgttca

SEQ ID NO: 2553 - RNA, 21 nt, synthetic construct
  source 1..21: mol_type = other RNA
  modified_base 1: mod_base = OTHER; note = 2'-O-methylcytidine with phosphorothioate linkage
  modified_base 2: mod_base = OTHER; note = 2'-O-methyladenosine with phosphorothioate linkage
  modified_base 3: mod_base = OTHER; note = 2'-fluoroguanosine
  modified_base 4: mod_base = OTHER; note = 2'-O-methylguanosine
  modified_base 5: mod_base = OTHER; note = 2'-fluoroguanosine
  modified_base 6: mod_base = OTHER; note = 2'-O-methyladenosine
  modified_base 7: mod_base = OTHER; note = 2'-fluorocytidine
  modified_base 8: mod_base = OTHER; note = 2'-O-methyladenosine
  modified_base 9: mod_base = OTHER; note = 2'-fluorocytidine
  modified_base 10: mod_base = OTHER; note = 2'-O-methyluridine
  modified_base 11: mod_base = OTHER; note = 2'-fluorouridine
  modified_base 12: mod_base = OTHER; note = 2'-O-methylguanosine
  modified_base 13: mod_base = OTHER; note = 2'-fluorocytidine
  modified_base 14: mod_base = OTHER; note = 2'-O-methylguanosine
  modified_base 15: mod_base = OTHER; note = 2'-fluoroadenosine
  modified_base 16: mod_base = OTHER; note = 2'-O-methylcytidine
  modified_base 17: mod_base = OTHER; note = 2'-fluoroguanosine
  modified_base 18: mod_base = OTHER; note = 2'-O-methyladenosine
  modified_base 19: mod_base = OTHER; note = 2'-fluoroadenosine with phosphorothioate linkage
  modified_base 20: mod_base = OTHER; note = 2'-O-methylguanosine with phosphorothioate linkage
  modified_base 21: mod_base = OTHER; note = 2'-O-methyladenosine
cagggacacttgcgacgaaga

SEQ ID NO: 2554 - RNA, 21 nt, synthetic construct
  source 1..21: mol_type = other RNA
  modified_base 1: mod_base = OTHER; note = 2'-O-methyladenosine with phosphorothioate linkage
  modified_base 2: mod_base = OTHER; note = 2'-O-methylcytidine with phosphorothioate linkage
  modified_base 3: mod_base = OTHER; note = 2'-fluorocytidine
  modified_base 4: mod_base = OTHER; note = 2'-O-methyladenosine
  modified_base 5: mod_base = OTHER; note = 2'-fluoroadenosine
  modified_base 6: mod_base = OTHER; note = 2'-O-methyladenosine
  modified_base 7: mod_base = OTHER; note = 2'-fluoroguanosine
  modified_base 8: mod_base = OTHER; note = 2'-O-methylguanosine
  modified_base 9: mod_base = OTHER; note = 2'-fluorouridine
  modified_base 10: mod_base = OTHER; note = 2'-O-methylcytidine
  modified_base 11: mod_base = OTHER; note = 2'-fluoroadenosine
  modified_base 12: mod_base = OTHER; note = 2'-O-methyluridine
  modified_base 13: mod_base = OTHER; note = 2'-fluorouridine
  modified_base 14: mod_base = OTHER; note = 2'-O-methyladenosine
  modified_base 15: mod_base = OTHER; note = 2'-fluorocytidine
  modified_base 16: mod_base = OTHER; note = 2'-O-methyladenosine
  modified_base 17: mod_base = OTHER; note = 2'-fluoroadenosine
  modified_base 18: mod_base = OTHER; note = 2'-O-methylcytidine
  modified_base 19: mod_base = OTHER; note = 2'-fluorocytidine with phosphorothioate linkage
  modified_base 20: mod_base = OTHER; note = 2'-O-methyluridine with phosphorothioate linkage
  modified_base 21: mod_base = OTHER; note = 2'-O-methylguanosine
accaaaggtcattacaacctg

SEQ ID NO: 2555 - RNA, 21 nt, synthetic construct
  source 1..21: mol_type = other RNA
  modified_base 1: mod_base = OTHER; note = 2'-O-methylcytidine with phosphorothioate linkage
  modified_base 2: mod_base = OTHER; note = 2'-O-methylguanosine with phosphorothioate linkage
  modified_base 3: mod_base = OTHER; note = 2'-fluorouridine
  modified_base 4: mod_base = OTHER; note = 2'-O-methyluridine
  modified_base 5: mod_base = OTHER; note = 2'-fluorocytidine
  modified_base 6: mod_base = OTHER; note = 2'-O-methyladenosine
  modified_base 7: mod_base = OTHER; note = 2'-fluoroadenosine
  modified_base 8: mod_base = OTHER; note = 2'-O-methyladenosine
  modified_base 9: mod_base = OTHER; note = 2'-fluorouridine
  modified_base 10: mod_base = OTHER; note = 2'-O-methyluridine
  modified_base 11: mod_base = OTHER; note = 2'-fluorouridine
  modified_base 12: mod_base = OTHER; note = 2'-O-methylcytidine
  modified_base 13: mod_base = OTHER; note = 2'-fluoroadenosine
  modified_base 14: mod_base = OTHER; note = 2'-O-methylguanosine
  modified_base 15: mod_base = OTHER; note = 2'-fluoroadenosine
  modified_base 16: mod_base = OTHER; note = 2'-O-methylguanosine
  modified_base 17: mod_base = OTHER; note = 2'-fluorocytidine
  modified_base 18: mod_base = OTHER; note = 2'-O-methyladenosine
  modified_base 19: mod_base = OTHER; note = 2'-fluoroadenosine with phosphorothioate linkage
  modified_base 20: mod_base = OTHER; note = 2'-O-methylcytidine with phosphorothioate linkage
  modified_base 21: mod_base = OTHER; note = 2'-O-methylcytidine
cgttcaaatttcagagcaacc

SEQ ID NO: 2556 - RNA, 21 nt, synthetic construct
  source 1..21: mol_type = other RNA
  modified_base 1: mod_base = OTHER; note = 2'-O-methylcytidine with phosphorothioate linkage
  modified_base 2: mod_base = OTHER; note = 2'-O-methyluridine with phosphorothioate linkage
  modified_base 3: mod_base = OTHER; note = 2'-fluorocytidine
  modified_base 4: mod_base = OTHER; note = 2'-O-methylcytidine
  modified_base 5: mod_base = OTHER; note = 2'-fluoroadenosine
  modified_base 6: mod_base = OTHER; note = 2'-O-methyluridine
  modified_base 7: mod_base = OTHER; note = 2'-fluoroguanosine
  modified_base 8: mod_base = OTHER; note = 2'-O-methylguanosine
  modified_base 9: mod_base = OTHER; note = 2'-fluoroguanosine
  modified_base 10: mod_base = OTHER; note = 2'-O-methyladenosine
  modified_base 11: mod_base = OTHER; note = 2'-fluorouridine
  modified_base 12: mod_base = OTHER; note = 2'-O-methyluridine
  modified_base 13: mod_base = OTHER; note = 2'-fluorocytidine
  modified_base 14: mod_base = OTHER; note = 2'-O-methyladenosine
  modified_base 15: mod_base = OTHER; note = 2'-fluorouridine
  modified_base 16: mod_base = OTHER; note = 2'-O-methyladenosine
  modified_base 17: mod_base = OTHER; note = 2'-fluorouridine
  modified_base 18: mod_base = OTHER; note = 2'-O-methyluridine
  modified_base 19: mod_base = OTHER; note = 2'-fluoroguanosine with phosphorothioate linkage
  modified_base 20: mod_base = OTHER; note = 2'-O-methylcytidine with phosphorothioate linkage
  modified_base 21: mod_base = OTHER; note = 2'-O-methyladenosine
ctccatgggattcatattgca

SEQ ID NO: 2557 - RNA, 21 nt, synthetic construct
  source 1..21: mol_type = other RNA
  modified_base 1: mod_base = OTHER; note = 2'-O-methylcytidine with phosphorothioate linkage
  modified_base 2: mod_base = OTHER; note = 2'-O-methyladenosine with phosphorothioate linkage
  modified_base 3: mod_base = OTHER; note = 2'-fluoroguanosine
  modified_base 4: mod_base = OTHER; note = 2'-O-methylcytidine
  modified_base 5: mod_base = OTHER; note = 2'-fluorocytidine
  modified_base 6: mod_base = OTHER; note = 2'-O-methylcytidine
  modified_base 7: mod_base = OTHER; note = 2'-fluorouridine
  modified_base 8: mod_base = OTHER; note = 2'-O-methyladenosine
  modified_base 9: mod_base = OTHER; note = 2'-fluorouridine
  modified_base 10: mod_base = OTHER; note = 2'-O-methylguanosine
  modified_base 11: mod_base = OTHER; note = 2'-fluorocytidine
  modified_base 12: mod_base = OTHER; note = 2'-O-methyladenosine
  modified_base 13: mod_base = OTHER; note = 2'-fluoroadenosine
  modified_base 14: mod_base = OTHER; note = 2'-O-methyladenosine
  modified_base 15: mod_base = OTHER; note = 2'-fluoroguanosine
  modified_base 16: mod_base = OTHER; note = 2'-O-methylguanosine
  modified_base 17: mod_base = OTHER; note = 2'-fluorouridine
  modified_base 18: mod_base = OTHER; note = 2'-O-methyluridine
  modified_base 19: mod_base = OTHER; note = 2'-fluoroadenosine with phosphorothioate linkage
  modified_base 20: mod_base = OTHER; note = 2'-O-methylcytidine with phosphorothioate linkage
  modified_base 21: mod_base = OTHER; note = 2'-O-methyluridine
cagccctatgcaaaggttact

SEQ ID NO: 2558 - RNA, 21 nt, synthetic construct
  source 1..21: mol_type = other RNA
  modified_base 1: mod_base = OTHER; note = 2'-O-methylcytidine with phosphorothioate linkage
  modified_base 2: mod_base = OTHER; note = 2'-O-methyladenosine with phosphorothioate linkage
  modified_base 3: mod_base = OTHER; note = 2'-fluorocytidine
  modified_base 4: mod_base = OTHER; note = 2'-O-methyladenosine
  modified_base 5: mod_base = OTHER; note = 2'-fluoroguanosine
  modified_base 6: mod_base = OTHER; note = 2'-O-methylguanosine
  modified_base 7: mod_base = OTHER; note = 2'-fluoroguanosine
  modified_base 8: mod_base = OTHER; note = 2'-O-methyladenosine
  modified_base 9: mod_base = OTHER; note = 2'-fluorocytidine
  modified_base 10: mod_base = OTHER; note = 2'-O-methyladenosine
  modified_base 11: mod_base = OTHER; note = 2'-fluorocytidine
  modified_base 12: mod_base = OTHER; note = 2'-O-methyluridine
  modified_base 13: mod_base = OTHER; note = 2'-fluorouridine
  modified_base 14: mod_base = OTHER; note = 2'-O-methylguanosine
  modified_base 15: mod_base = OTHER; note = 2'-fluorocytidine
  modified_base 16: mod_base = OTHER; note = 2'-O-methylguanosine
  modified_base 17: mod_base = OTHER; note = 2'-fluoroadenosine
  modified_base 18: mod_base = OTHER; note = 2'-O-methylcytidine
  modified_base 19: mod_base = OTHER; note = 2'-fluoroguanosine with phosphorothioate linkage
  modified_base 20: mod_base = OTHER; note = 2'-O-methyladenosine with phosphorothioate linkage
  modified_base 21: mod_base = OTHER; note = 2'-O-methyladenosine
cacagggacacttgcgacgaa

SEQ ID NO: 2559 - RNA, 21 nt, synthetic construct
  source 1..21: mol_type = other RNA
  modified_base 1: mod_base = OTHER; note = 2'-O-methyladenosine with phosphorothioate linkage
  modified_base 2: mod_base = OTHER; note = 2'-O-methyluridine with phosphorothioate linkage
  modified_base 3: mod_base = OTHER; note = 2'-fluoroadenosine
  modified_base 4: mod_base = OTHER; note = 2'-O-methylcytidine
  modified_base 5: mod_base = OTHER; note = 2'-fluorocytidine
  modified_base 6: mod_base = OTHER; note = 2'-O-methyladenosine
  modified_base 7: mod_base = OTHER; note = 2'-fluoroguanosine
  modified_base 8: mod_base = OTHER; note = 2'-O-methylguanosine
  modified_base 9: mod_base = OTHER; note = 2'-fluoroadenosine
  modified_base 10: mod_base = OTHER; note = 2'-O-methyluridine
  modified_base 11: mod_base = OTHER; note = 2'-fluorocytidine
  modified_base 12: mod_base = OTHER; note = 2'-O-methyladenosine
  modified_base 13: mod_base = OTHER; note = 2'-fluoroguanosine
  modified_base 14: mod_base = OTHER; note = 2'-O-methyluridine
  modified_base 15: mod_base = OTHER; note = 2'-fluoroadenosine
  modified_base 16: mod_base = OTHER; note = 2'-O-methyluridine
  modified_base 17: mod_base = OTHER; note = 2'-fluorocytidine
  modified_base 18: mod_base = OTHER; note = 2'-O-methylguanosine
  modified_base 19: mod_base = OTHER; note = 2'-fluoroadenosine with phosphorothioate linkage
  modified_base 20: mod_base = OTHER; note = 2'-O-methylguanosine with phosphorothioate linkage
  modified_base 21: mod_base = OTHER; note = 2'-O-methyladenosine
ataccaggatcagtatcgaga

SEQ ID NO: 2560 - RNA, 21 nt, synthetic construct
  source 1..21: mol_type = other RNA
  modified_base 1: mod_base = OTHER; note = 2'-O-methylguanosine with phosphorothioate linkage
  modified_base 2: mod_base = OTHER; note = 2'-O-methylcytidine with phosphorothioate linkage
  modified_base 3: mod_base = OTHER; note = 2'-fluoroadenosine
  modified_base 4: mod_base = OTHER; note = 2'-O-methyluridine
  modified_base 5: mod_base = OTHER; note = 2'-fluorocytidine
  modified_base 6: mod_base = OTHER; note = 2'-O-methylcytidine
  modified_base 7: mod_base = OTHER; note = 2'-fluoroadenosine
  modified_base 8: mod_base = OTHER; note = 2'-O-methyladenosine
  modified_base 9: mod_base = OTHER; note = 2'-fluorouridine
  modified_base 10: mod_base = OTHER; note = 2'-O-methylcytidine
  modified_base 11: mod_base = OTHER; note = 2'-fluorocytidine
  modified_base 12: mod_base = OTHER; note = 2'-O-methylcytidine
  modified_base 13: mod_base = OTHER; note = 2'-fluoroguanosine
  modified_base 14: mod_base = OTHER; note = 2'-O-methyluridine
  modified_base 15: mod_base = OTHER; note = 2'-fluoroguanosine
  modified_base 16: mod_base = OTHER; note = 2'-O-methylguanosine
  modified_base 17: mod_base = OTHER; note = 2'-fluoroadenosine
  modified_base 18: mod_base = OTHER; note = 2'-O-methylguanosine
  modified_base 19: mod_base = OTHER; note = 2'-fluoroguanosine with phosphorothioate linkage
  modified_base 20: mod_base = OTHER; note = 2'-O-methyluridine with phosphorothioate linkage
  modified_base 21: mod_base = OTHER; note = 2'-O-methyluridine
gcatccaatcccgtggaggtt

SEQ ID NO: 2561 - RNA, 21 nt, synthetic construct
  source 1..21: mol_type = other RNA
  modified_base 1: mod_base = OTHER; note = 2'-O-methylguanosine with phosphorothioate linkage
  modified_base 2: mod_base = OTHER; note = 2'-O-methylcytidine with phosphorothioate linkage
  modified_base 3: mod_base = OTHER; note = 2'-fluorocytidine
  modified_base 4: mod_base = OTHER; note = 2'-O-methylcytidine
  modified_base 5: mod_base = OTHER; note = 2'-fluoroadenosine
  modified_base 6: mod_base = OTHER; note = 2'-O-methyladenosine
  modified_base 7: mod_base = OTHER; note = 2'-fluorocytidine
  modified_base 8: mod_base = OTHER; note = 2'-O-methyladenosine
  modified_base 9: mod_base = OTHER; note = 2'-fluorocytidine
  modified_base 10: mod_base = OTHER; note = 2'-O-methylguanosine
  modified_base 11: mod_base = OTHER; note = 2'-fluoroguanosine
  modified_base 12: mod_base = OTHER; note = 2'-O-methyladenosine
  modified_base 13: mod_base = OTHER; note = 2'-fluoroguanosine
  modified_base 14: mod_base = OTHER; note = 2'-O-methyladenosine
  modified_base 15: mod_base = OTHER; note = 2'-fluoroadenosine
  modified_base 16: mod_base = OTHER; note = 2'-O-methylcytidine
  modified_base 17: mod_base = OTHER; note = 2'-fluoroguanosine
  modified_base 18: mod_base = OTHER; note = 2'-O-methyluridine
  modified_base 19: mod_base = OTHER; note = 2'-fluoroguanosine with phosphorothioate linkage
  modified_base 20: mod_base = OTHER; note = 2'-O-methyluridine with phosphorothioate linkage
  modified_base 21: mod_base = OTHER; note = 2'-O-methyladenosine
gcccaacacggagaacgtgta

SEQ ID NO: 2562 - RNA, 21 nt, synthetic construct
  source 1..21: mol_type = other RNA
  modified_base 1: mod_base = OTHER; note = 2'-O-methylcytidine with phosphorothioate linkage
  modified_base 2: mod_base = OTHER; note = 2'-O-methylcytidine with phosphorothioate linkage
  modified_base 3: mod_base = OTHER; note = 2'-fluoroadenosine
  modified_base 4: mod_base = OTHER; note = 2'-O-methylguanosine
  modified_base 5: mod_base = OTHER; note = 2'-fluorocytidine
  modified_base 6: mod_base = OTHER; note = 2'-O-methylcytidine
  modified_base 7: mod_base = OTHER; note = 2'-fluoroadenosine
  modified_base 8: mod_base = OTHER; note = 2'-O-methylcytidine
  modified_base 9: mod_base = OTHER; note = 2'-fluorocytidine
  modified_base 10: mod_base = OTHER; note = 2'-O-methyluridine
  modified_base 11: mod_base = OTHER; note = 2'-fluorocytidine
  modified_base 12: mod_base = OTHER; note = 2'-O-methyluridine
  modified_base 13: mod_base = OTHER; note = 2'-fluorocytidine
  modified_base 14: mod_base = OTHER; note = 2'-O-methylcytidine
  modified_base 15: mod_base = OTHER; note = 2'-fluoroadenosine
  modified_base 16: mod_base = OTHER; note = 2'-O-methyluridine
  modified_base 17: mod_base = OTHER; note = 2'-fluoroguanosine
  modified_base 18: mod_base = OTHER; note = 2'-O-methylguanosine
  modified_base 19: mod_base = OTHER; note = 2'-fluoroguanosine with phosphorothioate linkage
  modified_base 20: mod_base = OTHER; note = 2'-O-methyladenosine with phosphorothioate linkage
  modified_base 21: mod_base = OTHER; note = 2'-O-methyluridine
ccagccacctctccatgggat

SEQ ID NO: 2563 - RNA, 21 nt, synthetic construct
  source 1..21: mol_type = other RNA
  modified_base 1: mod_base = OTHER; note = 2'-O-methyladenosine with phosphorothioate linkage
  modified_base 2: mod_base = OTHER; note = 2'-O-methylguanosine with phosphorothioate linkage
  modified_base 3: mod_base = OTHER; note = 2'-fluorouridine
  modified_base 4: mod_base = OTHER; note = 2'-O-methylguanosine
  modified_base 5: mod_base = OTHER; note = 2'-fluoroadenosine
  modified_base 6: mod_base = OTHER; note = 2'-O-methyluridine
  modified_base 7: mod_base = OTHER; note = 2'-fluorocytidine
  modified_base 8: mod_base = OTHER; note = 2'-O-methylguanosine
  modified_base 9: mod_base = OTHER; note = 2'-fluoroadenosine
  modified_base 10: mod_base = OTHER; note = 2'-O-methylguanosine
  modified_base 11: mod_base = OTHER; note = 2'-fluorouridine
  modified_base 12: mod_base = OTHER; note = 2'-O-methylguanosine
  modified_base 13: mod_base = OTHER; note = 2'-fluorouridine
  modified_base 14: mod_base = OTHER; note = 2'-O-methyluridine
  modified_base 15: mod_base = OTHER; note = 2'-fluoroguanosine
  modified_base 16: mod_base = OTHER; note = 2'-O-methyladenosine
  modified_base 17: mod_base = OTHER; note = 2'-fluoroadenosine
  modified_base 18: mod_base = OTHER; note = 2'-O-methyluridine
  modified_base 19: mod_base = OTHER; note = 2'-fluoroadenosine with phosphorothioate linkage
  modified_base 20: mod_base = OTHER; note = 2'-O-methyladenosine with phosphorothioate linkage
  modified_base 21: mod_base = OTHER; note = 2'-O-methyluridine
agtgatcgagtgttgaataat

SEQ ID NO: 2564 - RNA, 21 nt, synthetic construct
  source 1..21: mol_type = other RNA
  modified_base 1: mod_base = OTHER; note = 2'-O-methylcytidine with phosphorothioate linkage
  modified_base 2: mod_base = OTHER; note = 2'-O-methylcytidine with phosphorothioate linkage
  modified_base 3: mod_base = OTHER; note = 2'-fluoroadenosine
  modified_base 4: mod_base = OTHER; note = 2'-O-methylcytidine
  modified_base 5: mod_base = OTHER; note = 2'-fluorocytidine
  modified_base 6: mod_base = OTHER; note = 2'-O-methyluridine
  modified_base 7: mod_base = OTHER; note = 2'-fluorocytidine
  modified_base 8: mod_base = OTHER; note = 2'-O-methyluridine
  modified_base 9: mod_base = OTHER; note = 2'-fluorocytidine
  modified_base 10: mod_base = OTHER; note = 2'-O-methylcytidine
  modified_base 11: mod_base = OTHER; note = 2'-fluoroadenosine
  modified_base 12: mod_base = OTHER; note = 2'-O-methyluridine
  modified_base 13: mod_base = OTHER; note = 2'-fluoroguanosine
  modified_base 14: mod_base = OTHER; note = 2'-O-methylguanosine
  modified_base 15: mod_base = OTHER; note = 2'-fluoroguanosine
  modified_base 16: mod_base = OTHER; note = 2'-O-methyladenosine
  modified_base 17: mod_base = OTHER; note = 2'-fluorouridine
  modified_base 18: mod_base = OTHER; note = 2'-O-methyluridine
  modified_base 19: mod_base = OTHER; note = 2'-fluorocytidine with phosphorothioate linkage
  modified_base 20: mod_base = OTHER; note = 2'-O-methyladenosine with phosphorothioate linkage
  modified_base 21: mod_base = OTHER; note = 2'-O-methyluridine
ccacctctccatgggattcat

SEQ ID NO: 2565 - RNA, 21 nt, synthetic construct
  source 1..21: mol_type = other RNA
  modified_base 1: mod_base = OTHER; note = 2'-O-methylguanosine with phosphorothioate linkage
  modified_base 2: mod_base = OTHER; note = 2'-O-methyladenosine with phosphorothioate linkage
  modified_base 3: mod_base = OTHER; note = 2'-fluoroadenosine
  modified_base 4: mod_base = OTHER; note = 2'-O-methyluridine
  modified_base 5: mod_base = OTHER; note = 2'-fluoroadenosine
  modified_base 6: mod_base = OTHER; note = 2'-O-methylcytidine
  modified_base 7: mod_base = OTHER; note = 2'-fluorocytidine
  modified_base 8: mod_base = OTHER; note = 2'-O-methyladenosine
  modified_base 9: mod_base = OTHER; note = 2'-fluoroguanosine
  modified_base 10: mod_base = OTHER; note = 2'-O-methylguanosine
  modified_base 11: mod_base = OTHER; note = 2'-fluoroadenosine
  modified_base 12: mod_base = OTHER; note = 2'-O-methyluridine
  modified_base 13: mod_base = OTHER; note = 2'-fluorocytidine
  modified_base 14: mod_base = OTHER; note = 2'-O-methyladenosine
  modified_base 15: mod_base = OTHER; note = 2'-fluoroguanosine
  modified_base 16: mod_base = OTHER; note = 2'-O-methyluridine
  modified_base 17: mod_base = OTHER; note = 2'-fluoroadenosine
  modified_base 18: mod_base = OTHER; note = 2'-O-methyluridine
  modified_base 19: mod_base = OTHER; note = 2'-fluorocytidine with phosphorothioate linkage
  modified_base 20: mod_base = OTHER; note = 2'-O-methylguanosine with phosphorothioate linkage
  modified_base 21: mod_base = OTHER; note = 2'-O-methyladenosine
gaataccaggatcagtatcga

SEQ ID NO: 2566 - RNA, 21 nt, synthetic construct
  source 1..21: mol_type = other RNA
  modified_base 1: mod_base = OTHER; note = 2'-O-methylcytidine with phosphorothioate linkage
  modified_base 2: mod_base = OTHER; note = 2'-O-methyladenosine with phosphorothioate linkage
  modified_base 3: mod_base = OTHER; note = 2'-fluorocytidine
  modified_base 4: mod_base = OTHER; note = 2'-O-methyladenosine
  modified_base 5: mod_base = OTHER; note = 2'-fluoroguanosine
  modified_base 6: mod_base = OTHER; note = 2'-O-methyluridine
  modified_base 7: mod_base = OTHER; note = 2'-fluoroguanosine
  modified_base 8: mod_base = OTHER; note = 2'-O-methyladenosine
  modified_base 9: mod_base = OTHER; note = 2'-fluorouridine
  modified_base 10: mod_base = OTHER; note = 2'-O-methylcytidine
  modified_base 11: mod_base = OTHER; note = 2'-fluoroguanosine
  modified_base 12: mod_base = OTHER; note = 2'-O-methyladenosine
  modified_base 13: mod_base = OTHER; note = 2'-fluoroguanosine
  modified_base 14: mod_base = OTHER; note = 2'-O-methyluridine
  modified_base 15: mod_base = OTHER; note = 2'-fluoroguanosine
  modified_base 16: mod_base = OTHER; note = 2'-O-methyluridine
  modified_base 17: mod_base = OTHER; note = 2'-fluorouridine
  modified_base 18: mod_base = OTHER; note = 2'-O-methylguanosine
  modified_base 19: mod_base = OTHER; note = 2'-fluoroadenosine with phosphorothioate linkage
  modified_base 20: mod_base = OTHER; note = 2'-O-methyladenosine with phosphorothioate linkage
  modified_base 21: mod_base = OTHER; note = 2'-O-methyluridine
cacagtgatcgagtgttgaat

SEQ ID NO: 2567 - RNA, 21 nt, synthetic construct
  source 1..21: mol_type = other RNA
  modified_base 1: mod_base = OTHER; note = 2'-O-methylcytidine with phosphorothioate linkage
  modified_base 2: mod_base = OTHER; note = 2'-O-methylguanosine with phosphorothioate linkage
  modified_base 3: mod_base = OTHER; note = 2'-fluoroguanosine
  modified_base 4: mod_base = OTHER; note = 2'-O-methylcytidine
  modified_base 5: mod_base = OTHER; note = 2'-fluorocytidine
  modified_base 6: mod_base = OTHER; note = 2'-O-methylcytidine
  modified_base 7: mod_base = OTHER; note = 2'-fluoroadenosine
  modified_base 8: mod_base = OTHER; note = 2'-O-methylguanosine
  modified_base 9: mod_base = OTHER; note = 2'-fluorocytidine
  modified_base 10: mod_base = OTHER; note = 2'-O-methylcytidine
  modified_base 11: mod_base = OTHER; note = 2'-fluorocytidine
  modified_base 12: mod_base = OTHER; note = 2'-O-methyluridine
  modified_base 13: mod_base = OTHER; note = 2'-fluoroadenosine
  modified_base 14: mod_base = OTHER; note = 2'-O-methyluridine
  modified_base 15: mod_base = OTHER; note = 2'-fluoroguanosine
  modified_base 16: mod_base = OTHER; note = 2'-O-methylcytidine
  modified_base 17: mod_base = OTHER; note = 2'-fluoroadenosine
  modified_base 18: mod_base = OTHER; note = 2'-O-methyladenosine
  modified_base 19: mod_base = OTHER; note = 2'-fluoroadenosine with phosphorothioate linkage
  modified_base 20: mod_base = OTHER; note = 2'-O-methylguanosine with phosphorothioate linkage
  modified_base 21: mod_base = OTHER; note = 2'-O-methylguanosine
cggcccagccctatgcaaagg

SEQ ID NO: 2568 - RNA, 21 nt, synthetic construct
  source 1..21: mol_type = other RNA
  modified_base 1: mod_base = OTHER; note = 2'-O-methylguanosine with phosphorothioate linkage
  modified_base 2: mod_base = OTHER; note = 2'-O-methylguanosine with phosphorothioate linkage
  modified_base 3: mod_base = OTHER; note = 2'-fluorocytidine
  modified_base 4: mod_base = OTHER; note = 2'-O-methyladenosine
  modified_base 5: mod_base = OTHER; note = 2'-fluorocytidine
  modified_base 6: mod_base = OTHER; note = 2'-O-methyladenosine
  modified_base 7: mod_base = OTHER; note = 2'-fluoroguanosine
  modified_base 8: mod_base = OTHER; note = 2'-O-methyluridine
  modified_base 9: mod_base = OTHER; note = 2'-fluoroguanosine
  modified_base 10: mod_base = OTHER; note = 2'-O-methyladenosine
  modified_base 11: mod_base = OTHER; note = 2'-fluorouridine
  modified_base 12: mod_base = OTHER; note = 2'-O-methylcytidine
  modified_base 13: mod_base = OTHER; note = 2'-fluoroguanosine
  modified_base 14: mod_base = OTHER; note = 2'-O-methyladenosine
  modified_base 15: mod_base = OTHER; note = 2'-fluoroguanosine
  modified_base 16: mod_base = OTHER; note = 2'-O-methyluridine
  modified_base 17: mod_base = OTHER; note = 2'-fluoroguanosine
  modified_base 18: mod_base = OTHER; note = 2'-O-methyluridine
  modified_base 19: mod_base = OTHER; note = 2'-fluorouridine with phosphorothioate linkage
  modified_base 20: mod_base = OTHER; note = 2'-O-methylguanosine with phosphorothioate linkage
  modified_base 21: mod_base = OTHER; note = 2'-O-methyladenosine
ggcacagtgatcgagtgttga

SEQ ID NO: 2569 - RNA, 21 nt, synthetic construct
  source 1..21: mol_type = other RNA
  modified_base 1: mod_base = OTHER; note = 2'-O-methylcytidine with phosphorothioate linkage
  modified_base 2: mod_base = OTHER; note = 2'-O-methylcytidine with phosphorothioate linkage
  modified_base 3: mod_base = OTHER; note = 2'-fluorouridine
  modified_base 4: mod_base = OTHER; note = 2'-O-methylguanosine
  modified_base 5: mod_base = OTHER; note = 2'-fluoroguanosine
  modified_base 6: mod_base = OTHER; note = 2'-O-methylguanosine
  modified_base 7: mod_base = OTHER; note = 2'-fluorocytidine
  modified_base 8: mod_base = OTHER; note = 2'-O-methylguanosine
  modified_base 9: mod_base = OTHER; note = 2'-fluoroadenosine
  modified_base 10: mod_base = OTHER; note = 2'-O-methylguanosine
  modified_base 11: mod_base = OTHER; note = 2'-fluoroadenosine
  modified_base 12: mod_base = OTHER; note = 2'-O-methyladenosine
  modified_base 13: mod_base = OTHER; note = 2'-fluoroguanosine
  modified_base 14: mod_base = OTHER; note = 2'-O-methylcytidine
  modified_base 15: mod_base = OTHER; note = 2'-fluoroadenosine
  modified_base 16: mod_base = OTHER; note = 2'-O-methyluridine
  modified_base 17: mod_base = OTHER; note = 2'-fluoroadenosine
  modified_base 18: mod_base = OTHER; note = 2'-O-methyladenosine
  modified_base 19: mod_base = OTHER; note = 2'-fluoroguanosine with phosphorothioate linkage
  modified_base 20: mod_base = OTHER; note = 2'-O-methylcytidine with phosphorothioate linkage
  modified_base 21: mod_base = OTHER; note = 2'-O-methylguanosine
cctgggcgagaagcataagcg

SEQ ID NO: 2570 - RNA, 21 nt, synthetic construct
  source 1..21: mol_type = other RNA
  modified_base 1: mod_base = OTHER; note = 2'-O-methyluridine with phosphorothioate linkage
  modified_base 2: mod_base = OTHER; note = 2'-O-methylcytidine with phosphorothioate linkage
  modified_base 3: mod_base = OTHER; note = 2'-fluorocytidine
  modified_base 4: mod_base = OTHER; note = 2'-O-methyluridine
  modified_base 5: mod_base = OTHER; note = 2'-fluoroguanosine
  modified_base 6: mod_base = OTHER; note = 2'-O-methyladenosine
  modified_base 7: mod_base = OTHER; note = 2'-fluorocytidine
  modified_base 8: mod_base = OTHER; note = 2'-O-methylguanosine
  modified_base 9: mod_base = OTHER; note = 2'-fluorouridine
  modified_base 10: mod_base = OTHER; note = 2'-O-methyluridine
  modified_base 11: mod_base = OTHER; note = 2'-fluorocytidine
  modified_base 12: mod_base = OTHER; note = 2'-O-methyladenosine
  modified_base 13: mod_base = OTHER; note = 2'-fluoroadenosine
  modified_base 14: mod_base = OTHER; note = 2'-O-methylguanosine
  modified_base 15: mod_base = OTHER; note = 2'-fluorouridine
  modified_base 16: mod_base = OTHER; note = 2'-O-methyluridine
  modified_base 17: mod_base = OTHER; note = 2'-fluorocytidine
  modified_base 18: mod_base = OTHER; note = 2'-O-methylguanosine
  modified_base 19: mod_base = OTHER; note = 2'-fluorocytidine with phosphorothioate linkage
  modified_base 20: mod_base = OTHER; note = 2'-O-methyladenosine with phosphorothioate linkage
  modified_base 21: mod_base = OTHER; note = 2'-O-methylguanosine
tcctgacgttcaagttcgcag

SEQ ID NO: 2571 - RNA, 21 nt, synthetic construct
  source 1..21: mol_type = other RNA
  modified_base 1: mod_base = OTHER; note = 2'-O-methylguanosine with phosphorothioate linkage
  modified_base 2: mod_base = OTHER; note = 2'-O-methyladenosine with phosphorothioate linkage
  modified_base 3: mod_base = OTHER; note = 2'-fluorouridine
  modified_base 4: mod_base = OTHER; note = 2'-O-methylcytidine
  modified_base 5: mod_base = OTHER; note = 2'-fluoroguanosine
  modified_base 6: mod_base = OTHER; note = 2'-O-methyladenosine
  modified_base 7: mod_base = OTHER; note = 2'-fluoroguanosine
  modified_base 8: mod_base = OTHER; note = 2'-O-methyluridine
  modified_base 9: mod_base = OTHER; note = 2'-fluoroguanosine
  modified_base 10: mod_base = OTHER; note = 2'-O-methyluridine
  modified_base 11: mod_base = OTHER; note = 2'-fluorouridine
  modified_base 12: mod_base = OTHER; note = 2'-O-methylguanosine
  modified_base 13: mod_base = OTHER; note = 2'-fluoroadenosine
  modified_base 14: mod_base = OTHER; note = 2'-O-methyladenosine
  modified_base 15: mod_base = OTHER; note = 2'-fluorouridine
  modified_base 16: mod_base = OTHER; note = 2'-O-methyladenosine
  modified_base 17: mod_base = OTHER; note = 2'-fluoroadenosine
  modified_base 18: mod_base = OTHER; note = 2'-O-methyluridine
  modified_base 19: mod_base = OTHER; note = 2'-fluoroguanosine with phosphorothioate linkage
  modified_base 20: mod_base = OTHER; note = 2'-O-methyladenosine with phosphorothioate linkage
  modified_base 21: mod_base = OTHER; note = 2'-O-methyluridine
gatcgagtgttgaataatgat

SEQ ID NO: 2572 - RNA, 21 nt, synthetic construct
  source 1..21: mol_type = other RNA
  modified_base 1: mod_base = OTHER; note = 2'-O-methyladenosine with phosphorothioate linkage
  modified_base 2: mod_base = OTHER; note = 2'-O-methylcytidine with phosphorothioate linkage
  modified_base 3: mod_base = OTHER; note = 2'-fluoroguanosine
  modified_base 4: mod_base = OTHER; note = 2'-O-methylcytidine
  modified_base 5: mod_base = OTHER; note = 2'-fluorocytidine
  modified_base 6: mod_base = OTHER; note = 2'-O-methyladenosine
  modified_base 7: mod_base = OTHER; note = 2'-fluoroguanosine
  modified_base 8: mod_base = OTHER; note = 2'-O-methyladenosine
  modified_base 9: mod_base = OTHER; note = 2'-fluoroguanosine
  modified_base 10: mod_base = OTHER; note = 2'-O-methylguanosine
  modified_base 11: mod_base = OTHER; note = 2'-fluoroadenosine
  modified_base 12: mod_base = OTHER; note = 2'-O-methyluridine
  modified_base 13: mod_base = OTHER; note = 2'-fluoroguanosine
  modified_base 14: mod_base = OTHER; note = 2'-O-methyladenosine
  modified_base 15: mod_base = OTHER; note = 2'-fluorocytidine
  modified_base 16: mod_base = OTHER; note = 2'-O-methylguanosine
  modified_base 17: mod_base = OTHER; note = 2'-fluoroadenosine
  modified_base 18: mod_base = OTHER; note = 2'-O-methyluridine
  modified_base 19: mod_base = OTHER; note = 2'-fluorouridine with phosphorothioate linkage
  modified_base 20: mod_base = OTHER; note = 2'-O-methylguanosine with phosphorothioate linkage
  modified_base 21: mod_base = OTHER; note = 2'-O-methyluridine
acgccagaggatgacgattgt

SEQ ID NO: 2573 - RNA, 21 nt, synthetic construct
  source 1..21: mol_type = other RNA
  modified_base 1: mod_base = OTHER; note = 2'-O-methyladenosine with phosphorothioate linkage
  modified_base 2: mod_base = OTHER; note = 2'-O-methyluridine with phosphorothioate linkage
  modified_base 3: mod_base = OTHER; note = 2'-fluorouridine
  modified_base 4: mod_base = OTHER; note = 2'-O-methylcytidine
  modified_base 5: mod_base = OTHER; note = 2'-fluoroadenosine
  modified_base 6: mod_base = OTHER; note = 2'-O-methyluridine
  modified_base 7: mod_base = OTHER; note = 2'-fluoroadenosine
  modified_base 8: mod_base = OTHER; note = 2'-O-methyluridine
  modified_base 9: mod_base = OTHER; note = 2'-fluorouridine
  modified_base 10: mod_base = OTHER; note = 2'-O-methylguanosine
  modified_base 11: mod_base = OTHER; note = 2'-fluorocytidine
  modified_base 12: mod_base = OTHER; note = 2'-O-methyladenosine
  modified_base 13: mod_base = OTHER; note = 2'-fluoroguanosine
  modified_base 14: mod_base = OTHER; note = 2'-O-methyladenosine
  modified_base 15: mod_base = OTHER; note = 2'-fluorocytidine
  modified_base 16: mod_base = OTHER; note = 2'-O-methyladenosine
  modified_base 17: mod_base = OTHER; note = 2'-fluoroadenosine
  modified_base 18: mod_base = OTHER; note = 2'-O-methyluridine
  modified_base 19: mod_base = OTHER; note = 2'-fluoroadenosine with phosphorothioate linkage
  modified_base 20: mod_base = OTHER; note = 2'-O-methyladenosine with phosphorothioate linkage
  modified_base 21: mod_base = OTHER; note = 2'-O-methylcytidine
attcatattgcagacaataac

SEQ ID NO: 2574 - RNA, 21 nt, synthetic construct
  source 1..21: mol_type = other RNA
  modified_base 1: mod_base = OTHER; note = 2'-O-methylguanosine with phosphorothioate linkage
  modified_base 2: mod_base = OTHER; note = 2'-O-methylguanosine with phosphorothioate linkage
  modified_base 3: mod_base = OTHER; note = 2'-fluorouridine
  modified_base 4: mod_base = OTHER; note = 2'-O-methyluridine
  modified_base 5: mod_base = OTHER; note = 2'-fluoroguanosine
  modified_base 6: mod_base = OTHER; note = 2'-O-methylguanosine
  modified_base 7: mod_base = OTHER; note = 2'-fluorocytidine
  modified_base 8: mod_base = OTHER; note = 2'-O-methyladenosine
  modified_base 9: mod_base = OTHER; note = 2'-fluorouridine
  modified_base 10: mod_base = OTHER; note = 2'-O-methylcytidine
  modified_base 11: mod_base = OTHER; note = 2'-fluorocytidine
  modified_base 12: mod_base = OTHER; note = 2'-O-methyladenosine
  modified_base 13: mod_base = OTHER; note = 2'-fluoroguanosine
  modified_base 14: mod_base = OTHER; note = 2'-O-methylguanosine
  modified_base 15: mod_base = OTHER; note = 2'-fluorouridine
  modified_base 16: mod_base = OTHER; note = 2'-O-methylcytidine
  modified_base 17: mod_base = OTHER; note = 2'-fluoroadenosine
  modified_base 18: mod_base = OTHER; note = 2'-O-methylcytidine
  modified_base 19: mod_base = OTHER; note = 2'-fluoroguanosine with phosphorothioate linkage
  modified_base 20: mod_base = OTHER; note = 2'-O-methylcytidine with phosphorothioate linkage
  modified_base 21: mod_base = OTHER; note = 2'-O-methylcytidine
ggttggcatccaggtcacgcc

SEQ ID NO: 2575 - RNA, 21 nt, synthetic construct
  source 1..21: mol_type = other RNA
  modified_base 1: mod_base = OTHER; note = 2'-O-methylguanosine with phosphorothioate linkage
  modified_base 2: mod_base = OTHER; note = 2'-O-methyluridine with phosphorothioate linkage
  modified_base 3: mod_base = OTHER; note = 2'-fluoroguanosine
  modified_base 4: mod_base = OTHER; note = 2'-O-methylguanosine
  modified_base 5: mod_base = OTHER; note = 2'-fluorocytidine
  modified_base 6: mod_base = OTHER; note = 2'-O-methylcytidine
  modified_base 7: mod_base = OTHER; note = 2'-fluoroadenosine
  modified_base 8: mod_base = OTHER; note = 2'-O-methyladenosine
  modified_base 9: mod_base = OTHER; note = 2'-fluoroguanosine
  modified_base 10: mod_base = OTHER; note = 2'-O-methyluridine
  modified_base 11: mod_base = OTHER; note = 2'-fluorouridine
  modified_base 12: mod_base = OTHER; note = 2'-O-methylcytidine
  modified_base 13: mod_base = OTHER; note = 2'-fluoroadenosine
  modified_base 14: mod_base = OTHER; note = 2'-O-methyladenosine
  modified_base 15: mod_base = OTHER; note = 2'-fluoroguanosine
  modified_base 16: mod_base = OTHER; note = 2'-O-methyladenosine
  modified_base 17: mod_base = OTHER; note = 2'-fluoroguanosine
  modified_base 18: mod_base = OTHER; note = 2'-O-methylcytidine
  modified_base 19: mod_base = OTHER; note = 2'-fluoroguanosine with phosphorothioate linkage
  modified_base 20: mod_base = OTHER; note = 2'-O-methyladenosine with phosphorothioate linkage
  modified_base 21: mod_base = OTHER; note = 2'-O-methylguanosine
gtggccaagttcaagagcgag

SEQ ID NO: 2576 - RNA, 21 nt, synthetic construct
  source 1..21: mol_type = other RNA
  modified_base 1: mod_base = OTHER; note = 2'-O-methyladenosine with phosphorothioate linkage
  modified_base 2: mod_base = OTHER; note = 2'-O-methyluridine with phosphorothioate linkage
  modified_base 3: mod_base = OTHER; note = 2'-fluoroguanosine
  modified_base 4: mod_base = OTHER; note = 2'-O-methylguanosine
  modified_base 5: mod_base = OTHER; note = 2'-fluorocytidine
  modified_base 6: mod_base = OTHER; note = 2'-O-methyladenosine
  modified_base 7: mod_base = OTHER; note = 2'-fluorocytidine
  modified_base 8: mod_base = OTHER; note = 2'-O-methyladenosine
  modified_base 9: mod_base = OTHER; note = 2'-fluoroguanosine
  modified_base 10: mod_base = OTHER; note = 2'-O-methyluridine
  modified_base 11: mod_base = OTHER; note = 2'-fluoroguanosine
  modified_base 12: mod_base = OTHER; note = 2'-O-methyladenosine
  modified_base 13: mod_base = OTHER; note = 2'-fluorouridine
  modified_base 14: mod_base = OTHER; note = 2'-O-methylcytidine
  modified_base 15: mod_base = OTHER; note = 2'-fluoroguanosine
  modified_base 16: mod_base = OTHER; note = 2'-O-methyladenosine
  modified_base 17: mod_base = OTHER; note = 2'-fluoroguanosine
  modified_base 18: mod_base = OTHER; note = 2'-O-methyluridine
  modified_base 19: mod_base = OTHER; note = 2'-fluoroguanosine with phosphorothioate linkage
  modified_base 20: mod_base = OTHER; note = 2'-O-methyluridine with phosphorothioate linkage
  modified_base 21: mod_base = OTHER; note = 2'-O-methyluridine
atggcacagtgatcgagtgtt

SEQ ID NO: 2577 - RNA, 21 nt, synthetic construct
  source 1..21: mol_type = other RNA
  modified_base 1: mod_base = OTHER; note = 2'-O-methyluridine with phosphorothioate linkage
  modified_base 2: mod_base = OTHER; note = 2'-O-methyladenosine with phosphorothioate linkage
  modified_base 3: mod_base = OTHER; note = 2'-fluorocytidine
  modified_base 4: mod_base = OTHER; note = 2'-O-methyladenosine
  modified_base 5: mod_base = OTHER; note = 2'-fluoroadenosine
  modified_base 6: mod_base = OTHER; note = 2'-O-methylguanosine
  modified_base 7: mod_base = OTHER; note = 2'-fluorouridine
  modified_base 8: mod_base = OTHER; note = 2'-O-methylguanosine
  modified_base 9: mod_base = OTHER; note = 2'-fluorocytidine
  modified_base 10: mod_base = OTHER; note = 2'-O-methyladenosine
  modified_base 11: mod_base = OTHER; note = 2'-fluoroadenosine
  modified_base 12: mod_base = OTHER; note = 2'-O-methylcytidine
  modified_base 13: mod_base = OTHER; note = 2'-fluorocytidine
  modified_base 14: mod_base = OTHER; note = 2'-O-methyluridine
  modified_base 15: mod_base = OTHER; note = 2'-fluoroguanosine
  modified_base 16: mod_base = OTHER; note = 2'-O-methyluridine
  modified_base 17: mod_base = OTHER; note = 2'-fluoroguanosine
  modified_base 18: mod_base = OTHER; note = 2'-O-methylcytidine
  modified_base 19: mod_base = OTHER; note = 2'-fluoroguanosine with phosphorothioate linkage
  modified_base 20: mod_base = OTHER; note = 2'-O-methyladenosine with phosphorothioate linkage
  modified_base 21: mod_base = OTHER; note = 2'-O-methylcytidine
tacaagtgcaacctgtgcgac

SEQ ID NO: 2578 - RNA, 21 nt, synthetic construct
  source 1..21: mol_type = other RNA
  modified_base 1: mod_base = OTHER; note = 2'-O-methyladenosine with phosphorothioate linkage
  modified_base 2: mod_base = OTHER; note = 2'-O-methylguanosine with phosphorothioate linkage
  modified_base 3: mod_base = OTHER; note = 2'-fluoroadenosine
  modified_base 4: mod_base = OTHER; note = 2'-O-methyluridine
  modified_base 5: mod_base = OTHER; note = 2'-fluorocytidine
  modified_base 6: mod_base = OTHER; note = 2'-O-methylcytidine
  modified_base 7: mod_base = OTHER; note = 2'-fluorocytidine
  modified_base 8: mod_base = OTHER; note = 2'-O-methyluridine
  modified_base 9: mod_base = OTHER; note = 2'-fluorouridine
  modified_base 10: mod_base = OTHER; note = 2'-O-methylcytidine
  modified_base 11: mod_base = OTHER; note = 2'-fluorocytidine
  modified_base 12: mod_base = OTHER; note = 2'-O-methyluridine
  modified_base 13: mod_base = OTHER; note = 2'-fluorouridine
  modified_base 14: mod_base = OTHER; note = 2'-O-methyladenosine
  modified_base 15: mod_base = OTHER; note = 2'-fluoroguanosine
  modified_base 16: mod_base = OTHER; note = 2'-O-methylcytidine
  modified_base 17: mod_base = OTHER; note = 2'-fluorouridine
  modified_base 18: mod_base = OTHER; note = 2'-O-methyluridine
  modified_base 19: mod_base = OTHER; note = 2'-fluorocytidine with phosphorothioate linkage
  modified_base 20: mod_base = OTHER; note = 2'-O-methylguanosine with phosphorothioate linkage
  modified_base 21: mod_base = OTHER; note = 2'-O-methylguanosine
agatcccttccttagcttcgg

SEQ ID NO: 2579 - RNA, 21 nt, synthetic construct
  source 1..21: mol_type = other RNA
  modified_base 1: mod_base = OTHER; note = 2'-O-methylcytidine with phosphorothioate linkage
  modified_base 2: mod_base = OTHER; note = 2'-O-methyladenosine with phosphorothioate linkage
  modified_base 3: mod_base = OTHER; note = 2'-fluorouridine
  modified_base 4: mod_base = OTHER; note = 2'-O-methylcytidine
  modified_base 5: mod_base = OTHER; note = 2'-fluoroadenosine
  modified_base 6: mod_base = OTHER; note = 2'-O-methyladenosine
  modified_base 7: mod_base = OTHER; note = 2'-fluoroguanosine
  modified_base 8: mod_base = OTHER; note = 2'-O-methylcytidine
  modified_base 9: mod_base = OTHER; note = 2'-fluorouridine
  modified_base 10: mod_base = OTHER; note = 2'-O-methylcytidine
  modified_base 11: mod_base = OTHER; note = 2'-fluoroguanosine
  modified_base 12: mod_base = OTHER; note = 2'-O-methyladenosine
  modified_base 13: mod_base = OTHER; note = 2'-fluoroguanosine
  modified_base 14: mod_base = OTHER; note = 2'-O-methyladenosine
  modified_base 15: mod_base = OTHER; note = 2'-fluoroadenosine
  modified_base 16: mod_base = OTHER; note = 2'-O-methylguanosine
  modified_base 17: mod_base = OTHER; note = 2'-fluoroguanosine
  modified_base 18: mod_base = OTHER; note = 2'-O-methyladenosine
  modified_base 19: mod_base = OTHER; note = 2'-fluoroguanosine with phosphorothioate linkage
  modified_base 20: mod_base = OTHER; note = 2'-O-methyluridine with phosphorothioate linkage
  modified_base 21: mod_base = OTHER; note = 2'-O-methyluridine
catcaagctcgagaaggagtt

SEQ ID NO: 2580 - RNA, 21 nt, synthetic construct
  source 1..21: mol_type = other RNA
  modified_base 1: mod_base = OTHER; note = 2'-O-methyluridine with phosphorothioate linkage
  modified_base 2: mod_base = OTHER; note = 2'-O-methylcytidine with phosphorothioate linkage
  modified_base 3: mod_base = OTHER; note = 2'-fluorocytidine
  modified_base 4: mod_base = OTHER; note = 2'-O-methyladenosine
  modified_base 5: mod_base = OTHER; note = 2'-fluoroguanosine
  modified_base 6: mod_base = OTHER; note = 2'-O-methyladenosine
  modified_base 7: mod_base = OTHER; note = 2'-fluorocytidine
  modified_base 8: mod_base = OTHER; note = 2'-O-methyluridine
  modified_base 9: mod_base = OTHER; note = 2'-fluorocytidine
  modified_base 10: mod_base = OTHER; note = 2'-O-methylcytidine
  modified_base 11: mod_base = OTHER; note = 2'-fluorouridine
  modified_base 12: mod_base = OTHER; note = 2'-O-methylguanosine
  modified_base 13: mod_base = OTHER; note = 2'-fluoroadenosine
  modified_base 14: mod_base = OTHER; note = 2'-O-methylcytidine
  modified_base 15: mod_base = OTHER; note = 2'-fluoroguanosine
  modified_base 16: mod_base = OTHER; note = 2'-O-methyluridine
  modified_base 17: mod_base = OTHER; note = 2'-fluorouridine
  modified_base 18: mod_base = OTHER; note = 2'-O-methylcytidine
  modified_base 19: mod_base = OTHER; note = 2'-fluoroadenosine with phosphorothioate linkage
  modified_base 20: mod_base = OTHER; note = 2'-O-methyladenosine with phosphorothioate linkage
  modified_base 21: mod_base = OTHER; note = 2'-O-methylguanosine
tccagactcctgacgttcaag

SEQ ID NO: 2581 - RNA, 21 nt, synthetic construct
  source 1..21: mol_type = other RNA
  modified_base 1: mod_base = OTHER; note = 2'-O-methylguanosine with phosphorothioate linkage
  modified_base 2: mod_base = OTHER; note = 2'-O-methyladenosine with phosphorothioate linkage
  modified_base 3: mod_base = OTHER; note = 2'-fluoroguanosine
  modified_base 4: mod_base = OTHER; note = 2'-O-methylcytidine
  modified_base 5: mod_base = OTHER; note = 2'-fluorouridine
  modified_base 6: mod_base = OTHER; note = 2'-O-methylguanosine
  modified_base 7: mod_base = OTHER; note = 2'-fluoroguanosine
  modified_base 8: mod_base = OTHER; note = 2'-O-methyladenosine
  modified_base 9: mod_base = OTHER; note = 2'-fluorocytidine
  modified_base 10: mod_base = OTHER; note = 2'-O-methylguanosine
  modified_base 11: mod_base = OTHER; note = 2'-fluoroguanosine
  modified_base 12: mod_base = OTHER; note = 2'-O-methyladenosine
  modified_base 13: mod_base = OTHER; note = 2'-fluoroguanosine
  modified_base 14: mod_base = OTHER; note = 2'-O-methylguanosine
  modified_base 15: mod_base = OTHER; note = 2'-fluoroguanosine
  modified_base 16: mod_base = OTHER; note = 2'-O-methyladenosine
  modified_base 17: mod_base = OTHER; note = 2'-fluorouridine
  modified_base 18: mod_base = OTHER; note = 2'-O-methylcytidine
  modified_base 19: mod_base = OTHER; note = 2'-fluorouridine with phosphorothioate linkage
  modified_base 20: mod_base = OTHER; note = 2'-O-methylcytidine with phosphorothioate linkage
  modified_base 21: mod_base = OTHER; note = 2'-O-methylguanosine
gagctggacggagggatctcg

SEQ ID NO: 2582 - RNA, 21 nt, synthetic construct
  source 1..21: mol_type = other RNA
  modified_base 1: mod_base = OTHER; note = 2'-O-methyladenosine with phosphorothioate linkage
  modified_base 2: mod_base = OTHER; note = 2'-O-methylcytidine with phosphorothioate linkage
  modified_base 3: mod_base = OTHER; note = 2'-fluoroadenosine
  modified_base 4: mod_base = OTHER; note = 2'-O-methylguanosine
  modified_base 5: mod_base = OTHER; note = 2'-fluoroguanosine
  modified_base 6: mod_base = OTHER; note = 2'-O-methylguanosine
  modified_base 7: mod_base = OTHER; note = 2'-fluoroadenosine
  modified_base 8: mod_base = OTHER; note = 2'-O-methylcytidine
  modified_base 9: mod_base = OTHER; note = 2'-fluoroadenosine
  modified_base 10: mod_base = OTHER; note = 2'-O-methylcytidine
  modified_base 11: mod_base = OTHER; note = 2'-fluorouridine
  modified_base 12: mod_base = OTHER; note = 2'-O-methyluridine
  modified_base 13: mod_base = OTHER; note = 2'-fluoroguanosine
  modified_base 14: mod_base = OTHER; note = 2'-O-methylcytidine
  modified_base 15: mod_base = OTHER; note = 2'-fluoroguanosine
  modified_base 16: mod_base = OTHER; note = 2'-O-methyladenosine
  modified_base 17: mod_base = OTHER; note = 2'-fluorocytidine
  modified_base 18: mod_base = OTHER; note = 2'-O-methylguanosine
  modified_base 19: mod_base = OTHER; note = 2'-fluoroadenosine with phosphorothioate linkage
  modified_base 20: mod_base = OTHER; note = 2'-O-methyladenosine with phosphorothioate linkage
  modified_base 21: mod_base = OTHER; note = 2'-O-methylguanosine
acagggacacttgcgacgaag

SEQ ID NO: 2583 - RNA, 21 nt, synthetic construct
  source 1..21: mol_type = other RNA
  modified_base 1: mod_base = OTHER; note = 2'-O-methylcytidine with phosphorothioate linkage
  modified_base 2: mod_base = OTHER; note = 2'-O-methylcytidine with phosphorothioate linkage
  modified_base 3: mod_base = OTHER; note = 2'-fluorouridine
  modified_base 4: mod_base = OTHER; note = 2'-O-methyluridine
  modified_base 5: mod_base = OTHER; note = 2'-fluorocytidine
  modified_base 6: mod_base = OTHER; note = 2'-O-methylcytidine
  modified_base 7: mod_base = OTHER; note = 2'-fluorouridine
  modified_base 8: mod_base = OTHER; note = 2'-O-methyluridine
  modified_base 9: mod_base = OTHER; note = 2'-fluoroadenosine
  modified_base 10: mod_base = OTHER; note = 2'-O-methylguanosine
  modified_base 11: mod_base = OTHER; note = 2'-fluorocytidine
  modified_base 12: mod_base = OTHER; note = 2'-O-methyluridine
  modified_base 13: mod_base = OTHER; note = 2'-fluorouridine
  modified_base 14: mod_base = OTHER; note = 2'-O-methylcytidine
  modified_base 15: mod_base = OTHER; note = 2'-fluoroguanosine
  modified_base 16: mod_base = OTHER; note = 2'-O-methylguanosine
  modified_base 17: mod_base = OTHER; note = 2'-fluoroadenosine
  modified_base 18: mod_base = OTHER; note = 2'-O-methylguanosine
  modified_base 19: mod_base = OTHER; note = 2'-fluoroadenosine with phosphorothioate linkage
  modified_base 20: mod_base = OTHER; note = 2'-O-methylcytidine with phosphorothioate linkage
  modified_base 21: mod_base = OTHER; note = 2'-O-methyluridine
ccttccttagcttcggagact

SEQ ID NO: 2584 - RNA, 21 nt, synthetic construct
  source 1..21: mol_type = other RNA
  modified_base 1: mod_base = OTHER; note = 2'-O-methyladenosine with phosphorothioate linkage
  modified_base 2: mod_base = OTHER; note = 2'-O-methylguanosine with phosphorothioate linkage
  modified_base 3: mod_base = OTHER; note = 2'-fluoroguanosine
  modified_base 4: mod_base = OTHER; note = 2'-O-methyluridine
  modified_base 5: mod_base = OTHER; note = 2'-fluorocytidine
  modified_base 6: mod_base = OTHER; note = 2'-O-methylcytidine
  modified_base 7: mod_base = OTHER; note = 2'-fluorouridine
  modified_base 8: mod_base = OTHER; note = 2'-O-methylguanosine
  modified_base 9: mod_base = OTHER; note = 2'-fluoroguanosine
  modified_base 10: mod_base = OTHER; note = 2'-O-methylguanosine
  modified_base 11: mod_base = OTHER; note = 2'-fluorocytidine
  modified_base 12: mod_base = OTHER; note = 2'-O-methylguanosine
  modified_base 13: mod_base = OTHER; note = 2'-fluoroadenosine
  modified_base 14: mod_base = OTHER; note = 2'-O-methylguanosine
  modified_base 15: mod_base = OTHER; note = 2'-fluoroadenosine
  modified_base 16: mod_base = OTHER; note = 2'-O-methyladenosine
  modified_base 17: mod_base = OTHER; note = 2'-fluoroguanosine
  modified_base 18: mod_base = OTHER; note = 2'-O-methylcytidine
  modified_base 19: mod_base = OTHER; note = 2'-fluoroadenosine with phosphorothioate linkage
  modified_base 20: mod_base = OTHER; note = 2'-O-methyluridine with phosphorothioate linkage
  modified_base 21: mod_base = OTHER; note = 2'-O-methyladenosine
aggtcctgggcgagaagcata

SEQ ID NO: 2585 - RNA, 21 nt, synthetic construct
  source 1..21: mol_type = other RNA
  modified_base 1: mod_base = OTHER; note = 2'-O-methyladenosine with phosphorothioate linkage
  modified_base 2: mod_base = OTHER; note = 2'-O-methyluridine with phosphorothioate linkage
  modified_base 3: mod_base = OTHER; note = 2'-fluorouridine
  modified_base 4: mod_base = OTHER; note = 2'-O-methyluridine
  modified_base 5: mod_base = OTHER; note = 2'-fluorocytidine
  modified_base 6: mod_base = OTHER; note = 2'-O-methyladenosine
  modified_base 7: mod_base = OTHER; note = 2'-fluoroguanosine
  modified_base 8: mod_base = OTHER; note = 2'-O-methyladenosine
  modified_base 9: mod_base = OTHER; note = 2'-fluoroguanosine
  modified_base 10: mod_base = OTHER; note = 2'-O-methylcytidine
  modified_base 11: mod_base = OTHER; note = 2'-fluoroadenosine
  modified_base 12: mod_base = OTHER; note = 2'-O-methyladenosine
  modified_base 13: mod_base = OTHER; note = 2'-fluorocytidine
  modified_base 14: mod_base = OTHER; note = 2'-O-methylcytidine
  modified_base 15: mod_base = OTHER; note = 2'-fluorouridine
  modified_base 16: mod_base = OTHER; note = 2'-O-methylguanosine
  modified_base 17: mod_base = OTHER; note = 2'-fluoroguanosine
  modified_base 18: mod_base = OTHER; note = 2'-O-methyluridine
  modified_base 19: mod_base = OTHER; note = 2'-fluoroguanosine with phosphorothioate linkage
  modified_base 20: mod_base = OTHER; note = 2'-O-methylguanosine with phosphorothioate linkage
  modified_base 21: mod_base = OTHER; note = 2'-O-methyluridine
atttcagagcaacctggtggt

SEQ ID NO: 2586 - RNA, 21 nt, synthetic construct
  source 1..21: mol_type = other RNA
  modified_base 1: mod_base = OTHER; note = 2'-O-methyladenosine with phosphorothioate linkage
  modified_base 2: mod_base = OTHER; note = 2'-O-methylguanosine with phosphorothioate linkage
  modified_base 3: mod_base = OTHER; note = 2'-fluoroadenosine
  modified_base 4: mod_base = OTHER; note = 2'-O-methylguanosine
  modified_base 5: mod_base = OTHER; note = 2'-fluoroguanosine
  modified_base 6: mod_base = OTHER; note = 2'-O-methyladenosine
  modified_base 7: mod_base = OTHER; note = 2'-fluorouridine
  modified_base 8: mod_base = OTHER; note = 2'-O-methylguanosine
  modified_base 9: mod_base = OTHER; note = 2'-fluoroadenosine
  modified_base 10: mod_base = OTHER; note = 2'-O-methylcytidine
  modified_base 11: mod_base = OTHER; note = 2'-fluoroguanosine
  modified_base 12: mod_base = OTHER; note = 2'-O-methyladenosine
  modified_base 13: mod_base = OTHER; note = 2'-fluorouridine
  modified_base 14: mod_base = OTHER; note = 2'-O-methyluridine
  modified_base 15: mod_base = OTHER; note = 2'-fluoroguanosine
  modified_base 16: mod_base = OTHER; note = 2'-O-methyluridine
  modified_base 17: mod_base = OTHER; note = 2'-fluorouridine
  modified_base 18: mod_base = OTHER; note = 2'-O-methyluridine
  modified_base 19: mod_base = OTHER; note = 2'-fluoroadenosine with phosphorothioate linkage
  modified_base 20: mod_base = OTHER; note = 2'-O-methyluridine with phosphorothioate linkage
  modified_base 21: mod_base = OTHER; note = 2'-O-methylcytidine
agaggatgacgattgtttatc

SEQ ID NO: 2587 - RNA, 21 nt, synthetic construct
  source 1..21: mol_type = other RNA
  modified_base 1: mod_base = OTHER; note = 2'-O-methyluridine with phosphorothioate linkage
  modified_base 2: mod_base = OTHER; note = 2'-O-methylguanosine with phosphorothioate linkage
  modified_base 3: mod_base = OTHER; note = 2'-fluoroguanosine
  modified_base 4: mod_base = OTHER; note = 2'-O-methyluridine
  modified_base 5: mod_base = OTHER; note = 2'-fluoroguanosine
  modified_base 6: mod_base = OTHER; note = 2'-O-methylguanosine
  modified_base 7: mod_base = OTHER; note = 2'-fluorocytidine
  modified_base 8: mod_base = OTHER; note = 2'-O-methylcytidine
  modified_base 9: mod_base = OTHER; note = 2'-fluoroadenosine
  modified_base 10: mod_base = OTHER; note = 2'-O-methyladenosine
  modified_base 11: mod_base = OTHER; note = 2'-fluoroguanosine
  modified_base 12: mod_base = OTHER; note = 2'-O-methyluridine
  modified_base 13: mod_base = OTHER; note = 2'-fluorouridine
  modified_base 14: mod_base = OTHER; note = 2'-O-methylcytidine
  modified_base 15: mod_base = OTHER; note = 2'-fluoroadenosine
  modified_base 16: mod_base = OTHER; note = 2'-O-methyladenosine
  modified_base 17: mod_base = OTHER; note = 2'-fluoroguanosine
  modified_base 18: mod_base = OTHER; note = 2'-O-methyladenosine
  modified_base 19: mod_base = OTHER; note = 2'-fluoroguanosine with phosphorothioate linkage
  modified_base 20: mod_base = OTHER; note = 2'-O-methylcytidine with phosphorothioate linkage
  modified_base 21: mod_base = OTHER; note = 2'-O-methylguanosine
tggtggccaagttcaagagcg

SEQ ID NO: 2588 - RNA, 21 nt, synthetic construct
  source 1..21: mol_type = other RNA
  modified_base 1: mod_base = OTHER; note = 2'-O-methylguanosine with phosphorothioate linkage
  modified_base 2: mod_base = OTHER; note = 2'-O-methylcytidine with phosphorothioate linkage
  modified_base 3: mod_base = OTHER; note = 2'-fluorocytidine
  modified_base 4: mod_base = OTHER; note = 2'-O-methylguanosine
  modified_base 5: mod_base = OTHER; note = 2'-fluoroguanosine
  modified_base 6: mod_base = OTHER; note = 2'-O-methylcytidine
  modified_base 7: mod_base = OTHER; note = 2'-fluorocytidine
  modified_base 8: mod_base = OTHER; note = 2'-O-methylcytidine
  modified_base 9: mod_base = OTHER; note = 2'-fluoroadenosine
  modified_base 10: mod_base = OTHER; note = 2'-O-methylguanosine
  modified_base 11: mod_base = OTHER; note = 2'-fluorocytidine
  modified_base 12: mod_base = OTHER; note = 2'-O-methylcytidine
  modified_base 13: mod_base = OTHER; note = 2'-fluorocytidine
  modified_base 14: mod_base = OTHER; note = 2'-O-methyluridine
  modified_base 15: mod_base = OTHER; note = 2'-fluoroadenosine
  modified_base 16: mod_base = OTHER; note = 2'-O-methyluridine
  modified_base 17: mod_base = OTHER; note = 2'-fluoroguanosine
  modified_base 18: mod_base = OTHER; note = 2'-O-methylcytidine
  modified_base 19: mod_base = OTHER; note = 2'-fluoroadenosine with phosphorothioate linkage
  modified_base 20: mod_base = OTHER; note = 2'-O-methyladenosine with phosphorothioate linkage
  modified_base 21: mod_base = OTHER; note = 2'-O-methyladenosine
gccggcccagccctatgcaaa

SEQ ID NO: 2589 - RNA, 21 nt, synthetic construct
  source 1..21: mol_type = other RNA
  modified_base 1: mod_base = OTHER; note = 2'-O-methyluridine with phosphorothioate linkage
  modified_base 2: mod_base = OTHER; note = 2'-O-methylcytidine with phosphorothioate linkage
  modified_base 3: mod_base = OTHER; note = 2'-fluoroadenosine
  modified_base 4: mod_base = OTHER; note = 2'-O-methyluridine
  modified_base 5: mod_base = OTHER; note = 2'-fluoroadenosine
  modified_base 6: mod_base = OTHER; note = 2'-O-methyluridine
  modified_base 7: mod_base = OTHER; note = 2'-fluorouridine
  modified_base 8: mod_base = OTHER; note = 2'-O-methylguanosine
  modified_base 9: mod_base = OTHER; note = 2'-fluorocytidine
  modified_base 10: mod_base = OTHER; note = 2'-O-methyladenosine
  modified_base 11: mod_base = OTHER; note = 2'-fluoroguanosine
  modified_base 12: mod_base = OTHER; note = 2'-O-methyladenosine
  modified_base 13: mod_base = OTHER; note = 2'-fluorocytidine
  modified_base 14: mod_base = OTHER; note = 2'-O-methyladenosine
  modified_base 15: mod_base = OTHER; note = 2'-fluoroadenosine
  modified_base 16: mod_base = OTHER; note = 2'-O-methyluridine
  modified_base 17: mod_base = OTHER; note = 2'-fluoroadenosine
  modified_base 18: mod_base = OTHER; note = 2'-O-methyladenosine
  modified_base 19: mod_base = OTHER; note = 2'-fluorocytidine with phosphorothioate linkage
  modified_base 20: mod_base = OTHER; note = 2'-O-methylcytidine with phosphorothioate linkage
  modified_base 21: mod_base = OTHER; note = 2'-O-methylcytidine
tcatattgcagacaataaccc

SEQ ID NO: 2590 - RNA, 21 nt, synthetic construct
  source 1..21: mol_type = other RNA
  modified_base 1: mod_base = OTHER; note = 2'-O-methyladenosine with phosphorothioate linkage
  modified_base 2: mod_base = OTHER; note = 2'-O-methylguanosine with phosphorothioate linkage
  modified_base 3: mod_base = OTHER; note = 2'-fluorocytidine
  modified_base 4: mod_base = OTHER; note = 2'-O-methylcytidine
  modified_base 5: mod_base = OTHER; note = 2'-fluoroadenosine
  modified_base 6: mod_base = OTHER; note = 2'-O-methylcytidine
  modified_base 7: mod_base = OTHER; note = 2'-fluorocytidine
  modified_base 8: mod_base = OTHER; note = 2'-O-methyluridine
  modified_base 9: mod_base = OTHER; note = 2'-fluorocytidine
  modified_base 10: mod_base = OTHER; note = 2'-O-methyluridine
  modified_base 11: mod_base = OTHER; note = 2'-fluorocytidine
  modified_base 12: mod_base = OTHER; note = 2'-O-methylcytidine
  modified_base 13: mod_base = OTHER; note = 2'-fluoroadenosine
  modified_base 14: mod_base = OTHER; note = 2'-O-methyluridine
  modified_base 15: mod_base = OTHER; note = 2'-fluoroguanosine
  modified_base 16: mod_base = OTHER; note = 2'-O-methylguanosine
  modified_base 17: mod_base = OTHER; note = 2'-fluoroguanosine
  modified_base 18: mod_base = OTHER; note = 2'-O-methyladenosine
  modified_base 19: mod_base = OTHER; note = 2'-fluorouridine with phosphorothioate linkage
  modified_base 20: mod_base = OTHER; note = 2'-O-methyluridine with phosphorothioate linkage
  modified_base 21: mod_base = OTHER; note = 2'-O-methylcytidine
agccacctctccatgggattc

SEQ ID NO: 2591 - RNA, 21 nt, synthetic construct
  source 1..21: mol_type = other RNA
  modified_base 1: mod_base = OTHER; note = 2'-O-methyluridine with phosphorothioate linkage
  modified_base 2: mod_base = OTHER; note = 2'-O-methylcytidine with phosphorothioate linkage
  modified_base 3: mod_base = OTHER; note = 2'-fluorouridine
  modified_base 4: mod_base = OTHER; note = 2'-O-methyladenosine
  modified_base 5: mod_base = OTHER; note = 2'-fluoroadenosine
  modified_base 6: mod_base = OTHER; note = 2'-O-methylguanosine
  modified_base 7: mod_base = OTHER; note = 2'-fluorocytidine
  modified_base 8: mod_base = OTHER; note = 2'-O-methylguanosine
  modified_base 9: mod_base = OTHER; note = 2'-fluorocytidine
  modified_base 10: mod_base = OTHER; note = 2'-O-methyladenosine
  modified_base 11: mod_base = OTHER; note = 2'-fluorouridine
  modified_base 12: mod_base = OTHER; note = 2'-O-methylcytidine
  modified_base 13: mod_base = OTHER; note = 2'-fluoroadenosine
  modified_base 14: mod_base = OTHER; note = 2'-O-methyladenosine
  modified_base 15: mod_base = OTHER; note = 2'-fluoroguanosine
  modified_base 16: mod_base = OTHER; note = 2'-O-methylcytidine
  modified_base 17: mod_base = OTHER; note = 2'-fluorouridine
  modified_base 18: mod_base = OTHER; note = 2'-O-methylcytidine
  modified_base 19: mod_base = OTHER; note = 2'-fluoroguanosine with phosphorothioate linkage
  modified_base 20: mod_base = OTHER; note = 2'-O-methyladenosine with phosphorothioate linkage
  modified_base 21: mod_base = OTHER; note = 2'-O-methylguanosine
tctaagcgcatcaagctcgag

SEQ ID NO: 2592 - RNA, 21 nt, synthetic construct
  source 1..21: mol_type = other RNA
  modified_base 1: mod_base = OTHER; note = 2'-O-methyladenosine with phosphorothioate linkage
  modified_base 2: mod_base = OTHER; note = 2'-O-methylguanosine with phosphorothioate linkage
  modified_base 3: mod_base = OTHER; note = 2'-fluoroguanosine
  modified_base 4: mod_base = OTHER; note = 2'-O-methylguanosine
  modified_base 5: mod_base = OTHER; note = 2'-fluoroadenosine
  modified_base 6: mod_base = OTHER; note = 2'-O-methyladenosine
  modified_base 7: mod_base = OTHER; note = 2'-fluorocytidine
  modified_base 8: mod_base = OTHER; note = 2'-O-methyladenosine
  modified_base 9: mod_base = OTHER; note = 2'-fluorocytidine
  modified_base 10: mod_base = OTHER; note = 2'-O-methylguanosine
  modified_base 11: mod_base = OTHER; note = 2'-fluorouridine
  modified_base 12: mod_base = OTHER; note = 2'-O-methylcytidine
  modified_base 13: mod_base = OTHER; note = 2'-fluorouridine
  modified_base 14: mod_base = OTHER; note = 2'-O-methyladenosine
  modified_base 15: mod_base = OTHER; note = 2'-fluoroguanosine
  modified_base 16: mod_base = OTHER; note = 2'-O-methylcytidine
  modified_base 17: mod_base = OTHER; note = 2'-fluorocytidine
  modified_base 18: mod_base = OTHER; note = 2'-O-methylcytidine
  modified_base 19: mod_base = OTHER; note = 2'-fluoroadenosine with phosphorothioate linkage
  modified_base 20: mod_base = OTHER; note = 2'-O-methylcytidine with phosphorothioate linkage
  modified_base 21: mod_base = OTHER; note = 2'-O-methylcytidine
agggaacacgtctagcccacc

SEQ ID NO: 2593 - RNA, 21 nt, synthetic construct
  source 1..21: mol_type = other RNA
  modified_base 1: mod_base = OTHER; note = 2'-O-methylcytidine with phosphorothioate linkage
  modified_base 2: mod_base = OTHER; note = 2'-O-methylcytidine with phosphorothioate linkage
  modified_base 3: mod_base = OTHER; note = 2'-fluorouridine
  modified_base 4: mod_base = OTHER; note = 2'-O-methylcytidine
  modified_base 5: mod_base = OTHER; note = 2'-fluorouridine
  modified_base 6: mod_base = OTHER; note = 2'-O-methylcytidine
  modified_base 7: mod_base = OTHER; note = 2'-fluorocytidine
  modified_base 8: mod_base = OTHER; note = 2'-O-methyladenosine
  modified_base 9: mod_base = OTHER; note = 2'-fluorouridine
  modified_base 10: mod_base = OTHER; note = 2'-O-methylguanosine
  modified_base 11: mod_base = OTHER; note = 2'-fluoroguanosine
  modified_base 12: mod_base = OTHER; note = 2'-O-methylguanosine
  modified_base 13: mod_base = OTHER; note = 2'-fluoroadenosine
  modified_base 14: mod_base = OTHER; note = 2'-O-methyluridine
  modified_base 15: mod_base = OTHER; note = 2'-fluorouridine
  modified_base 16: mod_base = OTHER; note = 2'-O-methylcytidine
  modified_base 17: mod_base = OTHER; note = 2'-fluoroadenosine
  modified_base 18: mod_base = OTHER; note = 2'-O-methyluridine
  modified_base 19: mod_base = OTHER; note = 2'-fluoroadenosine with phosphorothioate linkage
  modified_base 20: mod_base = OTHER; note = 2'-O-methyluridine with phosphorothioate linkage
  modified_base 21: mod_base = OTHER; note = 2'-O-methyluridine
cctctccatgggattcatatt

SEQ ID NO: 2594 - RNA, 21 nt, synthetic construct
  source 1..21: mol_type = other RNA
  modified_base 1: mod_base = OTHER; note = 2'-O-methylcytidine with phosphorothioate linkage
  modified_base 2: mod_base = OTHER; note = 2'-O-methyladenosine with phosphorothioate linkage
  modified_base 3: mod_base = OTHER; note = 2'-fluorocytidine
  modified_base 4: mod_base = OTHER; note = 2'-O-methylcytidine
  modified_base 5: mod_base = OTHER; note = 2'-fluorouridine
  modified_base 6: mod_base = OTHER; note = 2'-O-methylcytidine
  modified_base 7: mod_base = OTHER; note = 2'-fluorouridine
  modified_base 8: mod_base = OTHER; note = 2'-O-methylcytidine
  modified_base 9: mod_base = OTHER; note = 2'-fluorocytidine
  modified_base 10: mod_base = OTHER; note = 2'-O-methyladenosine
  modified_base 11: mod_base = OTHER; note = 2'-fluorouridine
  modified_base 12: mod_base = OTHER; note = 2'-O-methylguanosine
  modified_base 13: mod_base = OTHER; note = 2'-fluoroguanosine
  modified_base 14: mod_base = OTHER; note = 2'-O-methylguanosine
  modified_base 15: mod_base = OTHER; note = 2'-fluoroadenosine
  modified_base 16: mod_base = OTHER; note = 2'-O-methyluridine
  modified_base 17: mod_base = OTHER; note = 2'-fluorouridine
  modified_base 18: mod_base = OTHER; note = 2'-O-methylcytidine
  modified_base 19: mod_base = OTHER; note = 2'-fluoroadenosine with phosphorothioate linkage
  modified_base 20: mod_base = OTHER; note = 2'-O-methyluridine with phosphorothioate linkage
  modified_base 21: mod_base = OTHER; note = 2'-O-methyladenosine
cacctctccatgggattcata

SEQ ID NO: 2595 - RNA, 21 nt, synthetic construct
  source 1..21: mol_type = other RNA
  modified_base 1: mod_base = OTHER; note = 2'-O-methylguanosine with phosphorothioate linkage
  modified_base 2: mod_base = OTHER; note = 2'-O-methylguanosine with phosphorothioate linkage
  modified_base 3: mod_base = OTHER; note = 2'-fluoroadenosine
  modified_base 4: mod_base = OTHER; note = 2'-O-methyluridine
  modified_base 5: mod_base = OTHER; note = 2'-fluorouridine
  modified_base 6: mod_base = OTHER; note = 2'-O-methylcytidine
  modified_base 7: mod_base = OTHER; note = 2'-fluoroadenosine
  modified_base 8: mod_base = OTHER; note = 2'-O-methyluridine
  modified_base 9: mod_base = OTHER; note = 2'-fluoroadenosine
  modified_base 10: mod_base = OTHER; note = 2'-O-methyluridine
  modified_base 11: mod_base = OTHER; note = 2'-fluorouridine
  modified_base 12: mod_base = OTHER; note = 2'-O-methylguanosine
  modified_base 13: mod_base = OTHER; note = 2'-fluorocytidine
  modified_base 14: mod_base = OTHER; note = 2'-O-methyladenosine
  modified_base 15: mod_base = OTHER; note = 2'-fluoroguanosine
  modified_base 16: mod_base = OTHER; note = 2'-O-methyladenosine
  modified_base 17: mod_base = OTHER; note = 2'-fluorocytidine
  modified_base 18: mod_base = OTHER; note = 2'-O-methyladenosine
  modified_base 19: mod_base = OTHER; note = 2'-fluoroadenosine with phosphorothioate linkage
  modified_base 20: mod_base = OTHER; note = 2'-O-methyluridine with phosphorothioate linkage
  modified_base 21: mod_base = OTHER; note = 2'-O-methyladenosine
ggattcatattgcagacaata

SEQ ID NO: 2596 - RNA, 21 nt, synthetic construct
  source 1..21: mol_type = other RNA
  modified_base 1: mod_base = OTHER; note = 2'-O-methyluridine with phosphorothioate linkage
  modified_base 2: mod_base = OTHER; note = 2'-O-methylguanosine with phosphorothioate linkage
  modified_base 3: mod_base = OTHER; note = 2'-fluorouridine
  modified_base 4: mod_base = OTHER; note = 2'-O-methylguanosine
  modified_base 5: mod_base = OTHER; note = 2'-fluoroguanosine
  modified_base 6: mod_base = OTHER; note = 2'-O-methylguanosine
  modified_base 7: mod_base = OTHER; note = 2'-fluorocytidine
  modified_base 8: mod_base = OTHER; note = 2'-O-methyladenosine
  modified_base 9: mod_base = OTHER; note = 2'-fluoroguanosine
  modified_base 10: mod_base = OTHER; note = 2'-O-methyluridine
  modified_base 11: mod_base = OTHER; note = 2'-fluoroguanosine
  modified_base 12: mod_base = OTHER; note = 2'-O-methylcytidine
  modified_base 13: mod_base = OTHER; note = 2'-fluorocytidine
  modified_base 14: mod_base = OTHER; note = 2'-O-methyladenosine
  modified_base 15: mod_base = OTHER; note = 2'-fluoroguanosine
  modified_base 16: mod_base = OTHER; note = 2'-O-methyladenosine
  modified_base 17: mod_base = OTHER; note = 2'-fluorouridine
  modified_base 18: mod_base = OTHER; note = 2'-O-methylguanosine
  modified_base 19: mod_base = OTHER; note = 2'-fluoroadenosine with phosphorothioate linkage
  modified_base 20: mod_base = OTHER; note = 2'-O-methyladenosine with phosphorothioate linkage
  modified_base 21: mod_base = OTHER; note = 2'-O-methylcytidine
tgtgggcagtgccagatgaac

SEQ ID NO: 2597 - RNA, 21 nt, synthetic construct
  source 1..21: mol_type = other RNA
  modified_base 1: mod_base = OTHER; note = 2'-O-methylguanosine with phosphorothioate linkage
  modified_base 2: mod_base = OTHER; note = 2'-O-methylcytidine with phosphorothioate linkage
  modified_base 3: mod_base = OTHER; note = 2'-fluorocytidine
  modified_base 4: mod_base = OTHER; note = 2'-O-methyladenosine
  modified_base 5: mod_base = OTHER; note = 2'-fluorocytidine
  modified_base 6: mod_base = OTHER; note = 2'-O-methylcytidine
  modified_base 7: mod_base = OTHER; note = 2'-fluorouridine
  modified_base 8: mod_base = OTHER; note = 2'-O-methylcytidine
  modified_base 9: mod_base = OTHER; note = 2'-fluorouridine
  modified_base 10: mod_base = OTHER; note = 2'-O-methylcytidine
  modified_base 11: mod_base = OTHER; note = 2'-fluorocytidine
  modified_base 12: mod_base = OTHER; note = 2'-O-methyladenosine
  modified_base 13: mod_base = OTHER; note = 2'-fluorouridine
  modified_base 14: mod_base = OTHER; note = 2'-O-methylguanosine
  modified_base 15: mod_base = OTHER; note = 2'-fluoroguanosine
  modified_base 16: mod_base = OTHER; note = 2'-O-methylguanosine
  modified_base 17: mod_base = OTHER; note = 2'-fluoroadenosine
  modified_base 18: mod_base = OTHER; note = 2'-O-methyluridine
  modified_base 19: mod_base = OTHER; note = 2'-fluorouridine with phosphorothioate linkage
  modified_base 20: mod_base = OTHER; note = 2'-O-methylcytidine with phosphorothioate linkage
  modified_base 21: mod_base = OTHER; note = 2'-O-methyladenosine
gccacctctccatgggattca

SEQ ID NO: 2598 - RNA, 21 nt, synthetic construct
  source 1..21: mol_type = other RNA
  modified_base 1: mod_base = OTHER; note = 2'-O-methylcytidine with phosphorothioate linkage
  modified_base 2: mod_base = OTHER; note = 2'-O-methylcytidine with phosphorothioate linkage
  modified_base 3: mod_base = OTHER; note = 2'-fluoroadenosine
  modified_base 4: mod_base = OTHER; note = 2'-O-methyladenosine
  modified_base 5: mod_base = OTHER; note = 2'-fluorocytidine
  modified_base 6: mod_base = OTHER; note = 2'-O-methyladenosine
  modified_base 7: mod_base = OTHER; note = 2'-fluorocytidine
  modified_base 8: mod_base = OTHER; note = 2'-O-methylguanosine
  modified_base 9: mod_base = OTHER; note = 2'-fluoroguanosine
  modified_base 10: mod_base = OTHER; note = 2'-O-methyladenosine
  modified_base 11: mod_base = OTHER; note = 2'-fluoroguanosine
  modified_base 12: mod_base = OTHER; note = 2'-O-methyladenosine
  modified_base 13: mod_base = OTHER; note = 2'-fluoroadenosine
  modified_base 14: mod_base = OTHER; note = 2'-O-methylcytidine
  modified_base 15: mod_base = OTHER; note = 2'-fluoroguanosine
  modified_base 16: mod_base = OTHER; note = 2'-O-methyluridine
  modified_base 17: mod_base = OTHER; note = 2'-fluoroguanosine
  modified_base 18: mod_base = OTHER; note = 2'-O-methyluridine
  modified_base 19: mod_base = OTHER; note = 2'-fluoroadenosine with phosphorothioate linkage
  modified_base 20: mod_base = OTHER; note = 2'-O-methylcytidine with phosphorothioate linkage
  modified_base 21: mod_base = OTHER; note = 2'-O-methyluridine
ccaacacggagaacgtgtact

SEQ ID NO: 2599 - RNA, 21 nt, synthetic construct
  source 1..21: mol_type = other RNA
  modified_base 1: mod_base = OTHER; note = 2'-O-methyladenosine with phosphorothioate linkage
  modified_base 2: mod_base = OTHER; note = 2'-O-methyladenosine with phosphorothioate linkage
  modified_base 3: mod_base = OTHER; note = 2'-fluorouridine
  modified_base 4: mod_base = OTHER; note = 2'-O-methyladenosine
  modified_base 5: mod_base = OTHER; note = 2'-fluorocytidine
  modified_base 6: mod_base = OTHER; note = 2'-O-methylcytidine
  modified_base 7: mod_base = OTHER; note = 2'-fluoroadenosine
  modified_base 8: mod_base = OTHER; note = 2'-O-methylguanosine
  modified_base 9: mod_base = OTHER; note = 2'-fluoroguanosine
  modified_base 10: mod_base = OTHER; note = 2'-O-methyladenosine
  modified_base 11: mod_base = OTHER; note = 2'-fluorouridine
  modified_base 12: mod_base = OTHER; note = 2'-O-methylcytidine
  modified_base 13: mod_base = OTHER; note = 2'-fluoroadenosine
  modified_base 14: mod_base = OTHER; note = 2'-O-methylguanosine
  modified_base 15: mod_base = OTHER; note = 2'-fluorouridine
  modified_base 16: mod_base = OTHER; note = 2'-O-methyladenosine
  modified_base 17: mod_base = OTHER; note = 2'-fluorouridine
  modified_base 18: mod_base = OTHER; note = 2'-O-methylcytidine
  modified_base 19: mod_base = OTHER; note = 2'-fluoroguanosine with phosphorothioate linkage
  modified_base 20: mod_base = OTHER; note = 2'-O-methyladenosine with phosphorothioate linkage
  modified_base 21: mod_base = OTHER; note = 2'-O-methylguanosine
aataccaggatcagtatcgag

SEQ ID NO: 2600 - RNA, 21 nt, synthetic construct
  source 1..21: mol_type = other RNA
  modified_base 1: mod_base = OTHER; note = 2'-O-methylcytidine with phosphorothioate linkage
  modified_base 2: mod_base = OTHER; note = 2'-O-methylcytidine with phosphorothioate linkage
  modified_base 3: mod_base = OTHER; note = 2'-fluorouridine
  modified_base 4: mod_base = OTHER; note = 2'-O-methylcytidine
  modified_base 5: mod_base = OTHER; note = 2'-fluorocytidine
  modified_base 6: mod_base = OTHER; note = 2'-O-methyluridine
  modified_base 7: mod_base = OTHER; note = 2'-fluorocytidine
  modified_base 8: mod_base = OTHER; note = 2'-O-methyladenosine
  modified_base 9: mod_base = OTHER; note = 2'-fluorocytidine
  modified_base 10: mod_base = OTHER; note = 2'-O-methylcytidine
  modified_base 11: mod_base = OTHER; note = 2'-fluorouridine
  modified_base 12: mod_base = OTHER; note = 2'-O-methylguanosine
  modified_base 13: mod_base = OTHER; note = 2'-fluorouridine
  modified_base 14: mod_base = OTHER; note = 2'-O-methylguanosine
  modified_base 15: mod_base = OTHER; note = 2'-fluoroguanosine
  modified_base 16: mod_base = OTHER; note = 2'-O-methylguanosine
  modified_base 17: mod_base = OTHER; note = 2'-fluorocytidine
  modified_base 18: mod_base = OTHER; note = 2'-O-methyladenosine
  modified_base 19: mod_base = OTHER; note = 2'-fluoroguanosine with phosphorothioate linkage
  modified_base 20: mod_base = OTHER; note = 2'-O-methyluridine with phosphorothioate linkage
  modified_base 21: mod_base = OTHER; note = 2'-O-methylguanosine
cctcctcacctgtgggcagtg

SEQ ID NO: 2601 - RNA, 21 nt, synthetic construct
  source 1..21: mol_type = other RNA
  modified_base 1: mod_base = OTHER; note = 2'-O-methylcytidine with phosphorothioate linkage
  modified_base 2: mod_base = OTHER; note = 2'-O-methyluridine with phosphorothioate linkage
  modified_base 3: mod_base = OTHER; note = 2'-fluorouridine
  modified_base 4: mod_base = OTHER; note = 2'-O-methylcytidine
  modified_base 5: mod_base = OTHER; note = 2'-fluorouridine
  modified_base 6: mod_base = OTHER; note = 2'-O-methylcytidine
  modified_base 7: mod_base = OTHER; note = 2'-fluorouridine
  modified_base 8: mod_base = OTHER; note = 2'-O-methyladenosine
  modified_base 9: mod_base = OTHER; note = 2'-fluoroadenosine
  modified_base 10: mod_base = OTHER; note = 2'-O-methylguanosine
  modified_base 11: mod_base = OTHER; note = 2'-fluorocytidine
  modified_base 12: mod_base = OTHER; note = 2'-O-methylguanosine
  modified_base 13: mod_base = OTHER; note = 2'-fluorocytidine
  modified_base 14: mod_base = OTHER; note = 2'-O-methyladenosine
  modified_base 15: mod_base = OTHER; note = 2'-fluorouridine
  modified_base 16: mod_base = OTHER; note = 2'-O-methylcytidine
  modified_base 17: mod_base = OTHER; note = 2'-fluoroadenosine
  modified_base 18: mod_base = OTHER; note = 2'-O-methyladenosine
  modified_base 19: mod_base = OTHER; note = 2'-fluoroguanosine with phosphorothioate linkage
  modified_base 20: mod_base = OTHER; note = 2'-O-methylcytidine with phosphorothioate linkage
  modified_base 21: mod_base = OTHER; note = 2'-O-methyluridine
cttctctaagcgcatcaagct

SEQ ID NO: 2602 - RNA, 21 nt, synthetic construct
  source 1..21: mol_type = other RNA
  modified_base 1: mod_base = OTHER; note = 2'-O-methylguanosine with phosphorothioate linkage
  modified_base 2: mod_base = OTHER; note = 2'-O-methylcytidine with phosphorothioate linkage
  modified_base 3: mod_base = OTHER; note = 2'-fluoroadenosine
  modified_base 4: mod_base = OTHER; note = 2'-O-methylguanosine
  modified_base 5: mod_base = OTHER; note = 2'-fluorouridine
  modified_base 6: mod_base = OTHER; note = 2'-O-methylguanosine
  modified_base 7: mod_base = OTHER; note = 2'-fluorocytidine
  modified_base 8: mod_base = OTHER; note = 2'-O-methylcytidine
  modified_base 9: mod_base = OTHER; note = 2'-fluoroadenosine
  modified_base 10: mod_base = OTHER; note = 2'-O-methylguanosine
  modified_base 11: mod_base = OTHER; note = 2'-fluoroadenosine
  modified_base 12: mod_base = OTHER; note = 2'-O-methyluridine
  modified_base 13: mod_base = OTHER; note = 2'-fluoroguanosine
  modified_base 14: mod_base = OTHER; note = 2'-O-methyladenosine
  modified_base 15: mod_base = OTHER; note = 2'-fluoroadenosine
  modified_base 16: mod_base = OTHER; note = 2'-O-methylcytidine
  modified_base 17: mod_base = OTHER; note = 2'-fluorouridine
  modified_base 18: mod_base = OTHER; note = 2'-O-methyluridine
  modified_base 19: mod_base = OTHER; note = 2'-fluorocytidine with phosphorothioate linkage
  modified_base 20: mod_base = OTHER; note = 2'-O-methylcytidine with phosphorothioate linkage
  modified_base 21: mod_base = OTHER; note = 2'-O-methylcytidine
gcagtgccagatgaacttccc

SEQ ID NO: 2603 - RNA, 21 nt, synthetic construct
  source 1..21: mol_type = other RNA
  modified_base 1: mod_base = OTHER; note = 2'-O-methyluridine with phosphorothioate linkage
  modified_base 2: mod_base = OTHER; note = 2'-O-methyluridine with phosphorothioate linkage
  modified_base 3: mod_base = OTHER; note = 2'-fluorocytidine
  modified_base 4: mod_base = OTHER; note = 2'-O-methyladenosine
  modified_base 5: mod_base = OTHER; note = 2'-fluorouridine
  modified_base 6: mod_base = OTHER; note = 2'-O-methyladenosine
  modified_base 7: mod_base = OTHER; note = 2'-fluorouridine
  modified_base 8: mod_base = OTHER; note = 2'-O-methyluridine
  modified_base 9: mod_base = OTHER; note = 2'-fluoroguanosine
  modified_base 10: mod_base = OTHER; note = 2'-O-methylcytidine
  modified_base 11: mod_base = OTHER; note = 2'-fluoroadenosine
  modified_base 12: mod_base = OTHER; note = 2'-O-methylguanosine
  modified_base 13: mod_base = OTHER; note = 2'-fluoroadenosine
  modified_base 14: mod_base = OTHER; note = 2'-O-methylcytidine
  modified_base 15: mod_base = OTHER; note = 2'-fluoroadenosine
  modified_base 16: mod_base = OTHER; note = 2'-O-methyladenosine
  modified_base 17: mod_base = OTHER; note = 2'-fluorouridine
  modified_base 18: mod_base = OTHER; note = 2'-O-methyladenosine
  modified_base 19: mod_base = OTHER; note = 2'-fluoroadenosine with phosphorothioate linkage
  modified_base 20: mod_base = OTHER; note = 2'-O-methylcytidine with phosphorothioate linkage
  modified_base 21: mod_base = OTHER; note = 2'-O-methylcytidine
ttcatattgcagacaataacc

SEQ ID NO: 2604 - RNA, 21 nt, synthetic construct
  source 1..21: mol_type = other RNA
  modified_base 1: mod_base = OTHER; note = 2'-O-methylguanosine with phosphorothioate linkage
  modified_base 2: mod_base = OTHER; note = 2'-O-methyladenosine with phosphorothioate linkage
  modified_base 3: mod_base = OTHER; note = 2'-fluoroadenosine
  modified_base 4: mod_base = OTHER; note = 2'-O-methylguanosine
  modified_base 5: mod_base = OTHER; note = 2'-fluoroadenosine
  modified_base 6: mod_base = OTHER; note = 2'-O-methylcytidine
  modified_base 7: mod_base = OTHER; note = 2'-fluoroguanosine
  modified_base 8: mod_base = OTHER; note = 2'-O-methylcytidine
  modified_base 9: mod_base = OTHER; note = 2'-fluoroadenosine
  modified_base 10: mod_base = OTHER; note = 2'-O-methylcytidine
  modified_base 11: mod_base = OTHER; note = 2'-fluoroadenosine
  modified_base 12: mod_base = OTHER; note = 2'-O-methyluridine
  modified_base 13: mod_base = OTHER; note = 2'-fluoroguanosine
  modified_base 14: mod_base = OTHER; note = 2'-O-methylcytidine
  modified_base 15: mod_base = OTHER; note = 2'-fluoroadenosine
  modified_base 16: mod_base = OTHER; note = 2'-O-methylcytidine
  modified_base 17: mod_base = OTHER; note = 2'-fluoroadenosine
  modified_base 18: mod_base = OTHER; note = 2'-O-methyladenosine
  modified_base 19: mod_base = OTHER; note = 2'-fluoroadenosine with phosphorothioate linkage
  modified_base 20: mod_base = OTHER; note = 2'-O-methyluridine with phosphorothioate linkage
  modified_base 21: mod_base = OTHER; note = 2'-O-methylcytidine
gaagacgcacatgcacaaatc

SEQ ID NO: 2605 - RNA, 21 nt, synthetic construct
  source 1..21: mol_type = other RNA
  modified_base 1: mod_base = OTHER; note = 2'-O-methyluridine with phosphorothioate linkage
  modified_base 2: mod_base = OTHER; note = 2'-O-methylguanosine with phosphorothioate linkage
  modified_base 3: mod_base = OTHER; note = 2'-fluoroguanosine
  modified_base 4: mod_base = OTHER; note = 2'-O-methylcytidine
  modified_base 5: mod_base = OTHER; note = 2'-fluoroadenosine
  modified_base 6: mod_base = OTHER; note = 2'-O-methylguanosine
  modified_base 7: mod_base = OTHER; note = 2'-fluoroguanosine
  modified_base 8: mod_base = OTHER; note = 2'-O-methylguanosine
  modified_base 9: mod_base = OTHER; note = 2'-fluoroadenosine
  modified_base 10: mod_base = OTHER; note = 2'-O-methyladenosine
  modified_base 11: mod_base = OTHER; note = 2'-fluorocytidine
  modified_base 12: mod_base = OTHER; note = 2'-O-methyladenosine
  modified_base 13: mod_base = OTHER; note = 2'-fluorocytidine
  modified_base 14: mod_base = OTHER; note = 2'-O-methylguanosine
  modified_base 15: mod_base = OTHER; note = 2'-fluorouridine
  modified_base 16: mod_base = OTHER; note = 2'-O-methylcytidine
  modified_base 17: mod_base = OTHER; note = 2'-fluorouridine
  modified_base 18: mod_base = OTHER; note = 2'-O-methyladenosine
  modified_base 19: mod_base = OTHER; note = 2'-fluoroguanosine with phosphorothioate linkage
  modified_base 20: mod_base = OTHER; note = 2'-O-methylcytidine with phosphorothioate linkage
  modified_base 21: mod_base = OTHER; note = 2'-O-methylcytidine
tggcagggaacacgtctagcc

SEQ ID NO: 2606 - RNA, 21 nt, synthetic construct
  source 1..21: mol_type = other RNA
  modified_base 1: mod_base = OTHER; note = 2'-O-methylcytidine with phosphorothioate linkage
  modified_base 2: mod_base = OTHER; note = 2'-O-methyluridine with phosphorothioate linkage
  modified_base 3: mod_base = OTHER; note = 2'-fluoroadenosine
  modified_base 4: mod_base = OTHER; note = 2'-O-methyluridine
  modified_base 5: mod_base = OTHER; note = 2'-fluoroguanosine
  modified_base 6: mod_base = OTHER; note = 2'-O-methylguanosine
  modified_base 7: mod_base = OTHER; note = 2'-fluoroadenosine
  modified_base 8: mod_base = OTHER; note = 2'-O-methylguanosine
  modified_base 9: mod_base = OTHER; note = 2'-fluorocytidine
  modified_base 10: mod_base = OTHER; note = 2'-O-methylcytidine
  modified_base 11: mod_base = OTHER; note = 2'-fluorouridine
  modified_base 12: mod_base = OTHER; note = 2'-O-methylcytidine
  modified_base 13: mod_base = OTHER; note = 2'-fluorocytidine
  modified_base 14: mod_base = OTHER; note = 2'-O-methylcytidine
  modified_base 15: mod_base = OTHER; note = 2'-fluoroguanosine
  modified_base 16: mod_base = OTHER; note = 2'-O-methylcytidine
  modified_base 17: mod_base = OTHER; note = 2'-fluorocytidine
  modified_base 18: mod_base = OTHER; note = 2'-O-methyladenosine
  modified_base 19: mod_base = OTHER; note = 2'-fluorouridine with phosphorothioate linkage
  modified_base 20: mod_base = OTHER; note = 2'-O-methylguanosine with phosphorothioate linkage
  modified_base 21: mod_base = OTHER; note = 2'-O-methylguanosine
ctatggagcctcccgccatgg

SEQ ID NO: 2607 - RNA, 21 nt, synthetic construct
  source 1..21: mol_type = other RNA
  modified_base 1: mod_base = OTHER; note = 2'-O-methylcytidine with phosphorothioate linkage
  modified_base 2: mod_base = OTHER; note = 2'-O-methyladenosine with phosphorothioate linkage
  modified_base 3: mod_base = OTHER; note = 2'-fluorocytidine
  modified_base 4: mod_base = OTHER; note = 2'-O-methylguanosine
  modified_base 5: mod_base = OTHER; note = 2'-fluorocytidine
  modified_base 6: mod_base = OTHER; note = 2'-O-methylcytidine
  modified_base 7: mod_base = OTHER; note = 2'-fluoroadenosine
  modified_base 8: mod_base = OTHER; note = 2'-O-methylguanosine
  modified_base 9: mod_base = OTHER; note = 2'-fluoroadenosine
  modified_base 10: mod_base = OTHER; note = 2'-O-methylguanosine
  modified_base 11: mod_base = OTHER; note = 2'-fluoroguanosine
  modified_base 12: mod_base = OTHER; note = 2'-O-methyladenosine
  modified_base 13: mod_base = OTHER; note = 2'-fluorouridine
  modified_base 14: mod_base = OTHER; note = 2'-O-methylguanosine
  modified_base 15: mod_base = OTHER; note = 2'-fluoroadenosine
  modified_base 16: mod_base = OTHER; note = 2'-O-methylcytidine
  modified_base 17: mod_base = OTHER; note = 2'-fluoroguanosine
  modified_base 18: mod_base = OTHER; note = 2'-O-methyladenosine
  modified_base 19: mod_base = OTHER; note = 2'-fluorouridine with phosphorothioate linkage
  modified_base 20: mod_base = OTHER; note = 2'-O-methyluridine with phosphorothioate linkage
  modified_base 21: mod_base = OTHER; note = 2'-O-methylguanosine
cacgccagaggatgacgattg

SEQ ID NO: 2608 - RNA, 21 nt, synthetic construct
  source 1..21: mol_type = other RNA
  modified_base 1: mod_base = OTHER; note = 2'-O-methylcytidine with phosphorothioate linkage
  modified_base 2: mod_base = OTHER; note = 2'-O-methylcytidine with phosphorothioate linkage
  modified_base 3: mod_base = OTHER; note = 2'-fluoroadenosine
  modified_base 4: mod_base = OTHER; note = 2'-O-methylguanosine
  modified_base 5: mod_base = OTHER; note = 2'-fluorocytidine
  modified_base 6: mod_base = OTHER; note = 2'-O-methylcytidine
  modified_base 7: mod_base = OTHER; note = 2'-fluorocytidine
  modified_base 8: mod_base = OTHER; note = 2'-O-methyluridine
  modified_base 9: mod_base = OTHER; note = 2'-fluoroadenosine
  modified_base 10: mod_base = OTHER; note = 2'-O-methyluridine
  modified_base 11: mod_base = OTHER; note = 2'-fluoroguanosine
  modified_base 12: mod_base = OTHER; note = 2'-O-methylcytidine
  modified_base 13: mod_base = OTHER; note = 2'-fluoroadenosine
  modified_base 14: mod_base = OTHER; note = 2'-O-methyladenosine
  modified_base 15: mod_base = OTHER; note = 2'-fluoroadenosine
  modified_base 16: mod_base = OTHER; note = 2'-O-methylguanosine
  modified_base 17: mod_base = OTHER; note = 2'-fluoroguanosine
  modified_base 18: mod_base = OTHER; note = 2'-O-methyluridine
  modified_base 19: mod_base = OTHER; note = 2'-fluorouridine with phosphorothioate linkage
  modified_base 20: mod_base = OTHER; note = 2'-O-methyladenosine with phosphorothioate linkage
  modified_base 21: mod_base = OTHER; note = 2'-O-methylcytidine
ccagccctatgcaaaggttac

SEQ ID NO: 2609 - RNA, 21 nt, synthetic construct
  source 1..21: mol_type = other RNA
  modified_base 1: mod_base = OTHER; note = 2'-O-methylcytidine with phosphorothioate linkage
  modified_base 2: mod_base = OTHER; note = 2'-O-methylcytidine with phosphorothioate linkage
  modified_base 3: mod_base = OTHER; note = 2'-fluoroadenosine
  modified_base 4: mod_base = OTHER; note = 2'-O-methylguanosine
  modified_base 5: mod_base = OTHER; note = 2'-fluoroadenosine
  modified_base 6: mod_base = OTHER; note = 2'-O-methylcytidine
  modified_base 7: mod_base = OTHER; note = 2'-fluorocytidine
  modified_base 8: mod_base = OTHER; note = 2'-O-methyladenosine
  modified_base 9: mod_base = OTHER; note = 2'-fluorocytidine
  modified_base 10: mod_base = OTHER; note = 2'-O-methylguanosine
  modified_base 11: mod_base = OTHER; note = 2'-fluoroguanosine
  modified_base 12: mod_base = OTHER; note = 2'-O-methylcytidine
  modified_base 13: mod_base = OTHER; note = 2'-fluorocytidine
  modified_base 14: mod_base = OTHER; note = 2'-O-methylcytidine
  modified_base 15: mod_base = OTHER; note = 2'-fluoroguanosine
  modified_base 16: mod_base = OTHER; note = 2'-O-methyluridine
  modified_base 17: mod_base = OTHER; note = 2'-fluorouridine
  modified_base 18: mod_base = OTHER; note = 2'-O-methylguanosine
  modified_base 19: mod_base = OTHER; note = 2'-fluoroguanosine with phosphorothioate linkage
  modified_base 20: mod_base = OTHER; note = 2'-O-methylguanosine with phosphorothioate linkage
  modified_base 21: mod_base = OTHER; note = 2'-O-methyladenosine
ccagaccacggcccgttggga

SEQ ID NO: 2610 - RNA, 21 nt, synthetic construct
  source 1..21: mol_type = other RNA
  modified_base 1: mod_base = OTHER; note = 2'-O-methylcytidine with phosphorothioate linkage
  modified_base 2: mod_base = OTHER; note = 2'-O-methyluridine with phosphorothioate linkage
  modified_base 3: mod_base = OTHER; note = 2'-fluorocytidine
  modified_base 4: mod_base = OTHER; note = 2'-O-methyluridine
  modified_base 5: mod_base = OTHER; note = 2'-fluoroadenosine
  modified_base 6: mod_base = OTHER; note = 2'-O-methyladenosine
  modified_base 7: mod_base = OTHER; note = 2'-fluoroguanosine
  modified_base 8: mod_base = OTHER; note = 2'-O-methylcytidine
  modified_base 9: mod_base = OTHER; note = 2'-fluoroguanosine
  modified_base 10: mod_base = OTHER; note = 2'-O-methylcytidine
  modified_base 11: mod_base = OTHER; note = 2'-fluoroadenosine
  modified_base 12: mod_base = OTHER; note = 2'-O-methyluridine
  modified_base 13: mod_base = OTHER; note = 2'-fluorocytidine
  modified_base 14: mod_base = OTHER; note = 2'-O-methyladenosine
  modified_base 15: mod_base = OTHER; note = 2'-fluoroadenosine
  modified_base 16: mod_base = OTHER; note = 2'-O-methylguanosine
  modified_base 17: mod_base = OTHER; note = 2'-fluorocytidine
  modified_base 18: mod_base = OTHER; note = 2'-O-methyluridine
  modified_base 19: mod_base = OTHER; note = 2'-fluorocytidine with phosphorothioate linkage
  modified_base 20: mod_base = OTHER; note = 2'-O-methylguanosine with phosphorothioate linkage
  modified_base 21: mod_base = OTHER; note = 2'-O-methyladenosine
ctctaagcgcatcaagctcga

SEQ ID NO: 2611 - RNA, 21 nt, synthetic construct
  source 1..21: mol_type = other RNA
  modified_base 1: mod_base = OTHER; note = 2'-O-methylguanosine with phosphorothioate linkage
  modified_base 2: mod_base = OTHER; note = 2'-O-methylguanosine with phosphorothioate linkage
  modified_base 3: mod_base = OTHER; note = 2'-fluoroadenosine
  modified_base 4: mod_base = OTHER; note = 2'-O-methylcytidine
  modified_base 5: mod_base = OTHER; note = 2'-fluoroadenosine
  modified_base 6: mod_base = OTHER; note = 2'-O-methylcytidine
  modified_base 7: mod_base = OTHER; note = 2'-fluorouridine
  modified_base 8: mod_base = OTHER; note = 2'-O-methyluridine
  modified_base 9: mod_base = OTHER; note = 2'-fluoroguanosine
  modified_base 10: mod_base = OTHER; note = 2'-O-methylcytidine
  modified_base 11: mod_base = OTHER; note = 2'-fluoroguanosine
  modified_base 12: mod_base = OTHER; note = 2'-O-methyladenosine
  modified_base 13: mod_base = OTHER; note = 2'-fluorocytidine
  modified_base 14: mod_base = OTHER; note = 2'-O-methylguanosine
  modified_base 15: mod_base = OTHER; note = 2'-fluoroadenosine
  modified_base 16: mod_base = OTHER; note = 2'-O-methyladenosine
  modified_base 17: mod_base = OTHER; note = 2'-fluoroguanosine
  modified_base 18: mod_base = OTHER; note = 2'-O-methyladenosine
  modified_base 19: mod_base = OTHER; note = 2'-fluorocytidine with phosphorothioate linkage
  modified_base 20: mod_base = OTHER; note = 2'-O-methyluridine with phosphorothioate linkage
  modified_base 21: mod_base = OTHER; note = 2'-O-methylcytidine
ggacacttgcgacgaagactc

SEQ ID NO: 2612 - RNA, 21 nt, synthetic construct
  source 1..21: mol_type = other RNA
  modified_base 1: mod_base = OTHER; note = 2'-O-methylguanosine with phosphorothioate linkage
  modified_base 2: mod_base = OTHER; note = 2'-O-methylcytidine with phosphorothioate linkage
  modified_base 3: mod_base = OTHER; note = 2'-fluorocytidine
  modified_base 4: mod_base = OTHER; note = 2'-O-methyladenosine
  modified_base 5: mod_base = OTHER; note = 2'-fluorocytidine
  modified_base 6: mod_base = OTHER; note = 2'-O-methyladenosine
  modified_base 7: mod_base = OTHER; note = 2'-fluoroguanosine
  modified_base 8: mod_base = OTHER; note = 2'-O-methylguanosine
  modified_base 9: mod_base = OTHER; note = 2'-fluoroguanosine
  modified_base 10: mod_base = OTHER; note = 2'-O-methyladenosine
  modified_base 11: mod_base = OTHER; note = 2'-fluorocytidine
  modified_base 12: mod_base = OTHER; note = 2'-O-methyladenosine
  modified_base 13: mod_base = OTHER; note = 2'-fluorocytidine
  modified_base 14: mod_base = OTHER; note = 2'-O-methyluridine
  modified_base 15: mod_base = OTHER; note = 2'-fluorouridine
  modified_base 16: mod_base = OTHER; note = 2'-O-methylguanosine
  modified_base 17: mod_base = OTHER; note = 2'-fluorocytidine
  modified_base 18: mod_base = OTHER; note = 2'-O-methylguanosine
  modified_base 19: mod_base = OTHER; note = 2'-fluoroadenosine with phosphorothioate linkage
  modified_base 20: mod_base = OTHER; note = 2'-O-methylcytidine with phosphorothioate linkage
  modified_base 21: mod_base = OTHER; note = 2'-O-methylguanosine
gccacagggacacttgcgacg

SEQ ID NO: 2613 - RNA, 21 nt, synthetic construct
  source 1..21: mol_type = other RNA
  modified_base 1: mod_base = OTHER; note = 2'-O-methyluridine with phosphorothioate linkage
  modified_base 2: mod_base = OTHER; note = 2'-O-methylcytidine with phosphorothioate linkage
  modified_base 3: mod_base = OTHER; note = 2'-fluorocytidine
  modified_base 4: mod_base = OTHER; note = 2'-O-methylcytidine
  modified_base 5: mod_base = OTHER; note = 2'-fluoroguanosine
  modified_base 6: mod_base = OTHER; note = 2'-O-methyluridine
  modified_base 7: mod_base = OTHER; note = 2'-fluoroguanosine
  modified_base 8: mod_base = OTHER; note = 2'-O-methylguanosine
  modified_base 9: mod_base = OTHER; note = 2'-fluoroadenosine
  modified_base 10: mod_base = OTHER; note = 2'-O-methylguanosine
  modified_base 11: mod_base = OTHER; note = 2'-fluoroguanosine
  modified_base 12: mod_base = OTHER; note = 2'-O-methyluridine
  modified_base 13: mod_base = OTHER; note = 2'-fluorouridine
  modified_base 14: mod_base = OTHER; note = 2'-O-methylguanosine
  modified_base 15: mod_base = OTHER; note = 2'-fluoroguanosine
  modified_base 16: mod_base = OTHER; note = 2'-O-methylcytidine
  modified_base 17: mod_base = OTHER; note = 2'-fluoroadenosine
  modified_base 18: mod_base = OTHER; note = 2'-O-methyluridine
  modified_base 19: mod_base = OTHER; note = 2'-fluorocytidine with phosphorothioate linkage
  modified_base 20: mod_base = OTHER; note = 2'-O-methylcytidine with phosphorothioate linkage
  modified_base 21: mod_base = OTHER; note = 2'-O-methyladenosine
tcccgtggaggttggcatcca

SEQ ID NO: 2614 - RNA, 21 nt, synthetic construct
  source 1..21: mol_type = other RNA
  modified_base 1: mod_base = OTHER; note = 2'-O-methylcytidine with phosphorothioate linkage
  modified_base 2: mod_base = OTHER; note = 2'-O-methyluridine with phosphorothioate linkage
  modified_base 3: mod_base = OTHER; note = 2'-fluoroguanosine
  modified_base 4: mod_base = OTHER; note = 2'-O-methylguanosine
  modified_base 5: mod_base = OTHER; note = 2'-fluoroguanosine
  modified_base 6: mod_base = OTHER; note = 2'-O-methylcytidine
  modified_base 7: mod_base = OTHER; note = 2'-fluoroguanosine
  modified_base 8: mod_base = OTHER; note = 2'-O-methyladenosine
  modified_base 9: mod_base = OTHER; note = 2'-fluoroguanosine
  modified_base 10: mod_base = OTHER; note = 2'-O-methyladenosine
  modified_base 11: mod_base = OTHER; note = 2'-fluoroadenosine
  modified_base 12: mod_base = OTHER; note = 2'-O-methylguanosine
  modified_base 13: mod_base = OTHER; note = 2'-fluorocytidine
  modified_base 14: mod_base = OTHER; note = 2'-O-methyladenosine
  modified_base 15: mod_base = OTHER; note = 2'-fluorouridine
  modified_base 16: mod_base = OTHER; note = 2'-O-methyladenosine
  modified_base 17: mod_base = OTHER; note = 2'-fluoroadenosine
  modified_base 18: mod_base = OTHER; note = 2'-O-methylguanosine
  modified_base 19: mod_base = OTHER; note = 2'-fluorocytidine with phosphorothioate linkage
  modified_base 20: mod_base = OTHER; note = 2'-O-methylguanosine with phosphorothioate linkage
  modified_base 21: mod_base = OTHER; note = 2'-O-methylcytidine
ctgggcgagaagcataagcgc

SEQ ID NO: 2615 - RNA, 21 nt, synthetic construct
  source 1..21: mol_type = other RNA
  modified_base 1: mod_base = OTHER; note = 2'-O-methylcytidine with phosphorothioate linkage
  modified_base 2: mod_base = OTHER; note = 2'-O-methyladenosine with phosphorothioate linkage
  modified_base 3: mod_base = OTHER; note = 2'-fluoroadenosine
  modified_base 4: mod_base = OTHER; note = 2'-O-methylcytidine
  modified_base 5: mod_base = OTHER; note = 2'-fluoroadenosine
  modified_base 6: mod_base = OTHER; note = 2'-O-methylcytidine
  modified_base 7: mod_base = OTHER; note = 2'-fluoroguanosine
  modified_base 8: mod_base = OTHER; note = 2'-O-methylguanosine
  modified_base 9: mod_base = OTHER; note = 2'-fluoroadenosine
  modified_base 10: mod_base = OTHER; note = 2'-O-methylguanosine
  modified_base 11: mod_base = OTHER; note = 2'-fluoroadenosine
  modified_base 12: mod_base = OTHER; note = 2'-O-methyladenosine
  modified_base 13: mod_base = OTHER; note = 2'-fluorocytidine
  modified_base 14: mod_base = OTHER; note = 2'-O-methylguanosine
  modified_base 15: mod_base = OTHER; note = 2'-fluorouridine
  modified_base 16: mod_base = OTHER; note = 2'-O-methylguanosine
  modified_base 17: mod_base = OTHER; note = 2'-fluorouridine
  modified_base 18: mod_base = OTHER; note = 2'-O-methyladenosine
  modified_base 19: mod_base = OTHER; note = 2'-fluorocytidine with phosphorothioate linkage
  modified_base 20: mod_base = OTHER; note = 2'-O-methyluridine with phosphorothioate linkage
  modified_base 21: mod_base = OTHER; note = 2'-O-methylcytidine
caacacggagaacgtgtactc

SEQ ID NO: 2616 - RNA, 21 nt, synthetic construct
  source 1..21: mol_type = other RNA
  modified_base 1: mod_base = OTHER; note = 2'-O-methyladenosine with phosphorothioate linkage
  modified_base 2: mod_base = OTHER; note = 2'-O-methylcytidine with phosphorothioate linkage
  modified_base 3: mod_base = OTHER; note = 2'-fluorocytidine
  modified_base 4: mod_base = OTHER; note = 2'-O-methyladenosine
  modified_base 5: mod_base = OTHER; note = 2'-fluorocytidine
  modified_base 6: mod_base = OTHER; note = 2'-O-methylguanosine
  modified_base 7: mod_base = OTHER; note = 2'-fluoroguanosine
  modified_base 8: mod_base = OTHER; note = 2'-O-methylcytidine
  modified_base 9: mod_base = OTHER; note = 2'-fluorocytidine
  modified_base 10: mod_base = OTHER; note = 2'-O-methylcytidine
  modified_base 11: mod_base = OTHER; note = 2'-fluoroguanosine
  modified_base 12: mod_base = OTHER; note = 2'-O-methyluridine
  modified_base 13: mod_base = OTHER; note = 2'-fluorouridine
  modified_base 14: mod_base = OTHER; note = 2'-O-methylguanosine
  modified_base 15: mod_base = OTHER; note = 2'-fluoroguanosine
  modified_base 16: mod_base = OTHER; note = 2'-O-methylguanosine
  modified_base 17: mod_base = OTHER; note = 2'-fluoroadenosine
  modified_base 18: mod_base = OTHER; note = 2'-O-methylguanosine
  modified_base 19: mod_base = OTHER; note = 2'-fluorocytidine with phosphorothioate linkage
  modified_base 20: mod_base = OTHER; note = 2'-O-methyluridine with phosphorothioate linkage
  modified_base 21: mod_base = OTHER; note = 2'-O-methylcytidine
accacggcccgttgggagctc

SEQ ID NO: 2617 - RNA, 21 nt, synthetic construct
  source 1..21: mol_type = other RNA
  modified_base 1: mod_base = OTHER; note = 2'-O-methyluridine with phosphorothioate linkage
  modified_base 2: mod_base = OTHER; note = 2'-O-methylcytidine with phosphorothioate linkage
  modified_base 3: mod_base = OTHER; note = 2'-fluorocytidine
  modified_base 4: mod_base = OTHER; note = 2'-O-methyladenosine
  modified_base 5: mod_base = OTHER; note = 2'-fluoroguanosine
  modified_base 6: mod_base = OTHER; note = 2'-O-methylguanosine
  modified_base 7: mod_base = OTHER; note = 2'-fluorouridine
  modified_base 8: mod_base = OTHER; note = 2'-O-methylcytidine
  modified_base 9: mod_base = OTHER; note = 2'-fluoroadenosine
  modified_base 10: mod_base = OTHER; note = 2'-O-methylcytidine
  modified_base 11: mod_base = OTHER; note = 2'-fluoroguanosine
  modified_base 12: mod_base = OTHER; note = 2'-O-methylcytidine
  modified_base 13: mod_base = OTHER; note = 2'-fluorocytidine
  modified_base 14: mod_base = OTHER; note = 2'-O-methyladenosine
  modified_base 15: mod_base = OTHER; note = 2'-fluoroguanosine
  modified_base 16: mod_base = OTHER; note = 2'-O-methyladenosine
  modified_base 17: mod_base = OTHER; note = 2'-fluoroguanosine
  modified_base 18: mod_base = OTHER; note = 2'-O-methylguanosine
  modified_base 19: mod_base = OTHER; note = 2'-fluoroadenosine with phosphorothioate linkage
  modified_base 20: mod_base = OTHER; note = 2'-O-methyluridine with phosphorothioate linkage
  modified_base 21: mod_base = OTHER; note = 2'-O-methylguanosine
tccaggtcacgccagaggatg

SEQ ID NO: 2618 - RNA, 21 nt, synthetic construct
  source 1..21: mol_type = other RNA
  modified_base 1: mod_base = OTHER; note = 2'-O-methyluridine with phosphorothioate linkage
  modified_base 2: mod_base = OTHER; note = 2'-O-methyladenosine with phosphorothioate linkage
  modified_base 3: mod_base = OTHER; note = 2'-fluoroguanosine
  modified_base 4: mod_base = OTHER; note = 2'-O-methyladenosine
  modified_base 5: mod_base = OTHER; note = 2'-fluorouridine
  modified_base 6: mod_base = OTHER; note = 2'-O-methylguanosine
  modified_base 7: mod_base = OTHER; note = 2'-fluoroadenosine
  modified_base 8: mod_base = OTHER; note = 2'-O-methylcytidine
  modified_base 9: mod_base = OTHER; note = 2'-fluorocytidine
  modified_base 10: mod_base = OTHER; note = 2'-O-methyladenosine
  modified_base 11: mod_base = OTHER; note = 2'-fluoroadenosine
  modified_base 12: mod_base = OTHER; note = 2'-O-methyladenosine
  modified_base 13: mod_base = OTHER; note = 2'-fluoroguanosine
  modified_base 14: mod_base = OTHER; note = 2'-O-methylguanosine
  modified_base 15: mod_base = OTHER; note = 2'-fluorouridine
  modified_base 16: mod_base = OTHER; note = 2'-O-methylcytidine
  modified_base 17: mod_base = OTHER; note = 2'-fluoroadenosine
  modified_base 18: mod_base = OTHER; note = 2'-O-methyluridine
  modified_base 19: mod_base = OTHER; note = 2'-fluorouridine with phosphorothioate linkage
  modified_base 20: mod_base = OTHER; note = 2'-O-methyladenosine with phosphorothioate linkage
  modified_base 21: mod_base = OTHER; note = 2'-O-methylcytidine
tagatgaccaaaggtcattac

SEQ ID NO: 2619 - RNA, 21 nt, synthetic construct
  source 1..21: mol_type = other RNA
  modified_base 1: mod_base = OTHER; note = 2'-O-methylguanosine with phosphorothioate linkage
  modified_base 2: mod_base = OTHER; note = 2'-O-methyladenosine with phosphorothioate linkage
  modified_base 3: mod_base = OTHER; note = 2'-fluoroadenosine
  modified_base 4: mod_base = OTHER; note = 2'-O-methylguanosine
  modified_base 5: mod_base = OTHER; note = 2'-fluorocytidine
  modified_base 6: mod_base = OTHER; note = 2'-O-methyladenosine
  modified_base 7: mod_base = OTHER; note = 2'-fluorouridine
  modified_base 8: mod_base = OTHER; note = 2'-O-methyladenosine
  modified_base 9: mod_base = OTHER; note = 2'-fluoroadenosine
  modified_base 10: mod_base = OTHER; note = 2'-O-methylguanosine
  modified_base 11: mod_base = OTHER; note = 2'-fluorocytidine
  modified_base 12: mod_base = OTHER; note = 2'-O-methylguanosine
  modified_base 13: mod_base = OTHER; note = 2'-fluorocytidine
  modified_base 14: mod_base = OTHER; note = 2'-O-methylguanosine
  modified_base 15: mod_base = OTHER; note = 2'-fluoroguanosine
  modified_base 16: mod_base = OTHER; note = 2'-O-methylcytidine
  modified_base 17: mod_base = OTHER; note = 2'-fluorocytidine
  modified_base 18: mod_base = OTHER; note = 2'-O-methyladenosine
  modified_base 19: mod_base = OTHER; note = 2'-fluorocytidine with phosphorothioate linkage
  modified_base 20: mod_base = OTHER; note = 2'-O-methylcytidine with phosphorothioate linkage
  modified_base 21: mod_base = OTHER; note = 2'-O-methyluridine
gaagcataagcgcggccacct

SEQ ID NO: 2620 - RNA, 21 nt, synthetic construct
  source 1..21: mol_type = other RNA
  modified_base 1: mod_base = OTHER; note = 2'-O-methyladenosine with phosphorothioate linkage
  modified_base 2: mod_base = OTHER; note = 2'-O-methyladenosine with phosphorothioate linkage
  modified_base 3: mod_base = OTHER; note = 2'-fluoroguanosine
  modified_base 4: mod_base = OTHER; note = 2'-O-methyluridine
  modified_base 5: mod_base = OTHER; note = 2'-fluoroguanosine
  modified_base 6: mod_base = OTHER; note = 2'-O-methylcytidine
  modified_base 7: mod_base = OTHER; note = 2'-fluoroadenosine
  modified_base 8: mod_base = OTHER; note = 2'-O-methyladenosine
  modified_base 9: mod_base = OTHER; note = 2'-fluorocytidine
  modified_base 10: mod_base = OTHER; note = 2'-O-methylcytidine
  modified_base 11: mod_base = OTHER; note = 2'-fluorouridine
  modified_base 12: mod_base = OTHER; note = 2'-O-methylguanosine
  modified_base 13: mod_base = OTHER; note = 2'-fluorouridine
  modified_base 14: mod_base = OTHER; note = 2'-O-methylguanosine
  modified_base 15: mod_base = OTHER; note = 2'-fluorocytidine
  modified_base 16: mod_base = OTHER; note = 2'-O-methylguanosine
  modified_base 17: mod_base = OTHER; note = 2'-fluoroadenosine
  modified_base 18: mod_base = OTHER; note = 2'-O-methylcytidine
  modified_base 19: mod_base = OTHER; note = 2'-fluorocytidine with phosphorothioate linkage
  modified_base 20: mod_base = OTHER; note = 2'-O-methyladenosine with phosphorothioate linkage
  modified_base 21: mod_base = OTHER; note = 2'-O-methylcytidine
aagtgcaacctgtgcgaccac

SEQ ID NO: 2621 - RNA, 21 nt, synthetic construct
  source 1..21: mol_type = other RNA
  modified_base 1: mod_base = OTHER; note = 2'-O-methyladenosine with phosphorothioate linkage
  modified_base 2: mod_base = OTHER; note = 2'-O-methylguanosine with phosphorothioate linkage
  modified_base 3: mod_base = OTHER; note = 2'-fluorouridine
  modified_base 4: mod_base = OTHER; note = 2'-O-methylguanosine
  modified_base 5: mod_base = OTHER; note = 2'-fluorocytidine
  modified_base 6: mod_base = OTHER; note = 2'-O-methyladenosine
  modified_base 7: mod_base = OTHER; note = 2'-fluoroadenosine
  modified_base 8: mod_base = OTHER; note = 2'-O-methylcytidine
  modified_base 9: mod_base = OTHER; note = 2'-fluorocytidine
  modified_base 10: mod_base = OTHER; note = 2'-O-methyluridine
  modified_base 11: mod_base = OTHER; note = 2'-fluoroguanosine
  modified_base 12: mod_base = OTHER; note = 2'-O-methyluridine
  modified_base 13: mod_base = OTHER; note = 2'-fluoroguanosine
  modified_base 14: mod_base = OTHER; note = 2'-O-methylcytidine
  modified_base 15: mod_base = OTHER; note = 2'-fluoroguanosine
  modified_base 16: mod_base = OTHER; note = 2'-O-methyladenosine
  modified_base 17: mod_base = OTHER; note = 2'-fluorocytidine
  modified_base 18: mod_base = OTHER; note = 2'-O-methylcytidine
  modified_base 19: mod_base = OTHER; note = 2'-fluoroadenosine with phosphorothioate linkage
  modified_base 20: mod_base = OTHER; note = 2'-O-methylcytidine with phosphorothioate linkage
  modified_base 21: mod_base = OTHER; note = 2'-O-methylguanosine
agtgcaacctgtgcgaccacg

SEQ ID NO: 2622 - RNA, 21 nt, synthetic construct
  source 1..21: mol_type = other RNA
  modified_base 1: mod_base = OTHER; note = 2'-O-methylcytidine with phosphorothioate linkage
  modified_base 2: mod_base = OTHER; note = 2'-O-methylcytidine with phosphorothioate linkage
  modified_base 3: mod_base = OTHER; note = 2'-fluorouridine
  modified_base 4: mod_base = OTHER; note = 2'-O-methylguanosine
  modified_base 5: mod_base = OTHER; note = 2'-fluorocytidine
  modified_base 6: mod_base = OTHER; note = 2'-O-methylcytidine
  modified_base 7: mod_base = OTHER; note = 2'-fluorocytidine
  modified_base 8: mod_base = OTHER; note = 2'-O-methylguanosine
  modified_base 9: mod_base = OTHER; note = 2'-fluoroadenosine
  modified_base 10: mod_base = OTHER; note = 2'-O-methylcytidine
  modified_base 11: mod_base = OTHER; note = 2'-fluoroguanosine
  modified_base 12: mod_base = OTHER; note = 2'-O-methyluridine
  modified_base 13: mod_base = OTHER; note = 2'-fluorocytidine
  modified_base 14: mod_base = OTHER; note = 2'-O-methyladenosine
  modified_base 15: mod_base = OTHER; note = 2'-fluorouridine
  modified_base 16: mod_base = OTHER; note = 2'-O-methylguanosine
  modified_base 17: mod_base = OTHER; note = 2'-fluorocytidine
  modified_base 18: mod_base = OTHER; note = 2'-O-methyladenosine
  modified_base 19: mod_base = OTHER; note = 2'-fluoroguanosine with phosphorothioate linkage
  modified_base 20: mod_base = OTHER; note = 2'-O-methylguanosine with phosphorothioate linkage
  modified_base 21: mod_base = OTHER; note = 2'-O-methylguanosine
cctgcccgacgtcatgcaggg

SEQ ID NO: 2623 - RNA, 21 nt, synthetic construct
  source 1..21: mol_type = other RNA
  modified_base 1: mod_base = OTHER; note = 2'-O-methylcytidine with phosphorothioate linkage
  modified_base 2: mod_base = OTHER; note = 2'-O-methyluridine with phosphorothioate linkage
  modified_base 3: mod_base = OTHER; note = 2'-fluorocytidine
  modified_base 4: mod_base = OTHER; note = 2'-O-methylcytidine
  modified_base 5: mod_base = OTHER; note = 2'-fluorouridine
  modified_base 6: mod_base = OTHER; note = 2'-O-methylguanosine
  modified_base 7: mod_base = OTHER; note = 2'-fluoroadenosine
  modified_base 8: mod_base = OTHER; note = 2'-O-methylcytidine
  modified_base 9: mod_base = OTHER; note = 2'-fluoroguanosine
  modified_base 10: mod_base = OTHER; note = 2'-O-methyluridine
  modified_base 11: mod_base = OTHER; note = 2'-fluorouridine
  modified_base 12: mod_base = OTHER; note = 2'-O-methylcytidine
  modified_base 13: mod_base = OTHER; note = 2'-fluoroadenosine
  modified_base 14: mod_base = OTHER; note = 2'-O-methyladenosine
  modified_base 15: mod_base = OTHER; note = 2'-fluoroguanosine
  modified_base 16: mod_base = OTHER; note = 2'-O-methyluridine
  modified_base 17: mod_base = OTHER; note = 2'-fluorouridine
  modified_base 18: mod_base = OTHER; note = 2'-O-methylcytidine
  modified_base 19: mod_base = OTHER; note = 2'-fluoroguanosine with phosphorothioate linkage
  modified_base 20: mod_base = OTHER; note = 2'-O-methylcytidine with phosphorothioate linkage
  modified_base 21: mod_base = OTHER; note = 2'-O-methyladenosine
ctcctgacgttcaagttcgca

SEQ ID NO: 2624 - RNA, 21 nt, synthetic construct
  source 1..21: mol_type = other RNA
  modified_base 1: mod_base = OTHER; note = 2'-O-methylguanosine with phosphorothioate linkage
  modified_base 2: mod_base = OTHER; note = 2'-O-methyluridine with phosphorothioate linkage
  modified_base 3: mod_base = OTHER; note = 2'-fluoroguanosine
  modified_base 4: mod_base = OTHER; note = 2'-O-methylcytidine
  modified_base 5: mod_base = OTHER; note = 2'-fluoroadenosine
  modified_base 6: mod_base = OTHER; note = 2'-O-methyladenosine
  modified_base 7: mod_base = OTHER; note = 2'-fluorocytidine
  modified_base 8: mod_base = OTHER; note = 2'-O-methylcytidine
  modified_base 9: mod_base = OTHER; note = 2'-fluorouridine
  modified_base 10: mod_base = OTHER; note = 2'-O-methylguanosine
  modified_base 11: mod_base = OTHER; note = 2'-fluorouridine
  modified_base 12: mod_base = OTHER; note = 2'-O-methylguanosine
  modified_base 13: mod_base = OTHER; note = 2'-fluorocytidine
  modified_base 14: mod_base = OTHER; note = 2'-O-methylguanosine
  modified_base 15: mod_base = OTHER; note = 2'-fluoroadenosine
  modified_base 16: mod_base = OTHER; note = 2'-O-methylcytidine
  modified_base 17: mod_base = OTHER; note = 2'-fluorocytidine
  modified_base 18: mod_base = OTHER; note = 2'-O-methyladenosine
  modified_base 19: mod_base = OTHER; note = 2'-fluorocytidine with phosphorothioate linkage
  modified_base 20: mod_base = OTHER; note = 2'-O-methylguanosine with phosphorothioate linkage
  modified_base 21: mod_base = OTHER; note = 2'-O-methylcytidine
gtgcaacctgtgcgaccacgc

SEQ ID NO: 2625 - RNA, 21 nt, synthetic construct
  source 1..21: mol_type = other RNA
  modified_base 1: mod_base = OTHER; note = 2'-O-methylguanosine with phosphorothioate linkage
  modified_base 2: mod_base = OTHER; note = 2'-O-methylguanosine with phosphorothioate linkage
  modified_base 3: mod_base = OTHER; note = 2'-fluorouridine
  modified_base 4: mod_base = OTHER; note = 2'-O-methylcytidine
  modified_base 5: mod_base = OTHER; note = 2'-fluorocytidine
  modified_base 6: mod_base = OTHER; note = 2'-O-methyluridine
  modified_base 7: mod_base = OTHER; note = 2'-fluoroguanosine
  modified_base 8: mod_base = OTHER; note = 2'-O-methylguanosine
  modified_base 9: mod_base = OTHER; note = 2'-fluoroguanosine
  modified_base 10: mod_base = OTHER; note = 2'-O-methylcytidine
  modified_base 11: mod_base = OTHER; note = 2'-fluoroguanosine
  modified_base 12: mod_base = OTHER; note = 2'-O-methyladenosine
  modified_base 13: mod_base = OTHER; note = 2'-fluoroguanosine
  modified_base 14: mod_base = OTHER; note = 2'-O-methyladenosine
  modified_base 15: mod_base = OTHER; note = 2'-fluoroadenosine
  modified_base 16: mod_base = OTHER; note = 2'-O-methylguanosine
  modified_base 17: mod_base = OTHER; note = 2'-fluorocytidine
  modified_base 18: mod_base = OTHER; note = 2'-O-methyladenosine
  modified_base 19: mod_base = OTHER; note = 2'-fluorouridine with phosphorothioate linkage
  modified_base 20: mod_base = OTHER; note = 2'-O-methyladenosine with phosphorothioate linkage
  modified_base 21: mod_base = OTHER; note = 2'-O-methyladenosine
ggtcctgggcgagaagcataa

SEQ ID NO: 2626 - RNA, 21 nt, synthetic construct
  source 1..21: mol_type = other RNA
  modified_base 1: mod_base = OTHER; note = 2'-O-methylguanosine with phosphorothioate linkage
  modified_base 2: mod_base = OTHER; note = 2'-O-methylguanosine with phosphorothioate linkage
  modified_base 3: mod_base = OTHER; note = 2'-fluorocytidine
  modified_base 4: mod_base = OTHER; note = 2'-O-methylcytidine
  modified_base 5: mod_base = OTHER; note = 2'-fluoroadenosine
  modified_base 6: mod_base = OTHER; note = 2'-O-methylcytidine
  modified_base 7: mod_base = OTHER; note = 2'-fluoroadenosine
  modified_base 8: mod_base = OTHER; note = 2'-O-methylguanosine
  modified_base 9: mod_base = OTHER; note = 2'-fluoroguanosine
  modified_base 10: mod_base = OTHER; note = 2'-O-methylguanosine
  modified_base 11: mod_base = OTHER; note = 2'-fluoroadenosine
  modified_base 12: mod_base = OTHER; note = 2'-O-methylcytidine
  modified_base 13: mod_base = OTHER; note = 2'-fluoroadenosine
  modified_base 14: mod_base = OTHER; note = 2'-O-methylcytidine
  modified_base 15: mod_base = OTHER; note = 2'-fluorouridine
  modified_base 16: mod_base = OTHER; note = 2'-O-methyluridine
  modified_base 17: mod_base = OTHER; note = 2'-fluoroguanosine
  modified_base 18: mod_base = OTHER; note = 2'-O-methylcytidine
  modified_base 19: mod_base = OTHER; note = 2'-fluoroguanosine with phosphorothioate linkage
  modified_base 20: mod_base = OTHER; note = 2'-O-methyladenosine with phosphorothioate linkage
  modified_base 21: mod_base = OTHER; note = 2'-O-methylcytidine
ggccacagggacacttgcgac

SEQ ID NO: 2627 - RNA, 21 nt, synthetic construct
  source 1..21: mol_type = other RNA
  modified_base 1: mod_base = OTHER; note = 2'-O-methyladenosine with phosphorothioate linkage
  modified_base 2: mod_base = OTHER; note = 2'-O-methylguanosine with phosphorothioate linkage
  modified_base 3: mod_base = OTHER; note = 2'-fluoroadenosine
  modified_base 4: mod_base = OTHER; note = 2'-O-methyladenosine
  modified_base 5: mod_base = OTHER; note = 2'-fluorouridine
  modified_base 6: mod_base = OTHER; note = 2'-O-methyladenosine
  modified_base 7: mod_base = OTHER; note = 2'-fluorocytidine
  modified_base 8: mod_base = OTHER; note = 2'-O-methylcytidine
  modified_base 9: mod_base = OTHER; note = 2'-fluoroadenosine
  modified_base 10: mod_base = OTHER; note = 2'-O-methylguanosine
  modified_base 11: mod_base = OTHER; note = 2'-fluoroguanosine
  modified_base 12: mod_base = OTHER; note = 2'-O-methyladenosine
  modified_base 13: mod_base = OTHER; note = 2'-fluorouridine
  modified_base 14: mod_base = OTHER; note = 2'-O-methylcytidine
  modified_base 15: mod_base = OTHER; note = 2'-fluoroadenosine
  modified_base 16: mod_base = OTHER; note = 2'-O-methylguanosine
  modified_base 17: mod_base = OTHER; note = 2'-fluorouridine
  modified_base 18: mod_base = OTHER; note = 2'-O-methyladenosine
  modified_base 19: mod_base = OTHER; note = 2'-fluorouridine with phosphorothioate linkage
  modified_base 20: mod_base = OTHER; note = 2'-O-methylcytidine with phosphorothioate linkage
  modified_base 21: mod_base = OTHER; note = 2'-O-methylguanosine
agaataccaggatcagtatcg

SEQ ID NO: 2628 - RNA, 21 nt, synthetic construct
  source 1..21: mol_type = other RNA
  modified_base 1: mod_base = OTHER; note = 2'-O-methylguanosine with phosphorothioate linkage
  modified_base 2: mod_base = OTHER; note = 2'-O-methyladenosine with phosphorothioate linkage
  modified_base 3: mod_base = OTHER; note = 2'-fluoroadenosine
  modified_base 4: mod_base = OTHER; note = 2'-O-methylcytidine
  modified_base 5: mod_base = OTHER; note = 2'-fluorocytidine
  modified_base 6: mod_base = OTHER; note = 2'-O-methyladenosine
  modified_base 7: mod_base = OTHER; note = 2'-fluoroguanosine
  modified_base 8: mod_base = OTHER; note = 2'-O-methyladenosine
  modified_base 9: mod_base = OTHER; note = 2'-fluorocytidine
  modified_base 10: mod_base = OTHER; note = 2'-O-methylcytidine
  modified_base 11: mod_base = OTHER; note = 2'-fluoroadenosine
  modified_base 12: mod_base = OTHER; note = 2'-O-methylcytidine
  modified_base 13: mod_base = OTHER; note = 2'-fluoroguanosine
  modified_base 14: mod_base = OTHER; note = 2'-O-methylguanosine
  modified_base 15: mod_base = OTHER; note = 2'-fluorocytidine
  modified_base 16: mod_base = OTHER; note = 2'-O-methylcytidine
  modified_base 17: mod_base = OTHER; note = 2'-fluorocytidine
  modified_base 18: mod_base = OTHER; note = 2'-O-methylguanosine
  modified_base 19: mod_base = OTHER; note = 2'-fluorouridine with phosphorothioate linkage
  modified_base 20: mod_base = OTHER; note = 2'-O-methyluridine with phosphorothioate linkage
  modified_base 21: mod_base = OTHER; note = 2'-O-methylguanosine
gaaccagaccacggcccgttg

SEQ ID NO: 2629 - RNA, 21 nt, synthetic construct
  source 1..21: mol_type = other RNA
  modified_base 1: mod_base = OTHER; note = 2'-O-methylguanosine with phosphorothioate linkage
  modified_base 2: mod_base = OTHER; note = 2'-O-methylguanosine with phosphorothioate linkage
  modified_base 3: mod_base = OTHER; note = 2'-fluoroadenosine
  modified_base 4: mod_base = OTHER; note = 2'-O-methylguanosine
  modified_base 5: mod_base = OTHER; note = 2'-fluorocytidine
  modified_base 6: mod_base = OTHER; note = 2'-O-methylcytidine
  modified_base 7: mod_base = OTHER; note = 2'-fluorouridine
  modified_base 8: mod_base = OTHER; note = 2'-O-methylcytidine
  modified_base 9: mod_base = OTHER; note = 2'-fluorocytidine
  modified_base 10: mod_base = OTHER; note = 2'-O-methylcytidine
  modified_base 11: mod_base = OTHER; note = 2'-fluoroguanosine
  modified_base 12: mod_base = OTHER; note = 2'-O-methylcytidine
  modified_base 13: mod_base = OTHER; note = 2'-fluorocytidine
  modified_base 14: mod_base = OTHER; note = 2'-O-methyladenosine
  modified_base 15: mod_base = OTHER; note = 2'-fluorouridine
  modified_base 16: mod_base = OTHER; note = 2'-O-methylguanosine
  modified_base 17: mod_base = OTHER; note = 2'-fluoroguanosine
  modified_base 18: mod_base = OTHER; note = 2'-O-methyladenosine
  modified_base 19: mod_base = OTHER; note = 2'-fluorouridine with phosphorothioate linkage
  modified_base 20: mod_base = OTHER; note = 2'-O-methyluridine with phosphorothioate linkage
  modified_base 21: mod_base = OTHER; note = 2'-O-methyluridine
ggagcctcccgccatggattt

SEQ ID NO: 2630 - RNA, 21 nt, synthetic construct
  source 1..21: mol_type = other RNA
  modified_base 1: mod_base = OTHER; note = 2'-O-methyluridine with phosphorothioate linkage
  modified_base 2: mod_base = OTHER; note = 2'-O-methylguanosine with phosphorothioate linkage
  modified_base 3: mod_base = OTHER; note = 2'-fluoroadenosine
  modified_base 4: mod_base = OTHER; note = 2'-O-methyladenosine
  modified_base 5: mod_base = OTHER; note = 2'-fluorocytidine
  modified_base 6: mod_base = OTHER; note = 2'-O-methylcytidine
  modified_base 7: mod_base = OTHER; note = 2'-fluoroadenosine
  modified_base 8: mod_base = OTHER; note = 2'-O-methylguanosine
  modified_base 9: mod_base = OTHER; note = 2'-fluoroadenosine
  modified_base 10: mod_base = OTHER; note = 2'-O-methylcytidine
  modified_base 11: mod_base = OTHER; note = 2'-fluorocytidine
  modified_base 12: mod_base = OTHER; note = 2'-O-methyladenosine
  modified_base 13: mod_base = OTHER; note = 2'-fluorocytidine
  modified_base 14: mod_base = OTHER; note = 2'-O-methylguanosine
  modified_base 15: mod_base = OTHER; note = 2'-fluoroguanosine
  modified_base 16: mod_base = OTHER; note = 2'-O-methylcytidine
  modified_base 17: mod_base = OTHER; note = 2'-fluorocytidine
  modified_base 18: mod_base = OTHER; note = 2'-O-methylcytidine
  modified_base 19: mod_base = OTHER; note = 2'-fluoroguanosine with phosphorothioate linkage
  modified_base 20: mod_base = OTHER; note = 2'-O-methyluridine with phosphorothioate linkage
  modified_base 21: mod_base = OTHER; note = 2'-O-methyluridine
tgaaccagaccacggcccgtt

SEQ ID NO: 2631 - RNA, 21 nt, synthetic construct
  source 1..21: mol_type = other RNA
  modified_base 1: mod_base = OTHER; note = 2'-O-methyladenosine with phosphorothioate linkage
  modified_base 2: mod_base = OTHER; note = 2'-O-methylguanosine with phosphorothioate linkage
  modified_base 3: mod_base = OTHER; note = 2'-fluorocytidine
  modified_base 4: mod_base = OTHER; note = 2'-O-methylcytidine
  modified_base 5: mod_base = OTHER; note = 2'-fluoroadenosine
  modified_base 6: mod_base = OTHER; note = 2'-O-methylguanosine
  modified_base 7: mod_base = OTHER; note = 2'-fluoroguanosine
  modified_base 8: mod_base = OTHER; note = 2'-O-methyluridine
  modified_base 9: mod_base = OTHER; note = 2'-fluoroadenosine
  modified_base 10: mod_base = OTHER; note = 2'-O-methylguanosine
  modified_base 11: mod_base = OTHER; note = 2'-fluorocytidine
  modified_base 12: mod_base = OTHER; note = 2'-O-methyladenosine
  modified_base 13: mod_base = OTHER; note = 2'-fluoroadenosine
  modified_base 14: mod_base = OTHER; note = 2'-O-methylguanosine
  modified_base 15: mod_base = OTHER; note = 2'-fluorocytidine
  modified_base 16: mod_base = OTHER; note = 2'-O-methylcytidine
  modified_base 17: mod_base = OTHER; note = 2'-fluoroguanosine
  modified_base 18: mod_base = OTHER; note = 2'-O-methylcytidine
  modified_base 19: mod_base = OTHER; note = 2'-fluorocytidine with phosphorothioate linkage
  modified_base 20: mod_base = OTHER; note = 2'-O-methylcytidine with phosphorothioate linkage
  modified_base 21: mod_base = OTHER; note = 2'-O-methyluridine
agccaggtagcaagccgccct

SEQ ID NO: 2632 - RNA, 21 nt, synthetic construct
  source 1..21: mol_type = other RNA
  modified_base 1: mod_base = OTHER; note = 2'-O-methyladenosine with phosphorothioate linkage
  modified_base 2: mod_base = OTHER; note = 2'-O-methylguanosine with phosphorothioate linkage
  modified_base 3: mod_base = OTHER; note = 2'-fluoroadenosine
  modified_base 4: mod_base = OTHER; note = 2'-O-methylcytidine
  modified_base 5: mod_base = OTHER; note = 2'-fluorouridine
  modified_base 6: mod_base = OTHER; note = 2'-O-methylcytidine
  modified_base 7: mod_base = OTHER; note = 2'-fluorocytidine
  modified_base 8: mod_base = OTHER; note = 2'-O-methyluridine
  modified_base 9: mod_base = OTHER; note = 2'-fluoroguanosine
  modified_base 10: mod_base = OTHER; note = 2'-O-methyladenosine
  modified_base 11: mod_base = OTHER; note = 2'-fluorocytidine
  modified_base 12: mod_base = OTHER; note = 2'-O-methylguanosine
  modified_base 13: mod_base = OTHER; note = 2'-fluorouridine
  modified_base 14: mod_base = OTHER; note = 2'-O-methyluridine
  modified_base 15: mod_base = OTHER; note = 2'-fluorocytidine
  modified_base 16: mod_base = OTHER; note = 2'-O-methyladenosine
  modified_base 17: mod_base = OTHER; note = 2'-fluoroadenosine
  modified_base 18: mod_base = OTHER; note = 2'-O-methylguanosine
  modified_base 19: mod_base = OTHER; note = 2'-fluorouridine with phosphorothioate linkage
  modified_base 20: mod_base = OTHER; note = 2'-O-methyluridine with phosphorothioate linkage
  modified_base 21: mod_base = OTHER; note = 2'-O-methylcytidine
agactcctgacgttcaagttc

SEQ ID NO: 2633 - RNA, 21 nt, synthetic construct
  source 1..21: mol_type = other RNA
  modified_base 1: mod_base = OTHER; note = 2'-O-methyluridine with phosphorothioate linkage
  modified_base 2: mod_base = OTHER; note = 2'-O-methylcytidine with phosphorothioate linkage
  modified_base 3: mod_base = OTHER; note = 2'-fluoroadenosine
  modified_base 4: mod_base = OTHER; note = 2'-O-methylcytidine
  modified_base 5: mod_base = OTHER; note = 2'-fluoroguanosine
  modified_base 6: mod_base = OTHER; note = 2'-O-methylcytidine
  modified_base 7: mod_base = OTHER; note = 2'-fluorocytidine
  modified_base 8: mod_base = OTHER; note = 2'-O-methyladenosine
  modified_base 9: mod_base = OTHER; note = 2'-fluoroguanosine
  modified_base 10: mod_base = OTHER; note = 2'-O-methyladenosine
  modified_base 11: mod_base = OTHER; note = 2'-fluoroguanosine
  modified_base 12: mod_base = OTHER; note = 2'-O-methylguanosine
  modified_base 13: mod_base = OTHER; note = 2'-fluoroadenosine
  modified_base 14: mod_base = OTHER; note = 2'-O-methyluridine
  modified_base 15: mod_base = OTHER; note = 2'-fluoroguanosine
  modified_base 16: mod_base = OTHER; note = 2'-O-methyladenosine
  modified_base 17: mod_base = OTHER; note = 2'-fluorocytidine
  modified_base 18: mod_base = OTHER; note = 2'-O-methylguanosine
  modified_base 19: mod_base = OTHER; note = 2'-fluoroadenosine with phosphorothioate linkage
  modified_base 20: mod_base = OTHER; note = 2'-O-methyluridine with phosphorothioate linkage
  modified_base 21: mod_base = OTHER; note = 2'-O-methyluridine
tcacgccagaggatgacgatt

SEQ ID NO: 2634 - RNA, 21 nt, synthetic construct
  source 1..21: mol_type = other RNA
  modified_base 1: mod_base = OTHER; note = 2'-O-methylguanosine with phosphorothioate linkage
  modified_base 2: mod_base = OTHER; note = 2'-O-methyluridine with phosphorothioate linkage
  modified_base 3: mod_base = OTHER; note = 2'-fluorocytidine
  modified_base 4: mod_base = OTHER; note = 2'-O-methyladenosine
  modified_base 5: mod_base = OTHER; note = 2'-fluorocytidine
  modified_base 6: mod_base = OTHER; note = 2'-O-methylguanosine
  modified_base 7: mod_base = OTHER; note = 2'-fluorocytidine
  modified_base 8: mod_base = OTHER; note = 2'-O-methylcytidine
  modified_base 9: mod_base = OTHER; note = 2'-fluoroadenosine
  modified_base 10: mod_base = OTHER; note = 2'-O-methylguanosine
  modified_base 11: mod_base = OTHER; note = 2'-fluoroadenosine
  modified_base 12: mod_base = OTHER; note = 2'-O-methylguanosine
  modified_base 13: mod_base = OTHER; note = 2'-fluoroguanosine
  modified_base 14: mod_base = OTHER; note = 2'-O-methyladenosine
  modified_base 15: mod_base = OTHER; note = 2'-fluorouridine
  modified_base 16: mod_base = OTHER; note = 2'-O-methylguanosine
  modified_base 17: mod_base = OTHER; note = 2'-fluoroadenosine
  modified_base 18: mod_base = OTHER; note = 2'-O-methylcytidine
  modified_base 19: mod_base = OTHER; note = 2'-fluoroguanosine with phosphorothioate linkage
  modified_base 20: mod_base = OTHER; note = 2'-O-methyladenosine with phosphorothioate linkage
  modified_base 21: mod_base = OTHER; note = 2'-O-methyluridine
gtcacgccagaggatgacgat

SEQ ID NO: 2635 - RNA, 21 nt, synthetic construct
  source 1..21: mol_type = other RNA
  modified_base 1: mod_base = OTHER; note = 2'-O-methyluridine with phosphorothioate linkage
  modified_base 2: mod_base = OTHER; note = 2'-O-methylcytidine with phosphorothioate linkage
  modified_base 3: mod_base = OTHER; note = 2'-fluorocytidine
  modified_base 4: mod_base = OTHER; note = 2'-O-methyladenosine
  modified_base 5: mod_base = OTHER; note = 2'-fluoroadenosine
  modified_base 6: mod_base = OTHER; note = 2'-O-methyluridine
  modified_base 7: mod_base = OTHER; note = 2'-fluorocytidine
  modified_base 8: mod_base = OTHER; note = 2'-O-methylcytidine
  modified_base 9: mod_base = OTHER; note = 2'-fluorocytidine
  modified_base 10: mod_base = OTHER; note = 2'-O-methylguanosine
  modified_base 11: mod_base = OTHER; note = 2'-fluorouridine
  modified_base 12: mod_base = OTHER; note = 2'-O-methylguanosine
  modified_base 13: mod_base = OTHER; note = 2'-fluoroguanosine
  modified_base 14: mod_base = OTHER; note = 2'-O-methyladenosine
  modified_base 15: mod_base = OTHER; note = 2'-fluoroguanosine
  modified_base 16: mod_base = OTHER; note = 2'-O-methylguanosine
  modified_base 17: mod_base = OTHER; note = 2'-fluorouridine
  modified_base 18: mod_base = OTHER; note = 2'-O-methyluridine
  modified_base 19: mod_base = OTHER; note = 2'-fluoroguanosine with phosphorothioate linkage
  modified_base 20: mod_base = OTHER; note = 2'-O-methylguanosine with phosphorothioate linkage
  modified_base 21: mod_base = OTHER; note = 2'-O-methylcytidine
tccaatcccgtggaggttggc

SEQ ID NO: 2636 - RNA, 21 nt, synthetic construct
  source 1..21: mol_type = other RNA
  modified_base 1: mod_base = OTHER; note = 2'-O-methylcytidine with phosphorothioate linkage
  modified_base 2: mod_base = OTHER; note = 2'-O-methyladenosine with phosphorothioate linkage
  modified_base 3: mod_base = OTHER; note = 2'-fluoroguanosine
  modified_base 4: mod_base = OTHER; note = 2'-O-methyladenosine
  modified_base 5: mod_base = OTHER; note = 2'-fluorocytidine
  modified_base 6: mod_base = OTHER; note = 2'-O-methylcytidine
  modified_base 7: mod_base = OTHER; note = 2'-fluoroadenosine
  modified_base 8: mod_base = OTHER; note = 2'-O-methylcytidine
  modified_base 9: mod_base = OTHER; note = 2'-fluoroguanosine
  modified_base 10: mod_base = OTHER; note = 2'-O-methylguanosine
  modified_base 11: mod_base = OTHER; note = 2'-fluorocytidine
  modified_base 12: mod_base = OTHER; note = 2'-O-methylcytidine
  modified_base 13: mod_base = OTHER; note = 2'-fluorocytidine
  modified_base 14: mod_base = OTHER; note = 2'-O-methylguanosine
  modified_base 15: mod_base = OTHER; note = 2'-fluorouridine
  modified_base 16: mod_base = OTHER; note = 2'-O-methyluridine
  modified_base 17: mod_base = OTHER; note = 2'-fluoroguanosine
  modified_base 18: mod_base = OTHER; note = 2'-O-methylguanosine
  modified_base 19: mod_base = OTHER; note = 2'-fluoroguanosine with phosphorothioate linkage
  modified_base 20: mod_base = OTHER; note = 2'-O-methyladenosine with phosphorothioate linkage
  modified_base 21: mod_base = OTHER; note = 2'-O-methylguanosine
cagaccacggcccgttgggag

SEQ ID NO: 2637 - RNA, 21 nt, synthetic construct
  source 1..21: mol_type = other RNA
  modified_base 1: mod_base = OTHER; note = 2'-O-methylguanosine with phosphorothioate linkage
  modified_base 2: mod_base = OTHER; note = 2'-O-methylcytidine with phosphorothioate linkage
  modified_base 3: mod_base = OTHER; note = 2'-fluorocytidine
  modified_base 4: mod_base = OTHER; note = 2'-O-methyladenosine
  modified_base 5: mod_base = OTHER; note = 2'-fluoroadenosine
  modified_base 6: mod_base = OTHER; note = 2'-O-methylguanosine
  modified_base 7: mod_base = OTHER; note = 2'-fluorouridine
  modified_base 8: mod_base = OTHER; note = 2'-O-methyluridine
  modified_base 9: mod_base = OTHER; note = 2'-fluorocytidine
  modified_base 10: mod_base = OTHER; note = 2'-O-methyladenosine
  modified_base 11: mod_base = OTHER; note = 2'-fluoroadenosine
  modified_base 12: mod_base = OTHER; note = 2'-O-methylguanosine
  modified_base 13: mod_base = OTHER; note = 2'-fluoroadenosine
  modified_base 14: mod_base = OTHER; note = 2'-O-methylguanosine
  modified_base 15: mod_base = OTHER; note = 2'-fluorocytidine
  modified_base 16: mod_base = OTHER; note = 2'-O-methylguanosine
  modified_base 17: mod_base = OTHER; note = 2'-fluoroadenosine
  modified_base 18: mod_base = OTHER; note = 2'-O-methylguanosine
  modified_base 19: mod_base = OTHER; note = 2'-fluoroadenosine with phosphorothioate linkage
  modified_base 20: mod_base = OTHER; note = 2'-O-methyladenosine with phosphorothioate linkage
  modified_base 21: mod_base = OTHER; note = 2'-O-methylcytidine
gccaagttcaagagcgagaac

SEQ ID NO: 2638 - RNA, 21 nt, synthetic construct
  source 1..21: mol_type = other RNA
  modified_base 1: mod_base = OTHER; note = 2'-O-methyladenosine with phosphorothioate linkage
  modified_base 2: mod_base = OTHER; note = 2'-O-methylguanosine with phosphorothioate linkage
  modified_base 3: mod_base = OTHER; note = 2'-fluoroadenosine
  modified_base 4: mod_base = OTHER; note = 2'-O-methyluridine
  modified_base 5: mod_base = OTHER; note = 2'-fluoroguanosine
  modified_base 6: mod_base = OTHER; note = 2'-O-methyladenosine
  modified_base 7: mod_base = OTHER; note = 2'-fluorocytidine
  modified_base 8: mod_base = OTHER; note = 2'-O-methylcytidine
  modified_base 9: mod_base = OTHER; note = 2'-fluoroadenosine
  modified_base 10: mod_base = OTHER; note = 2'-O-methyladenosine
  modified_base 11: mod_base = OTHER; note = 2'-fluoroadenosine
  modified_base 12: mod_base = OTHER; note = 2'-O-methylguanosine
  modified_base 13: mod_base = OTHER; note = 2'-fluoroguanosine
  modified_base 14: mod_base = OTHER; note = 2'-O-methyluridine
  modified_base 15: mod_base = OTHER; note = 2'-fluorocytidine
  modified_base 16: mod_base = OTHER; note = 2'-O-methyladenosine
  modified_base 17: mod_base = OTHER; note = 2'-fluorouridine
  modified_base 18: mod_base = OTHER; note = 2'-O-methyluridine
  modified_base 19: mod_base = OTHER; note = 2'-fluoroadenosine with phosphorothioate linkage
  modified_base 20: mod_base = OTHER; note = 2'-O-methylcytidine with phosphorothioate linkage
  modified_base 21: mod_base = OTHER; note = 2'-O-methyladenosine
agatgaccaaaggtcattaca

SEQ ID NO: 2639 - RNA, 21 nt, synthetic construct
  source 1..21: mol_type = other RNA
  modified_base 1: mod_base = OTHER; note = 2'-O-methyluridine with phosphorothioate linkage
  modified_base 2: mod_base = OTHER; note = 2'-O-methylcytidine with phosphorothioate linkage
  modified_base 3: mod_base = OTHER; note = 2'-fluorocytidine
  modified_base 4: mod_base = OTHER; note = 2'-O-methylcytidine
  modified_base 5: mod_base = OTHER; note = 2'-fluorouridine
  modified_base 6: mod_base = OTHER; note = 2'-O-methyluridine
  modified_base 7: mod_base = OTHER; note = 2'-fluorocytidine
  modified_base 8: mod_base = OTHER; note = 2'-O-methylcytidine
  modified_base 9: mod_base = OTHER; note = 2'-fluorouridine
  modified_base 10: mod_base = OTHER; note = 2'-O-methyluridine
  modified_base 11: mod_base = OTHER; note = 2'-fluoroadenosine
  modified_base 12: mod_base = OTHER; note = 2'-O-methylguanosine
  modified_base 13: mod_base = OTHER; note = 2'-fluorocytidine
  modified_base 14: mod_base = OTHER; note = 2'-O-methyluridine
  modified_base 15: mod_base = OTHER; note = 2'-fluorouridine
  modified_base 16: mod_base = OTHER; note = 2'-O-methylcytidine
  modified_base 17: mod_base = OTHER; note = 2'-fluoroguanosine
  modified_base 18: mod_base = OTHER; note = 2'-O-methylguanosine
  modified_base 19: mod_base = OTHER; note = 2'-fluoroadenosine with phosphorothioate linkage
  modified_base 20: mod_base = OTHER; note = 2'-O-methylguanosine with phosphorothioate linkage
  modified_base 21: mod_base = OTHER; note = 2'-O-methyladenosine
tcccttccttagcttcggaga

SEQ ID NO: 2640 - RNA, 21 nt, synthetic construct
  source 1..21: mol_type = other RNA
  modified_base 1: mod_base = OTHER; note = 2'-O-methyladenosine with phosphorothioate linkage
  modified_base 2: mod_base = OTHER; note = 2'-O-methylcytidine with phosphorothioate linkage
  modified_base 3: mod_base = OTHER; note = 2'-fluoroadenosine
  modified_base 4: mod_base = OTHER; note = 2'-O-methylcytidine
  modified_base 5: mod_base = OTHER; note = 2'-fluoroguanosine
  modified_base 6: mod_base = OTHER; note = 2'-O-methyluridine
  modified_base 7: mod_base = OTHER; note = 2'-fluorocytidine
  modified_base 8: mod_base = OTHER; note = 2'-O-methyluridine
  modified_base 9: mod_base = OTHER; note = 2'-fluoroadenosine
  modified_base 10: mod_base = OTHER; note = 2'-O-methylguanosine
  modified_base 11: mod_base = OTHER; note = 2'-fluorocytidine
  modified_base 12: mod_base = OTHER; note = 2'-O-methylcytidine
  modified_base 13: mod_base = OTHER; note = 2'-fluorocytidine
  modified_base 14: mod_base = OTHER; note = 2'-O-methyladenosine
  modified_base 15: mod_base = OTHER; note = 2'-fluorocytidine
  modified_base 16: mod_base = OTHER; note = 2'-O-methylcytidine
  modified_base 17: mod_base = OTHER; note = 2'-fluoroguanosine
  modified_base 18: mod_base = OTHER; note = 2'-O-methylcytidine
  modified_base 19: mod_base = OTHER; note = 2'-fluorouridine with phosphorothioate linkage
  modified_base 20: mod_base = OTHER; note = 2'-O-methylguanosine with phosphorothioate linkage
  modified_base 21: mod_base = OTHER; note = 2'-O-methyluridine
acacgtctagcccaccgctgt

SEQ ID NO: 2641 - RNA, 21 nt, synthetic construct
  source 1..21: mol_type = other RNA
  modified_base 1: mod_base = OTHER; note = 2'-O-methylguanosine with phosphorothioate linkage
  modified_base 2: mod_base = OTHER; note = 2'-O-methyluridine with phosphorothioate linkage
  modified_base 3: mod_base = OTHER; note = 2'-fluoroguanosine
  modified_base 4: mod_base = OTHER; note = 2'-O-methylguanosine
  modified_base 5: mod_base = OTHER; note = 2'-fluorouridine
  modified_base 6: mod_base = OTHER; note = 2'-O-methylguanosine
  modified_base 7: mod_base = OTHER; note = 2'-fluoroguanosine
  modified_base 8: mod_base = OTHER; note = 2'-O-methylcytidine
  modified_base 9: mod_base = OTHER; note = 2'-fluorocytidine
  modified_base 10: mod_base = OTHER; note = 2'-O-methyladenosine
  modified_base 11: mod_base = OTHER; note = 2'-fluoroadenosine
  modified_base 12: mod_base = OTHER; note = 2'-O-methylguanosine
  modified_base 13: mod_base = OTHER; note = 2'-fluorouridine
  modified_base 14: mod_base = OTHER; note = 2'-O-methyluridine
  modified_base 15: mod_base = OTHER; note = 2'-fluorocytidine
  modified_base 16: mod_base = OTHER; note = 2'-O-methyladenosine
  modified_base 17: mod_base = OTHER; note = 2'-fluoroadenosine
  modified_base 18: mod_base = OTHER; note = 2'-O-methylguanosine
  modified_base 19: mod_base = OTHER; note = 2'-fluoroadenosine with phosphorothioate linkage
  modified_base 20: mod_base = OTHER; note = 2'-O-methylguanosine with phosphorothioate linkage
  modified_base 21: mod_base = OTHER; note = 2'-O-methylcytidine
gtggtggccaagttcaagagc

SEQ ID NO: 2642 - RNA, 21 nt, synthetic construct
  source 1..21: mol_type = other RNA
  modified_base 1: mod_base = OTHER; note = 2'-O-methylcytidine with phosphorothioate linkage
  modified_base 2: mod_base = OTHER; note = 2'-O-methylcytidine with phosphorothioate linkage
  modified_base 3: mod_base = OTHER; note = 2'-fluorocytidine
  modified_base 4: mod_base = OTHER; note = 2'-O-methyluridine
  modified_base 5: mod_base = OTHER; note = 2'-fluorouridine
  modified_base 6: mod_base = OTHER; note = 2'-O-methylcytidine
  modified_base 7: mod_base = OTHER; note = 2'-fluorocytidine
  modified_base 8: mod_base = OTHER; note = 2'-O-methyluridine
  modified_base 9: mod_base = OTHER; note = 2'-fluorouridine
  modified_base 10: mod_base = OTHER; note = 2'-O-methyladenosine
  modified_base 11: mod_base = OTHER; note = 2'-fluoroguanosine
  modified_base 12: mod_base = OTHER; note = 2'-O-methylcytidine
  modified_base 13: mod_base = OTHER; note = 2'-fluorouridine
  modified_base 14: mod_base = OTHER; note = 2'-O-methyluridine
  modified_base 15: mod_base = OTHER; note = 2'-fluorocytidine
  modified_base 16: mod_base = OTHER; note = 2'-O-methylguanosine
  modified_base 17: mod_base = OTHER; note = 2'-fluoroguanosine
  modified_base 18: mod_base = OTHER; note = 2'-O-methyladenosine
  modified_base 19: mod_base = OTHER; note = 2'-fluoroguanosine with phosphorothioate linkage
  modified_base 20: mod_base = OTHER; note = 2'-O-methyladenosine with phosphorothioate linkage
  modified_base 21: mod_base = OTHER; note = 2'-O-methylcytidine
cccttccttagcttcggagac

SEQ ID NO: 2643 - RNA, 21 nt, synthetic construct
  source 1..21: mol_type = other RNA
  modified_base 1: mod_base = OTHER; note = 2'-O-methyluridine with phosphorothioate linkage
  modified_base 2: mod_base = OTHER; note = 2'-O-methylguanosine with phosphorothioate linkage
  modified_base 3: mod_base = OTHER; note = 2'-fluorocytidine
  modified_base 4: mod_base = OTHER; note = 2'-O-methylcytidine
  modified_base 5: mod_base = OTHER; note = 2'-fluorocytidine
  modified_base 6: mod_base = OTHER; note = 2'-O-methyladenosine
  modified_base 7: mod_base = OTHER; note = 2'-fluoroadenosine
  modified_base 8: mod_base = OTHER; note = 2'-O-methylcytidine
  modified_base 9: mod_base = OTHER; note = 2'-fluoroadenosine
  modified_base 10: mod_base = OTHER; note = 2'-O-methylcytidine
  modified_base 11: mod_base = OTHER; note = 2'-fluoroguanosine
  modified_base 12: mod_base = OTHER; note = 2'-O-methylguanosine
  modified_base 13: mod_base = OTHER; note = 2'-fluoroadenosine
  modified_base 14: mod_base = OTHER; note = 2'-O-methylguanosine
  modified_base 15: mod_base = OTHER; note = 2'-fluoroadenosine
  modified_base 16: mod_base = OTHER; note = 2'-O-methyladenosine
  modified_base 17: mod_base = OTHER; note = 2'-fluorocytidine
  modified_base 18: mod_base = OTHER; note = 2'-O-methylguanosine
  modified_base 19: mod_base = OTHER; note = 2'-fluorouridine with phosphorothioate linkage
  modified_base 20: mod_base = OTHER; note = 2'-O-methylguanosine with phosphorothioate linkage
  modified_base 21: mod_base = OTHER; note = 2'-O-methyluridine
tgcccaacacggagaacgtgt

SEQ ID NO: 2644 - RNA, 21 nt, synthetic construct
  source 1..21: mol_type = other RNA
  modified_base 1: mod_base = OTHER; note = 2'-O-methylguanosine with phosphorothioate linkage
  modified_base 2: mod_base = OTHER; note = 2'-O-methyluridine with phosphorothioate linkage
  modified_base 3: mod_base = OTHER; note = 2'-fluoroadenosine
  modified_base 4: mod_base = OTHER; note = 2'-O-methyluridine
  modified_base 5: mod_base = OTHER; note = 2'-fluorocytidine
  modified_base 6: mod_base = OTHER; note = 2'-O-methylguanosine
  modified_base 7: mod_base = OTHER; note = 2'-fluoroadenosine
  modified_base 8: mod_base = OTHER; note = 2'-O-methylguanosine
  modified_base 9: mod_base = OTHER; note = 2'-fluoroadenosine
  modified_base 10: mod_base = OTHER; note = 2'-O-methylguanosine
  modified_base 11: mod_base = OTHER; note = 2'-fluoroadenosine
  modified_base 12: mod_base = OTHER; note = 2'-O-methylguanosine
  modified_base 13: mod_base = OTHER; note = 2'-fluoroguanosine
  modified_base 14: mod_base = OTHER; note = 2'-O-methylcytidine
  modified_base 15: mod_base = OTHER; note = 2'-fluorouridine
  modified_base 16: mod_base = OTHER; note = 2'-O-methyluridine
  modified_base 17: mod_base = OTHER; note = 2'-fluorocytidine
  modified_base 18: mod_base = OTHER; note = 2'-O-methylcytidine
  modified_base 19: mod_base = OTHER; note = 2'-fluoroguanosine with phosphorothioate linkage
  modified_base 20: mod_base = OTHER; note = 2'-O-methylguanosine with phosphorothioate linkage
  modified_base 21: mod_base = OTHER; note = 2'-O-methylcytidine
gtatcgagagaggcttccggc

SEQ ID NO: 2645 - RNA, 21 nt, synthetic construct
  source 1..21: mol_type = other RNA
  modified_base 1: mod_base = OTHER; note = 2'-O-methylcytidine with phosphorothioate linkage
  modified_base 2: mod_base = OTHER; note = 2'-O-methylguanosine with phosphorothioate linkage
  modified_base 3: mod_base = OTHER; note = 2'-fluorouridine
  modified_base 4: mod_base = OTHER; note = 2'-O-methylcytidine
  modified_base 5: mod_base = OTHER; note = 2'-fluorouridine
  modified_base 6: mod_base = OTHER; note = 2'-O-methyladenosine
  modified_base 7: mod_base = OTHER; note = 2'-fluoroguanosine
  modified_base 8: mod_base = OTHER; note = 2'-O-methylcytidine
  modified_base 9: mod_base = OTHER; note = 2'-fluorocytidine
  modified_base 10: mod_base = OTHER; note = 2'-O-methylcytidine
  modified_base 11: mod_base = OTHER; note = 2'-fluoroadenosine
  modified_base 12: mod_base = OTHER; note = 2'-O-methylcytidine
  modified_base 13: mod_base = OTHER; note = 2'-fluorocytidine
  modified_base 14: mod_base = OTHER; note = 2'-O-methylguanosine
  modified_base 15: mod_base = OTHER; note = 2'-fluorocytidine
  modified_base 16: mod_base = OTHER; note = 2'-O-methyluridine
  modified_base 17: mod_base = OTHER; note = 2'-fluoroguanosine
  modified_base 18: mod_base = OTHER; note = 2'-O-methyluridine
  modified_base 19: mod_base = OTHER; note = 2'-fluorocytidine with phosphorothioate linkage
  modified_base 20: mod_base = OTHER; note = 2'-O-methylcytidine with phosphorothioate linkage
  modified_base 21: mod_base = OTHER; note = 2'-O-methylcytidine
cgtctagcccaccgctgtccc

SEQ ID NO: 2646 - RNA, 21 nt, synthetic construct
  source 1..21: mol_type = other RNA
  modified_base 1: mod_base = OTHER; note = 2'-O-methyladenosine with phosphorothioate linkage
  modified_base 2: mod_base = OTHER; note = 2'-O-methylguanosine with phosphorothioate linkage
  modified_base 3: mod_base = OTHER; note = 2'-fluoroguanosine
  modified_base 4: mod_base = OTHER; note = 2'-O-methyluridine
  modified_base 5: mod_base = OTHER; note = 2'-fluorouridine
  modified_base 6: mod_base = OTHER; note = 2'-O-methylguanosine
  modified_base 7: mod_base = OTHER; note = 2'-fluoroguanosine
  modified_base 8: mod_base = OTHER; note = 2'-O-methylcytidine
  modified_base 9: mod_base = OTHER; note = 2'-fluoroadenosine
  modified_base 10: mod_base = OTHER; note = 2'-O-methyluridine
  modified_base 11: mod_base = OTHER; note = 2'-fluorocytidine
  modified_base 12: mod_base = OTHER; note = 2'-O-methylcytidine
  modified_base 13: mod_base = OTHER; note = 2'-fluoroadenosine
  modified_base 14: mod_base = OTHER; note = 2'-O-methylguanosine
  modified_base 15: mod_base = OTHER; note = 2'-fluoroguanosine
  modified_base 16: mod_base = OTHER; note = 2'-O-methyluridine
  modified_base 17: mod_base = OTHER; note = 2'-fluorocytidine
  modified_base 18: mod_base = OTHER; note = 2'-O-methyladenosine
  modified_base 19: mod_base = OTHER; note = 2'-fluorocytidine with phosphorothioate linkage
  modified_base 20: mod_base = OTHER; note = 2'-O-methylguanosine with phosphorothioate linkage
  modified_base 21: mod_base = OTHER; note = 2'-O-methylcytidine
aggttggcatccaggtcacgc

SEQ ID NO: 2647 - RNA, 21 nt, synthetic construct
  source 1..21: mol_type = other RNA
  modified_base 1: mod_base = OTHER; note = 2'-O-methyluridine with phosphorothioate linkage
  modified_base 2: mod_base = OTHER; note = 2'-O-methyladenosine with phosphorothioate linkage
  modified_base 3: mod_base = OTHER; note = 2'-fluorouridine
  modified_base 4: mod_base = OTHER; note = 2'-O-methylguanosine
  modified_base 5: mod_base = OTHER; note = 2'-fluoroguanosine
  modified_base 6: mod_base = OTHER; note = 2'-O-methyladenosine
  modified_base 7: mod_base = OTHER; note = 2'-fluoroguanosine
  modified_base 8: mod_base = OTHER; note = 2'-O-methylcytidine
  modified_base 9: mod_base = OTHER; note = 2'-fluorocytidine
  modified_base 10: mod_base = OTHER; note = 2'-O-methyluridine
  modified_base 11: mod_base = OTHER; note = 2'-fluorocytidine
  modified_base 12: mod_base = OTHER; note = 2'-O-methylcytidine
  modified_base 13: mod_base = OTHER; note = 2'-fluorocytidine
  modified_base 14: mod_base = OTHER; note = 2'-O-methylguanosine
  modified_base 15: mod_base = OTHER; note = 2'-fluorocytidine
  modified_base 16: mod_base = OTHER; note = 2'-O-methylcytidine
  modified_base 17: mod_base = OTHER; note = 2'-fluoroadenosine
  modified_base 18: mod_base = OTHER; note = 2'-O-methyluridine
  modified_base 19: mod_base = OTHER; note = 2'-fluoroguanosine with phosphorothioate linkage
  modified_base 20: mod_base = OTHER; note = 2'-O-methylguanosine with phosphorothioate linkage
  modified_base 21: mod_base = OTHER; note = 2'-O-methyladenosine
tatggagcctcccgccatgga

SEQ ID NO: 2648 - RNA, 21 nt, synthetic construct
  source 1..21: mol_type = other RNA
  modified_base 1: mod_base = OTHER; note = 2'-O-methyladenosine with phosphorothioate linkage
  modified_base 2: mod_base = OTHER; note = 2'-O-methyladenosine with phosphorothioate linkage
  modified_base 3: mod_base = OTHER; note = 2'-fluorouridine
  modified_base 4: mod_base = OTHER; note = 2'-O-methylcytidine
  modified_base 5: mod_base = OTHER; note = 2'-fluorocytidine
  modified_base 6: mod_base = OTHER; note = 2'-O-methylcytidine
  modified_base 7: mod_base = OTHER; note = 2'-fluoroguanosine
  modified_base 8: mod_base = OTHER; note = 2'-O-methyluridine
  modified_base 9: mod_base = OTHER; note = 2'-fluoroguanosine
  modified_base 10: mod_base = OTHER; note = 2'-O-methylguanosine
  modified_base 11: mod_base = OTHER; note = 2'-fluoroadenosine
  modified_base 12: mod_base = OTHER; note = 2'-O-methylguanosine
  modified_base 13: mod_base = OTHER; note = 2'-fluoroguanosine
  modified_base 14: mod_base = OTHER; note = 2'-O-methyluridine
  modified_base 15: mod_base = OTHER; note = 2'-fluorouridine
  modified_base 16: mod_base = OTHER; note = 2'-O-methylguanosine
  modified_base 17: mod_base = OTHER; note = 2'-fluoroguanosine
  modified_base 18: mod_base = OTHER; note = 2'-O-methylcytidine
  modified_base 19: mod_base = OTHER; note = 2'-fluoroadenosine with phosphorothioate linkage
  modified_base 20: mod_base = OTHER; note = 2'-O-methyluridine with phosphorothioate linkage
  modified_base 21: mod_base = OTHER; note = 2'-O-methylcytidine
aatcccgtggaggttggcatc

SEQ ID NO: 2649 - RNA, 21 nt, synthetic construct
  source 1..21: mol_type = other RNA
  modified_base 1: mod_base = OTHER; note = 2'-O-methyluridine with phosphorothioate linkage
  modified_base 2: mod_base = OTHER; note = 2'-O-methyluridine with phosphorothioate linkage
  modified_base 3: mod_base = OTHER; note = 2'-fluoroguanosine
  modified_base 4: mod_base = OTHER; note = 2'-O-methylguanosine
  modified_base 5: mod_base = OTHER; note = 2'-fluorocytidine
  modified_base 6: mod_base = OTHER; note = 2'-O-methyladenosine
  modified_base 7: mod_base = OTHER; note = 2'-fluorouridine
  modified_base 8: mod_base = OTHER; note = 2'-O-methylcytidine
  modified_base 9: mod_base = OTHER; note = 2'-fluorocytidine
  modified_base 10: mod_base = OTHER; note = 2'-O-methyladenosine
  modified_base 11: mod_base = OTHER; note = 2'-fluoroguanosine
  modified_base 12: mod_base = OTHER; note = 2'-O-methylguanosine
  modified_base 13: mod_base = OTHER; note = 2'-fluorouridine
  modified_base 14: mod_base = OTHER; note = 2'-O-methylcytidine
  modified_base 15: mod_base = OTHER; note = 2'-fluoroadenosine
  modified_base 16: mod_base = OTHER; note = 2'-O-methylcytidine
  modified_base 17: mod_base = OTHER; note = 2'-fluoroguanosine
  modified_base 18: mod_base = OTHER; note = 2'-O-methylcytidine
  modified_base 19: mod_base = OTHER; note = 2'-fluorocytidine with phosphorothioate linkage
  modified_base 20: mod_base = OTHER; note = 2'-O-methyladenosine with phosphorothioate linkage
  modified_base 21: mod_base = OTHER; note = 2'-O-methylguanosine
ttggcatccaggtcacgccag

SEQ ID NO: 2650 - RNA, 21 nt, synthetic construct
  source 1..21: mol_type = other RNA
  modified_base 1: mod_base = OTHER; note = 2'-O-methylcytidine with phosphorothioate linkage
  modified_base 2: mod_base = OTHER; note = 2'-O-methyluridine with phosphorothioate linkage
  modified_base 3: mod_base = OTHER; note = 2'-fluorouridine
  modified_base 4: mod_base = OTHER; note = 2'-O-methyladenosine
  modified_base 5: mod_base = OTHER; note = 2'-fluoroguanosine
  modified_base 6: mod_base = OTHER; note = 2'-O-methylcytidine
  modified_base 7: mod_base = OTHER; note = 2'-fluorouridine
  modified_base 8: mod_base = OTHER; note = 2'-O-methyluridine
  modified_base 9: mod_base = OTHER; note = 2'-fluorocytidine
  modified_base 10: mod_base = OTHER; note = 2'-O-methylguanosine
  modified_base 11: mod_base = OTHER; note = 2'-fluoroguanosine
  modified_base 12: mod_base = OTHER; note = 2'-O-methyladenosine
  modified_base 13: mod_base = OTHER; note = 2'-fluoroguanosine
  modified_base 14: mod_base = OTHER; note = 2'-O-methyladenosine
  modified_base 15: mod_base = OTHER; note = 2'-fluorocytidine
  modified_base 16: mod_base = OTHER; note = 2'-O-methyluridine
  modified_base 17: mod_base = OTHER; note = 2'-fluorocytidine
  modified_base 18: mod_base = OTHER; note = 2'-O-methylcytidine
  modified_base 19: mod_base = OTHER; note = 2'-fluoroadenosine with phosphorothioate linkage
  modified_base 20: mod_base = OTHER; note = 2'-O-methylguanosine with phosphorothioate linkage
  modified_base 21: mod_base = OTHER; note = 2'-O-methyladenosine
cttagcttcggagactccaga

SEQ ID NO: 2651 - RNA, 21 nt, synthetic construct
  source 1..21: mol_type = other RNA
  modified_base 1: mod_base = OTHER; note = 2'-O-methylcytidine with phosphorothioate linkage
  modified_base 2: mod_base = OTHER; note = 2'-O-methyladenosine with phosphorothioate linkage
  modified_base 3: mod_base = OTHER; note = 2'-fluorocytidine
  modified_base 4: mod_base = OTHER; note = 2'-O-methylguanosine
  modified_base 5: mod_base = OTHER; note = 2'-fluorouridine
  modified_base 6: mod_base = OTHER; note = 2'-O-methylcytidine
  modified_base 7: mod_base = OTHER; note = 2'-fluorouridine
  modified_base 8: mod_base = OTHER; note = 2'-O-methyladenosine
  modified_base 9: mod_base = OTHER; note = 2'-fluoroguanosine
  modified_base 10: mod_base = OTHER; note = 2'-O-methylcytidine
  modified_base 11: mod_base = OTHER; note = 2'-fluorocytidine
  modified_base 12: mod_base = OTHER; note = 2'-O-methylcytidine
  modified_base 13: mod_base = OTHER; note = 2'-fluoroadenosine
  modified_base 14: mod_base = OTHER; note = 2'-O-methylcytidine
  modified_base 15: mod_base = OTHER; note = 2'-fluorocytidine
  modified_base 16: mod_base = OTHER; note = 2'-O-methylguanosine
  modified_base 17: mod_base = OTHER; note = 2'-fluorocytidine
  modified_base 18: mod_base = OTHER; note = 2'-O-methyluridine
  modified_base 19: mod_base = OTHER; note = 2'-fluoroguanosine with phosphorothioate linkage
  modified_base 20: mod_base = OTHER; note = 2'-O-methyluridine with phosphorothioate linkage
  modified_base 21: mod_base = OTHER; note = 2'-O-methylcytidine
cacgtctagcccaccgctgtc

SEQ ID NO: 2652 - RNA, 21 nt, synthetic construct
  source 1..21: mol_type = other RNA
  modified_base 1: mod_base = OTHER; note = 2'-O-methyladenosine with phosphorothioate linkage
  modified_base 2: mod_base = OTHER; note = 2'-O-methyladenosine with phosphorothioate linkage
  modified_base 3: mod_base = OTHER; note = 2'-fluorocytidine
  modified_base 4: mod_base = OTHER; note = 2'-O-methylcytidine
  modified_base 5: mod_base = OTHER; note = 2'-fluoroadenosine
  modified_base 6: mod_base = OTHER; note = 2'-O-methylguanosine
  modified_base 7: mod_base = OTHER; note = 2'-fluoroadenosine
  modified_base 8: mod_base = OTHER; note = 2'-O-methylcytidine
  modified_base 9: mod_base = OTHER; note = 2'-fluorocytidine
  modified_base 10: mod_base = OTHER; note = 2'-O-methyladenosine
  modified_base 11: mod_base = OTHER; note = 2'-fluorocytidine
  modified_base 12: mod_base = OTHER; note = 2'-O-methylguanosine
  modified_base 13: mod_base = OTHER; note = 2'-fluoroguanosine
  modified_base 14: mod_base = OTHER; note = 2'-O-methylcytidine
  modified_base 15: mod_base = OTHER; note = 2'-fluorocytidine
  modified_base 16: mod_base = OTHER; note = 2'-O-methylcytidine
  modified_base 17: mod_base = OTHER; note = 2'-fluoroguanosine
  modified_base 18: mod_base = OTHER; note = 2'-O-methyluridine
  modified_base 19: mod_base = OTHER; note = 2'-fluorouridine with phosphorothioate linkage
  modified_base 20: mod_base = OTHER; note = 2'-O-methylguanosine with phosphorothioate linkage
  modified_base 21: mod_base = OTHER; note = 2'-O-methylguanosine
aaccagaccacggcccgttgg

SEQ ID NO: 2653 - RNA, 21 nt, synthetic construct
  source 1..21: mol_type = other RNA
  modified_base 1: mod_base = OTHER; note = 2'-O-methyladenosine with phosphorothioate linkage
  modified_base 2: mod_base = OTHER; note = 2'-O-methyladenosine with phosphorothioate linkage
  modified_base 3: mod_base = OTHER; note = 2'-fluorocytidine
  modified_base 4: mod_base = OTHER; note = 2'-O-methyladenosine
  modified_base 5: mod_base = OTHER; note = 2'-fluorocytidine
  modified_base 6: mod_base = OTHER; note = 2'-O-methylguanosine
  modified_base 7: mod_base = OTHER; note = 2'-fluorouridine
  modified_base 8: mod_base = OTHER; note = 2'-O-methylcytidine
  modified_base 9: mod_base = OTHER; note = 2'-fluorouridine
  modified_base 10: mod_base = OTHER; note = 2'-O-methyladenosine
  modified_base 11: mod_base = OTHER; note = 2'-fluoroguanosine
  modified_base 12: mod_base = OTHER; note = 2'-O-methylcytidine
  modified_base 13: mod_base = OTHER; note = 2'-fluorocytidine
  modified_base 14: mod_base = OTHER; note = 2'-O-methylcytidine
  modified_base 15: mod_base = OTHER; note = 2'-fluoroadenosine
  modified_base 16: mod_base = OTHER; note = 2'-O-methylcytidine
  modified_base 17: mod_base = OTHER; note = 2'-fluorocytidine
  modified_base 18: mod_base = OTHER; note = 2'-O-methylguanosine
  modified_base 19: mod_base = OTHER; note = 2'-fluorocytidine with phosphorothioate linkage
  modified_base 20: mod_base = OTHER; note = 2'-O-methyluridine with phosphorothioate linkage
  modified_base 21: mod_base = OTHER; note = 2'-O-methylguanosine
aacacgtctagcccaccgctg

SEQ ID NO: 2654 - RNA, 21 nt, synthetic construct
  source 1..21: mol_type = other RNA
  modified_base 1: mod_base = OTHER; note = 2'-O-methylguanosine with phosphorothioate linkage
  modified_base 2: mod_base = OTHER; note = 2'-O-methyluridine with phosphorothioate linkage
  modified_base 3: mod_base = OTHER; note = 2'-fluorocytidine
  modified_base 4: mod_base = OTHER; note = 2'-O-methylcytidine
  modified_base 5: mod_base = OTHER; note = 2'-fluoroadenosine
  modified_base 6: mod_base = OTHER; note = 2'-O-methyluridine
  modified_base 7: mod_base = OTHER; note = 2'-fluorocytidine
  modified_base 8: mod_base = OTHER; note = 2'-O-methylcytidine
  modified_base 9: mod_base = OTHER; note = 2'-fluoroadenosine
  modified_base 10: mod_base = OTHER; note = 2'-O-methylguanosine
  modified_base 11: mod_base = OTHER; note = 2'-fluoroadenosine
  modified_base 12: mod_base = OTHER; note = 2'-O-methylcytidine
  modified_base 13: mod_base = OTHER; note = 2'-fluorouridine
  modified_base 14: mod_base = OTHER; note = 2'-O-methylcytidine
  modified_base 15: mod_base = OTHER; note = 2'-fluorocytidine
  modified_base 16: mod_base = OTHER; note = 2'-O-methyluridine
  modified_base 17: mod_base = OTHER; note = 2'-fluoroguanosine
  modified_base 18: mod_base = OTHER; note = 2'-O-methyladenosine
  modified_base 19: mod_base = OTHER; note = 2'-fluorocytidine with phosphorothioate linkage
  modified_base 20: mod_base = OTHER; note = 2'-O-methylguanosine with phosphorothioate linkage
  modified_base 21: mod_base = OTHER; note = 2'-O-methyluridine
gtccatccagactcctgacgt

SEQ ID NO: 2655 - RNA, 21 nt, synthetic construct
  source 1..21: mol_type = other RNA
  modified_base 1: mod_base = OTHER; note = 2'-O-methyladenosine with phosphorothioate linkage
  modified_base 2: mod_base = OTHER; note = 2'-O-methylguanosine with phosphorothioate linkage
  modified_base 3: mod_base = OTHER; note = 2'-fluorocytidine
  modified_base 4: mod_base = OTHER; note = 2'-O-methyluridine
  modified_base 5: mod_base = OTHER; note = 2'-fluoroguanosine
  modified_base 6: mod_base = OTHER; note = 2'-O-methylguanosine
  modified_base 7: mod_base = OTHER; note = 2'-fluoroadenosine
  modified_base 8: mod_base = OTHER; note = 2'-O-methylcytidine
  modified_base 9: mod_base = OTHER; note = 2'-fluoroguanosine
  modified_base 10: mod_base = OTHER; note = 2'-O-methylguanosine
  modified_base 11: mod_base = OTHER; note = 2'-fluoroadenosine
  modified_base 12: mod_base = OTHER; note = 2'-O-methylguanosine
  modified_base 13: mod_base = OTHER; note = 2'-fluoroguanosine
  modified_base 14: mod_base = OTHER; note = 2'-O-methylguanosine
  modified_base 15: mod_base = OTHER; note = 2'-fluoroadenosine
  modified_base 16: mod_base = OTHER; note = 2'-O-methyluridine
  modified_base 17: mod_base = OTHER; note = 2'-fluorocytidine
  modified_base 18: mod_base = OTHER; note = 2'-O-methyluridine
  modified_base 19: mod_base = OTHER; note = 2'-fluorocytidine with phosphorothioate linkage
  modified_base 20: mod_base = OTHER; note = 2'-O-methylguanosine with phosphorothioate linkage
  modified_base 21: mod_base = OTHER; note = 2'-O-methylguanosine
agctggacggagggatctcgg

SEQ ID NO: 2656 - RNA, 21 nt, synthetic construct
  source 1..21: mol_type = other RNA
  modified_base 1: mod_base = OTHER; note = 2'-O-methylcytidine with phosphorothioate linkage
  modified_base 2: mod_base = OTHER; note = 2'-O-methyluridine with phosphorothioate linkage
  modified_base 3: mod_base = OTHER; note = 2'-fluoroadenosine
  modified_base 4: mod_base = OTHER; note = 2'-O-methyladenosine
  modified_base 5: mod_base = OTHER; note = 2'-fluoroguanosine
  modified_base 6: mod_base = OTHER; note = 2'-O-methylcytidine
  modified_base 7: mod_base = OTHER; note = 2'-fluoroguanosine
  modified_base 8: mod_base = OTHER; note = 2'-O-methylcytidine
  modified_base 9: mod_base = OTHER; note = 2'-fluoroadenosine
  modified_base 10: mod_base = OTHER; note = 2'-O-methyluridine
  modified_base 11: mod_base = OTHER; note = 2'-fluorocytidine
  modified_base 12: mod_base = OTHER; note = 2'-O-methyladenosine
  modified_base 13: mod_base = OTHER; note = 2'-fluoroadenosine
  modified_base 14: mod_base = OTHER; note = 2'-O-methylguanosine
  modified_base 15: mod_base = OTHER; note = 2'-fluorocytidine
  modified_base 16: mod_base = OTHER; note = 2'-O-methyluridine
  modified_base 17: mod_base = OTHER; note = 2'-fluorocytidine
  modified_base 18: mod_base = OTHER; note = 2'-O-methylguanosine
  modified_base 19: mod_base = OTHER; note = 2'-fluoroadenosine with phosphorothioate linkage
  modified_base 20: mod_base = OTHER; note = 2'-O-methylguanosine with phosphorothioate linkage
  modified_base 21: mod_base = OTHER; note = 2'-O-methyladenosine
ctaagcgcatcaagctcgaga

SEQ ID NO: 2657 - RNA, 21 nt, synthetic construct
  source 1..21: mol_type = other RNA
  modified_base 1: mod_base = OTHER; note = 2'-O-methylguanosine with phosphorothioate linkage
  modified_base 2: mod_base = OTHER; note = 2'-O-methyluridine with phosphorothioate linkage
  modified_base 3: mod_base = OTHER; note = 2'-fluorouridine
  modified_base 4: mod_base = OTHER; note = 2'-O-methylguanosine
  modified_base 5: mod_base = OTHER; note = 2'-fluoroguanosine
  modified_base 6: mod_base = OTHER; note = 2'-O-methylcytidine
  modified_base 7: mod_base = OTHER; note = 2'-fluoroadenosine
  modified_base 8: mod_base = OTHER; note = 2'-O-methyluridine
  modified_base 9: mod_base = OTHER; note = 2'-fluorocytidine
  modified_base 10: mod_base = OTHER; note = 2'-O-methylcytidine
  modified_base 11: mod_base = OTHER; note = 2'-fluoroadenosine
  modified_base 12: mod_base = OTHER; note = 2'-O-methylguanosine
  modified_base 13: mod_base = OTHER; note = 2'-fluoroguanosine
  modified_base 14: mod_base = OTHER; note = 2'-O-methyluridine
  modified_base 15: mod_base = OTHER; note = 2'-fluorocytidine
  modified_base 16: mod_base = OTHER; note = 2'-O-methyladenosine
  modified_base 17: mod_base = OTHER; note = 2'-fluorocytidine
  modified_base 18: mod_base = OTHER; note = 2'-O-methylguanosine
  modified_base 19: mod_base = OTHER; note = 2'-fluorocytidine with phosphorothioate linkage
  modified_base 20: mod_base = OTHER; note = 2'-O-methylcytidine with phosphorothioate linkage
  modified_base 21: mod_base = OTHER; note = 2'-O-methyladenosine
gttggcatccaggtcacgcca

SEQ ID NO: 2658 - RNA, 21 nt, synthetic construct
  source 1..21: mol_type = other RNA
  modified_base 1: mod_base = OTHER; note = 2'-O-methylcytidine with phosphorothioate linkage
  modified_base 2: mod_base = OTHER; note = 2'-O-methylcytidine with phosphorothioate linkage
  modified_base 3: mod_base = OTHER; note = 2'-fluoroadenosine
  modified_base 4: mod_base = OTHER; note = 2'-O-methylguanosine
  modified_base 5: mod_base = OTHER; note = 2'-fluoroguanosine
  modified_base 6: mod_base = OTHER; note = 2'-O-methyluridine
  modified_base 7: mod_base = OTHER; note = 2'-fluoroadenosine
  modified_base 8: mod_base = OTHER; note = 2'-O-methylguanosine
  modified_base 9: mod_base = OTHER; note = 2'-fluorocytidine
  modified_base 10: mod_base = OTHER; note = 2'-O-methyladenosine
  modified_base 11: mod_base = OTHER; note = 2'-fluoroadenosine
  modified_base 12: mod_base = OTHER; note = 2'-O-methylguanosine
  modified_base 13: mod_base = OTHER; note = 2'-fluorocytidine
  modified_base 14: mod_base = OTHER; note = 2'-O-methylcytidine
  modified_base 15: mod_base = OTHER; note = 2'-fluoroguanosine
  modified_base 16: mod_base = OTHER; note = 2'-O-methylcytidine
  modified_base 17: mod_base = OTHER; note = 2'-fluorocytidine
  modified_base 18: mod_base = OTHER; note = 2'-O-methylcytidine
  modified_base 19: mod_base = OTHER; note = 2'-fluorouridine with phosphorothioate linkage
  modified_base 20: mod_base = OTHER; note = 2'-O-methyluridine with phosphorothioate linkage
  modified_base 21: mod_base = OTHER; note = 2'-O-methylcytidine
ccaggtagcaagccgcccttc

SEQ ID NO: 2659 - RNA, 21 nt, synthetic construct
  source 1..21: mol_type = other RNA
  modified_base 1: mod_base = OTHER; note = 2'-O-methyladenosine with phosphorothioate linkage
  modified_base 2: mod_base = OTHER; note = 2'-O-methylcytidine with phosphorothioate linkage
  modified_base 3: mod_base = OTHER; note = 2'-fluorocytidine
  modified_base 4: mod_base = OTHER; note = 2'-O-methyluridine
  modified_base 5: mod_base = OTHER; note = 2'-fluorocytidine
  modified_base 6: mod_base = OTHER; note = 2'-O-methyluridine
  modified_base 7: mod_base = OTHER; note = 2'-fluorocytidine
  modified_base 8: mod_base = OTHER; note = 2'-O-methylcytidine
  modified_base 9: mod_base = OTHER; note = 2'-fluoroadenosine
  modified_base 10: mod_base = OTHER; note = 2'-O-methyluridine
  modified_base 11: mod_base = OTHER; note = 2'-fluoroguanosine
  modified_base 12: mod_base = OTHER; note = 2'-O-methylguanosine
  modified_base 13: mod_base = OTHER; note = 2'-fluoroguanosine
  modified_base 14: mod_base = OTHER; note = 2'-O-methyladenosine
  modified_base 15: mod_base = OTHER; note = 2'-fluorouridine
  modified_base 16: mod_base = OTHER; note = 2'-O-methyluridine
  modified_base 17: mod_base = OTHER; note = 2'-fluorocytidine
  modified_base 18: mod_base = OTHER; note = 2'-O-methyladenosine
  modified_base 19: mod_base = OTHER; note = 2'-fluorouridine with phosphorothioate linkage
  modified_base 20: mod_base = OTHER; note = 2'-O-methyladenosine with phosphorothioate linkage
  modified_base 21: mod_base = OTHER; note = 2'-O-methyluridine
acctctccatgggattcatat

SEQ ID NO: 2660 - RNA, 21 nt, synthetic construct
  source 1..21: mol_type = other RNA
  modified_base 1: mod_base = OTHER; note = 2'-O-methylcytidine with phosphorothioate linkage
  modified_base 2: mod_base = OTHER; note = 2'-O-methylcytidine with phosphorothioate linkage
  modified_base 3: mod_base = OTHER; note = 2'-fluoroadenosine
  modified_base 4: mod_base = OTHER; note = 2'-O-methylguanosine
  modified_base 5: mod_base = OTHER; note = 2'-fluorocytidine
  modified_base 6: mod_base = OTHER; note = 2'-O-methylcytidine
  modified_base 7: mod_base = OTHER; note = 2'-fluoroadenosine
  modified_base 8: mod_base = OTHER; note = 2'-O-methylguanosine
  modified_base 9: mod_base = OTHER; note = 2'-fluoroguanosine
  modified_base 10: mod_base = OTHER; note = 2'-O-methyluridine
  modified_base 11: mod_base = OTHER; note = 2'-fluoroadenosine
  modified_base 12: mod_base = OTHER; note = 2'-O-methylguanosine
  modified_base 13: mod_base = OTHER; note = 2'-fluorocytidine
  modified_base 14: mod_base = OTHER; note = 2'-O-methyladenosine
  modified_base 15: mod_base = OTHER; note = 2'-fluoroadenosine
  modified_base 16: mod_base = OTHER; note = 2'-O-methylguanosine
  modified_base 17: mod_base = OTHER; note = 2'-fluorocytidine
  modified_base 18: mod_base = OTHER; note = 2'-O-methylcytidine
  modified_base 19: mod_base = OTHER; note = 2'-fluoroguanosine with phosphorothioate linkage
  modified_base 20: mod_base = OTHER; note = 2'-O-methylcytidine with phosphorothioate linkage
  modified_base 21: mod_base = OTHER; note = 2'-O-methylcytidine
ccagccaggtagcaagccgcc

SEQ ID NO: 2661 - RNA, 21 nt, synthetic construct
  source 1..21: mol_type = other RNA
  modified_base 1: mod_base = OTHER; note = 2'-O-methyladenosine with phosphorothioate linkage
  modified_base 2: mod_base = OTHER; note = 2'-O-methylguanosine with phosphorothioate linkage
  modified_base 3: mod_base = OTHER; note = 2'-fluoroguanosine
  modified_base 4: mod_base = OTHER; note = 2'-O-methylguanosine
  modified_base 5: mod_base = OTHER; note = 2'-fluoroadenosine
  modified_base 6: mod_base = OTHER; note = 2'-O-methylcytidine
  modified_base 7: mod_base = OTHER; note = 2'-fluoroadenosine
  modified_base 8: mod_base = OTHER; note = 2'-O-methylcytidine
  modified_base 9: mod_base = OTHER; note = 2'-fluorouridine
  modified_base 10: mod_base = OTHER; note = 2'-O-methyluridine
  modified_base 11: mod_base = OTHER; note = 2'-fluoroguanosine
  modified_base 12: mod_base = OTHER; note = 2'-O-methylcytidine
  modified_base 13: mod_base = OTHER; note = 2'-fluoroguanosine
  modified_base 14: mod_base = OTHER; note = 2'-O-methyladenosine
  modified_base 15: mod_base = OTHER; note = 2'-fluorocytidine
  modified_base 16: mod_base = OTHER; note = 2'-O-methylguanosine
  modified_base 17: mod_base = OTHER; note = 2'-fluoroadenosine
  modified_base 18: mod_base = OTHER; note = 2'-O-methyladenosine
  modified_base 19: mod_base = OTHER; note = 2'-fluoroguanosine with phosphorothioate linkage
  modified_base 20: mod_base = OTHER; note = 2'-O-methyladenosine with phosphorothioate linkage
  modified_base 21: mod_base = OTHER; note = 2'-O-methylcytidine
agggacacttgcgacgaagac

SEQ ID NO: 2662 - RNA, 21 nt, synthetic construct
  source 1..21: mol_type = other RNA
  modified_base 1: mod_base = OTHER; note = 2'-O-methyladenosine with phosphorothioate linkage
  modified_base 2: mod_base = OTHER; note = 2'-O-methylcytidine with phosphorothioate linkage
  modified_base 3: mod_base = OTHER; note = 2'-fluoroadenosine
  modified_base 4: mod_base = OTHER; note = 2'-O-methyladenosine
  modified_base 5: mod_base = OTHER; note = 2'-fluoroguanosine
  modified_base 6: mod_base = OTHER; note = 2'-O-methyluridine
  modified_base 7: mod_base = OTHER; note = 2'-fluoroguanosine
  modified_base 8: mod_base = OTHER; note = 2'-O-methylcytidine
  modified_base 9: mod_base = OTHER; note = 2'-fluoroadenosine
  modified_base 10: mod_base = OTHER; note = 2'-O-methyladenosine
  modified_base 11: mod_base = OTHER; note = 2'-fluorocytidine
  modified_base 12: mod_base = OTHER; note = 2'-O-methylcytidine
  modified_base 13: mod_base = OTHER; note = 2'-fluorouridine
  modified_base 14: mod_base = OTHER; note = 2'-O-methylguanosine
  modified_base 15: mod_base = OTHER; note = 2'-fluorouridine
  modified_base 16: mod_base = OTHER; note = 2'-O-methylguanosine
  modified_base 17: mod_base = OTHER; note = 2'-fluorocytidine
  modified_base 18: mod_base = OTHER; note = 2'-O-methylguanosine
  modified_base 19: mod_base = OTHER; note = 2'-fluoroadenosine with phosphorothioate linkage
  modified_base 20: mod_base = OTHER; note = 2'-O-methylcytidine with phosphorothioate linkage
  modified_base 21: mod_base = OTHER; note = 2'-O-methylcytidine
acaagtgcaacctgtgcgacc

SEQ ID NO: 2663 - RNA, 21 nt, synthetic construct
  source 1..21: mol_type = other RNA
  modified_base 1: mod_base = OTHER; note = 2'-O-methylguanosine with phosphorothioate linkage
  modified_base 2: mod_base = OTHER; note = 2'-O-methylcytidine with phosphorothioate linkage
  modified_base 3: mod_base = OTHER; note = 2'-fluorouridine
  modified_base 4: mod_base = OTHER; note = 2'-O-methylguanosine
  modified_base 5: mod_base = OTHER; note = 2'-fluoroguanosine
  modified_base 6: mod_base = OTHER; note = 2'-O-methyladenosine
  modified_base 7: mod_base = OTHER; note = 2'-fluorocytidine
  modified_base 8: mod_base = OTHER; note = 2'-O-methylguanosine
  modified_base 9: mod_base = OTHER; note = 2'-fluoroguanosine
  modified_base 10: mod_base = OTHER; note = 2'-O-methyladenosine
  modified_base 11: mod_base = OTHER; note = 2'-fluoroguanosine
  modified_base 12: mod_base = OTHER; note = 2'-O-methylguanosine
  modified_base 13: mod_base = OTHER; note = 2'-fluoroguanosine
  modified_base 14: mod_base = OTHER; note = 2'-O-methyladenosine
  modified_base 15: mod_base = OTHER; note = 2'-fluorouridine
  modified_base 16: mod_base = OTHER; note = 2'-O-methylcytidine
  modified_base 17: mod_base = OTHER; note = 2'-fluorouridine
  modified_base 18: mod_base = OTHER; note = 2'-O-methylcytidine
  modified_base 19: mod_base = OTHER; note = 2'-fluoroguanosine with phosphorothioate linkage
  modified_base 20: mod_base = OTHER; note = 2'-O-methylguanosine with phosphorothioate linkage
  modified_base 21: mod_base = OTHER; note = 2'-O-methylguanosine
gctggacggagggatctcggg

SEQ ID NO: 2664 - RNA, 21 nt, synthetic construct
  source 1..21: mol_type = other RNA
  modified_base 1: mod_base = OTHER; note = 2'-O-methylcytidine with phosphorothioate linkage
  modified_base 2: mod_base = OTHER; note = 2'-O-methyladenosine with phosphorothioate linkage
  modified_base 3: mod_base = OTHER; note = 2'-fluoroadenosine
  modified_base 4: mod_base = OTHER; note = 2'-O-methyladenosine
  modified_base 5: mod_base = OTHER; note = 2'-fluorouridine
  modified_base 6: mod_base = OTHER; note = 2'-O-methyluridine
  modified_base 7: mod_base = OTHER; note = 2'-fluorouridine
  modified_base 8: mod_base = OTHER; note = 2'-O-methylcytidine
  modified_base 9: mod_base = OTHER; note = 2'-fluoroadenosine
  modified_base 10: mod_base = OTHER; note = 2'-O-methylguanosine
  modified_base 11: mod_base = OTHER; note = 2'-fluoroadenosine
  modified_base 12: mod_base = OTHER; note = 2'-O-methylguanosine
  modified_base 13: mod_base = OTHER; note = 2'-fluorocytidine
  modified_base 14: mod_base = OTHER; note = 2'-O-methyladenosine
  modified_base 15: mod_base = OTHER; note = 2'-fluoroadenosine
  modified_base 16: mod_base = OTHER; note = 2'-O-methylcytidine
  modified_base 17: mod_base = OTHER; note = 2'-fluorocytidine
  modified_base 18: mod_base = OTHER; note = 2'-O-methyluridine
  modified_base 19: mod_base = OTHER; note = 2'-fluoroguanosine with phosphorothioate linkage
  modified_base 20: mod_base = OTHER; note = 2'-O-methylguanosine with phosphorothioate linkage
  modified_base 21: mod_base = OTHER; note = 2'-O-methyluridine
caaatttcagagcaacctggt

SEQ ID NO: 2665 - RNA, 21 nt, synthetic construct
  source 1..21: mol_type = other RNA
  modified_base 1: mod_base = OTHER; note = 2'-O-methylcytidine with phosphorothioate linkage
  modified_base 2: mod_base = OTHER; note = 2'-O-methyluridine with phosphorothioate linkage
  modified_base 3: mod_base = OTHER; note = 2'-fluoroguanosine
  modified_base 4: mod_base = OTHER; note = 2'-O-methyluridine
  modified_base 5: mod_base = OTHER; note = 2'-fluorocytidine
  modified_base 6: mod_base = OTHER; note = 2'-O-methylcytidine
  modified_base 7: mod_base = OTHER; note = 2'-fluoroadenosine
  modified_base 8: mod_base = OTHER; note = 2'-O-methyluridine
  modified_base 9: mod_base = OTHER; note = 2'-fluorocytidine
  modified_base 10: mod_base = OTHER; note = 2'-O-methylcytidine
  modified_base 11: mod_base = OTHER; note = 2'-fluoroadenosine
  modified_base 12: mod_base = OTHER; note = 2'-O-methylguanosine
  modified_base 13: mod_base = OTHER; note = 2'-fluoroadenosine
  modified_base 14: mod_base = OTHER; note = 2'-O-methylcytidine
  modified_base 15: mod_base = OTHER; note = 2'-fluorouridine
  modified_base 16: mod_base = OTHER; note = 2'-O-methylcytidine
  modified_base 17: mod_base = OTHER; note = 2'-fluorocytidine
  modified_base 18: mod_base = OTHER; note = 2'-O-methyluridine
  modified_base 19: mod_base = OTHER; note = 2'-fluoroguanosine with phosphorothioate linkage
  modified_base 20: mod_base = OTHER; note = 2'-O-methyladenosine with phosphorothioate linkage
  modified_base 21: mod_base = OTHER; note = 2'-O-methylcytidine
ctgtccatccagactcctgac

SEQ ID NO: 2666 - RNA, 21 nt, synthetic construct
  source 1..21: mol_type = other RNA
  modified_base 1: mod_base = OTHER; note = 2'-O-methyladenosine with phosphorothioate linkage
  modified_base 2: mod_base = OTHER; note = 2'-O-methyluridine with phosphorothioate linkage
  modified_base 3: mod_base = OTHER; note = 2'-fluorocytidine
  modified_base 4: mod_base = OTHER; note = 2'-O-methylcytidine
  modified_base 5: mod_base = OTHER; note = 2'-fluorocytidine
  modified_base 6: mod_base = OTHER; note = 2'-O-methylguanosine
  modified_base 7: mod_base = OTHER; note = 2'-fluorouridine
  modified_base 8: mod_base = OTHER; note = 2'-O-methylguanosine
  modified_base 9: mod_base = OTHER; note = 2'-fluoroguanosine
  modified_base 10: mod_base = OTHER; note = 2'-O-methyladenosine
  modified_base 11: mod_base = OTHER; note = 2'-fluoroguanosine
  modified_base 12: mod_base = OTHER; note = 2'-O-methylguanosine
  modified_base 13: mod_base = OTHER; note = 2'-fluorouridine
  modified_base 14: mod_base = OTHER; note = 2'-O-methyluridine
  modified_base 15: mod_base = OTHER; note = 2'-fluoroguanosine
  modified_base 16: mod_base = OTHER; note = 2'-O-methylguanosine
  modified_base 17: mod_base = OTHER; note = 2'-fluorocytidine
  modified_base 18: mod_base = OTHER; note = 2'-O-methyladenosine
  modified_base 19: mod_base = OTHER; note = 2'-fluorouridine with phosphorothioate linkage
  modified_base 20: mod_base = OTHER; note = 2'-O-methylcytidine with phosphorothioate linkage
  modified_base 21: mod_base = OTHER; note = 2'-O-methylcytidine
atcccgtggaggttggcatcc

SEQ ID NO: 2667 - RNA, 21 nt, synthetic construct
  source 1..21: mol_type = other RNA
  modified_base 1: mod_base = OTHER; note = 2'-O-methyluridine with phosphorothioate linkage
  modified_base 2: mod_base = OTHER; note = 2'-O-methylcytidine with phosphorothioate linkage
  modified_base 3: mod_base = OTHER; note = 2'-fluorocytidine
  modified_base 4: mod_base = OTHER; note = 2'-O-methyluridine
  modified_base 5: mod_base = OTHER; note = 2'-fluoroguanosine
  modified_base 6: mod_base = OTHER; note = 2'-O-methylguanosine
  modified_base 7: mod_base = OTHER; note = 2'-fluoroguanosine
  modified_base 8: mod_base = OTHER; note = 2'-O-methylcytidine
  modified_base 9: mod_base = OTHER; note = 2'-fluoroguanosine
  modified_base 10: mod_base = OTHER; note = 2'-O-methyladenosine
  modified_base 11: mod_base = OTHER; note = 2'-fluoroguanosine
  modified_base 12: mod_base = OTHER; note = 2'-O-methyladenosine
  modified_base 13: mod_base = OTHER; note = 2'-fluoroadenosine
  modified_base 14: mod_base = OTHER; note = 2'-O-methylguanosine
  modified_base 15: mod_base = OTHER; note = 2'-fluorocytidine
  modified_base 16: mod_base = OTHER; note = 2'-O-methyladenosine
  modified_base 17: mod_base = OTHER; note = 2'-fluorouridine
  modified_base 18: mod_base = OTHER; note = 2'-O-methyladenosine
  modified_base 19: mod_base = OTHER; note = 2'-fluoroadenosine with phosphorothioate linkage
  modified_base 20: mod_base = OTHER; note = 2'-O-methylguanosine with phosphorothioate linkage
  modified_base 21: mod_base = OTHER; note = 2'-O-methylcytidine
tcctgggcgagaagcataagc

SEQ ID NO: 2668 - RNA, 21 nt, synthetic construct
  source 1..21: mol_type = other RNA
  modified_base 1: mod_base = OTHER; note = 2'-O-methyluridine with phosphorothioate linkage
  modified_base 2: mod_base = OTHER; note = 2'-O-methyladenosine with phosphorothioate linkage
  modified_base 3: mod_base = OTHER; note = 2'-fluoroguanosine
  modified_base 4: mod_base = OTHER; note = 2'-O-methylcytidine
  modified_base 5: mod_base = OTHER; note = 2'-fluorouridine
  modified_base 6: mod_base = OTHER; note = 2'-O-methyluridine
  modified_base 7: mod_base = OTHER; note = 2'-fluorocytidine
  modified_base 8: mod_base = OTHER; note = 2'-O-methylguanosine
  modified_base 9: mod_base = OTHER; note = 2'-fluoroguanosine
  modified_base 10: mod_base = OTHER; note = 2'-O-methyladenosine
  modified_base 11: mod_base = OTHER; note = 2'-fluoroguanosine
  modified_base 12: mod_base = OTHER; note = 2'-O-methyladenosine
  modified_base 13: mod_base = OTHER; note = 2'-fluorocytidine
  modified_base 14: mod_base = OTHER; note = 2'-O-methyluridine
  modified_base 15: mod_base = OTHER; note = 2'-fluorocytidine
  modified_base 16: mod_base = OTHER; note = 2'-O-methylcytidine
  modified_base 17: mod_base = OTHER; note = 2'-fluoroadenosine
  modified_base 18: mod_base = OTHER; note = 2'-O-methylguanosine
  modified_base 19: mod_base = OTHER; note = 2'-fluoroadenosine with phosphorothioate linkage
  modified_base 20: mod_base = OTHER; note = 2'-O-methylcytidine with phosphorothioate linkage
  modified_base 21: mod_base = OTHER; note = 2'-O-methyladenosine
tagcttcggagactccagaca

SEQ ID NO: 2669 - RNA, 21 nt, synthetic construct
  source 1..21: mol_type = other RNA
  modified_base 1: mod_base = OTHER; note = 2'-O-methyluridine with phosphorothioate linkage
  modified_base 2: mod_base = OTHER; note = 2'-O-methyladenosine with phosphorothioate linkage
  modified_base 3: mod_base = OTHER; note = 2'-fluorouridine
  modified_base 4: mod_base = OTHER; note = 2'-O-methylcytidine
  modified_base 5: mod_base = OTHER; note = 2'-fluoroguanosine
  modified_base 6: mod_base = OTHER; note = 2'-O-methyladenosine
  modified_base 7: mod_base = OTHER; note = 2'-fluoroguanosine
  modified_base 8: mod_base = OTHER; note = 2'-O-methyladenosine
  modified_base 9: mod_base = OTHER; note = 2'-fluoroguanosine
  modified_base 10: mod_base = OTHER; note = 2'-O-methyladenosine
  modified_base 11: mod_base = OTHER; note = 2'-fluoroguanosine
  modified_base 12: mod_base = OTHER; note = 2'-O-methylguanosine
  modified_base 13: mod_base = OTHER; note = 2'-fluorocytidine
  modified_base 14: mod_base = OTHER; note = 2'-O-methyluridine
  modified_base 15: mod_base = OTHER; note = 2'-fluorouridine
  modified_base 16: mod_base = OTHER; note = 2'-O-methylcytidine
  modified_base 17: mod_base = OTHER; note = 2'-fluorocytidine
  modified_base 18: mod_base = OTHER; note = 2'-O-methylguanosine
  modified_base 19: mod_base = OTHER; note = 2'-fluoroguanosine with phosphorothioate linkage
  modified_base 20: mod_base = OTHER; note = 2'-O-methylcytidine with phosphorothioate linkage
  modified_base 21: mod_base = OTHER; note = 2'-O-methylcytidine
tatcgagagaggcttccggcc

SEQ ID NO: 2670 - RNA, 21 nt, synthetic construct
  source 1..21: mol_type = other RNA
  modified_base 1: mod_base = OTHER; note = 2'-O-methylcytidine with phosphorothioate linkage
  modified_base 2: mod_base = OTHER; note = 2'-O-methylcytidine with phosphorothioate linkage
  modified_base 3: mod_base = OTHER; note = 2'-fluoroguanosine
  modified_base 4: mod_base = OTHER; note = 2'-O-methyladenosine
  modified_base 5: mod_base = OTHER; note = 2'-fluorocytidine
  modified_base 6: mod_base = OTHER; note = 2'-O-methylguanosine
  modified_base 7: mod_base = OTHER; note = 2'-fluorouridine
  modified_base 8: mod_base = OTHER; note = 2'-O-methylcytidine
  modified_base 9: mod_base = OTHER; note = 2'-fluoroadenosine
  modified_base 10: mod_base = OTHER; note = 2'-O-methyluridine
  modified_base 11: mod_base = OTHER; note = 2'-fluoroguanosine
  modified_base 12: mod_base = OTHER; note = 2'-O-methylcytidine
  modified_base 13: mod_base = OTHER; note = 2'-fluoroadenosine
  modified_base 14: mod_base = OTHER; note = 2'-O-methylguanosine
  modified_base 15: mod_base = OTHER; note = 2'-fluoroguanosine
  modified_base 16: mod_base = OTHER; note = 2'-O-methylguanosine
  modified_base 17: mod_base = OTHER; note = 2'-fluorocytidine
  modified_base 18: mod_base = OTHER; note = 2'-O-methyladenosine
  modified_base 19: mod_base = OTHER; note = 2'-fluorouridine with phosphorothioate linkage
  modified_base 20: mod_base = OTHER; note = 2'-O-methylguanosine with phosphorothioate linkage
  modified_base 21: mod_base = OTHER; note = 2'-O-methylguanosine
ccgacgtcatgcagggcatgg

SEQ ID NO: 2671 - RNA, 21 nt, synthetic construct
  source 1..21: mol_type = other RNA
  modified_base 1: mod_base = OTHER; note = 2'-O-methyluridine with phosphorothioate linkage
  modified_base 2: mod_base = OTHER; note = 2'-O-methylguanosine with phosphorothioate linkage
  modified_base 3: mod_base = OTHER; note = 2'-fluorouridine
  modified_base 4: mod_base = OTHER; note = 2'-O-methylcytidine
  modified_base 5: mod_base = OTHER; note = 2'-fluorocytidine
  modified_base 6: mod_base = OTHER; note = 2'-O-methyladenosine
  modified_base 7: mod_base = OTHER; note = 2'-fluorouridine
  modified_base 8: mod_base = OTHER; note = 2'-O-methylcytidine
  modified_base 9: mod_base = OTHER; note = 2'-fluorocytidine
  modified_base 10: mod_base = OTHER; note = 2'-O-methyladenosine
  modified_base 11: mod_base = OTHER; note = 2'-fluoroguanosine
  modified_base 12: mod_base = OTHER; note = 2'-O-methyladenosine
  modified_base 13: mod_base = OTHER; note = 2'-fluorocytidine
  modified_base 14: mod_base = OTHER; note = 2'-O-methyluridine
  modified_base 15: mod_base = OTHER; note = 2'-fluorocytidine
  modified_base 16: mod_base = OTHER; note = 2'-O-methylcytidine
  modified_base 17: mod_base = OTHER; note = 2'-fluorouridine
  modified_base 18: mod_base = OTHER; note = 2'-O-methylguanosine
  modified_base 19: mod_base = OTHER; note = 2'-fluoroadenosine with phosphorothioate linkage
  modified_base 20: mod_base = OTHER; note = 2'-O-methylcytidine with phosphorothioate linkage
  modified_base 21: mod_base = OTHER; note = 2'-O-methylguanosine
tgtccatccagactcctgacg

SEQ ID NO: 2672 - RNA, 21 nt, synthetic construct
  source 1..21: mol_type = other RNA
  modified_base 1: mod_base = OTHER; note = 2'-O-methyladenosine with phosphorothioate linkage
  modified_base 2: mod_base = OTHER; note = 2'-O-methylguanosine with phosphorothioate linkage
  modified_base 3: mod_base = OTHER; note = 2'-fluoroguanosine
  modified_base 4: mod_base = OTHER; note = 2'-O-methylguanosine
  modified_base 5: mod_base = OTHER; note = 2'-fluorocytidine
  modified_base 6: mod_base = OTHER; note = 2'-O-methylcytidine
  modified_base 7: mod_base = OTHER; note = 2'-fluoroadenosine
  modified_base 8: mod_base = OTHER; note = 2'-O-methylcytidine
  modified_base 9: mod_base = OTHER; note = 2'-fluoroadenosine
  modified_base 10: mod_base = OTHER; note = 2'-O-methylguanosine
  modified_base 11: mod_base = OTHER; note = 2'-fluoroguanosine
  modified_base 12: mod_base = OTHER; note = 2'-O-methylguanosine
  modified_base 13: mod_base = OTHER; note = 2'-fluoroadenosine
  modified_base 14: mod_base = OTHER; note = 2'-O-methylcytidine
  modified_base 15: mod_base = OTHER; note = 2'-fluoroadenosine
  modified_base 16: mod_base = OTHER; note = 2'-O-methylcytidine
  modified_base 17: mod_base = OTHER; note = 2'-fluorouridine
  modified_base 18: mod_base = OTHER; note = 2'-O-methyluridine
  modified_base 19: mod_base = OTHER; note = 2'-fluoroguanosine with phosphorothioate linkage
  modified_base 20: mod_base = OTHER; note = 2'-O-methylcytidine with phosphorothioate linkage
  modified_base 21: mod_base = OTHER; note = 2'-O-methylguanosine
agggccacagggacacttgcg

SEQ ID NO: 2673 - RNA, 21 nt, synthetic construct
  source 1..21: mol_type = other RNA
  modified_base 1: mod_base = OTHER; note = 2'-O-methyladenosine with phosphorothioate linkage
  modified_base 2: mod_base = OTHER; note = 2'-O-methylcytidine with phosphorothioate linkage
  modified_base 3: mod_base = OTHER; note = 2'-fluorocytidine
  modified_base 4: mod_base = OTHER; note = 2'-O-methyladenosine
  modified_base 5: mod_base = OTHER; note = 2'-fluoroguanosine
  modified_base 6: mod_base = OTHER; note = 2'-O-methyladenosine
  modified_base 7: mod_base = OTHER; note = 2'-fluorocytidine
  modified_base 8: mod_base = OTHER; note = 2'-O-methylcytidine
  modified_base 9: mod_base = OTHER; note = 2'-fluoroadenosine
  modified_base 10: mod_base = OTHER; note = 2'-O-methylcytidine
  modified_base 11: mod_base = OTHER; note = 2'-fluoroguanosine
  modified_base 12: mod_base = OTHER; note = 2'-O-methylguanosine
  modified_base 13: mod_base = OTHER; note = 2'-fluorocytidine
  modified_base 14: mod_base = OTHER; note = 2'-O-methylcytidine
  modified_base 15: mod_base = OTHER; note = 2'-fluorocytidine
  modified_base 16: mod_base = OTHER; note = 2'-O-methylguanosine
  modified_base 17: mod_base = OTHER; note = 2'-fluorouridine
  modified_base 18: mod_base = OTHER; note = 2'-O-methyluridine
  modified_base 19: mod_base = OTHER; note = 2'-fluoroguanosine with phosphorothioate linkage
  modified_base 20: mod_base = OTHER; note = 2'-O-methylguanosine with phosphorothioate linkage
  modified_base 21: mod_base = OTHER; note = 2'-O-methylguanosine
accagaccacggcccgttggg

SEQ ID NO: 2674 - RNA, 21 nt, synthetic construct
  source 1..21: mol_type = other RNA
  modified_base 1: mod_base = OTHER; note = 2'-O-methylguanosine with phosphorothioate linkage
  modified_base 2: mod_base = OTHER; note = 2'-O-methylcytidine with phosphorothioate linkage
  modified_base 3: mod_base = OTHER; note = 2'-fluoroadenosine
  modified_base 4: mod_base = OTHER; note = 2'-O-methyluridine
  modified_base 5: mod_base = OTHER; note = 2'-fluoroadenosine
  modified_base 6: mod_base = OTHER; note = 2'-O-methyladenosine
  modified_base 7: mod_base = OTHER; note = 2'-fluoroguanosine
  modified_base 8: mod_base = OTHER; note = 2'-O-methylcytidine
  modified_base 9: mod_base = OTHER; note = 2'-fluoroguanosine
  modified_base 10: mod_base = OTHER; note = 2'-O-methylcytidine
  modified_base 11: mod_base = OTHER; note = 2'-fluoroguanosine
  modified_base 12: mod_base = OTHER; note = 2'-O-methylguanosine
  modified_base 13: mod_base = OTHER; note = 2'-fluorocytidine
  modified_base 14: mod_base = OTHER; note = 2'-O-methylcytidine
  modified_base 15: mod_base = OTHER; note = 2'-fluoroadenosine
  modified_base 16: mod_base = OTHER; note = 2'-O-methylcytidine
  modified_base 17: mod_base = OTHER; note = 2'-fluorocytidine
  modified_base 18: mod_base = OTHER; note = 2'-O-methyluridine
  modified_base 19: mod_base = OTHER; note = 2'-fluoroguanosine with phosphorothioate linkage
  modified_base 20: mod_base = OTHER; note = 2'-O-methylguanosine with phosphorothioate linkage
  modified_base 21: mod_base = OTHER; note = 2'-O-methylcytidine
gcataagcgcggccacctggc

SEQ ID NO: 2675 - RNA, 21 nt, synthetic construct
  source 1..21: mol_type = other RNA
  modified_base 1: mod_base = OTHER; note = 2'-O-methyladenosine with phosphorothioate linkage
  modified_base 2: mod_base = OTHER; note = 2'-O-methyluridine with phosphorothioate linkage
  modified_base 3: mod_base = OTHER; note = 2'-fluoroguanosine
  modified_base 4: mod_base = OTHER; note = 2'-O-methylguanosine
  modified_base 5: mod_base = OTHER; note = 2'-fluorocytidine
  modified_base 6: mod_base = OTHER; note = 2'-O-methyluridine
  modified_base 7: mod_base = OTHER; note = 2'-fluoroadenosine
  modified_base 8: mod_base = OTHER; note = 2'-O-methyluridine
  modified_base 9: mod_base = OTHER; note = 2'-fluoroguanosine
  modified_base 10: mod_base = OTHER; note = 2'-O-methylguanosine
  modified_base 11: mod_base = OTHER; note = 2'-fluoroadenosine
  modified_base 12: mod_base = OTHER; note = 2'-O-methylguanosine
  modified_base 13: mod_base = OTHER; note = 2'-fluorocytidine
  modified_base 14: mod_base = OTHER; note = 2'-O-methylcytidine
  modified_base 15: mod_base = OTHER; note = 2'-fluorouridine
  modified_base 16: mod_base = OTHER; note = 2'-O-methylcytidine
  modified_base 17: mod_base = OTHER; note = 2'-fluorocytidine
  modified_base 18: mod_base = OTHER; note = 2'-O-methylcytidine
  modified_base 19: mod_base = OTHER; note = 2'-fluoroguanosine with phosphorothioate linkage
  modified_base 20: mod_base = OTHER; note = 2'-O-methylcytidine with phosphorothioate linkage
  modified_base 21: mod_base = OTHER; note = 2'-O-methylcytidine
atggctatggagcctcccgcc

SEQ ID NO: 2676 - RNA, 21 nt, synthetic construct
  source 1..21: mol_type = other RNA
  modified_base 1: mod_base = OTHER; note = 2'-fluorocytidine with phosphorothioate linkage
  modified_base 2: mod_base = OTHER; note = 2'-O-methyladenosine with phosphorothioate linkage
  modified_base 3: mod_base = OTHER; note = 2'-fluoroguanosine
  modified_base 4: mod_base = OTHER; note = 2'-O-methylguanosine
  modified_base 5: mod_base = OTHER; note = 2'-fluoroadenosine
  modified_base 6: mod_base = OTHER; note = 2'-O-methyladenosine
  modified_base 7: mod_base = OTHER; note = 2'-fluorocytidine
  modified_base 8: mod_base = OTHER; note = 2'-O-methyladenosine
  modified_base 9: mod_base = OTHER; note = 2'-fluorocytidine
  modified_base 10: mod_base = OTHER; note = 2'-O-methyladenosine
  modified_base 11: mod_base = OTHER; note = 2'-fluorouridine
  modified_base 12: mod_base = OTHER; note = 2'-O-methyladenosine
  modified_base 13: mod_base = OTHER; note = 2'-fluoroguanosine
  modified_base 14: mod_base = OTHER; note = 2'-O-methylcytidine
  modified_base 15: mod_base = OTHER; note = 2'-fluoroadenosine
  modified_base 16: mod_base = OTHER; note = 2'-O-methylguanosine
  modified_base 17: mod_base = OTHER; note = 2'-fluoroadenosine
  modified_base 18: mod_base = OTHER; note = 2'-O-methyluridine
  modified_base 19: mod_base = OTHER; note = 2'-fluoroadenosine with phosphorothioate linkage
  modified_base 20: mod_base = OTHER; note = 2'-O-methyladenosine with phosphorothioate linkage
  modified_base 21: mod_base = OTHER; note = 2'-fluoroadenosine
caggaacacatagcagataaa

SEQ ID NO: 2677 - RNA, 21 nt, synthetic construct
  source 1..21: mol_type = other RNA
  modified_base 1: mod_base = OTHER; note = 2'-fluoroadenosine with phosphorothioate linkage
  modified_base 2: mod_base = OTHER; note = 2'-O-methylguanosine with phosphorothioate linkage
  modified_base 3: mod_base = OTHER; note = 2'-fluoroguanosine
  modified_base 4: mod_base = OTHER; note = 2'-O-methyladenosine
  modified_base 5: mod_base = OTHER; note = 2'-fluoroadenosine
  modified_base 6: mod_base = OTHER; note = 2'-O-methylcytidine
  modified_base 7: mod_base = OTHER; note = 2'-fluoroadenosine
  modified_base 8: mod_base = OTHER; note = 2'-O-methylcytidine
  modified_base 9: mod_base = OTHER; note = 2'-fluoroadenosine
  modified_base 10: mod_base = OTHER; note = 2'-O-methyluridine
  modified_base 11: mod_base = OTHER; note = 2'-fluoroadenosine
  modified_base 12: mod_base = OTHER; note = 2'-O-methylguanosine
  modified_base 13: mod_base = OTHER; note = 2'-fluorocytidine
  modified_base 14: mod_base = OTHER; note = 2'-O-methyladenosine
  modified_base 15: mod_base = OTHER; note = 2'-fluoroguanosine
  modified_base 16: mod_base = OTHER; note = 2'-O-methyladenosine
  modified_base 17: mod_base = OTHER; note = 2'-fluorouridine
  modified_base 18: mod_base = OTHER; note = 2'-O-methyladenosine
  modified_base 19: mod_base = OTHER; note = 2'-fluoroadenosine with phosphorothioate linkage
  modified_base 20: mod_base = OTHER; note = 2'-O-methyladenosine with phosphorothioate linkage
  modified_base 21: mod_base = OTHER; note = 2'-fluorocytidine
aggaacacatagcagataaac

SEQ ID NO: 2678 - RNA, 21 nt, synthetic construct
  source 1..21: mol_type = other RNA
  modified_base 1: mod_base = OTHER; note = 2'-fluoroguanosine with phosphorothioate linkage
  modified_base 2: mod_base = OTHER; note = 2'-O-methylguanosine with phosphorothioate linkage
  modified_base 3: mod_base = OTHER; note = 2'-fluoroadenosine
  modified_base 4: mod_base = OTHER; note = 2'-O-methyladenosine
  modified_base 5: mod_base = OTHER; note = 2'-fluorocytidine
  modified_base 6: mod_base = OTHER; note = 2'-O-methyladenosine
  modified_base 7: mod_base = OTHER; note = 2'-fluorocytidine
  modified_base 8: mod_base = OTHER; note = 2'-O-methyladenosine
  modified_base 9: mod_base = OTHER; note = 2'-fluorouridine
  modified_base 10: mod_base = OTHER; note = 2'-O-methyladenosine
  modified_base 11: mod_base = OTHER; note = 2'-fluoroguanosine
  modified_base 12: mod_base = OTHER; note = 2'-O-methylcytidine
  modified_base 13: mod_base = OTHER; note = 2'-fluoroadenosine
  modified_base 14: mod_base = OTHER; note = 2'-O-methylguanosine
  modified_base 15: mod_base = OTHER; note = 2'-fluoroadenosine
  modified_base 16: mod_base = OTHER; note = 2'-O-methyluridine
  modified_base 17: mod_base = OTHER; note = 2'-fluoroadenosine
  modified_base 18: mod_base = OTHER; note = 2'-O-methyladenosine
  modified_base 19: mod_base = OTHER; note = 2'-fluoroadenosine with phosphorothioate linkage
  modified_base 20: mod_base = OTHER; note = 2'-O-methylcytidine with phosphorothioate linkage
  modified_base 21: mod_base = OTHER; note = 2'-fluorouridine
ggaacacatagcagataaact

SEQ ID NO: 2679 - RNA, 21 nt, synthetic construct
  source 1..21: mol_type = other RNA
  modified_base 1: mod_base = OTHER; note = 2'-fluoroguanosine with phosphorothioate linkage
  modified_base 2: mod_base = OTHER; note = 2'-O-methyladenosine with phosphorothioate linkage
  modified_base 3: mod_base = OTHER; note = 2'-fluoroadenosine
  modified_base 4: mod_base = OTHER; note = 2'-O-methylcytidine
  modified_base 5: mod_base = OTHER; note = 2'-fluoroadenosine
  modified_base 6: mod_base = OTHER; note = 2'-O-methylcytidine
  modified_base 7: mod_base = OTHER; note = 2'-fluoroadenosine
  modified_base 8: mod_base = OTHER; note = 2'-O-methyluridine
  modified_base 9: mod_base = OTHER; note = 2'-fluoroadenosine
  modified_base 10: mod_base = OTHER; note = 2'-O-methylguanosine
  modified_base 11: mod_base = OTHER; note = 2'-fluorocytidine
  modified_base 12: mod_base = OTHER; note = 2'-O-methyladenosine
  modified_base 13: mod_base = OTHER; note = 2'-fluoroguanosine
  modified_base 14: mod_base = OTHER; note = 2'-O-methyladenosine
  modified_base 15: mod_base = OTHER; note = 2'-fluorouridine
  modified_base 16: mod_base = OTHER; note = 2'-O-methyladenosine
  modified_base 17: mod_base = OTHER; note = 2'-fluoroadenosine
  modified_base 18: mod_base = OTHER; note = 2'-O-methyladenosine
  modified_base 19: mod_base = OTHER; note = 2'-fluorocytidine with phosphorothioate linkage
  modified_base 20: mod_base = OTHER; note = 2'-O-methyluridine with phosphorothioate linkage
  modified_base 21: mod_base = OTHER; note = 2'-fluorouridine
gaacacatagcagataaactt

SEQ ID NO: 2680 - RNA, 21 nt, synthetic construct
  source 1..21: mol_type = other RNA
  modified_base 1: mod_base = OTHER; note = 2'-fluoroadenosine with phosphorothioate linkage
  modified_base 2: mod_base = OTHER; note = 2'-O-methyladenosine with phosphorothioate linkage
  modified_base 3: mod_base = OTHER; note = 2'-fluorocytidine
  modified_base 4: mod_base = OTHER; note = 2'-O-methyladenosine
  modified_base 5: mod_base = OTHER; note = 2'-fluorocytidine
  modified_base 6: mod_base = OTHER; note = 2'-O-methyladenosine
  modified_base 7: mod_base = OTHER; note = 2'-fluorouridine
  modified_base 8: mod_base = OTHER; note = 2'-O-methyladenosine
  modified_base 9: mod_base = OTHER; note = 2'-fluoroguanosine
  modified_base 10: mod_base = OTHER; note = 2'-O-methylcytidine
  modified_base 11: mod_base = OTHER; note = 2'-fluoroadenosine
  modified_base 12: mod_base = OTHER; note = 2'-O-methylguanosine
  modified_base 13: mod_base = OTHER; note = 2'-fluoroadenosine
  modified_base 14: mod_base = OTHER; note = 2'-O-methyluridine
  modified_base 15: mod_base = OTHER; note = 2'-fluoroadenosine
  modified_base 16: mod_base = OTHER; note = 2'-O-methyladenosine
  modified_base 17: mod_base = OTHER; note = 2'-fluoroadenosine
  modified_base 18: mod_base = OTHER; note = 2'-O-methylcytidine
  modified_base 19: mod_base = OTHER; note = 2'-fluorouridine with phosphorothioate linkage
  modified_base 20: mod_base = OTHER; note = 2'-O-methyluridine with phosphorothioate linkage
  modified_base 21: mod_base = OTHER; note = 2'-fluorocytidine
aacacatagcagataaacttc

SEQ ID NO: 2681 - RNA, 21 nt, synthetic construct
  source 1..21: mol_type = other RNA
  modified_base 1: mod_base = OTHER; note = 2'-fluorocytidine with phosphorothioate linkage
  modified_base 2: mod_base = OTHER; note = 2'-O-methylcytidine with phosphorothioate linkage
  modified_base 3: mod_base = OTHER; note = 2'-fluorocytidine
  modified_base 4: mod_base = OTHER; note = 2'-O-methyladenosine
  modified_base 5: mod_base = OTHER; note = 2'-fluoroguanosine
  modified_base 6: mod_base = OTHER; note = 2'-O-methylcytidine
  modified_base 7: mod_base = OTHER; note = 2'-fluoroadenosine
  modified_base 8: mod_base = OTHER; note = 2'-O-methylguanosine
  modified_base 9: mod_base = OTHER; note = 2'-fluorocytidine
  modified_base 10: mod_base = OTHER; note = 2'-O-methyluridine
  modified_base 11: mod_base = OTHER; note = 2'-fluoroadenosine
  modified_base 12: mod_base = OTHER; note = 2'-O-methylcytidine
  modified_base 13: mod_base = OTHER; note = 2'-fluoroadenosine
  modified_base 14: mod_base = OTHER; note = 2'-O-methylcytidine
  modified_base 15: mod_base = OTHER; note = 2'-fluoroadenosine
  modified_base 16: mod_base = OTHER; note = 2'-O-methyluridine
  modified_base 17: mod_base = OTHER; note = 2'-fluoroguanosine
  modified_base 18: mod_base = OTHER; note = 2'-O-methyluridine
  modified_base 19: mod_base = OTHER; note = 2'-fluoroadenosine with phosphorothioate linkage
  modified_base 20: mod_base = OTHER; note = 2'-O-methylcytidine with phosphorothioate linkage
  modified_base 21: mod_base = OTHER; note = 2'-fluoroadenosine
cccagcagctacacatgtaca

SEQ ID NO: 2682 - RNA, 21 nt, synthetic construct
  source 1..21: mol_type = other RNA
  modified_base 1: mod_base = OTHER; note = 2'-fluorocytidine with phosphorothioate linkage
  modified_base 2: mod_base = OTHER; note = 2'-O-methyladenosine with phosphorothioate linkage
  modified_base 3: mod_base = OTHER; note = 2'-fluoroguanosine
  modified_base 4: mod_base = OTHER; note = 2'-O-methylcytidine
  modified_base 5: mod_base = OTHER; note = 2'-fluoroadenosine
  modified_base 6: mod_base = OTHER; note = 2'-O-methylguanosine
  modified_base 7: mod_base = OTHER; note = 2'-fluorocytidine
  modified_base 8: mod_base = OTHER; note = 2'-O-methyluridine
  modified_base 9: mod_base = OTHER; note = 2'-fluoroadenosine
  modified_base 10: mod_base = OTHER; note = 2'-O-methylcytidine
  modified_base 11: mod_base = OTHER; note = 2'-fluoroadenosine
  modified_base 12: mod_base = OTHER; note = 2'-O-methylcytidine
  modified_base 13: mod_base = OTHER; note = 2'-fluoroadenosine
  modified_base 14: mod_base = OTHER; note = 2'-O-methyluridine
  modified_base 15: mod_base = OTHER; note = 2'-fluoroguanosine
  modified_base 16: mod_base = OTHER; note = 2'-O-methyluridine
  modified_base 17: mod_base = OTHER; note = 2'-fluoroadenosine
  modified_base 18: mod_base = OTHER; note = 2'-O-methylcytidine
  modified_base 19: mod_base = OTHER; note = 2'-fluoroadenosine with phosphorothioate linkage
  modified_base 20: mod_base = OTHER; note = 2'-O-methyladenosine with phosphorothioate linkage
  modified_base 21: mod_base = OTHER; note = 2'-fluorocytidine
cagcagctacacatgtacaac

SEQ ID NO: 2683 - RNA, 21 nt, synthetic construct
  source 1..21: mol_type = other RNA
  modified_base 1: mod_base = OTHER; note = 2'-fluoroguanosine with phosphorothioate linkage
  modified_base 2: mod_base = OTHER; note = 2'-O-methylcytidine with phosphorothioate linkage
  modified_base 3: mod_base = OTHER; note = 2'-fluoroadenosine
  modified_base 4: mod_base = OTHER; note = 2'-O-methylguanosine
  modified_base 5: mod_base = OTHER; note = 2'-fluorocytidine
  modified_base 6: mod_base = OTHER; note = 2'-O-methyluridine
  modified_base 7: mod_base = OTHER; note = 2'-fluoroadenosine
  modified_base 8: mod_base = OTHER; note = 2'-O-methylcytidine
  modified_base 9: mod_base = OTHER; note = 2'-fluoroadenosine
  modified_base 10: mod_base = OTHER; note = 2'-O-methylcytidine
  modified_base 11: mod_base = OTHER; note = 2'-fluoroadenosine
  modified_base 12: mod_base = OTHER; note = 2'-O-methyluridine
  modified_base 13: mod_base = OTHER; note = 2'-fluoroguanosine
  modified_base 14: mod_base = OTHER; note = 2'-O-methyluridine
  modified_base 15: mod_base = OTHER; note = 2'-fluoroadenosine
  modified_base 16: mod_base = OTHER; note = 2'-O-methylcytidine
  modified_base 17: mod_base = OTHER; note = 2'-fluoroadenosine
  modified_base 18: mod_base = OTHER; note = 2'-O-methyladenosine
  modified_base 19: mod_base = OTHER; note = 2'-fluorocytidine with phosphorothioate linkage
  modified_base 20: mod_base = OTHER; note = 2'-O-methyluridine with phosphorothioate linkage
  modified_base 21: mod_base = OTHER; note = 2'-fluorouridine
gcagctacacatgtacaactt

SEQ ID NO: 2684 - RNA, 21 nt, synthetic construct
  source 1..21: mol_type = other RNA
  modified_base 1: mod_base = OTHER; note = 2'-fluoroadenosine with phosphorothioate linkage
  modified_base 2: mod_base = OTHER; note = 2'-O-methylguanosine with phosphorothioate linkage
  modified_base 3: mod_base = OTHER; note = 2'-fluorocytidine
  modified_base 4: mod_base = OTHER; note = 2'-O-methyluridine
  modified_base 5: mod_base = OTHER; note = 2'-fluoroadenosine
  modified_base 6: mod_base = OTHER; note = 2'-O-methylcytidine
  modified_base 7: mod_base = OTHER; note = 2'-fluoroadenosine
  modified_base 8: mod_base = OTHER; note = 2'-O-methylcytidine
  modified_base 9: mod_base = OTHER; note = 2'-fluoroadenosine
  modified_base 10: mod_base = OTHER; note = 2'-O-methyluridine
  modified_base 11: mod_base = OTHER; note = 2'-fluoroguanosine
  modified_base 12: mod_base = OTHER; note = 2'-O-methyluridine
  modified_base 13: mod_base = OTHER; note = 2'-fluoroadenosine
  modified_base 14: mod_base = OTHER; note = 2'-O-methylcytidine
  modified_base 15: mod_base = OTHER; note = 2'-fluoroadenosine
  modified_base 16: mod_base = OTHER; note = 2'-O-methyladenosine
  modified_base 17: mod_base = OTHER; note = 2'-fluorocytidine
  modified_base 18: mod_base = OTHER; note = 2'-O-methyluridine
  modified_base 19: mod_base = OTHER; note = 2'-fluorouridine with phosphorothioate linkage
  modified_base 20: mod_base = OTHER; note = 2'-O-methylguanosine with phosphorothioate linkage
  modified_base 21: mod_base = OTHER; note = 2'-fluorocytidine
agctacacatgtacaacttgc

SEQ ID NO: 2685 - RNA, 21 nt, synthetic construct
  source 1..21: mol_type = other RNA
  modified_base 1: mod_base = OTHER; note = 2'-fluorocytidine with phosphorothioate linkage
  modified_base 2: mod_base = OTHER; note = 2'-O-methyluridine with phosphorothioate linkage
  modified_base 3: mod_base = OTHER; note = 2'-fluoroadenosine
  modified_base 4: mod_base = OTHER; note = 2'-O-methylcytidine
  modified_base 5: mod_base = OTHER; note = 2'-fluoroadenosine
  modified_base 6: mod_base = OTHER; note = 2'-O-methylcytidine
  modified_base 7: mod_base = OTHER; note = 2'-fluoroadenosine
  modified_base 8: mod_base = OTHER; note = 2'-O-methyluridine
  modified_base 9: mod_base = OTHER; note = 2'-fluoroguanosine
  modified_base 10: mod_base = OTHER; note = 2'-O-methyluridine
  modified_base 11: mod_base = OTHER; note = 2'-fluoroadenosine
  modified_base 12: mod_base = OTHER; note = 2'-O-methylcytidine
  modified_base 13: mod_base = OTHER; note = 2'-fluoroadenosine
  modified_base 14: mod_base = OTHER; note = 2'-O-methyladenosine
  modified_base 15: mod_base = OTHER; note = 2'-fluorocytidine
  modified_base 16: mod_base = OTHER; note = 2'-O-methyluridine
  modified_base 17: mod_base = OTHER; note = 2'-fluorouridine
  modified_base 18: mod_base = OTHER; note = 2'-O-methylguanosine
  modified_base 19: mod_base = OTHER; note = 2'-fluorocytidine with phosphorothioate linkage
  modified_base 20: mod_base = OTHER; note = 2'-O-methyladenosine with phosphorothioate linkage
  modified_base 21: mod_base = OTHER; note = 2'-fluoroadenosine
ctacacatgtacaacttgcaa

SEQ ID NO: 2686 - RNA, 21 nt, synthetic construct
  source 1..21: mol_type = other RNA
  modified_base 1: mod_base = OTHER; note = 2'-fluorouridine with phosphorothioate linkage
  modified_base 2: mod_base = OTHER; note = 2'-O-methyladenosine with phosphorothioate linkage
  modified_base 3: mod_base = OTHER; note = 2'-fluorocytidine
  modified_base 4: mod_base = OTHER; note = 2'-O-methyladenosine
  modified_base 5: mod_base = OTHER; note = 2'-fluorocytidine
  modified_base 6: mod_base = OTHER; note = 2'-O-methyladenosine
  modified_base 7: mod_base = OTHER; note = 2'-fluorouridine
  modified_base 8: mod_base = OTHER; note = 2'-O-methylguanosine
  modified_base 9: mod_base = OTHER; note = 2'-fluorouridine
  modified_base 10: mod_base = OTHER; note = 2'-O-methyladenosine
  modified_base 11: mod_base = OTHER; note = 2'-fluorocytidine
  modified_base 12: mod_base = OTHER; note = 2'-O-methyladenosine
  modified_base 13: mod_base = OTHER; note = 2'-fluoroadenosine
  modified_base 14: mod_base = OTHER; note = 2'-O-methylcytidine
  modified_base 15: mod_base = OTHER; note = 2'-fluorouridine
  modified_base 16: mod_base = OTHER; note = 2'-O-methyluridine
  modified_base 17: mod_base = OTHER; note = 2'-fluoroguanosine
  modified_base 18: mod_base = OTHER; note = 2'-O-methylcytidine
  modified_base 19: mod_base = OTHER; note = 2'-fluoroadenosine with phosphorothioate linkage
  modified_base 20: mod_base = OTHER; note = 2'-O-methyladenosine with phosphorothioate linkage
  modified_base 21: mod_base = OTHER; note = 2'-fluoroadenosine
tacacatgtacaacttgcaaa

SEQ ID NO: 2687 - RNA, 21 nt, synthetic construct
  source 1..21: mol_type = other RNA
  modified_base 1: mod_base = OTHER; note = 2'-fluoroadenosine with phosphorothioate linkage
  modified_base 2: mod_base = OTHER; note = 2'-O-methylcytidine with phosphorothioate linkage
  modified_base 3: mod_base = OTHER; note = 2'-fluoroadenosine
  modified_base 4: mod_base = OTHER; note = 2'-O-methyluridine
  modified_base 5: mod_base = OTHER; note = 2'-fluoroguanosine
  modified_base 6: mod_base = OTHER; note = 2'-O-methyluridine
  modified_base 7: mod_base = OTHER; note = 2'-fluoroadenosine
  modified_base 8: mod_base = OTHER; note = 2'-O-methylcytidine
  modified_base 9: mod_base = OTHER; note = 2'-fluoroadenosine
  modified_base 10: mod_base = OTHER; note = 2'-O-methyladenosine
  modified_base 11: mod_base = OTHER; note = 2'-fluorocytidine
  modified_base 12: mod_base = OTHER; note = 2'-O-methyluridine
  modified_base 13: mod_base = OTHER; note = 2'-fluorouridine
  modified_base 14: mod_base = OTHER; note = 2'-O-methylguanosine
  modified_base 15: mod_base = OTHER; note = 2'-fluorocytidine
  modified_base 16: mod_base = OTHER; note = 2'-O-methyladenosine
  modified_base 17: mod_base = OTHER; note = 2'-fluoroadenosine
  modified_base 18: mod_base = OTHER; note = 2'-O-methyladenosine
  modified_base 19: mod_base = OTHER; note = 2'-fluorocytidine with phosphorothioate linkage
  modified_base 20: mod_base = OTHER; note = 2'-O-methyladenosine with phosphorothioate linkage
  modified_base 21: mod_base = OTHER; note = 2'-fluorouridine
acatgtacaacttgcaaacat

SEQ ID NO: 2688 - RNA, 21 nt, synthetic construct
  source 1..21: mol_type = other RNA
  modified_base 1: mod_base = OTHER; note = 2'-fluorocytidine with phosphorothioate linkage
  modified_base 2: mod_base = OTHER; note = 2'-O-methyladenosine with phosphorothioate linkage
  modified_base 3: mod_base = OTHER; note = 2'-fluorouridine
  modified_base 4: mod_base = OTHER; note = 2'-O-methylguanosine
  modified_base 5: mod_base = OTHER; note = 2'-fluorouridine
  modified_base 6: mod_base = OTHER; note = 2'-O-methyladenosine
  modified_base 7: mod_base = OTHER; note = 2'-fluorocytidine
  modified_base 8: mod_base = OTHER; note = 2'-O-methyladenosine
  modified_base 9: mod_base = OTHER; note = 2'-fluoroadenosine
  modified_base 10: mod_base = OTHER; note = 2'-O-methylcytidine
  modified_base 11: mod_base = OTHER; note = 2'-fluorouridine
  modified_base 12: mod_base = OTHER; note = 2'-O-methyluridine
  modified_base 13: mod_base = OTHER; note = 2'-fluoroguanosine
  modified_base 14: mod_base = OTHER; note = 2'-O-methylcytidine
  modified_base 15: mod_base = OTHER; note = 2'-fluoroadenosine
  modified_base 16: mod_base = OTHER; note = 2'-O-methyladenosine
  modified_base 17: mod_base = OTHER; note = 2'-fluoroadenosine
  modified_base 18: mod_base = OTHER; note = 2'-O-methylcytidine
  modified_base 19: mod_base = OTHER; note = 2'-fluoroadenosine with phosphorothioate linkage
  modified_base 20: mod_base = OTHER; note = 2'-O-methylguanosine with phosphorothioate linkage
  modified_base 21: mod_base = OTHER; note = 2'-fluorocytidine
catgtacaacttgcaaacagc

SEQ ID NO: 2689 - RNA, 21 nt, synthetic construct
  source 1..21: mol_type = other RNA
  modified_base 1: mod_base = OTHER; note = 2'-fluoroadenosine with phosphorothioate linkage
  modified_base 2: mod_base = OTHER; note = 2'-O-methyluridine with phosphorothioate linkage
  modified_base 3: mod_base = OTHER; note = 2'-fluoroguanosine
  modified_base 4: mod_base = OTHER; note = 2'-O-methyluridine
  modified_base 5: mod_base = OTHER; note = 2'-fluoroadenosine
  modified_base 6: mod_base = OTHER; note = 2'-O-methylcytidine
  modified_base 7: mod_base = OTHER; note = 2'-fluoroadenosine
  modified_base 8: mod_base = OTHER; note = 2'-O-methyladenosine
  modified_base 9: mod_base = OTHER; note = 2'-fluorocytidine
  modified_base 10: mod_base = OTHER; note = 2'-O-methyluridine
  modified_base 11: mod_base = OTHER; note = 2'-fluorouridine
  modified_base 12: mod_base = OTHER; note = 2'-O-methylguanosine
  modified_base 13: mod_base = OTHER; note = 2'-fluorocytidine
  modified_base 14: mod_base = OTHER; note = 2'-O-methyladenosine
  modified_base 15: mod_base = OTHER; note = 2'-fluoroadenosine
  modified_base 16: mod_base = OTHER; note = 2'-O-methyladenosine
  modified_base 17: mod_base = OTHER; note = 2'-fluorocytidine
  modified_base 18: mod_base = OTHER; note = 2'-O-methyladenosine
  modified_base 19: mod_base = OTHER; note = 2'-fluoroguanosine with phosphorothioate linkage
  modified_base 20: mod_base = OTHER; note = 2'-O-methylcytidine with phosphorothioate linkage
  modified_base 21: mod_base = OTHER; note = 2'-fluorocytidine
atgtacaacttgcaaacagcc

SEQ ID NO: 2690 - RNA, 21 nt, synthetic construct
  source 1..21: mol_type = other RNA
  modified_base 1: mod_base = OTHER; note = 2'-fluorouridine with phosphorothioate linkage
  modified_base 2: mod_base = OTHER; note = 2'-O-methylguanosine with phosphorothioate linkage
  modified_base 3: mod_base = OTHER; note = 2'-fluorouridine
  modified_base 4: mod_base = OTHER; note = 2'-O-methyladenosine
  modified_base 5: mod_base = OTHER; note = 2'-fluorocytidine
  modified_base 6: mod_base = OTHER; note = 2'-O-methyladenosine
  modified_base 7: mod_base = OTHER; note = 2'-fluoroadenosine
  modified_base 8: mod_base = OTHER; note = 2'-O-methylcytidine
  modified_base 9: mod_base = OTHER; note = 2'-fluorouridine
  modified_base 10: mod_base = OTHER; note = 2'-O-methyluridine
  modified_base 11: mod_base = OTHER; note = 2'-fluoroguanosine
  modified_base 12: mod_base = OTHER; note = 2'-O-methylcytidine
  modified_base 13: mod_base = OTHER; note = 2'-fluoroadenosine
  modified_base 14: mod_base = OTHER; note = 2'-O-methyladenosine
  modified_base 15: mod_base = OTHER; note = 2'-fluoroadenosine
  modified_base 16: mod_base = OTHER; note = 2'-O-methylcytidine
  modified_base 17: mod_base = OTHER; note = 2'-fluoroadenosine
  modified_base 18: mod_base = OTHER; note = 2'-O-methylguanosine
  modified_base 19: mod_base = OTHER; note = 2'-fluorocytidine with phosphorothioate linkage
  modified_base 20: mod_base = OTHER; note = 2'-O-methylcytidine with phosphorothioate linkage
  modified_base 21: mod_base = OTHER; note = 2'-fluoroadenosine
tgtacaacttgcaaacagcca

SEQ ID NO: 2691 - RNA, 21 nt, synthetic construct
  source 1..21: mol_type = other RNA
  modified_base 1: mod_base = OTHER; note = 2'-fluoroguanosine with phosphorothioate linkage
  modified_base 2: mod_base = OTHER; note = 2'-O-methyluridine with phosphorothioate linkage
  modified_base 3: mod_base = OTHER; note = 2'-fluoroadenosine
  modified_base 4: mod_base = OTHER; note = 2'-O-methylcytidine
  modified_base 5: mod_base = OTHER; note = 2'-fluoroadenosine
  modified_base 6: mod_base = OTHER; note = 2'-O-methyladenosine
  modified_base 7: mod_base = OTHER; note = 2'-fluorocytidine
  modified_base 8: mod_base = OTHER; note = 2'-O-methyluridine
  modified_base 9: mod_base = OTHER; note = 2'-fluorouridine
  modified_base 10: mod_base = OTHER; note = 2'-O-methylguanosine
  modified_base 11: mod_base = OTHER; note = 2'-fluorocytidine
  modified_base 12: mod_base = OTHER; note = 2'-O-methyladenosine
  modified_base 13: mod_base = OTHER; note = 2'-fluoroadenosine
  modified_base 14: mod_base = OTHER; note = 2'-O-methyladenosine
  modified_base 15: mod_base = OTHER; note = 2'-fluorocytidine
  modified_base 16: mod_base = OTHER; note = 2'-O-methyladenosine
  modified_base 17: mod_base = OTHER; note = 2'-fluoroguanosine
  modified_base 18: mod_base = OTHER; note = 2'-O-methylcytidine
  modified_base 19: mod_base = OTHER; note = 2'-fluorocytidine with phosphorothioate linkage
  modified_base 20: mod_base = OTHER; note = 2'-O-methyladenosine with phosphorothioate linkage
  modified_base 21: mod_base = OTHER; note = 2'-fluorouridine
gtacaacttgcaaacagccat

SEQ ID NO: 2692 - RNA, 21 nt, synthetic construct
  source 1..21: mol_type = other RNA
  modified_base 1: mod_base = OTHER; note = 2'-fluorouridine with phosphorothioate linkage
  modified_base 2: mod_base = OTHER; note = 2'-O-methyladenosine with phosphorothioate linkage
  modified_base 3: mod_base = OTHER; note = 2'-fluorocytidine
  modified_base 4: mod_base = OTHER; note = 2'-O-methyladenosine
  modified_base 5: mod_base = OTHER; note = 2'-fluoroadenosine
  modified_base 6: mod_base = OTHER; note = 2'-O-methylcytidine
  modified_base 7: mod_base = OTHER; note = 2'-fluorouridine
  modified_base 8: mod_base = OTHER; note = 2'-O-methyluridine
  modified_base 9: mod_base = OTHER; note = 2'-fluoroguanosine
  modified_base 10: mod_base = OTHER; note = 2'-O-methylcytidine
  modified_base 11: mod_base = OTHER; note = 2'-fluoroadenosine
  modified_base 12: mod_base = OTHER; note = 2'-O-methyladenosine
  modified_base 13: mod_base = OTHER; note = 2'-fluoroadenosine
  modified_base 14: mod_base = OTHER; note = 2'-O-methylcytidine
  modified_base 15: mod_base = OTHER; note = 2'-fluoroadenosine
  modified_base 16: mod_base = OTHER; note = 2'-O-methylguanosine
  modified_base 17: mod_base = OTHER; note = 2'-fluorocytidine
  modified_base 18: mod_base = OTHER; note = 2'-O-methylcytidine
  modified_base 19: mod_base = OTHER; note = 2'-fluoroadenosine with phosphorothioate linkage
  modified_base 20: mod_base = OTHER; note = 2'-O-methyluridine with phosphorothioate linkage
  modified_base 21: mod_base = OTHER; note = 2'-fluorouridine
tacaacttgcaaacagccatt

SEQ ID NO: 2693 - RNA, 21 nt, synthetic construct
  source 1..21: mol_type = other RNA
  modified_base 1: mod_base = OTHER; note = 2'-fluoroadenosine with phosphorothioate linkage
  modified_base 2: mod_base = OTHER; note = 2'-O-methylcytidine with phosphorothioate linkage
  modified_base 3: mod_base = OTHER; note = 2'-fluoroadenosine
  modified_base 4: mod_base = OTHER; note = 2'-O-methyladenosine
  modified_base 5: mod_base = OTHER; note = 2'-fluorocytidine
  modified_base 6: mod_base = OTHER; note = 2'-O-methyluridine
  modified_base 7: mod_base = OTHER; note = 2'-fluorouridine
  modified_base 8: mod_base = OTHER; note = 2'-O-methylguanosine
  modified_base 9: mod_base = OTHER; note = 2'-fluorocytidine
  modified_base 10: mod_base = OTHER; note = 2'-O-methyladenosine
  modified_base 11: mod_base = OTHER; note = 2'-fluoroadenosine
  modified_base 12: mod_base = OTHER; note = 2'-O-methyladenosine
  modified_base 13: mod_base = OTHER; note = 2'-fluorocytidine
  modified_base 14: mod_base = OTHER; note = 2'-O-methyladenosine
  modified_base 15: mod_base = OTHER; note = 2'-fluoroguanosine
  modified_base 16: mod_base = OTHER; note = 2'-O-methylcytidine
  modified_base 17: mod_base = OTHER; note = 2'-fluorocytidine
  modified_base 18: mod_base = OTHER; note = 2'-O-methyladenosine
  modified_base 19: mod_base = OTHER; note = 2'-fluorouridine with phosphorothioate linkage
  modified_base 20: mod_base = OTHER; note = 2'-O-methyluridine with phosphorothioate linkage
  modified_base 21: mod_base = OTHER; note = 2'-fluorocytidine
acaacttgcaaacagccattc

SEQ ID NO: 2694 - RNA, 21 nt, synthetic construct
  source 1..21: mol_type = other RNA
  modified_base 1: mod_base = OTHER; note = 2'-fluorocytidine with phosphorothioate linkage
  modified_base 2: mod_base = OTHER; note = 2'-O-methyladenosine with phosphorothioate linkage
  modified_base 3: mod_base = OTHER; note = 2'-fluoroadenosine
  modified_base 4: mod_base = OTHER; note = 2'-O-methylcytidine
  modified_base 5: mod_base = OTHER; note = 2'-fluorouridine
  modified_base 6: mod_base = OTHER; note = 2'-O-methyluridine
  modified_base 7: mod_base = OTHER; note = 2'-fluoroguanosine
  modified_base 8: mod_base = OTHER; note = 2'-O-methylcytidine
  modified_base 9: mod_base = OTHER; note = 2'-fluoroadenosine
  modified_base 10: mod_base = OTHER; note = 2'-O-methyladenosine
  modified_base 11: mod_base = OTHER; note = 2'-fluoroadenosine
  modified_base 12: mod_base = OTHER; note = 2'-O-methylcytidine
  modified_base 13: mod_base = OTHER; note = 2'-fluoroadenosine
  modified_base 14: mod_base = OTHER; note = 2'-O-methylguanosine
  modified_base 15: mod_base = OTHER; note = 2'-fluorocytidine
  modified_base 16: mod_base = OTHER; note = 2'-O-methylcytidine
  modified_base 17: mod_base = OTHER; note = 2'-fluoroadenosine
  modified_base 18: mod_base = OTHER; note = 2'-O-methyluridine
  modified_base 19: mod_base = OTHER; note = 2'-fluorouridine with phosphorothioate linkage
  modified_base 20: mod_base = OTHER; note = 2'-O-methylcytidine with phosphorothioate linkage
  modified_base 21: mod_base = OTHER; note = 2'-fluoroadenosine
caacttgcaaacagccattca

SEQ ID NO: 2695 - RNA, 21 nt, synthetic construct
  source 1..21: mol_type = other RNA
  modified_base 1: mod_base = OTHER; note = 2'-fluoroadenosine with phosphorothioate linkage
  modified_base 2: mod_base = OTHER; note = 2'-O-methyladenosine with phosphorothioate linkage
  modified_base 3: mod_base = OTHER; note = 2'-fluorocytidine
  modified_base 4: mod_base = OTHER; note = 2'-O-methyluridine
  modified_base 5: mod_base = OTHER; note = 2'-fluorouridine
  modified_base 6: mod_base = OTHER; note = 2'-O-methylguanosine
  modified_base 7: mod_base = OTHER; note = 2'-fluorocytidine
  modified_base 8: mod_base = OTHER; note = 2'-O-methyladenosine
  modified_base 9: mod_base = OTHER; note = 2'-fluoroadenosine
  modified_base 10: mod_base = OTHER; note = 2'-O-methyladenosine
  modified_base 11: mod_base = OTHER; note = 2'-fluorocytidine
  modified_base 12: mod_base = OTHER; note = 2'-O-methyladenosine
  modified_base 13: mod_base = OTHER; note = 2'-fluoroguanosine
  modified_base 14: mod_base = OTHER; note = 2'-O-methylcytidine
  modified_base 15: mod_base = OTHER; note = 2'-fluorocytidine
  modified_base 16: mod_base = OTHER; note = 2'-O-methyladenosine
  modified_base 17: mod_base = OTHER; note = 2'-fluorouridine
  modified_base 18: mod_base = OTHER; note = 2'-O-methyluridine
  modified_base 19: mod_base = OTHER; note = 2'-fluorocytidine with phosphorothioate linkage
  modified_base 20: mod_base = OTHER; note = 2'-O-methyladenosine with phosphorothioate linkage
  modified_base 21: mod_base = OTHER; note = 2'-fluorocytidine
aacttgcaaacagccattcac

SEQ ID NO: 2696 - RNA, 21 nt, synthetic construct
  source 1..21: mol_type = other RNA
  modified_base 1: mod_base = OTHER; note = 2'-fluoroadenosine with phosphorothioate linkage
  modified_base 2: mod_base = OTHER; note = 2'-O-methylcytidine with phosphorothioate linkage
  modified_base 3: mod_base = OTHER; note = 2'-fluorouridine
  modified_base 4: mod_base = OTHER; note = 2'-O-methyluridine
  modified_base 5: mod_base = OTHER; note = 2'-fluoroguanosine
  modified_base 6: mod_base = OTHER; note = 2'-O-methylcytidine
  modified_base 7: mod_base = OTHER; note = 2'-fluoroadenosine
  modified_base 8: mod_base = OTHER; note = 2'-O-methyladenosine
  modified_base 9: mod_base = OTHER; note = 2'-fluoroadenosine
  modified_base 10: mod_base = OTHER; note = 2'-O-methylcytidine
  modified_base 11: mod_base = OTHER; note = 2'-fluoroadenosine
  modified_base 12: mod_base = OTHER; note = 2'-O-methylguanosine
  modified_base 13: mod_base = OTHER; note = 2'-fluorocytidine
  modified_base 14: mod_base = OTHER; note = 2'-O-methylcytidine
  modified_base 15: mod_base = OTHER; note = 2'-fluoroadenosine
  modified_base 16: mod_base = OTHER; note = 2'-O-methyluridine
  modified_base 17: mod_base = OTHER; note = 2'-fluorouridine
  modified_base 18: mod_base = OTHER; note = 2'-O-methylcytidine
  modified_base 19: mod_base = OTHER; note = 2'-fluoroadenosine with phosphorothioate linkage
  modified_base 20: mod_base = OTHER; note = 2'-O-methylcytidine with phosphorothioate linkage
  modified_base 21: mod_base = OTHER; note = 2'-fluorocytidine
acttgcaaacagccattcacc

SEQ ID NO: 2697 - RNA, 21 nt, synthetic construct
  source 1..21: mol_type = other RNA
  modified_base 1: mod_base = OTHER; note = 2'-fluorocytidine with phosphorothioate linkage
  modified_base 2: mod_base = OTHER; note = 2'-O-methyluridine with phosphorothioate linkage
  modified_base 3: mod_base = OTHER; note = 2'-fluorouridine
  modified_base 4: mod_base = OTHER; note = 2'-O-methylguanosine
  modified_base 5: mod_base = OTHER; note = 2'-fluorocytidine
  modified_base 6: mod_base = OTHER; note = 2'-O-methyladenosine
  modified_base 7: mod_base = OTHER; note = 2'-fluoroadenosine
  modified_base 8: mod_base = OTHER; note = 2'-O-methyladenosine
  modified_base 9: mod_base = OTHER; note = 2'-fluorocytidine
  modified_base 10: mod_base = OTHER; note = 2'-O-methyladenosine
  modified_base 11: mod_base = OTHER; note = 2'-fluoroguanosine
  modified_base 12: mod_base = OTHER; note = 2'-O-methylcytidine
  modified_base 13: mod_base = OTHER; note = 2'-fluorocytidine
  modified_base 14: mod_base = OTHER; note = 2'-O-methyladenosine
  modified_base 15: mod_base = OTHER; note = 2'-fluorouridine
  modified_base 16: mod_base = OTHER; note = 2'-O-methyluridine
  modified_base 17: mod_base = OTHER; note = 2'-fluorocytidine
  modified_base 18: mod_base = OTHER; note = 2'-O-methyladenosine
  modified_base 19: mod_base = OTHER; note = 2'-fluorocytidine with phosphorothioate linkage
  modified_base 20: mod_base = OTHER; note = 2'-O-methylcytidine with phosphorothioate linkage
  modified_base 21: mod_base = OTHER; note = 2'-fluoroadenosine
cttgcaaacagccattcacca

SEQ ID NO: 2698 - RNA, 21 nt, synthetic construct
  source 1..21: mol_type = other RNA
  modified_base 1: mod_base = OTHER; note = 2'-fluorouridine with phosphorothioate linkage
  modified_base 2: mod_base = OTHER; note = 2'-O-methyluridine with phosphorothioate linkage
  modified_base 3: mod_base = OTHER; note = 2'-fluoroguanosine
  modified_base 4: mod_base = OTHER; note = 2'-O-methylcytidine
  modified_base 5: mod_base = OTHER; note = 2'-fluoroadenosine
  modified_base 6: mod_base = OTHER; note = 2'-O-methyladenosine
  modified_base 7: mod_base = OTHER; note = 2'-fluoroadenosine
  modified_base 8: mod_base = OTHER; note = 2'-O-methylcytidine
  modified_base 9: mod_base = OTHER; note = 2'-fluoroadenosine
  modified_base 10: mod_base = OTHER; note = 2'-O-methylguanosine
  modified_base 11: mod_base = OTHER; note = 2'-fluorocytidine
  modified_base 12: mod_base = OTHER; note = 2'-O-methylcytidine
  modified_base 13: mod_base = OTHER; note = 2'-fluoroadenosine
  modified_base 14: mod_base = OTHER; note = 2'-O-methyluridine
  modified_base 15: mod_base = OTHER; note = 2'-fluorouridine
  modified_base 16: mod_base = OTHER; note = 2'-O-methylcytidine
  modified_base 17: mod_base = OTHER; note = 2'-fluoroadenosine
  modified_base 18: mod_base = OTHER; note = 2'-O-methylcytidine
  modified_base 19: mod_base = OTHER; note = 2'-fluorocytidine with phosphorothioate linkage
  modified_base 20: mod_base = OTHER; note = 2'-O-methyladenosine with phosphorothioate linkage
  modified_base 21: mod_base = OTHER; note = 2'-fluorouridine
ttgcaaacagccattcaccat

SEQ ID NO: 2699 - RNA, 21 nt, synthetic construct
  source 1..21: mol_type = other RNA
  modified_base 1: mod_base = OTHER; note = 2'-fluorouridine with phosphorothioate linkage
  modified_base 2: mod_base = OTHER; note = 2'-O-methylguanosine with phosphorothioate linkage
  modified_base 3: mod_base = OTHER; note = 2'-fluorocytidine
  modified_base 4: mod_base = OTHER; note = 2'-O-methyladenosine
  modified_base 5: mod_base = OTHER; note = 2'-fluoroadenosine
  modified_base 6: mod_base = OTHER; note = 2'-O-methyladenosine
  modified_base 7: mod_base = OTHER; note = 2'-fluorocytidine
  modified_base 8: mod_base = OTHER; note = 2'-O-methyladenosine
  modified_base 9: mod_base = OTHER; note = 2'-fluoroguanosine
  modified_base 10: mod_base = OTHER; note = 2'-O-methylcytidine
  modified_base 11: mod_base = OTHER; note = 2'-fluorocytidine
  modified_base 12: mod_base = OTHER; note = 2'-O-methyladenosine
  modified_base 13: mod_base = OTHER; note = 2'-fluorouridine
  modified_base 14: mod_base = OTHER; note = 2'-O-methyluridine
  modified_base 15: mod_base = OTHER; note = 2'-fluorocytidine
  modified_base 16: mod_base = OTHER; note = 2'-O-methyladenosine
  modified_base 17: mod_base = OTHER; note = 2'-fluorocytidine
  modified_base 18: mod_base = OTHER; note = 2'-O-methylcytidine
  modified_base 19: mod_base = OTHER; note = 2'-fluoroadenosine with phosphorothioate linkage
  modified_base 20: mod_base = OTHER; note = 2'-O-methylguanosine with phosphorothioate linkage
  modified_base 21: mod_base = OTHER; note = 2'-fluorouridine
tgcaaacagccattcaccagt

SEQ ID NO: 2700 - RNA, 21 nt, synthetic construct
  source 1..21: mol_type = other RNA
  modified_base 1: mod_base = OTHER; note = 2'-fluoroguanosine with phosphorothioate linkage
  modified_base 2: mod_base = OTHER; note = 2'-O-methylcytidine with phosphorothioate linkage
  modified_base 3: mod_base = OTHER; note = 2'-fluoroadenosine
  modified_base 4: mod_base = OTHER; note = 2'-O-methyladenosine
  modified_base 5: mod_base = OTHER; note = 2'-fluoroadenosine
  modified_base 6: mod_base = OTHER; note = 2'-O-methylcytidine
  modified_base 7: mod_base = OTHER; note = 2'-fluoroadenosine
  modified_base 8: mod_base = OTHER; note = 2'-O-methylguanosine
  modified_base 9: mod_base = OTHER; note = 2'-fluorocytidine
  modified_base 10: mod_base = OTHER; note = 2'-O-methylcytidine
  modified_base 11: mod_base = OTHER; note = 2'-fluoroadenosine
  modified_base 12: mod_base = OTHER; note = 2'-O-methyluridine
  modified_base 13: mod_base = OTHER; note = 2'-fluorouridine
  modified_base 14: mod_base = OTHER; note = 2'-O-methylcytidine
  modified_base 15: mod_base = OTHER; note = 2'-fluoroadenosine
  modified_base 16: mod_base = OTHER; note = 2'-O-methylcytidine
  modified_base 17: mod_base = OTHER; note = 2'-fluorocytidine
  modified_base 18: mod_base = OTHER; note = 2'-O-methyladenosine
  modified_base 19: mod_base = OTHER; note = 2'-fluoroguanosine with phosphorothioate linkage
  modified_base 20: mod_base = OTHER; note = 2'-O-methyluridine with phosphorothioate linkage
  modified_base 21: mod_base = OTHER; note = 2'-fluorouridine
gcaaacagccattcaccagtt

SEQ ID NO: 2701 - RNA, 21 nt, synthetic construct
  source 1..21: mol_type = other RNA
  modified_base 1: mod_base = OTHER; note = 2'-fluorocytidine with phosphorothioate linkage
  modified_base 2: mod_base = OTHER; note = 2'-O-methyladenosine with phosphorothioate linkage
  modified_base 3: mod_base = OTHER; note = 2'-fluoroadenosine
  modified_base 4: mod_base = OTHER; note = 2'-O-methyladenosine
  modified_base 5: mod_base = OTHER; note = 2'-fluorocytidine
  modified_base 6: mod_base = OTHER; note = 2'-O-methyladenosine
  modified_base 7: mod_base = OTHER; note = 2'-fluoroguanosine
  modified_base 8: mod_base = OTHER; note = 2'-O-methylcytidine
  modified_base 9: mod_base = OTHER; note = 2'-fluorocytidine
  modified_base 10: mod_base = OTHER; note = 2'-O-methyladenosine
  modified_base 11: mod_base = OTHER; note = 2'-fluorouridine
  modified_base 12: mod_base = OTHER; note = 2'-O-methyluridine
  modified_base 13: mod_base = OTHER; note = 2'-fluorocytidine
  modified_base 14: mod_base = OTHER; note = 2'-O-methyladenosine
  modified_base 15: mod_base = OTHER; note = 2'-fluorocytidine
  modified_base 16: mod_base = OTHER; note = 2'-O-methylcytidine
  modified_base 17: mod_base = OTHER; note = 2'-fluoroadenosine
  modified_base 18: mod_base = OTHER; note = 2'-O-methylguanosine
  modified_base 19: mod_base = OTHER; note = 2'-fluorouridine with phosphorothioate linkage
  modified_base 20: mod_base = OTHER; note = 2'-O-methylguanosine with phosphorothioate linkage
  modified_base 21: mod_base = OTHER; note = 2'-fluorocytidine
caaacagccattcaccagtgc

SEQ ID NO: 2702 - RNA, 21 nt, synthetic construct
  source 1..21: mol_type = other RNA
  modified_base 1: mod_base = OTHER; note = 2'-fluoroadenosine with phosphorothioate linkage
  modified_base 2: mod_base = OTHER; note = 2'-O-methyladenosine with phosphorothioate linkage
  modified_base 3: mod_base = OTHER; note = 2'-fluoroadenosine
  modified_base 4: mod_base = OTHER; note = 2'-O-methylcytidine
  modified_base 5: mod_base = OTHER; note = 2'-fluoroadenosine
  modified_base 6: mod_base = OTHER; note = 2'-O-methylguanosine
  modified_base 7: mod_base = OTHER; note = 2'-fluorocytidine
  modified_base 8: mod_base = OTHER; note = 2'-O-methylcytidine
  modified_base 9: mod_base = OTHER; note = 2'-fluoroadenosine
  modified_base 10: mod_base = OTHER; note = 2'-O-methyluridine
  modified_base 11: mod_base = OTHER; note = 2'-fluorouridine
  modified_base 12: mod_base = OTHER; note = 2'-O-methylcytidine
  modified_base 13: mod_base = OTHER; note = 2'-fluoroadenosine
  modified_base 14: mod_base = OTHER; note = 2'-O-methylcytidine
  modified_base 15: mod_base = OTHER; note = 2'-fluorocytidine
  modified_base 16: mod_base = OTHER; note = 2'-O-methyladenosine
  modified_base 17: mod_base = OTHER; note = 2'-fluoroguanosine
  modified_base 18: mod_base = OTHER; note = 2'-O-methyluridine
  modified_base 19: mod_base = OTHER; note = 2'-fluoroguanosine with phosphorothioate linkage
  modified_base 20: mod_base = OTHER; note = 2'-O-methylcytidine with phosphorothioate linkage
  modified_base 21: mod_base = OTHER; note = 2'-fluoroadenosine
aaacagccattcaccagtgca

SEQ ID NO: 2703 - RNA, 21 nt, synthetic construct
  source 1..21: mol_type = other RNA
  modified_base 1: mod_base = OTHER; note = 2'-fluoroadenosine with phosphorothioate linkage
  modified_base 2: mod_base = OTHER; note = 2'-O-methyladenosine with phosphorothioate linkage
  modified_base 3: mod_base = OTHER; note = 2'-fluorocytidine
  modified_base 4: mod_base = OTHER; note = 2'-O-methyladenosine
  modified_base 5: mod_base = OTHER; note = 2'-fluoroguanosine
  modified_base 6: mod_base = OTHER; note = 2'-O-methylcytidine
  modified_base 7: mod_base = OTHER; note = 2'-fluorocytidine
  modified_base 8: mod_base = OTHER; note = 2'-O-methyladenosine
  modified_base 9: mod_base = OTHER; note = 2'-fluorouridine
  modified_base 10: mod_base = OTHER; note = 2'-O-methyluridine
  modified_base 11: mod_base = OTHER; note = 2'-fluorocytidine
  modified_base 12: mod_base = OTHER; note = 2'-O-methyladenosine
  modified_base 13: mod_base = OTHER; note = 2'-fluorocytidine
  modified_base 14: mod_base = OTHER; note = 2'-O-methylcytidine
  modified_base 15: mod_base = OTHER; note = 2'-fluoroadenosine
  modified_base 16: mod_base = OTHER; note = 2'-O-methylguanosine
  modified_base 17: mod_base = OTHER; note = 2'-fluorouridine
  modified_base 18: mod_base = OTHER; note = 2'-O-methylguanosine
  modified_base 19: mod_base = OTHER; note = 2'-fluorocytidine with phosphorothioate linkage
  modified_base 20: mod_base = OTHER; note = 2'-O-methyladenosine with phosphorothioate linkage
  modified_base 21: mod_base = OTHER; note = 2'-fluorouridine
aacagccattcaccagtgcat

SEQ ID NO: 2704 - RNA, 21 nt, synthetic construct
  source 1..21: mol_type = other RNA
  modified_base 1: mod_base = OTHER; note = 2'-fluoroadenosine with phosphorothioate linkage
  modified_base 2: mod_base = OTHER; note = 2'-O-methylcytidine with phosphorothioate linkage
  modified_base 3: mod_base = OTHER; note = 2'-fluoroadenosine
  modified_base 4: mod_base = OTHER; note = 2'-O-methylguanosine
  modified_base 5: mod_base = OTHER; note = 2'-fluorocytidine
  modified_base 6: mod_base = OTHER; note = 2'-O-methylcytidine
  modified_base 7: mod_base = OTHER; note = 2'-fluoroadenosine
  modified_base 8: mod_base = OTHER; note = 2'-O-methyluridine
  modified_base 9: mod_base = OTHER; note = 2'-fluorouridine
  modified_base 10: mod_base = OTHER; note = 2'-O-methylcytidine
  modified_base 11: mod_base = OTHER; note = 2'-fluoroadenosine
  modified_base 12: mod_base = OTHER; note = 2'-O-methylcytidine
  modified_base 13: mod_base = OTHER; note = 2'-fluorocytidine
  modified_base 14: mod_base = OTHER; note = 2'-O-methyladenosine
  modified_base 15: mod_base = OTHER; note = 2'-fluoroguanosine
  modified_base 16: mod_base = OTHER; note = 2'-O-methyluridine
  modified_base 17: mod_base = OTHER; note = 2'-fluoroguanosine
  modified_base 18: mod_base = OTHER; note = 2'-O-methylcytidine
  modified_base 19: mod_base = OTHER; note = 2'-fluoroadenosine with phosphorothioate linkage
  modified_base 20: mod_base = OTHER; note = 2'-O-methyluridine with phosphorothioate linkage
  modified_base 21: mod_base = OTHER; note = 2'-fluorouridine
acagccattcaccagtgcatt

SEQ ID NO: 2705 - RNA, 21 nt, synthetic construct
  source 1..21: mol_type = other RNA
  modified_base 1: mod_base = OTHER; note = 2'-fluorocytidine with phosphorothioate linkage
  modified_base 2: mod_base = OTHER; note = 2'-O-methyladenosine with phosphorothioate linkage
  modified_base 3: mod_base = OTHER; note = 2'-fluoroguanosine
  modified_base 4: mod_base = OTHER; note = 2'-O-methylcytidine
  modified_base 5: mod_base = OTHER; note = 2'-fluorocytidine
  modified_base 6: mod_base = OTHER; note = 2'-O-methyladenosine
  modified_base 7: mod_base = OTHER; note = 2'-fluorouridine
  modified_base 8: mod_base = OTHER; note = 2'-O-methyluridine
  modified_base 9: mod_base = OTHER; note = 2'-fluorocytidine
  modified_base 10: mod_base = OTHER; note = 2'-O-methyladenosine
  modified_base 11: mod_base = OTHER; note = 2'-fluorocytidine
  modified_base 12: mod_base = OTHER; note = 2'-O-methylcytidine
  modified_base 13: mod_base = OTHER; note = 2'-fluoroadenosine
  modified_base 14: mod_base = OTHER; note = 2'-O-methylguanosine
  modified_base 15: mod_base = OTHER; note = 2'-fluorouridine
  modified_base 16: mod_base = OTHER; note = 2'-O-methylguanosine
  modified_base 17: mod_base = OTHER; note = 2'-fluorocytidine
  modified_base 18: mod_base = OTHER; note = 2'-O-methyladenosine
  modified_base 19: mod_base = OTHER; note = 2'-fluorouridine with phosphorothioate linkage
  modified_base 20: mod_base = OTHER; note = 2'-O-methylguanosine with phosphorothioate linkage
  modified_base 21: mod_base = OTHER; note = 2'-fluorouridine
cagccattcaccagtgcatgt

SEQ ID NO: 2706 - RNA, 21 nt, synthetic construct
  source 1..21: mol_type = other RNA
  modified_base 1: mod_base = OTHER; note = 2'-fluoroadenosine with phosphorothioate linkage
  modified_base 2: mod_base = OTHER; note = 2'-O-methylguanosine with phosphorothioate linkage
  modified_base 3: mod_base = OTHER; note = 2'-fluorocytidine
  modified_base 4: mod_base = OTHER; note = 2'-O-methylcytidine
  modified_base 5: mod_base = OTHER; note = 2'-fluoroadenosine
  modified_base 6: mod_base = OTHER; note = 2'-O-methyluridine
  modified_base 7: mod_base = OTHER; note = 2'-fluorouridine
  modified_base 8: mod_base = OTHER; note = 2'-O-methylcytidine
  modified_base 9: mod_base = OTHER; note = 2'-fluoroadenosine
  modified_base 10: mod_base = OTHER; note = 2'-O-methylcytidine
  modified_base 11: mod_base = OTHER; note = 2'-fluorocytidine
  modified_base 12: mod_base = OTHER; note = 2'-O-methyladenosine
  modified_base 13: mod_base = OTHER; note = 2'-fluoroguanosine
  modified_base 14: mod_base = OTHER; note = 2'-O-methyluridine
  modified_base 15: mod_base = OTHER; note = 2'-fluoroguanosine
  modified_base 16: mod_base = OTHER; note = 2'-O-methylcytidine
  modified_base 17: mod_base = OTHER; note = 2'-fluoroadenosine
  modified_base 18: mod_base = OTHER; note = 2'-O-methyluridine
  modified_base 19: mod_base = OTHER; note = 2'-fluoroguanosine with phosphorothioate linkage
  modified_base 20: mod_base = OTHER; note = 2'-O-methylguanosine with phosphorothioate linkage
  modified_base 21: mod_base = OTHER; note = 2'-fluorouridine
agccattcaccagtgcatggt

SEQ ID NO: 2707 - RNA, 21 nt, synthetic construct
  source 1..21: mol_type = other RNA
  modified_base 1: mod_base = OTHER; note = 2'-fluoroguanosine with phosphorothioate linkage
  modified_base 2: mod_base = OTHER; note = 2'-O-methylcytidine with phosphorothioate linkage
  modified_base 3: mod_base = OTHER; note = 2'-fluorocytidine
  modified_base 4: mod_base = OTHER; note = 2'-O-methyladenosine
  modified_base 5: mod_base = OTHER; note = 2'-fluorouridine
  modified_base 6: mod_base = OTHER; note = 2'-O-methyluridine
  modified_base 7: mod_base = OTHER; note = 2'-fluorocytidine
  modified_base 8: mod_base = OTHER; note = 2'-O-methyladenosine
  modified_base 9: mod_base = OTHER; note = 2'-fluorocytidine
  modified_base 10: mod_base = OTHER; note = 2'-O-methylcytidine
  modified_base 11: mod_base = OTHER; note = 2'-fluoroadenosine
  modified_base 12: mod_base = OTHER; note = 2'-O-methylguanosine
  modified_base 13: mod_base = OTHER; note = 2'-fluorouridine
  modified_base 14: mod_base = OTHER; note = 2'-O-methylguanosine
  modified_base 15: mod_base = OTHER; note = 2'-fluorocytidine
  modified_base 16: mod_base = OTHER; note = 2'-O-methyladenosine
  modified_base 17: mod_base = OTHER; note = 2'-fluorouridine
  modified_base 18: mod_base = OTHER; note = 2'-O-methylguanosine
  modified_base 19: mod_base = OTHER; note = 2'-fluoroguanosine with phosphorothioate linkage
  modified_base 20: mod_base = OTHER; note = 2'-O-methyluridine with phosphorothioate linkage
  modified_base 21: mod_base = OTHER; note = 2'-fluorouridine
gccattcaccagtgcatggtt

SEQ ID NO: 2708 - RNA, 21 nt, synthetic construct
  source 1..21: mol_type = other RNA
  modified_base 1: mod_base = OTHER; note = 2'-fluorocytidine with phosphorothioate linkage
  modified_base 2: mod_base = OTHER; note = 2'-O-methylcytidine with phosphorothioate linkage
  modified_base 3: mod_base = OTHER; note = 2'-fluoroadenosine
  modified_base 4: mod_base = OTHER; note = 2'-O-methyluridine
  modified_base 5: mod_base = OTHER; note = 2'-fluorouridine
  modified_base 6: mod_base = OTHER; note = 2'-O-methylcytidine
  modified_base 7: mod_base = OTHER; note = 2'-fluoroadenosine
  modified_base 8: mod_base = OTHER; note = 2'-O-methylcytidine
  modified_base 9: mod_base = OTHER; note = 2'-fluorocytidine
  modified_base 10: mod_base = OTHER; note = 2'-O-methyladenosine
  modified_base 11: mod_base = OTHER; note = 2'-fluoroguanosine
  modified_base 12: mod_base = OTHER; note = 2'-O-methyluridine
  modified_base 13: mod_base = OTHER; note = 2'-fluoroguanosine
  modified_base 14: mod_base = OTHER; note = 2'-O-methylcytidine
  modified_base 15: mod_base = OTHER; note = 2'-fluoroadenosine
  modified_base 16: mod_base = OTHER; note = 2'-O-methyluridine
  modified_base 17: mod_base = OTHER; note = 2'-fluoroguanosine
  modified_base 18: mod_base = OTHER; note = 2'-O-methylguanosine
  modified_base 19: mod_base = OTHER; note = 2'-fluorouridine with phosphorothioate linkage
  modified_base 20: mod_base = OTHER; note = 2'-O-methyluridine with phosphorothioate linkage
  modified_base 21: mod_base = OTHER; note = 2'-fluorouridine
ccattcaccagtgcatggttt

SEQ ID NO: 2709 - RNA, 21 nt, synthetic construct
  source 1..21: mol_type = other RNA
  modified_base 1: mod_base = OTHER; note = 2'-fluorocytidine with phosphorothioate linkage
  modified_base 2: mod_base = OTHER; note = 2'-O-methyladenosine with phosphorothioate linkage
  modified_base 3: mod_base = OTHER; note = 2'-fluorouridine
  modified_base 4: mod_base = OTHER; note = 2'-O-methyluridine
  modified_base 5: mod_base = OTHER; note = 2'-fluorocytidine
  modified_base 6: mod_base = OTHER; note = 2'-O-methyladenosine
  modified_base 7: mod_base = OTHER; note = 2'-fluorocytidine
  modified_base 8: mod_base = OTHER; note = 2'-O-methylcytidine
  modified_base 9: mod_base = OTHER; note = 2'-fluoroadenosine
  modified_base 10: mod_base = OTHER; note = 2'-O-methylguanosine
  modified_base 11: mod_base = OTHER; note = 2'-fluorouridine
  modified_base 12: mod_base = OTHER; note = 2'-O-methylguanosine
  modified_base 13: mod_base = OTHER; note = 2'-fluorocytidine
  modified_base 14: mod_base = OTHER; note = 2'-O-methyladenosine
  modified_base 15: mod_base = OTHER; note = 2'-fluorouridine
  modified_base 16: mod_base = OTHER; note = 2'-O-methylguanosine
  modified_base 17: mod_base = OTHER; note = 2'-fluoroguanosine
  modified_base 18: mod_base = OTHER; note = 2'-O-methyluridine
  modified_base 19: mod_base = OTHER; note = 2'-fluorouridine with phosphorothioate linkage
  modified_base 20: mod_base = OTHER; note = 2'-O-methyluridine with phosphorothioate linkage
  modified_base 21: mod_base = OTHER; note = 2'-fluorocytidine
cattcaccagtgcatggtttc

SEQ ID NO: 2710 - RNA, 21 nt, synthetic construct
  source 1..21: mol_type = other RNA
  modified_base 1: mod_base = OTHER; note = 2'-fluoroadenosine with phosphorothioate linkage
  modified_base 2: mod_base = OTHER; note = 2'-O-methyluridine with phosphorothioate linkage
  modified_base 3: mod_base = OTHER; note = 2'-fluorouridine
  modified_base 4: mod_base = OTHER; note = 2'-O-methylcytidine
  modified_base 5: mod_base = OTHER; note = 2'-fluoroadenosine
  modified_base 6: mod_base = OTHER; note = 2'-O-methylcytidine
  modified_base 7: mod_base = OTHER; note = 2'-fluorocytidine
  modified_base 8: mod_base = OTHER; note = 2'-O-methyladenosine
  modified_base 9: mod_base = OTHER; note = 2'-fluoroguanosine
  modified_base 10: mod_base = OTHER; note = 2'-O-methyluridine
  modified_base 11: mod_base = OTHER; note = 2'-fluoroguanosine
  modified_base 12: mod_base = OTHER; note = 2'-O-methylcytidine
  modified_base 13: mod_base = OTHER; note = 2'-fluoroadenosine
  modified_base 14: mod_base = OTHER; note = 2'-O-methyluridine
  modified_base 15: mod_base = OTHER; note = 2'-fluoroguanosine
  modified_base 16: mod_base = OTHER; note = 2'-O-methylguanosine
  modified_base 17: mod_base = OTHER; note = 2'-fluorouridine
  modified_base 18: mod_base = OTHER; note = 2'-O-methyluridine
  modified_base 19: mod_base = OTHER; note = 2'-fluorouridine with phosphorothioate linkage
  modified_base 20: mod_base = OTHER; note = 2'-O-methylcytidine with phosphorothioate linkage
  modified_base 21: mod_base = OTHER; note = 2'-fluorouridine
attcaccagtgcatggtttct

SEQ ID NO: 2711 - RNA, 21 nt, synthetic construct
  source 1..21: mol_type = other RNA
  modified_base 1: mod_base = OTHER; note = 2'-fluorouridine with phosphorothioate linkage
  modified_base 2: mod_base = OTHER; note = 2'-O-methyluridine with phosphorothioate linkage
  modified_base 3: mod_base = OTHER; note = 2'-fluorocytidine
  modified_base 4: mod_base = OTHER; note = 2'-O-methyladenosine
  modified_base 5: mod_base = OTHER; note = 2'-fluorocytidine
  modified_base 6: mod_base = OTHER; note = 2'-O-methylcytidine
  modified_base 7: mod_base = OTHER; note = 2'-fluoroadenosine
  modified_base 8: mod_base = OTHER; note = 2'-O-methylguanosine
  modified_base 9: mod_base = OTHER; note = 2'-fluorouridine
  modified_base 10: mod_base = OTHER; note = 2'-O-methylguanosine
  modified_base 11: mod_base = OTHER; note = 2'-fluorocytidine
  modified_base 12: mod_base = OTHER; note = 2'-O-methyladenosine
  modified_base 13: mod_base = OTHER; note = 2'-fluorouridine
  modified_base 14: mod_base = OTHER; note = 2'-O-methylguanosine
  modified_base 15: mod_base = OTHER; note = 2'-fluoroguanosine
  modified_base 16: mod_base = OTHER; note = 2'-O-methyluridine
  modified_base 17: mod_base = OTHER; note = 2'-fluorouridine
  modified_base 18: mod_base = OTHER; note = 2'-O-methyluridine
  modified_base 19: mod_base = OTHER; note = 2'-fluorocytidine with phosphorothioate linkage
  modified_base 20: mod_base = OTHER; note = 2'-O-methyluridine with phosphorothioate linkage
  modified_base 21: mod_base = OTHER; note = 2'-fluorocytidine
ttcaccagtgcatggtttctc

SEQ ID NO: 2712 - RNA, 21 nt, synthetic construct
  source 1..21: mol_type = other RNA
  modified_base 1: mod_base = OTHER; note = 2'-fluorouridine with phosphorothioate linkage
  modified_base 2: mod_base = OTHER; note = 2'-O-methylcytidine with phosphorothioate linkage
  modified_base 3: mod_base = OTHER; note = 2'-fluoroadenosine
  modified_base 4: mod_base = OTHER; note = 2'-O-methylcytidine
  modified_base 5: mod_base = OTHER; note = 2'-fluorocytidine
  modified_base 6: mod_base = OTHER; note = 2'-O-methyladenosine
  modified_base 7: mod_base = OTHER; note = 2'-fluoroguanosine
  modified_base 8: mod_base = OTHER; note = 2'-O-methyluridine
  modified_base 9: mod_base = OTHER; note = 2'-fluoroguanosine
  modified_base 10: mod_base = OTHER; note = 2'-O-methylcytidine
  modified_base 11: mod_base = OTHER; note = 2'-fluoroadenosine
  modified_base 12: mod_base = OTHER; note = 2'-O-methyluridine
  modified_base 13: mod_base = OTHER; note = 2'-fluoroguanosine
  modified_base 14: mod_base = OTHER; note = 2'-O-methylguanosine
  modified_base 15: mod_base = OTHER; note = 2'-fluorouridine
  modified_base 16: mod_base = OTHER; note = 2'-O-methyluridine
  modified_base 17: mod_base = OTHER; note = 2'-fluorouridine
  modified_base 18: mod_base = OTHER; note = 2'-O-methylcytidine
  modified_base 19: mod_base = OTHER; note = 2'-fluorouridine with phosphorothioate linkage
  modified_base 20: mod_base = OTHER; note = 2'-O-methylcytidine with phosphorothioate linkage
  modified_base 21: mod_base = OTHER; note = 2'-fluorouridine
tcaccagtgcatggtttctct

SEQ ID NO: 2713 - RNA, 21 nt, synthetic construct
  source 1..21: mol_type = other RNA
  modified_base 1: mod_base = OTHER; note = 2'-fluorocytidine with phosphorothioate linkage
  modified_base 2: mod_base = OTHER; note = 2'-O-methyladenosine with phosphorothioate linkage
  modified_base 3: mod_base = OTHER; note = 2'-fluorocytidine
  modified_base 4: mod_base = OTHER; note = 2'-O-methylcytidine
  modified_base 5: mod_base = OTHER; note = 2'-fluoroadenosine
  modified_base 6: mod_base = OTHER; note = 2'-O-methylguanosine
  modified_base 7: mod_base = OTHER; note = 2'-fluorouridine
  modified_base 8: mod_base = OTHER; note = 2'-O-methylguanosine
  modified_base 9: mod_base = OTHER; note = 2'-fluorocytidine
  modified_base 10: mod_base = OTHER; note = 2'-O-methyladenosine
  modified_base 11: mod_base = OTHER; note = 2'-fluorouridine
  modified_base 12: mod_base = OTHER; note = 2'-O-methylguanosine
  modified_base 13: mod_base = OTHER; note = 2'-fluoroguanosine
  modified_base 14: mod_base = OTHER; note = 2'-O-methyluridine
  modified_base 15: mod_base = OTHER; note = 2'-fluorouridine
  modified_base 16: mod_base = OTHER; note = 2'-O-methyluridine
  modified_base 17: mod_base = OTHER; note = 2'-fluorocytidine
  modified_base 18: mod_base = OTHER; note = 2'-O-methyluridine
  modified_base 19: mod_base = OTHER; note = 2'-fluorocytidine with phosphorothioate linkage
  modified_base 20: mod_base = OTHER; note = 2'-O-methyluridine with phosphorothioate linkage
  modified_base 21: mod_base = OTHER; note = 2'-fluorouridine
caccagtgcatggtttctctt

SEQ ID NO: 2714 - RNA, 21 nt, synthetic construct
  source 1..21: mol_type = other RNA
  modified_base 1: mod_base = OTHER; note = 2'-fluoroadenosine with phosphorothioate linkage
  modified_base 2: mod_base = OTHER; note = 2'-O-methylcytidine with phosphorothioate linkage
  modified_base 3: mod_base = OTHER; note = 2'-fluorocytidine
  modified_base 4: mod_base = OTHER; note = 2'-O-methyladenosine
  modified_base 5: mod_base = OTHER; note = 2'-fluoroguanosine
  modified_base 6: mod_base = OTHER; note = 2'-O-methyluridine
  modified_base 7: mod_base = OTHER; note = 2'-fluoroguanosine
  modified_base 8: mod_base = OTHER; note = 2'-O-methylcytidine
  modified_base 9: mod_base = OTHER; note = 2'-fluoroadenosine
  modified_base 10: mod_base = OTHER; note = 2'-O-methyluridine
  modified_base 11: mod_base = OTHER; note = 2'-fluoroguanosine
  modified_base 12: mod_base = OTHER; note = 2'-O-methylguanosine
  modified_base 13: mod_base = OTHER; note = 2'-fluorouridine
  modified_base 14: mod_base = OTHER; note = 2'-O-methyluridine
  modified_base 15: mod_base = OTHER; note = 2'-fluorouridine
  modified_base 16: mod_base = OTHER; note = 2'-O-methylcytidine
  modified_base 17: mod_base = OTHER; note = 2'-fluorouridine
  modified_base 18: mod_base = OTHER; note = 2'-O-methylcytidine
  modified_base 19: mod_base = OTHER; note = 2'-fluorouridine with phosphorothioate linkage
  modified_base 20: mod_base = OTHER; note = 2'-O-methyluridine with phosphorothioate linkage
  modified_base 21: mod_base = OTHER; note = 2'-fluorouridine
accagtgcatggtttctcttt

SEQ ID NO: 2715 - RNA, 21 nt, synthetic construct
  source 1..21: mol_type = other RNA
  modified_base 1: mod_base = OTHER; note = 2'-fluoroadenosine with phosphorothioate linkage
  modified_base 2: mod_base = OTHER; note = 2'-O-methylguanosine with phosphorothioate linkage
  modified_base 3: mod_base = OTHER; note = 2'-fluorouridine
  modified_base 4: mod_base = OTHER; note = 2'-O-methylguanosine
  modified_base 5: mod_base = OTHER; note = 2'-fluorocytidine
  modified_base 6: mod_base = OTHER; note = 2'-O-methyladenosine
  modified_base 7: mod_base = OTHER; note = 2'-fluorouridine
  modified_base 8: mod_base = OTHER; note = 2'-O-methylguanosine
  modified_base 9: mod_base = OTHER; note = 2'-fluoroguanosine
  modified_base 10: mod_base = OTHER; note = 2'-O-methyluridine
  modified_base 11: mod_base = OTHER; note = 2'-fluorouridine
  modified_base 12: mod_base = OTHER; note = 2'-O-methyluridine
  modified_base 13: mod_base = OTHER; note = 2'-fluorocytidine
  modified_base 14: mod_base = OTHER; note = 2'-O-methyluridine
  modified_base 15: mod_base = OTHER; note = 2'-fluorocytidine
  modified_base 16: mod_base = OTHER; note = 2'-O-methyluridine
  modified_base 17: mod_base = OTHER; note = 2'-fluorouridine
  modified_base 18: mod_base = OTHER; note = 2'-O-methylguanosine
  modified_base 19: mod_base = OTHER; note = 2'-fluorocytidine with phosphorothioate linkage
  modified_base 20: mod_base = OTHER; note = 2'-O-methyladenosine with phosphorothioate linkage
  modified_base 21: mod_base = OTHER; note = 2'-fluoroadenosine
agtgcatggtttctcttgcaa

SEQ ID NO: 2716 - RNA, 21 nt, synthetic construct
  source 1..21: mol_type = other RNA
  modified_base 1: mod_base = OTHER; note = 2'-fluoroguanosine with phosphorothioate linkage
  modified_base 2: mod_base = OTHER; note = 2'-O-methylguanosine with phosphorothioate linkage
  modified_base 3: mod_base = OTHER; note = 2'-fluorouridine
  modified_base 4: mod_base = OTHER; note = 2'-O-methyluridine
  modified_base 5: mod_base = OTHER; note = 2'-fluorouridine
  modified_base 6: mod_base = OTHER; note = 2'-O-methylcytidine
  modified_base 7: mod_base = OTHER; note = 2'-fluorouridine
  modified_base 8: mod_base = OTHER; note = 2'-O-methylcytidine
  modified_base 9: mod_base = OTHER; note = 2'-fluorouridine
  modified_base 10: mod_base = OTHER; note = 2'-O-methyluridine
  modified_base 11: mod_base = OTHER; note = 2'-fluoroguanosine
  modified_base 12: mod_base = OTHER; note = 2'-O-methylcytidine
  modified_base 13: mod_base = OTHER; note = 2'-fluoroadenosine
  modified_base 14: mod_base = OTHER; note = 2'-O-methyladenosine
  modified_base 15: mod_base = OTHER; note = 2'-fluorocytidine
  modified_base 16: mod_base = OTHER; note = 2'-O-methyladenosine
  modified_base 17: mod_base = OTHER; note = 2'-fluorocytidine
  modified_base 18: mod_base = OTHER; note = 2'-O-methylguanosine
  modified_base 19: mod_base = OTHER; note = 2'-fluorocytidine with phosphorothioate linkage
  modified_base 20: mod_base = OTHER; note = 2'-O-methyladenosine with phosphorothioate linkage
  modified_base 21: mod_base = OTHER; note = 2'-fluorocytidine
ggtttctcttgcaacacgcac

SEQ ID NO: 2717 - RNA, 21 nt, synthetic construct
  source 1..21: mol_type = other RNA
  modified_base 1: mod_base = OTHER; note = 2'-fluoroguanosine with phosphorothioate linkage
  modified_base 2: mod_base = OTHER; note = 2'-O-methyluridine with phosphorothioate linkage
  modified_base 3: mod_base = OTHER; note = 2'-fluorouridine
  modified_base 4: mod_base = OTHER; note = 2'-O-methyluridine
  modified_base 5: mod_base = OTHER; note = 2'-fluorocytidine
  modified_base 6: mod_base = OTHER; note = 2'-O-methyluridine
  modified_base 7: mod_base = OTHER; note = 2'-fluorocytidine
  modified_base 8: mod_base = OTHER; note = 2'-O-methyluridine
  modified_base 9: mod_base = OTHER; note = 2'-fluorouridine
  modified_base 10: mod_base = OTHER; note = 2'-O-methylguanosine
  modified_base 11: mod_base = OTHER; note = 2'-fluorocytidine
  modified_base 12: mod_base = OTHER; note = 2'-O-methyladenosine
  modified_base 13: mod_base = OTHER; note = 2'-fluoroadenosine
  modified_base 14: mod_base = OTHER; note = 2'-O-methylcytidine
  modified_base 15: mod_base = OTHER; note = 2'-fluoroadenosine
  modified_base 16: mod_base = OTHER; note = 2'-O-methylcytidine
  modified_base 17: mod_base = OTHER; note = 2'-fluoroguanosine
  modified_base 18: mod_base = OTHER; note = 2'-O-methylcytidine
  modified_base 19: mod_base = OTHER; note = 2'-fluoroadenosine with phosphorothioate linkage
  modified_base 20: mod_base = OTHER; note = 2'-O-methylcytidine with phosphorothioate linkage
  modified_base 21: mod_base = OTHER; note = 2'-fluoroadenosine
gtttctcttgcaacacgcaca

SEQ ID NO: 2718 - RNA, 21 nt, synthetic construct
  source 1..21: mol_type = other RNA
  modified_base 1: mod_base = OTHER; note = 2'-fluorouridine with phosphorothioate linkage
  modified_base 2: mod_base = OTHER; note = 2'-O-methyluridine with phosphorothioate linkage
  modified_base 3: mod_base = OTHER; note = 2'-fluorocytidine
  modified_base 4: mod_base = OTHER; note = 2'-O-methyluridine
  modified_base 5: mod_base = OTHER; note = 2'-fluorocytidine
  modified_base 6: mod_base = OTHER; note = 2'-O-methyluridine
  modified_base 7: mod_base = OTHER; note = 2'-fluorouridine
  modified_base 8: mod_base = OTHER; note = 2'-O-methylguanosine
  modified_base 9: mod_base = OTHER; note = 2'-fluorocytidine
  modified_base 10: mod_base = OTHER; note = 2'-O-methyladenosine
  modified_base 11: mod_base = OTHER; note = 2'-fluoroadenosine
  modified_base 12: mod_base = OTHER; note = 2'-O-methylcytidine
  modified_base 13: mod_base = OTHER; note = 2'-fluoroadenosine
  modified_base 14: mod_base = OTHER; note = 2'-O-methylcytidine
  modified_base 15: mod_base = OTHER; note = 2'-fluoroguanosine
  modified_base 16: mod_base = OTHER; note = 2'-O-methylcytidine
  modified_base 17: mod_base = OTHER; note = 2'-fluoroadenosine
  modified_base 18: mod_base = OTHER; note = 2'-O-methylcytidine
  modified_base 19: mod_base = OTHER; note = 2'-fluoroadenosine with phosphorothioate linkage
  modified_base 20: mod_base = OTHER; note = 2'-O-methylguanosine with phosphorothioate linkage
  modified_base 21: mod_base = OTHER; note = 2'-fluoroadenosine
ttctcttgcaacacgcacaga

SEQ ID NO: 2719 - RNA, 21 nt, synthetic construct
  source 1..21: mol_type = other RNA
  modified_base 1: mod_base = OTHER; note = 2'-fluorouridine with phosphorothioate linkage
  modified_base 2: mod_base = OTHER; note = 2'-O-methylcytidine with phosphorothioate linkage
  modified_base 3: mod_base = OTHER; note = 2'-fluorouridine
  modified_base 4: mod_base = OTHER; note = 2'-O-methylcytidine
  modified_base 5: mod_base = OTHER; note = 2'-fluorouridine
  modified_base 6: mod_base = OTHER; note = 2'-O-methyluridine
  modified_base 7: mod_base = OTHER; note = 2'-fluoroguanosine
  modified_base 8: mod_base = OTHER; note = 2'-O-methylcytidine
  modified_base 9: mod_base = OTHER; note = 2'-fluoroadenosine
  modified_base 10: mod_base = OTHER; note = 2'-O-methyladenosine
  modified_base 11: mod_base = OTHER; note = 2'-fluorocytidine
  modified_base 12: mod_base = OTHER; note = 2'-O-methyladenosine
  modified_base 13: mod_base = OTHER; note = 2'-fluorocytidine
  modified_base 14: mod_base = OTHER; note = 2'-O-methylguanosine
  modified_base 15: mod_base = OTHER; note = 2'-fluorocytidine
  modified_base 16: mod_base = OTHER; note = 2'-O-methyladenosine
  modified_base 17: mod_base = OTHER; note = 2'-fluorocytidine
  modified_base 18: mod_base = OTHER; note = 2'-O-methyladenosine
  modified_base 19: mod_base = OTHER; note = 2'-fluoroguanosine with phosphorothioate linkage
  modified_base 20: mod_base = OTHER; note = 2'-O-methyladenosine with phosphorothioate linkage
  modified_base 21: mod_base = OTHER; note = 2'-fluoroadenosine
tctcttgcaacacgcacagaa

SEQ ID NO: 2720 - RNA, 21 nt, synthetic construct
  source 1..21: mol_type = other RNA
  modified_base 1: mod_base = OTHER; note = 2'-fluorocytidine with phosphorothioate linkage
  modified_base 2: mod_base = OTHER; note = 2'-O-methyluridine with phosphorothioate linkage
  modified_base 3: mod_base = OTHER; note = 2'-fluorouridine
  modified_base 4: mod_base = OTHER; note = 2'-O-methylguanosine
  modified_base 5: mod_base = OTHER; note = 2'-fluorocytidine
  modified_base 6: mod_base = OTHER; note = 2'-O-methyladenosine
  modified_base 7: mod_base = OTHER; note = 2'-fluoroadenosine
  modified_base 8: mod_base = OTHER; note = 2'-O-methylcytidine
  modified_base 9: mod_base = OTHER; note = 2'-fluoroadenosine
  modified_base 10: mod_base = OTHER; note = 2'-O-methylcytidine
  modified_base 11: mod_base = OTHER; note = 2'-fluoroguanosine
  modified_base 12: mod_base = OTHER; note = 2'-O-methylcytidine
  modified_base 13: mod_base = OTHER; note = 2'-fluoroadenosine
  modified_base 14: mod_base = OTHER; note = 2'-O-methylcytidine
  modified_base 15: mod_base = OTHER; note = 2'-fluoroadenosine
  modified_base 16: mod_base = OTHER; note = 2'-O-methylguanosine
  modified_base 17: mod_base = OTHER; note = 2'-fluoroadenosine
  modified_base 18: mod_base = OTHER; note = 2'-O-methyladenosine
  modified_base 19: mod_base = OTHER; note = 2'-fluorocytidine with phosphorothioate linkage
  modified_base 20: mod_base = OTHER; note = 2'-O-methyladenosine with phosphorothioate linkage
  modified_base 21: mod_base = OTHER; note = 2'-fluorocytidine
cttgcaacacgcacagaacac

SEQ ID NO: 2721 - RNA, 21 nt, synthetic construct
  source 1..21: mol_type = other RNA
  modified_base 1: mod_base = OTHER; note = 2'-fluorouridine with phosphorothioate linkage
  modified_base 2: mod_base = OTHER; note = 2'-O-methyluridine with phosphorothioate linkage
  modified_base 3: mod_base = OTHER; note = 2'-fluoroguanosine
  modified_base 4: mod_base = OTHER; note = 2'-O-methylcytidine
  modified_base 5: mod_base = OTHER; note = 2'-fluoroadenosine
  modified_base 6: mod_base = OTHER; note = 2'-O-methyladenosine
  modified_base 7: mod_base = OTHER; note = 2'-fluorocytidine
  modified_base 8: mod_base = OTHER; note = 2'-O-methyladenosine
  modified_base 9: mod_base = OTHER; note = 2'-fluorocytidine
  modified_base 10: mod_base = OTHER; note = 2'-O-methylguanosine
  modified_base 11: mod_base = OTHER; note = 2'-fluorocytidine
  modified_base 12: mod_base = OTHER; note = 2'-O-methyladenosine
  modified_base 13: mod_base = OTHER; note = 2'-fluorocytidine
  modified_base 14: mod_base = OTHER; note = 2'-O-methyladenosine
  modified_base 15: mod_base = OTHER; note = 2'-fluoroguanosine
  modified_base 16: mod_base = OTHER; note = 2'-O-methyladenosine
  modified_base 17: mod_base = OTHER; note = 2'-fluoroadenosine
  modified_base 18: mod_base = OTHER; note = 2'-O-methylcytidine
  modified_base 19: mod_base = OTHER; note = 2'-fluoroadenosine with phosphorothioate linkage
  modified_base 20: mod_base = OTHER; note = 2'-O-methylcytidine with phosphorothioate linkage
  modified_base 21: mod_base = OTHER; note = 2'-fluorouridine
ttgcaacacgcacagaacact

SEQ ID NO: 2722 - RNA, 21 nt, synthetic construct
  source 1..21: mol_type = other RNA
  modified_base 1: mod_base = OTHER; note = 2'-fluorouridine with phosphorothioate linkage
  modified_base 2: mod_base = OTHER; note = 2'-O-methylguanosine with phosphorothioate linkage
  modified_base 3: mod_base = OTHER; note = 2'-fluorocytidine
  modified_base 4: mod_base = OTHER; note = 2'-O-methyladenosine
  modified_base 5: mod_base = OTHER; note = 2'-fluoroadenosine
  modified_base 6: mod_base = OTHER; note = 2'-O-methylcytidine
  modified_base 7: mod_base = OTHER; note = 2'-fluoroadenosine
  modified_base 8: mod_base = OTHER; note = 2'-O-methylcytidine
  modified_base 9: mod_base = OTHER; note = 2'-fluoroguanosine
  modified_base 10: mod_base = OTHER; note = 2'-O-methylcytidine
  modified_base 11: mod_base = OTHER; note = 2'-fluoroadenosine
  modified_base 12: mod_base = OTHER; note = 2'-O-methylcytidine
  modified_base 13: mod_base = OTHER; note = 2'-fluoroadenosine
  modified_base 14: mod_base = OTHER; note = 2'-O-methylguanosine
  modified_base 15: mod_base = OTHER; note = 2'-fluoroadenosine
  modified_base 16: mod_base = OTHER; note = 2'-O-methyladenosine
  modified_base 17: mod_base = OTHER; note = 2'-fluorocytidine
  modified_base 18: mod_base = OTHER; note = 2'-O-methyladenosine
  modified_base 19: mod_base = OTHER; note = 2'-fluorocytidine with phosphorothioate linkage
  modified_base 20: mod_base = OTHER; note = 2'-O-methyluridine with phosphorothioate linkage
  modified_base 21: mod_base = OTHER; note = 2'-fluorocytidine
tgcaacacgcacagaacactc

SEQ ID NO: 2723 - RNA, 21 nt, synthetic construct
  source 1..21: mol_type = other RNA
  modified_base 1: mod_base = OTHER; note = 2'-fluoroguanosine with phosphorothioate linkage
  modified_base 2: mod_base = OTHER; note = 2'-O-methylcytidine with phosphorothioate linkage
  modified_base 3: mod_base = OTHER; note = 2'-fluoroadenosine
  modified_base 4: mod_base = OTHER; note = 2'-O-methyladenosine
  modified_base 5: mod_base = OTHER; note = 2'-fluorocytidine
  modified_base 6: mod_base = OTHER; note = 2'-O-methyladenosine
  modified_base 7: mod_base = OTHER; note = 2'-fluorocytidine
  modified_base 8: mod_base = OTHER; note = 2'-O-methylguanosine
  modified_base 9: mod_base = OTHER; note = 2'-fluorocytidine
  modified_base 10: mod_base = OTHER; note = 2'-O-methyladenosine
  modified_base 11: mod_base = OTHER; note = 2'-fluorocytidine
  modified_base 12: mod_base = OTHER; note = 2'-O-methyladenosine
  modified_base 13: mod_base = OTHER; note = 2'-fluoroguanosine
  modified_base 14: mod_base = OTHER; note = 2'-O-methyladenosine
  modified_base 15: mod_base = OTHER; note = 2'-fluoroadenosine
  modified_base 16: mod_base = OTHER; note = 2'-O-methylcytidine
  modified_base 17: mod_base = OTHER; note = 2'-fluoroadenosine
  modified_base 18: mod_base = OTHER; note = 2'-O-methylcytidine
  modified_base 19: mod_base = OTHER; note = 2'-fluorouridine with phosphorothioate linkage
  modified_base 20: mod_base = OTHER; note = 2'-O-methylcytidine with phosphorothioate linkage
  modified_base 21: mod_base = OTHER; note = 2'-fluoroadenosine
gcaacacgcacagaacactca

SEQ ID NO: 2724 - RNA, 21 nt, synthetic construct
  source 1..21: mol_type = other RNA
  modified_base 1: mod_base = OTHER; note = 2'-fluorocytidine with phosphorothioate linkage
  modified_base 2: mod_base = OTHER; note = 2'-O-methyladenosine with phosphorothioate linkage
  modified_base 3: mod_base = OTHER; note = 2'-fluoroadenosine
  modified_base 4: mod_base = OTHER; note = 2'-O-methylcytidine
  modified_base 5: mod_base = OTHER; note = 2'-fluoroadenosine
  modified_base 6: mod_base = OTHER; note = 2'-O-methylcytidine
  modified_base 7: mod_base = OTHER; note = 2'-fluoroguanosine
  modified_base 8: mod_base = OTHER; note = 2'-O-methylcytidine
  modified_base 9: mod_base = OTHER; note = 2'-fluoroadenosine
  modified_base 10: mod_base = OTHER; note = 2'-O-methylcytidine
  modified_base 11: mod_base = OTHER; note = 2'-fluoroadenosine
  modified_base 12: mod_base = OTHER; note = 2'-O-methylguanosine
  modified_base 13: mod_base = OTHER; note = 2'-fluoroadenosine
  modified_base 14: mod_base = OTHER; note = 2'-O-methyladenosine
  modified_base 15: mod_base = OTHER; note = 2'-fluorocytidine
  modified_base 16: mod_base = OTHER; note = 2'-O-methyladenosine
  modified_base 17: mod_base = OTHER; note = 2'-fluorocytidine
  modified_base 18: mod_base = OTHER; note = 2'-O-methyluridine
  modified_base 19: mod_base = OTHER; note = 2'-fluorocytidine with phosphorothioate linkage
  modified_base 20: mod_base = OTHER; note = 2'-O-methyladenosine with phosphorothioate linkage
  modified_base 21: mod_base = OTHER; note = 2'-fluorouridine
caacacgcacagaacactcat

SEQ ID NO: 2725 - RNA, 21 nt, synthetic construct
  source 1..21: mol_type = other RNA
  modified_base 1: mod_base = OTHER; note = 2'-fluoroadenosine with phosphorothioate linkage
  modified_base 2: mod_base = OTHER; note = 2'-O-methylcytidine with phosphorothioate linkage
  modified_base 3: mod_base = OTHER; note = 2'-fluoroadenosine
  modified_base 4: mod_base = OTHER; note = 2'-O-methylcytidine
  modified_base 5: mod_base = OTHER; note = 2'-fluoroguanosine
  modified_base 6: mod_base = OTHER; note = 2'-O-methylcytidine
  modified_base 7: mod_base = OTHER; note = 2'-fluoroadenosine
  modified_base 8: mod_base = OTHER; note = 2'-O-methylcytidine
  modified_base 9: mod_base = OTHER; note = 2'-fluoroadenosine
  modified_base 10: mod_base = OTHER; note = 2'-O-methylguanosine
  modified_base 11: mod_base = OTHER; note = 2'-fluoroadenosine
  modified_base 12: mod_base = OTHER; note = 2'-O-methyladenosine
  modified_base 13: mod_base = OTHER; note = 2'-fluorocytidine
  modified_base 14: mod_base = OTHER; note = 2'-O-methyladenosine
  modified_base 15: mod_base = OTHER; note = 2'-fluorocytidine
  modified_base 16: mod_base = OTHER; note = 2'-O-methyluridine
  modified_base 17: mod_base = OTHER; note = 2'-fluorocytidine
  modified_base 18: mod_base = OTHER; note = 2'-O-methyladenosine
  modified_base 19: mod_base = OTHER; note = 2'-fluorouridine with phosphorothioate linkage
  modified_base 20: mod_base = OTHER; note = 2'-O-methylguanosine with phosphorothioate linkage
  modified_base 21: mod_base = OTHER; note = 2'-fluorouridine
acacgcacagaacactcatgt

SEQ ID NO: 2726 - RNA, 21 nt, synthetic construct
  source 1..21: mol_type = other RNA
  modified_base 1: mod_base = OTHER; note = 2'-fluorocytidine with phosphorothioate linkage
  modified_base 2: mod_base = OTHER; note = 2'-O-methyladenosine with phosphorothioate linkage
  modified_base 3: mod_base = OTHER; note = 2'-fluorocytidine
  modified_base 4: mod_base = OTHER; note = 2'-O-methylguanosine
  modified_base 5: mod_base = OTHER; note = 2'-fluorocytidine
  modified_base 6: mod_base = OTHER; note = 2'-O-methyladenosine
  modified_base 7: mod_base = OTHER; note = 2'-fluorocytidine
  modified_base 8: mod_base = OTHER; note = 2'-O-methyladenosine
  modified_base 9: mod_base = OTHER; note = 2'-fluoroguanosine
  modified_base 10: mod_base = OTHER; note = 2'-O-methyladenosine
  modified_base 11: mod_base = OTHER; note = 2'-fluoroadenosine
  modified_base 12: mod_base = OTHER; note = 2'-O-methylcytidine
  modified_base 13: mod_base = OTHER; note = 2'-fluoroadenosine
  modified_base 14: mod_base = OTHER; note = 2'-O-methylcytidine
  modified_base 15: mod_base = OTHER; note = 2'-fluorouridine
  modified_base 16: mod_base = OTHER; note = 2'-O-methylcytidine
  modified_base 17: mod_base = OTHER; note = 2'-fluoroadenosine
  modified_base 18: mod_base = OTHER; note = 2'-O-methyluridine
  modified_base 19: mod_base = OTHER; note = 2'-fluoroguanosine with phosphorothioate linkage
  modified_base 20: mod_base = OTHER; note = 2'-O-methylguanosine with phosphorothioate linkage
  modified_base 21: mod_base = OTHER; note = 2'-fluoroadenosine
cacgcacagaacactcatgga

SEQ ID NO: 2727 - RNA, 21 nt, synthetic construct
  source 1..21: mol_type = other RNA
  modified_base 1: mod_base = OTHER; note = 2'-fluoroadenosine with phosphorothioate linkage
  modified_base 2: mod_base = OTHER; note = 2'-O-methylcytidine with phosphorothioate linkage
  modified_base 3: mod_base = OTHER; note = 2'-fluoroguanosine
  modified_base 4: mod_base = OTHER; note = 2'-O-methylcytidine
  modified_base 5: mod_base = OTHER; note = 2'-fluoroadenosine
  modified_base 6: mod_base = OTHER; note = 2'-O-methylcytidine
  modified_base 7: mod_base = OTHER; note = 2'-fluoroadenosine
  modified_base 8: mod_base = OTHER; note = 2'-O-methylguanosine
  modified_base 9: mod_base = OTHER; note = 2'-fluoroadenosine
  modified_base 10: mod_base = OTHER; note = 2'-O-methyladenosine
  modified_base 11: mod_base = OTHER; note = 2'-fluorocytidine
  modified_base 12: mod_base = OTHER; note = 2'-O-methyladenosine
  modified_base 13: mod_base = OTHER; note = 2'-fluorocytidine
  modified_base 14: mod_base = OTHER; note = 2'-O-methyluridine
  modified_base 15: mod_base = OTHER; note = 2'-fluorocytidine
  modified_base 16: mod_base = OTHER; note = 2'-O-methyladenosine
  modified_base 17: mod_base = OTHER; note = 2'-fluorouridine
  modified_base 18: mod_base = OTHER; note = 2'-O-methylguanosine
  modified_base 19: mod_base = OTHER; note = 2'-fluoroguanosine with phosphorothioate linkage
  modified_base 20: mod_base = OTHER; note = 2'-O-methyladenosine with phosphorothioate linkage
  modified_base 21: mod_base = OTHER; note = 2'-fluorouridine
acgcacagaacactcatggat

SEQ ID NO: 2728 - RNA, 21 nt, synthetic construct
  source 1..21: mol_type = other RNA
  modified_base 1: mod_base = OTHER; note = 2'-fluorocytidine with phosphorothioate linkage
  modified_base 2: mod_base = OTHER; note = 2'-O-methylguanosine with phosphorothioate linkage
  modified_base 3: mod_base = OTHER; note = 2'-fluorocytidine
  modified_base 4: mod_base = OTHER; note = 2'-O-methyladenosine
  modified_base 5: mod_base = OTHER; note = 2'-fluorocytidine
  modified_base 6: mod_base = OTHER; note = 2'-O-methyladenosine
  modified_base 7: mod_base = OTHER; note = 2'-fluoroguanosine
  modified_base 8: mod_base = OTHER; note = 2'-O-methyladenosine
  modified_base 9: mod_base = OTHER; note = 2'-fluoroadenosine
  modified_base 10: mod_base = OTHER; note = 2'-O-methylcytidine
  modified_base 11: mod_base = OTHER; note = 2'-fluoroadenosine
  modified_base 12: mod_base = OTHER; note = 2'-O-methylcytidine
  modified_base 13: mod_base = OTHER; note = 2'-fluorouridine
  modified_base 14: mod_base = OTHER; note = 2'-O-methylcytidine
  modified_base 15: mod_base = OTHER; note = 2'-fluoroadenosine
  modified_base 16: mod_base = OTHER; note = 2'-O-methyluridine
  modified_base 17: mod_base = OTHER; note = 2'-fluoroguanosine
  modified_base 18: mod_base = OTHER; note = 2'-O-methylguanosine
  modified_base 19: mod_base = OTHER; note = 2'-fluoroadenosine with phosphorothioate linkage
  modified_base 20: mod_base = OTHER; note = 2'-O-methyluridine with phosphorothioate linkage
  modified_base 21: mod_base = OTHER; note = 2'-fluorouridine
cgcacagaacactcatggatt

SEQ ID NO: 2729 - RNA, 21 nt, synthetic construct
  source 1..21: mol_type = other RNA
  modified_base 1: mod_base = OTHER; note = 2'-fluoroguanosine with phosphorothioate linkage
  modified_base 2: mod_base = OTHER; note = 2'-O-methylcytidine with phosphorothioate linkage
  modified_base 3: mod_base = OTHER; note = 2'-fluoroadenosine
  modified_base 4: mod_base = OTHER; note = 2'-O-methylcytidine
  modified_base 5: mod_base = OTHER; note = 2'-fluoroadenosine
  modified_base 6: mod_base = OTHER; note = 2'-O-methylguanosine
  modified_base 7: mod_base = OTHER; note = 2'-fluoroadenosine
  modified_base 8: mod_base = OTHER; note = 2'-O-methyladenosine
  modified_base 9: mod_base = OTHER; note = 2'-fluorocytidine
  modified_base 10: mod_base = OTHER; note = 2'-O-methyladenosine
  modified_base 11: mod_base = OTHER; note = 2'-fluorocytidine
  modified_base 12: mod_base = OTHER; note = 2'-O-methyluridine
  modified_base 13: mod_base = OTHER; note = 2'-fluorocytidine
  modified_base 14: mod_base = OTHER; note = 2'-O-methyladenosine
  modified_base 15: mod_base = OTHER; note = 2'-fluorouridine
  modified_base 16: mod_base = OTHER; note = 2'-O-methylguanosine
  modified_base 17: mod_base = OTHER; note = 2'-fluoroguanosine
  modified_base 18: mod_base = OTHER; note = 2'-O-methyladenosine
  modified_base 19: mod_base = OTHER; note = 2'-fluorouridine with phosphorothioate linkage
  modified_base 20: mod_base = OTHER; note = 2'-O-methyluridine with phosphorothioate linkage
  modified_base 21: mod_base = OTHER; note = 2'-fluoroadenosine
gcacagaacactcatggatta

SEQ ID NO: 2730 - RNA, 21 nt, synthetic construct
  source 1..21: mol_type = other RNA
  modified_base 1: mod_base = OTHER; note = 2'-fluorocytidine with phosphorothioate linkage
  modified_base 2: mod_base = OTHER; note = 2'-O-methyladenosine with phosphorothioate linkage
  modified_base 3: mod_base = OTHER; note = 2'-fluorocytidine
  modified_base 4: mod_base = OTHER; note = 2'-O-methyladenosine
  modified_base 5: mod_base = OTHER; note = 2'-fluoroguanosine
  modified_base 6: mod_base = OTHER; note = 2'-O-methyladenosine
  modified_base 7: mod_base = OTHER; note = 2'-fluoroadenosine
  modified_base 8: mod_base = OTHER; note = 2'-O-methylcytidine
  modified_base 9: mod_base = OTHER; note = 2'-fluoroadenosine
  modified_base 10: mod_base = OTHER; note = 2'-O-methylcytidine
  modified_base 11: mod_base = OTHER; note = 2'-fluorouridine
  modified_base 12: mod_base = OTHER; note = 2'-O-methylcytidine
  modified_base 13: mod_base = OTHER; note = 2'-fluoroadenosine
  modified_base 14: mod_base = OTHER; note = 2'-O-methyluridine
  modified_base 15: mod_base = OTHER; note = 2'-fluoroguanosine
  modified_base 16: mod_base = OTHER; note = 2'-O-methylguanosine
  modified_base 17: mod_base = OTHER; note = 2'-fluoroadenosine
  modified_base 18: mod_base = OTHER; note = 2'-O-methyluridine
  modified_base 19: mod_base = OTHER; note = 2'-fluorouridine with phosphorothioate linkage
  modified_base 20: mod_base = OTHER; note = 2'-O-methyladenosine with phosphorothioate linkage
  modified_base 21: mod_base = OTHER; note = 2'-fluoroadenosine
cacagaacactcatggattaa

SEQ ID NO: 2731 - RNA, 21 nt, synthetic construct
  source 1..21: mol_type = other RNA
  modified_base 1: mod_base = OTHER; note = 2'-fluoroadenosine with phosphorothioate linkage
  modified_base 2: mod_base = OTHER; note = 2'-O-methylcytidine with phosphorothioate linkage
  modified_base 3: mod_base = OTHER; note = 2'-fluoroadenosine
  modified_base 4: mod_base = OTHER; note = 2'-O-methylguanosine
  modified_base 5: mod_base = OTHER; note = 2'-fluoroadenosine
  modified_base 6: mod_base = OTHER; note = 2'-O-methyladenosine
  modified_base 7: mod_base = OTHER; note = 2'-fluorocytidine
  modified_base 8: mod_base = OTHER; note = 2'-O-methyladenosine
  modified_base 9: mod_base = OTHER; note = 2'-fluorocytidine
  modified_base 10: mod_base = OTHER; note = 2'-O-methyluridine
  modified_base 11: mod_base = OTHER; note = 2'-fluorocytidine
  modified_base 12: mod_base = OTHER; note = 2'-O-methyladenosine
  modified_base 13: mod_base = OTHER; note = 2'-fluorouridine
  modified_base 14: mod_base = OTHER; note = 2'-O-methylguanosine
  modified_base 15: mod_base = OTHER; note = 2'-fluoroguanosine
  modified_base 16: mod_base = OTHER; note = 2'-O-methyladenosine
  modified_base 17: mod_base = OTHER; note = 2'-fluorouridine
  modified_base 18: mod_base = OTHER; note = 2'-O-methyluridine
  modified_base 19: mod_base = OTHER; note = 2'-fluoroadenosine with phosphorothioate linkage
  modified_base 20: mod_base = OTHER; note = 2'-O-methyladenosine with phosphorothioate linkage
  modified_base 21: mod_base = OTHER; note = 2'-fluorouridine
acagaacactcatggattaat

SEQ ID NO: 2732 - RNA, 21 nt, synthetic construct
  source 1..21: mol_type = other RNA
  modified_base 1: mod_base = OTHER; note = 2'-fluorocytidine with phosphorothioate linkage
  modified_base 2: mod_base = OTHER; note = 2'-O-methyladenosine with phosphorothioate linkage
  modified_base 3: mod_base = OTHER; note = 2'-fluoroguanosine
  modified_base 4: mod_base = OTHER; note = 2'-O-methyladenosine
  modified_base 5: mod_base = OTHER; note = 2'-fluoroadenosine
  modified_base 6: mod_base = OTHER; note = 2'-O-methylcytidine
  modified_base 7: mod_base = OTHER; note = 2'-fluoroadenosine
  modified_base 8: mod_base = OTHER; note = 2'-O-methylcytidine
  modified_base 9: mod_base = OTHER; note = 2'-fluorouridine
  modified_base 10: mod_base = OTHER; note = 2'-O-methylcytidine
  modified_base 11: mod_base = OTHER; note = 2'-fluoroadenosine
  modified_base 12: mod_base = OTHER; note = 2'-O-methyluridine
  modified_base 13: mod_base = OTHER; note = 2'-fluoroguanosine
  modified_base 14: mod_base = OTHER; note = 2'-O-methylguanosine
  modified_base 15: mod_base = OTHER; note = 2'-fluoroadenosine
  modified_base 16: mod_base = OTHER; note = 2'-O-methyluridine
  modified_base 17: mod_base = OTHER; note = 2'-fluorouridine
  modified_base 18: mod_base = OTHER; note = 2'-O-methyladenosine
  modified_base 19: mod_base = OTHER; note = 2'-fluoroadenosine with phosphorothioate linkage
  modified_base 20: mod_base = OTHER; note = 2'-O-methylguanosine with phosphorothioate linkage
  modified_base 21: mod_base = OTHER; note = 2'-fluoroadenosine
cagaacactcatggattaaga

SEQ ID NO: 2733 - RNA, 21 nt, synthetic construct
  source 1..21: mol_type = other RNA
  modified_base 1: mod_base = OTHER; note = 2'-fluoroadenosine with phosphorothioate linkage
  modified_base 2: mod_base = OTHER; note = 2'-O-methylguanosine with phosphorothioate linkage
  modified_base 3: mod_base = OTHER; note = 2'-fluoroadenosine
  modified_base 4: mod_base = OTHER; note = 2'-O-methyladenosine
  modified_base 5: mod_base = OTHER; note = 2'-fluorocytidine
  modified_base 6: mod_base = OTHER; note = 2'-O-methyladenosine
  modified_base 7: mod_base = OTHER; note = 2'-fluorocytidine
  modified_base 8: mod_base = OTHER; note = 2'-O-methyluridine
  modified_base 9: mod_base = OTHER; note = 2'-fluorocytidine
  modified_base 10: mod_base = OTHER; note = 2'-O-methyladenosine
  modified_base 11: mod_base = OTHER; note = 2'-fluorouridine
  modified_base 12: mod_base = OTHER; note = 2'-O-methylguanosine
  modified_base 13: mod_base = OTHER; note = 2'-fluoroguanosine
  modified_base 14: mod_base = OTHER; note = 2'-O-methyladenosine
  modified_base 15: mod_base = OTHER; note = 2'-fluorouridine
  modified_base 16: mod_base = OTHER; note = 2'-O-methyluridine
  modified_base 17: mod_base = OTHER; note = 2'-fluoroadenosine
  modified_base 18: mod_base = OTHER; note = 2'-O-methyladenosine
  modified_base 19: mod_base = OTHER; note = 2'-fluoroguanosine with phosphorothioate linkage
  modified_base 20: mod_base = OTHER; note = 2'-O-methyladenosine with phosphorothioate linkage
  modified_base 21: mod_base = OTHER; note = 2'-fluoroadenosine
agaacactcatggattaagaa

SEQ ID NO: 2734 - RNA, 21 nt, synthetic construct
  source 1..21: mol_type = other RNA
  modified_base 1: mod_base = OTHER; note = 2'-fluoroguanosine with phosphorothioate linkage
  modified_base 2: mod_base = OTHER; note = 2'-O-methyladenosine with phosphorothioate linkage
  modified_base 3: mod_base = OTHER; note = 2'-fluoroadenosine
  modified_base 4: mod_base = OTHER; note = 2'-O-methylcytidine
  modified_base 5: mod_base = OTHER; note = 2'-fluoroadenosine
  modified_base 6: mod_base = OTHER; note = 2'-O-methylcytidine
  modified_base 7: mod_base = OTHER; note = 2'-fluorouridine
  modified_base 8: mod_base = OTHER; note = 2'-O-methylcytidine
  modified_base 9: mod_base = OTHER; note = 2'-fluoroadenosine
  modified_base 10: mod_base = OTHER; note = 2'-O-methyluridine
  modified_base 11: mod_base = OTHER; note = 2'-fluoroguanosine
  modified_base 12: mod_base = OTHER; note = 2'-O-methylguanosine
  modified_base 13: mod_base = OTHER; note = 2'-fluoroadenosine
  modified_base 14: mod_base = OTHER; note = 2'-O-methyluridine
  modified_base 15: mod_base = OTHER; note = 2'-fluorouridine
  modified_base 16: mod_base = OTHER; note = 2'-O-methyladenosine
  modified_base 17: mod_base = OTHER; note = 2'-fluoroadenosine
  modified_base 18: mod_base = OTHER; note = 2'-O-methylguanosine
  modified_base 19: mod_base = OTHER; note = 2'-fluoroadenosine with phosphorothioate linkage
  modified_base 20: mod_base = OTHER; note = 2'-O-methyladenosine with phosphorothioate linkage
  modified_base 21: mod_base = OTHER; note = 2'-fluorouridine
gaacactcatggattaagaat

SEQ ID NO: 2735 - RNA, 21 nt, synthetic construct
  source 1..21: mol_type = other RNA
  modified_base 1: mod_base = OTHER; note = 2'-fluoroadenosine with phosphorothioate linkage
  modified_base 2: mod_base = OTHER; note = 2'-O-methyladenosine with phosphorothioate linkage
  modified_base 3: mod_base = OTHER; note = 2'-fluorocytidine
  modified_base 4: mod_base = OTHER; note = 2'-O-methyladenosine
  modified_base 5: mod_base = OTHER; note = 2'-fluorocytidine
  modified_base 6: mod_base = OTHER; note = 2'-O-methyluridine
  modified_base 7: mod_base = OTHER; note = 2'-fluorocytidine
  modified_base 8: mod_base = OTHER; note = 2'-O-methyladenosine
  modified_base 9: mod_base = OTHER; note = 2'-fluorouridine
  modified_base 10: mod_base = OTHER; note = 2'-O-methylguanosine
  modified_base 11: mod_base = OTHER; note = 2'-fluoroguanosine
  modified_base 12: mod_base = OTHER; note = 2'-O-methyladenosine
  modified_base 13: mod_base = OTHER; note = 2'-fluorouridine
  modified_base 14: mod_base = OTHER; note = 2'-O-methyluridine
  modified_base 15: mod_base = OTHER; note = 2'-fluoroadenosine
  modified_base 16: mod_base = OTHER; note = 2'-O-methyladenosine
  modified_base 17: mod_base = OTHER; note = 2'-fluoroguanosine
  modified_base 18: mod_base = OTHER; note = 2'-O-methyladenosine
  modified_base 19: mod_base = OTHER; note = 2'-fluoroadenosine with phosphorothioate linkage
  modified_base 20: mod_base = OTHER; note = 2'-O-methyluridine with phosphorothioate linkage
  modified_base 21: mod_base = OTHER; note = 2'-fluorocytidine
aacactcatggattaagaatc

SEQ ID NO: 2736 - RNA, 21 nt, synthetic construct
  source 1..21: mol_type = other RNA
  modified_base 1: mod_base = OTHER; note = 2'-fluorouridine with phosphorothioate linkage
  modified_base 2: mod_base = OTHER; note = 2'-O-methyluridine with phosphorothioate linkage
  modified_base 3: mod_base = OTHER; note = 2'-fluoroadenosine
  modified_base 4: mod_base = OTHER; note = 2'-O-methyladenosine
  modified_base 5: mod_base = OTHER; note = 2'-fluoroguanosine
  modified_base 6: mod_base = OTHER; note = 2'-O-methyladenosine
  modified_base 7: mod_base = OTHER; note = 2'-fluoroadenosine
  modified_base 8: mod_base = OTHER; note = 2'-O-methyluridine
  modified_base 9: mod_base = OTHER; note = 2'-fluorocytidine
  modified_base 10: mod_base = OTHER; note = 2'-O-methyluridine
  modified_base 11: mod_base = OTHER; note = 2'-fluoroadenosine
  modified_base 12: mod_base = OTHER; note = 2'-O-methylcytidine
  modified_base 13: mod_base = OTHER; note = 2'-fluorouridine
  modified_base 14: mod_base = OTHER; note = 2'-O-methyluridine
  modified_base 15: mod_base = OTHER; note = 2'-fluoroadenosine
  modified_base 16: mod_base = OTHER; note = 2'-O-methylguanosine
  modified_base 17: mod_base = OTHER; note = 2'-fluoroadenosine
  modified_base 18: mod_base = OTHER; note = 2'-O-methyladenosine
  modified_base 19: mod_base = OTHER; note = 2'-fluoroadenosine with phosphorothioate linkage
  modified_base 20: mod_base = OTHER; note = 2'-O-methylguanosine with phosphorothioate linkage
  modified_base 21: mod_base = OTHER; note = 2'-fluorocytidine
ttaagaatctacttagaaagc

SEQ ID NO: 2737 - RNA, 21 nt, synthetic construct
  source 1..21: mol_type = other RNA
  modified_base 1: mod_base = OTHER; note = 2'-fluoroguanosine with phosphorothioate linkage
  modified_base 2: mod_base = OTHER; note = 2'-O-methylguanosine with phosphorothioate linkage
  modified_base 3: mod_base = OTHER; note = 2'-fluorouridine
  modified_base 4: mod_base = OTHER; note = 2'-O-methyluridine
  modified_base 5: mod_base = OTHER; note = 2'-fluoroguanosine
  modified_base 6: mod_base = OTHER; note = 2'-O-methylguanosine
  modified_base 7: mod_base = OTHER; note = 2'-fluorouridine
  modified_base 8: mod_base = OTHER; note = 2'-O-methyladenosine
  modified_base 9: mod_base = OTHER; note = 2'-fluorouridine
  modified_base 10: mod_base = OTHER; note = 2'-O-methylcytidine
  modified_base 11: mod_base = OTHER; note = 2'-fluorocytidine
  modified_base 12: mod_base = OTHER; note = 2'-O-methylcytidine
  modified_base 13: mod_base = OTHER; note = 2'-fluorouridine
  modified_base 14: mod_base = OTHER; note = 2'-O-methyluridine
  modified_base 15: mod_base = OTHER; note = 2'-fluorocytidine
  modified_base 16: mod_base = OTHER; note = 2'-O-methyladenosine
  modified_base 17: mod_base = OTHER; note = 2'-fluoroguanosine
  modified_base 18: mod_base = OTHER; note = 2'-O-methylguanosine
  modified_base 19: mod_base = OTHER; note = 2'-fluoroadenosine with phosphorothioate linkage
  modified_base 20: mod_base = OTHER; note = 2'-O-methylcytidine with phosphorothioate linkage
  modified_base 21: mod_base = OTHER; note = 2'-fluorouridine
ggttggtatcccttcaggact

SEQ ID NO: 2738 - RNA, 21 nt, synthetic construct
  source 1..21: mol_type = other RNA
  modified_base 1: mod_base = OTHER; note = 2'-fluoroguanosine with phosphorothioate linkage
  modified_base 2: mod_base = OTHER; note = 2'-O-methyluridine with phosphorothioate linkage
  modified_base 3: mod_base = OTHER; note = 2'-fluorouridine
  modified_base 4: mod_base = OTHER; note = 2'-O-methylguanosine
  modified_base 5: mod_base = OTHER; note = 2'-fluoroguanosine
  modified_base 6: mod_base = OTHER; note = 2'-O-methyluridine
  modified_base 7: mod_base = OTHER; note = 2'-fluoroadenosine
  modified_base 8: mod_base = OTHER; note = 2'-O-methyluridine
  modified_base 9: mod_base = OTHER; note = 2'-fluorocytidine
  modified_base 10: mod_base = OTHER; note = 2'-O-methylcytidine
  modified_base 11: mod_base = OTHER; note = 2'-fluorocytidine
  modified_base 12: mod_base = OTHER; note = 2'-O-methyluridine
  modified_base 13: mod_base = OTHER; note = 2'-fluorouridine
  modified_base 14: mod_base = OTHER; note = 2'-O-methylcytidine
  modified_base 15: mod_base = OTHER; note = 2'-fluoroadenosine
  modified_base 16: mod_base = OTHER; note = 2'-O-methylguanosine
  modified_base 17: mod_base = OTHER; note = 2'-fluoroguanosine
  modified_base 18: mod_base = OTHER; note = 2'-O-methyladenosine
  modified_base 19: mod_base = OTHER; note = 2'-fluorocytidine with phosphorothioate linkage
  modified_base 20: mod_base = OTHER; note = 2'-O-methyluridine with phosphorothioate linkage
  modified_base 21: mod_base = OTHER; note = 2'-fluoroadenosine
gttggtatcccttcaggacta

SEQ ID NO: 2739 - RNA, 21 nt, synthetic construct
  source 1..21: mol_type = other RNA
  modified_base 1: mod_base = OTHER; note = 2'-fluorouridine with phosphorothioate linkage
  modified_base 2: mod_base = OTHER; note = 2'-O-methyluridine with phosphorothioate linkage
  modified_base 3: mod_base = OTHER; note = 2'-fluoroguanosine
  modified_base 4: mod_base = OTHER; note = 2'-O-methylguanosine
  modified_base 5: mod_base = OTHER; note = 2'-fluorouridine
  modified_base 6: mod_base = OTHER; note = 2'-O-methyladenosine
  modified_base 7: mod_base = OTHER; note = 2'-fluorouridine
  modified_base 8: mod_base = OTHER; note = 2'-O-methylcytidine
  modified_base 9: mod_base = OTHER; note = 2'-fluorocytidine
  modified_base 10: mod_base = OTHER; note = 2'-O-methylcytidine
  modified_base 11: mod_base = OTHER; note = 2'-fluorouridine
  modified_base 12: mod_base = OTHER; note = 2'-O-methyluridine
  modified_base 13: mod_base = OTHER; note = 2'-fluorocytidine
  modified_base 14: mod_base = OTHER; note = 2'-O-methyladenosine
  modified_base 15: mod_base = OTHER; note = 2'-fluoroguanosine
  modified_base 16: mod_base = OTHER; note = 2'-O-methylguanosine
  modified_base 17: mod_base = OTHER; note = 2'-fluoroadenosine
  modified_base 18: mod_base = OTHER; note = 2'-O-methylcytidine
  modified_base 19: mod_base = OTHER; note = 2'-fluorouridine with phosphorothioate linkage
  modified_base 20: mod_base = OTHER; note = 2'-O-methyladenosine with phosphorothioate linkage
  modified_base 21: mod_base = OTHER; note = 2'-fluorouridine
ttggtatcccttcaggactat

SEQ ID NO: 2740 - RNA, 21 nt, synthetic construct
  source 1..21: mol_type = other RNA
  modified_base 1: mod_base = OTHER; note = 2'-fluorouridine with phosphorothioate linkage
  modified_base 2: mod_base = OTHER; note = 2'-O-methylguanosine with phosphorothioate linkage
  modified_base 3: mod_base = OTHER; note = 2'-fluoroguanosine
  modified_base 4: mod_base = OTHER; note = 2'-O-methyluridine
  modified_base 5: mod_base = OTHER; note = 2'-fluoroadenosine
  modified_base 6: mod_base = OTHER; note = 2'-O-methyluridine
  modified_base 7: mod_base = OTHER; note = 2'-fluorocytidine
  modified_base 8: mod_base = OTHER; note = 2'-O-methylcytidine
  modified_base 9: mod_base = OTHER; note = 2'-fluorocytidine
  modified_base 10: mod_base = OTHER; note = 2'-O-methyluridine
  modified_base 11: mod_base = OTHER; note = 2'-fluorouridine
  modified_base 12: mod_base = OTHER; note = 2'-O-methylcytidine
  modified_base 13: mod_base = OTHER; note = 2'-fluoroadenosine
  modified_base 14: mod_base = OTHER; note = 2'-O-methylguanosine
  modified_base 15: mod_base = OTHER; note = 2'-fluoroguanosine
  modified_base 16: mod_base = OTHER; note = 2'-O-methyladenosine
  modified_base 17: mod_base = OTHER; note = 2'-fluorocytidine
  modified_base 18: mod_base = OTHER; note = 2'-O-methyluridine
  modified_base 19: mod_base = OTHER; note = 2'-fluoroadenosine with phosphorothioate linkage
  modified_base 20: mod_base = OTHER; note = 2'-O-methylguanosine with phosphorothioate linkage
  modified_base 21: mod_base = OTHER; note = 2'-fluorouridine
tggtatcccttcaggactagt

SEQ ID NO: 2741 - RNA, 21 nt, synthetic construct
  source 1..21: mol_type = other RNA
  modified_base 1: mod_base = OTHER; note = 2'-fluoroguanosine with phosphorothioate linkage
  modified_base 2: mod_base = OTHER; note = 2'-O-methylguanosine with phosphorothioate linkage
  modified_base 3: mod_base = OTHER; note = 2'-fluorouridine
  modified_base 4: mod_base = OTHER; note = 2'-O-methyladenosine
  modified_base 5: mod_base = OTHER; note = 2'-fluorouridine
  modified_base 6: mod_base = OTHER; note = 2'-O-methylcytidine
  modified_base 7: mod_base = OTHER; note = 2'-fluorocytidine
  modified_base 8: mod_base = OTHER; note = 2'-O-methylcytidine
  modified_base 9: mod_base = OTHER; note = 2'-fluorouridine
  modified_base 10: mod_base = OTHER; note = 2'-O-methyluridine
  modified_base 11: mod_base = OTHER; note = 2'-fluorocytidine
  modified_base 12: mod_base = OTHER; note = 2'-O-methyladenosine
  modified_base 13: mod_base = OTHER; note = 2'-fluoroguanosine
  modified_base 14: mod_base = OTHER; note = 2'-O-methylguanosine
  modified_base 15: mod_base = OTHER; note = 2'-fluoroadenosine
  modified_base 16: mod_base = OTHER; note = 2'-O-methylcytidine
  modified_base 17: mod_base = OTHER; note = 2'-fluorouridine
  modified_base 18: mod_base = OTHER; note = 2'-O-methyladenosine
  modified_base 19: mod_base = OTHER; note = 2'-fluoroguanosine with phosphorothioate linkage
  modified_base 20: mod_base = OTHER; note = 2'-O-methylguanosine with phosphorothioate linkage
  modified_base 21: mod_base = OTHER; note = 2'-fluorouridine
ggtatcccttcaggactaggt

SEQ ID NO: 2742 - RNA, 21 nt, synthetic construct
  source 1..21: mol_type = other RNA
  modified_base 1: mod_base = OTHER; note = 2'-fluoroadenosine with phosphorothioate linkage
  modified_base 2: mod_base = OTHER; note = 2'-O-methyluridine with phosphorothioate linkage
  modified_base 3: mod_base = OTHER; note = 2'-fluorocytidine
  modified_base 4: mod_base = OTHER; note = 2'-O-methylcytidine
  modified_base 5: mod_base = OTHER; note = 2'-fluorocytidine
  modified_base 6: mod_base = OTHER; note = 2'-O-methyluridine
  modified_base 7: mod_base = OTHER; note = 2'-fluorouridine
  modified_base 8: mod_base = OTHER; note = 2'-O-methylcytidine
  modified_base 9: mod_base = OTHER; note = 2'-fluoroadenosine
  modified_base 10: mod_base = OTHER; note = 2'-O-methylguanosine
  modified_base 11: mod_base = OTHER; note = 2'-fluoroguanosine
  modified_base 12: mod_base = OTHER; note = 2'-O-methyladenosine
  modified_base 13: mod_base = OTHER; note = 2'-fluorocytidine
  modified_base 14: mod_base = OTHER; note = 2'-O-methyluridine
  modified_base 15: mod_base = OTHER; note = 2'-fluoroadenosine
  modified_base 16: mod_base = OTHER; note = 2'-O-methylguanosine
  modified_base 17: mod_base = OTHER; note = 2'-fluoroguanosine
  modified_base 18: mod_base = OTHER; note = 2'-O-methyluridine
  modified_base 19: mod_base = OTHER; note = 2'-fluoroguanosine with phosphorothioate linkage
  modified_base 20: mod_base = OTHER; note = 2'-O-methylcytidine with phosphorothioate linkage
  modified_base 21: mod_base = OTHER; note = 2'-fluoroadenosine
atcccttcaggactaggtgca

SEQ ID NO: 2743 - RNA, 21 nt, synthetic construct
  source 1..21: mol_type = other RNA
  modified_base 1: mod_base = OTHER; note = 2'-fluorocytidine with phosphorothioate linkage
  modified_base 2: mod_base = OTHER; note = 2'-O-methylcytidine with phosphorothioate linkage
  modified_base 3: mod_base = OTHER; note = 2'-fluorouridine
  modified_base 4: mod_base = OTHER; note = 2'-O-methyluridine
  modified_base 5: mod_base = OTHER; note = 2'-fluorocytidine
  modified_base 6: mod_base = OTHER; note = 2'-O-methyladenosine
  modified_base 7: mod_base = OTHER; note = 2'-fluoroguanosine
  modified_base 8: mod_base = OTHER; note = 2'-O-methylguanosine
  modified_base 9: mod_base = OTHER; note = 2'-fluoroadenosine
  modified_base 10: mod_base = OTHER; note = 2'-O-methylcytidine
  modified_base 11: mod_base = OTHER; note = 2'-fluorouridine
  modified_base 12: mod_base = OTHER; note = 2'-O-methyladenosine
  modified_base 13: mod_base = OTHER; note = 2'-fluoroguanosine
  modified_base 14: mod_base = OTHER; note = 2'-O-methylguanosine
  modified_base 15: mod_base = OTHER; note = 2'-fluorouridine
  modified_base 16: mod_base = OTHER; note = 2'-O-methylguanosine
  modified_base 17: mod_base = OTHER; note = 2'-fluorocytidine
  modified_base 18: mod_base = OTHER; note = 2'-O-methyladenosine
  modified_base 19: mod_base = OTHER; note = 2'-fluoroguanosine with phosphorothioate linkage
  modified_base 20: mod_base = OTHER; note = 2'-O-methyladenosine with phosphorothioate linkage
  modified_base 21: mod_base = OTHER; note = 2'-fluoroadenosine
ccttcaggactaggtgcagaa

SEQ ID NO: 2744 - RNA, 21 nt, synthetic construct
  source 1..21: mol_type = other RNA
  modified_base 1: mod_base = OTHER; note = 2'-fluorouridine with phosphorothioate linkage
  modified_base 2: mod_base = OTHER; note = 2'-O-methyluridine with phosphorothioate linkage
  modified_base 3: mod_base = OTHER; note = 2'-fluorocytidine
  modified_base 4: mod_base = OTHER; note = 2'-O-methyladenosine
  modified_base 5: mod_base = OTHER; note = 2'-fluoroguanosine
  modified_base 6: mod_base = OTHER; note = 2'-O-methylguanosine
  modified_base 7: mod_base = OTHER; note = 2'-fluoroadenosine
  modified_base 8: mod_base = OTHER; note = 2'-O-methylcytidine
  modified_base 9: mod_base = OTHER; note = 2'-fluorouridine
  modified_base 10: mod_base = OTHER; note = 2'-O-methyladenosine
  modified_base 11: mod_base = OTHER; note = 2'-fluoroguanosine
  modified_base 12: mod_base = OTHER; note = 2'-O-methylguanosine
  modified_base 13: mod_base = OTHER; note = 2'-fluorouridine
  modified_base 14: mod_base = OTHER; note = 2'-O-methylguanosine
  modified_base 15: mod_base = OTHER; note = 2'-fluorocytidine
  modified_base 16: mod_base = OTHER; note = 2'-O-methyladenosine
  modified_base 17: mod_base = OTHER; note = 2'-fluoroguanosine
  modified_base 18: mod_base = OTHER; note = 2'-O-methyladenosine
  modified_base 19: mod_base = OTHER; note = 2'-fluoroadenosine with phosphorothioate linkage
  modified_base 20: mod_base = OTHER; note = 2'-O-methyluridine with phosphorothioate linkage
  modified_base 21: mod_base = OTHER; note = 2'-fluorouridine
ttcaggactaggtgcagaatt

SEQ ID NO: 2745 - RNA, 21 nt, synthetic construct
  source 1..21: mol_type = other RNA
  modified_base 1: mod_base = OTHER; note = 2'-fluorouridine with phosphorothioate linkage
  modified_base 2: mod_base = OTHER; note = 2'-O-methylcytidine with phosphorothioate linkage
  modified_base 3: mod_base = OTHER; note = 2'-fluoroadenosine
  modified_base 4: mod_base = OTHER; note = 2'-O-methylguanosine
  modified_base 5: mod_base = OTHER; note = 2'-fluoroguanosine
  modified_base 6: mod_base = OTHER; note = 2'-O-methyladenosine
  modified_base 7: mod_base = OTHER; note = 2'-fluorocytidine
  modified_base 8: mod_base = OTHER; note = 2'-O-methyluridine
  modified_base 9: mod_base = OTHER; note = 2'-fluoroadenosine
  modified_base 10: mod_base = OTHER; note = 2'-O-methylguanosine
  modified_base 11: mod_base = OTHER; note = 2'-fluoroguanosine
  modified_base 12: mod_base = OTHER; note = 2'-O-methyluridine
  modified_base 13: mod_base = OTHER; note = 2'-fluoroguanosine
  modified_base 14: mod_base = OTHER; note = 2'-O-methylcytidine
  modified_base 15: mod_base = OTHER; note = 2'-fluoroadenosine
  modified_base 16: mod_base = OTHER; note = 2'-O-methylguanosine
  modified_base 17: mod_base = OTHER; note = 2'-fluoroadenosine
  modified_base 18: mod_base = OTHER; note = 2'-O-methyladenosine
  modified_base 19: mod_base = OTHER; note = 2'-fluorouridine with phosphorothioate linkage
  modified_base 20: mod_base = OTHER; note = 2'-O-methylguanosine with phosphorothioate linkage
  modified_base 21: mod_base = OTHER; note = 2'-fluorouridine
tcaggactaggtgcagaatgt

SEQ ID NO: 2746 - RNA, 21 nt, synthetic construct
  source 1..21: mol_type = other RNA
  modified_base 1: mod_base = OTHER; note = 2'-fluorocytidine with phosphorothioate linkage
  modified_base 2: mod_base = OTHER; note = 2'-O-methyladenosine with phosphorothioate linkage
  modified_base 3: mod_base = OTHER; note = 2'-fluoroguanosine
  modified_base 4: mod_base = OTHER; note = 2'-O-methylguanosine
  modified_base 5: mod_base = OTHER; note = 2'-fluoroadenosine
  modified_base 6: mod_base = OTHER; note = 2'-O-methylcytidine
  modified_base 7: mod_base = OTHER; note = 2'-fluorouridine
  modified_base 8: mod_base = OTHER; note = 2'-O-methyladenosine
  modified_base 9: mod_base = OTHER; note = 2'-fluoroguanosine
  modified_base 10: mod_base = OTHER; note = 2'-O-methylguanosine
  modified_base 11: mod_base = OTHER; note = 2'-fluorouridine
  modified_base 12: mod_base = OTHER; note = 2'-O-methylguanosine
  modified_base 13: mod_base = OTHER; note = 2'-fluorocytidine
  modified_base 14: mod_base = OTHER; note = 2'-O-methyladenosine
  modified_base 15: mod_base = OTHER; note = 2'-fluoroguanosine
  modified_base 16: mod_base = OTHER; note = 2'-O-methyladenosine
  modified_base 17: mod_base = OTHER; note = 2'-fluoroadenosine
  modified_base 18: mod_base = OTHER; note = 2'-O-methyluridine
  modified_base 19: mod_base = OTHER; note = 2'-fluoroguanosine with phosphorothioate linkage
  modified_base 20: mod_base = OTHER; note = 2'-O-methyluridine with phosphorothioate linkage
  modified_base 21: mod_base = OTHER; note = 2'-fluorocytidine
caggactaggtgcagaatgtc

SEQ ID NO: 2747 - RNA, 21 nt, synthetic construct
  source 1..21: mol_type = other RNA
  modified_base 1: mod_base = OTHER; note = 2'-fluoroadenosine with phosphorothioate linkage
  modified_base 2: mod_base = OTHER; note = 2'-O-methylguanosine with phosphorothioate linkage
  modified_base 3: mod_base = OTHER; note = 2'-fluoroguanosine
  modified_base 4: mod_base = OTHER; note = 2'-O-methyladenosine
  modified_base 5: mod_base = OTHER; note = 2'-fluorocytidine
  modified_base 6: mod_base = OTHER; note = 2'-O-methyluridine
  modified_base 7: mod_base = OTHER; note = 2'-fluoroadenosine
  modified_base 8: mod_base = OTHER; note = 2'-O-methylguanosine
  modified_base 9: mod_base = OTHER; note = 2'-fluoroguanosine
  modified_base 10: mod_base = OTHER; note = 2'-O-methyluridine
  modified_base 11: mod_base = OTHER; note = 2'-fluoroguanosine
  modified_base 12: mod_base = OTHER; note = 2'-O-methylcytidine
  modified_base 13: mod_base = OTHER; note = 2'-fluoroadenosine
  modified_base 14: mod_base = OTHER; note = 2'-O-methylguanosine
  modified_base 15: mod_base = OTHER; note = 2'-fluoroadenosine
  modified_base 16: mod_base = OTHER; note = 2'-O-methyladenosine
  modified_base 17: mod_base = OTHER; note = 2'-fluorouridine
  modified_base 18: mod_base = OTHER; note = 2'-O-methylguanosine
  modified_base 19: mod_base = OTHER; note = 2'-fluorouridine with phosphorothioate linkage
  modified_base 20: mod_base = OTHER; note = 2'-O-methylcytidine with phosphorothioate linkage
  modified_base 21: mod_base = OTHER; note = 2'-fluorocytidine
aggactaggtgcagaatgtcc

SEQ ID NO: 2748 - RNA, 21 nt, synthetic construct
  source 1..21: mol_type = other RNA
  modified_base 1: mod_base = OTHER; note = 2'-fluoroguanosine with phosphorothioate linkage
  modified_base 2: mod_base = OTHER; note = 2'-O-methylguanosine with phosphorothioate linkage
  modified_base 3: mod_base = OTHER; note = 2'-fluoroadenosine
  modified_base 4: mod_base = OTHER; note = 2'-O-methylcytidine
  modified_base 5: mod_base = OTHER; note = 2'-fluorouridine
  modified_base 6: mod_base = OTHER; note = 2'-O-methyladenosine
  modified_base 7: mod_base = OTHER; note = 2'-fluoroguanosine
  modified_base 8: mod_base = OTHER; note = 2'-O-methylguanosine
  modified_base 9: mod_base = OTHER; note = 2'-fluorouridine
  modified_base 10: mod_base = OTHER; note = 2'-O-methylguanosine
  modified_base 11: mod_base = OTHER; note = 2'-fluorocytidine
  modified_base 12: mod_base = OTHER; note = 2'-O-methyladenosine
  modified_base 13: mod_base = OTHER; note = 2'-fluoroguanosine
  modified_base 14: mod_base = OTHER; note = 2'-O-methyladenosine
  modified_base 15: mod_base = OTHER; note = 2'-fluoroadenosine
  modified_base 16: mod_base = OTHER; note = 2'-O-methyluridine
  modified_base 17: mod_base = OTHER; note = 2'-fluoroguanosine
  modified_base 18: mod_base = OTHER; note = 2'-O-methyluridine
  modified_base 19: mod_base = OTHER; note = 2'-fluorocytidine with phosphorothioate linkage
  modified_base 20: mod_base = OTHER; note = 2'-O-methylcytidine with phosphorothioate linkage
  modified_base 21: mod_base = OTHER; note = 2'-fluorouridine
ggactaggtgcagaatgtcct

SEQ ID NO: 2749 - RNA, 21 nt, synthetic construct
  source 1..21: mol_type = other RNA
  modified_base 1: mod_base = OTHER; note = 2'-fluoroguanosine with phosphorothioate linkage
  modified_base 2: mod_base = OTHER; note = 2'-O-methyladenosine with phosphorothioate linkage
  modified_base 3: mod_base = OTHER; note = 2'-fluorocytidine
  modified_base 4: mod_base = OTHER; note = 2'-O-methyluridine
  modified_base 5: mod_base = OTHER; note = 2'-fluoroadenosine
  modified_base 6: mod_base = OTHER; note = 2'-O-methylguanosine
  modified_base 7: mod_base = OTHER; note = 2'-fluoroguanosine
  modified_base 8: mod_base = OTHER; note = 2'-O-methyluridine
  modified_base 9: mod_base = OTHER; note = 2'-fluoroguanosine
  modified_base 10: mod_base = OTHER; note = 2'-O-methylcytidine
  modified_base 11: mod_base = OTHER; note = 2'-fluoroadenosine
  modified_base 12: mod_base = OTHER; note = 2'-O-methylguanosine
  modified_base 13: mod_base = OTHER; note = 2'-fluoroadenosine
  modified_base 14: mod_base = OTHER; note = 2'-O-methyladenosine
  modified_base 15: mod_base = OTHER; note = 2'-fluorouridine
  modified_base 16: mod_base = OTHER; note = 2'-O-methylguanosine
  modified_base 17: mod_base = OTHER; note = 2'-fluorouridine
  modified_base 18: mod_base = OTHER; note = 2'-O-methylcytidine
  modified_base 19: mod_base = OTHER; note = 2'-fluorocytidine with phosphorothioate linkage
  modified_base 20: mod_base = OTHER; note = 2'-O-methyluridine with phosphorothioate linkage
  modified_base 21: mod_base = OTHER; note = 2'-fluorouridine
gactaggtgcagaatgtcctt

SEQ ID NO: 2750 - RNA, 21 nt, synthetic construct
  source 1..21: mol_type = other RNA
  modified_base 1: mod_base = OTHER; note = 2'-fluorocytidine with phosphorothioate linkage
  modified_base 2: mod_base = OTHER; note = 2'-O-methyladenosine with phosphorothioate linkage
  modified_base 3: mod_base = OTHER; note = 2'-fluorocytidine
  modified_base 4: mod_base = OTHER; note = 2'-O-methylcytidine
  modified_base 5: mod_base = OTHER; note = 2'-fluorouridine
  modified_base 6: mod_base = OTHER; note = 2'-O-methylcytidine
  modified_base 7: mod_base = OTHER; note = 2'-fluorouridine
  modified_base 8: mod_base = OTHER; note = 2'-O-methylcytidine
  modified_base 9: mod_base = OTHER; note = 2'-fluorocytidine
  modified_base 10: mod_base = OTHER; note = 2'-O-methyladenosine
  modified_base 11: mod_base = OTHER; note = 2'-fluorouridine
  modified_base 12: mod_base = OTHER; note = 2'-O-methylguanosine
  modified_base 13: mod_base = OTHER; note = 2'-fluoroguanosine
  modified_base 14: mod_base = OTHER; note = 2'-O-methylguanosine
  modified_base 15: mod_base = OTHER; note = 2'-fluoroadenosine
  modified_base 16: mod_base = OTHER; note = 2'-O-methyluridine
  modified_base 17: mod_base = OTHER; note = 2'-fluorouridine
  modified_base 18: mod_base = OTHER; note = 2'-O-methylcytidine
  modified_base 19: mod_base = OTHER; note = 2'-fluoroadenosine with phosphorothioate linkage
  modified_base 20: mod_base = OTHER; note = 2'-O-methyluridine with phosphorothioate linkage
  modified_base 21: mod_base = OTHER; note = 2'-fluoroadenosine
cacctctccatgggattcata

SEQ ID NO: 2751 - RNA, 21 nt, synthetic construct
  source 1..21: mol_type = other RNA
  modified_base 1: mod_base = OTHER; note = 2'-fluoroadenosine with phosphorothioate linkage
  modified_base 2: mod_base = OTHER; note = 2'-O-methylcytidine with phosphorothioate linkage
  modified_base 3: mod_base = OTHER; note = 2'-fluorocytidine
  modified_base 4: mod_base = OTHER; note = 2'-O-methyluridine
  modified_base 5: mod_base = OTHER; note = 2'-fluorocytidine
  modified_base 6: mod_base = OTHER; note = 2'-O-methyluridine
  modified_base 7: mod_base = OTHER; note = 2'-fluorocytidine
  modified_base 8: mod_base = OTHER; note = 2'-O-methylcytidine
  modified_base 9: mod_base = OTHER; note = 2'-fluoroadenosine
  modified_base 10: mod_base = OTHER; note = 2'-O-methyluridine
  modified_base 11: mod_base = OTHER; note = 2'-fluoroguanosine
  modified_base 12: mod_base = OTHER; note = 2'-O-methylguanosine
  modified_base 13: mod_base = OTHER; note = 2'-fluoroguanosine
  modified_base 14: mod_base = OTHER; note = 2'-O-methyladenosine
  modified_base 15: mod_base = OTHER; note = 2'-fluorouridine
  modified_base 16: mod_base = OTHER; note = 2'-O-methyluridine
  modified_base 17: mod_base = OTHER; note = 2'-fluorocytidine
  modified_base 18: mod_base = OTHER; note = 2'-O-methyladenosine
  modified_base 19: mod_base = OTHER; note = 2'-fluorouridine with phosphorothioate linkage
  modified_base 20: mod_base = OTHER; note = 2'-O-methyladenosine with phosphorothioate linkage
  modified_base 21: mod_base = OTHER; note = 2'-fluorouridine
acctctccatgggattcatat

SEQ ID NO: 2752 - RNA, 21 nt, synthetic construct
  source 1..21: mol_type = other RNA
  modified_base 1: mod_base = OTHER; note = 2'-fluorocytidine with phosphorothioate linkage
  modified_base 2: mod_base = OTHER; note = 2'-O-methylcytidine with phosphorothioate linkage
  modified_base 3: mod_base = OTHER; note = 2'-fluorouridine
  modified_base 4: mod_base = OTHER; note = 2'-O-methylcytidine
  modified_base 5: mod_base = OTHER; note = 2'-fluorouridine
  modified_base 6: mod_base = OTHER; note = 2'-O-methylcytidine
  modified_base 7: mod_base = OTHER; note = 2'-fluorocytidine
  modified_base 8: mod_base = OTHER; note = 2'-O-methyladenosine
  modified_base 9: mod_base = OTHER; note = 2'-fluorouridine
  modified_base 10: mod_base = OTHER; note = 2'-O-methylguanosine
  modified_base 11: mod_base = OTHER; note = 2'-fluoroguanosine
  modified_base 12: mod_base = OTHER; note = 2'-O-methylguanosine
  modified_base 13: mod_base = OTHER; note = 2'-fluoroadenosine
  modified_base 14: mod_base = OTHER; note = 2'-O-methyluridine
  modified_base 15: mod_base = OTHER; note = 2'-fluorouridine
  modified_base 16: mod_base = OTHER; note = 2'-O-methylcytidine
  modified_base 17: mod_base = OTHER; note = 2'-fluoroadenosine
  modified_base 18: mod_base = OTHER; note = 2'-O-methyluridine
  modified_base 19: mod_base = OTHER; note = 2'-fluoroadenosine with phosphorothioate linkage
  modified_base 20: mod_base = OTHER; note = 2'-O-methyluridine with phosphorothioate linkage
  modified_base 21: mod_base = OTHER; note = 2'-fluorouridine
cctctccatgggattcatatt

SEQ ID NO: 2753 - RNA, 21 nt, synthetic construct
  source 1..21: mol_type = other RNA
  modified_base 1: mod_base = OTHER; note = 2'-fluorocytidine with phosphorothioate linkage
  modified_base 2: mod_base = OTHER; note = 2'-O-methyluridine with phosphorothioate linkage
  modified_base 3: mod_base = OTHER; note = 2'-fluorocytidine
  modified_base 4: mod_base = OTHER; note = 2'-O-methyluridine
  modified_base 5: mod_base = OTHER; note = 2'-fluorocytidine
  modified_base 6: mod_base = OTHER; note = 2'-O-methylcytidine
  modified_base 7: mod_base = OTHER; note = 2'-fluoroadenosine
  modified_base 8: mod_base = OTHER; note = 2'-O-methyluridine
  modified_base 9: mod_base = OTHER; note = 2'-fluoroguanosine
  modified_base 10: mod_base = OTHER; note = 2'-O-methylguanosine
  modified_base 11: mod_base = OTHER; note = 2'-fluoroguanosine
  modified_base 12: mod_base = OTHER; note = 2'-O-methyladenosine
  modified_base 13: mod_base = OTHER; note = 2'-fluorouridine
  modified_base 14: mod_base = OTHER; note = 2'-O-methyluridine
  modified_base 15: mod_base = OTHER; note = 2'-fluorocytidine
  modified_base 16: mod_base = OTHER; note = 2'-O-methyladenosine
  modified_base 17: mod_base = OTHER; note = 2'-fluorouridine
  modified_base 18: mod_base = OTHER; note = 2'-O-methyladenosine
  modified_base 19: mod_base = OTHER; note = 2'-fluorouridine with phosphorothioate linkage
  modified_base 20: mod_base = OTHER; note = 2'-O-methyluridine with phosphorothioate linkage
  modified_base 21: mod_base = OTHER; note = 2'-fluorouridine
ctctccatgggattcatattt

SEQ ID NO: 2754 - RNA, 21 nt, synthetic construct
  source 1..21: mol_type = other RNA
  modified_base 1: mod_base = OTHER; note = 2'-fluorouridine with phosphorothioate linkage
  modified_base 2: mod_base = OTHER; note = 2'-O-methylcytidine with phosphorothioate linkage
  modified_base 3: mod_base = OTHER; note = 2'-fluorouridine
  modified_base 4: mod_base = OTHER; note = 2'-O-methylcytidine
  modified_base 5: mod_base = OTHER; note = 2'-fluorocytidine
  modified_base 6: mod_base = OTHER; note = 2'-O-methyladenosine
  modified_base 7: mod_base = OTHER; note = 2'-fluorouridine
  modified_base 8: mod_base = OTHER; note = 2'-O-methylguanosine
  modified_base 9: mod_base = OTHER; note = 2'-fluoroguanosine
  modified_base 10: mod_base = OTHER; note = 2'-O-methylguanosine
  modified_base 11: mod_base = OTHER; note = 2'-fluoroadenosine
  modified_base 12: mod_base = OTHER; note = 2'-O-methyluridine
  modified_base 13: mod_base = OTHER; note = 2'-fluorouridine
  modified_base 14: mod_base = OTHER; note = 2'-O-methylcytidine
  modified_base 15: mod_base = OTHER; note = 2'-fluoroadenosine
  modified_base 16: mod_base = OTHER; note = 2'-O-methyluridine
  modified_base 17: mod_base = OTHER; note = 2'-fluoroadenosine
  modified_base 18: mod_base = OTHER; note = 2'-O-methyluridine
  modified_base 19: mod_base = OTHER; note = 2'-fluorouridine with phosphorothioate linkage
  modified_base 20: mod_base = OTHER; note = 2'-O-methylguanosine with phosphorothioate linkage
  modified_base 21: mod_base = OTHER; note = 2'-fluorocytidine
tctccatgggattcatattgc

SEQ ID NO: 2755 - RNA, 21 nt, synthetic construct
  source 1..21: mol_type = other RNA
  modified_base 1: mod_base = OTHER; note = 2'-fluorocytidine with phosphorothioate linkage
  modified_base 2: mod_base = OTHER; note = 2'-O-methyluridine with phosphorothioate linkage
  modified_base 3: mod_base = OTHER; note = 2'-fluorocytidine
  modified_base 4: mod_base = OTHER; note = 2'-O-methylcytidine
  modified_base 5: mod_base = OTHER; note = 2'-fluoroadenosine
  modified_base 6: mod_base = OTHER; note = 2'-O-methyluridine
  modified_base 7: mod_base = OTHER; note = 2'-fluoroguanosine
  modified_base 8: mod_base = OTHER; note = 2'-O-methylguanosine
  modified_base 9: mod_base = OTHER; note = 2'-fluoroguanosine
  modified_base 10: mod_base = OTHER; note = 2'-O-methyladenosine
  modified_base 11: mod_base = OTHER; note = 2'-fluorouridine
  modified_base 12: mod_base = OTHER; note = 2'-O-methyluridine
  modified_base 13: mod_base = OTHER; note = 2'-fluorocytidine
  modified_base 14: mod_base = OTHER; note = 2'-O-methyladenosine
  modified_base 15: mod_base = OTHER; note = 2'-fluorouridine
  modified_base 16: mod_base = OTHER; note = 2'-O-methyladenosine
  modified_base 17: mod_base = OTHER; note = 2'-fluorouridine
  modified_base 18: mod_base = OTHER; note = 2'-O-methyluridine
  modified_base 19: mod_base = OTHER; note = 2'-fluoroguanosine with phosphorothioate linkage
  modified_base 20: mod_base = OTHER; note = 2'-O-methylcytidine with phosphorothioate linkage
  modified_base 21: mod_base = OTHER; note = 2'-fluoroadenosine
ctccatgggattcatattgca

SEQ ID NO: 2756 - RNA, 21 nt, synthetic construct
  source 1..21: mol_type = other RNA
  modified_base 1: mod_base = OTHER; note = 2'-fluorouridine with phosphorothioate linkage
  modified_base 2: mod_base = OTHER; note = 2'-O-methylcytidine with phosphorothioate linkage
  modified_base 3: mod_base = OTHER; note = 2'-fluorocytidine
  modified_base 4: mod_base = OTHER; note = 2'-O-methyladenosine
  modified_base 5: mod_base = OTHER; note = 2'-fluorouridine
  modified_base 6: mod_base = OTHER; note = 2'-O-methylguanosine
  modified_base 7: mod_base = OTHER; note = 2'-fluoroguanosine
  modified_base 8: mod_base = OTHER; note = 2'-O-methylguanosine
  modified_base 9: mod_base = OTHER; note = 2'-fluoroadenosine
  modified_base 10: mod_base = OTHER; note = 2'-O-methyluridine
  modified_base 11: mod_base = OTHER; note = 2'-fluorouridine
  modified_base 12: mod_base = OTHER; note = 2'-O-methylcytidine
  modified_base 13: mod_base = OTHER; note = 2'-fluoroadenosine
  modified_base 14: mod_base = OTHER; note = 2'-O-methyluridine
  modified_base 15: mod_base = OTHER; note = 2'-fluoroadenosine
  modified_base 16: mod_base = OTHER; note = 2'-O-methyluridine
  modified_base 17: mod_base = OTHER; note = 2'-fluorouridine
  modified_base 18: mod_base = OTHER; note = 2'-O-methylguanosine
  modified_base 19: mod_base = OTHER; note = 2'-fluorocytidine with phosphorothioate linkage
  modified_base 20: mod_base = OTHER; note = 2'-O-methyladenosine with phosphorothioate linkage
  modified_base 21: mod_base = OTHER; note = 2'-fluorouridine
tccatgggattcatattgcat

SEQ ID NO: 2757 - RNA, 21 nt, synthetic construct
  source 1..21: mol_type = other RNA
  modified_base 1: mod_base = OTHER; note = 2'-fluorocytidine with phosphorothioate linkage
  modified_base 2: mod_base = OTHER; note = 2'-O-methylcytidine with phosphorothioate linkage
  modified_base 3: mod_base = OTHER; note = 2'-fluoroadenosine
  modified_base 4: mod_base = OTHER; note = 2'-O-methyluridine
  modified_base 5: mod_base = OTHER; note = 2'-fluoroguanosine
  modified_base 6: mod_base = OTHER; note = 2'-O-methylguanosine
  modified_base 7: mod_base = OTHER; note = 2'-fluoroguanosine
  modified_base 8: mod_base = OTHER; note = 2'-O-methyladenosine
  modified_base 9: mod_base = OTHER; note = 2'-fluorouridine
  modified_base 10: mod_base = OTHER; note = 2'-O-methyluridine
  modified_base 11: mod_base = OTHER; note = 2'-fluorocytidine
  modified_base 12: mod_base = OTHER; note = 2'-O-methyladenosine
  modified_base 13: mod_base = OTHER; note = 2'-fluorouridine
  modified_base 14: mod_base = OTHER; note = 2'-O-methyladenosine
  modified_base 15: mod_base = OTHER; note = 2'-fluorouridine
  modified_base 16: mod_base = OTHER; note = 2'-O-methyluridine
  modified_base 17: mod_base = OTHER; note = 2'-fluoroguanosine
  modified_base 18: mod_base = OTHER; note = 2'-O-methylcytidine
  modified_base 19: mod_base = OTHER; note = 2'-fluoroadenosine with phosphorothioate linkage
  modified_base 20: mod_base = OTHER; note = 2'-O-methylguanosine with phosphorothioate linkage
  modified_base 21: mod_base = OTHER; note = 2'-fluoroadenosine
ccatgggattcatattgcaga

SEQ ID NO: 2758 - RNA, 21 nt, synthetic construct
  source 1..21: mol_type = other RNA
  modified_base 1: mod_base = OTHER; note = 2'-fluorocytidine with phosphorothioate linkage
  modified_base 2: mod_base = OTHER; note = 2'-O-methyladenosine with phosphorothioate linkage
  modified_base 3: mod_base = OTHER; note = 2'-fluorouridine
  modified_base 4: mod_base = OTHER; note = 2'-O-methylguanosine
  modified_base 5: mod_base = OTHER; note = 2'-fluoroguanosine
  modified_base 6: mod_base = OTHER; note = 2'-O-methylguanosine
  modified_base 7: mod_base = OTHER; note = 2'-fluoroadenosine
  modified_base 8: mod_base = OTHER; note = 2'-O-methyluridine
  modified_base 9: mod_base = OTHER; note = 2'-fluorouridine
  modified_base 10: mod_base = OTHER; note = 2'-O-methylcytidine
  modified_base 11: mod_base = OTHER; note = 2'-fluoroadenosine
  modified_base 12: mod_base = OTHER; note = 2'-O-methyluridine
  modified_base 13: mod_base = OTHER; note = 2'-fluoroadenosine
  modified_base 14: mod_base = OTHER; note = 2'-O-methyluridine
  modified_base 15: mod_base = OTHER; note = 2'-fluorouridine
  modified_base 16: mod_base = OTHER; note = 2'-O-methylguanosine
  modified_base 17: mod_base = OTHER; note = 2'-fluorocytidine
  modified_base 18: mod_base = OTHER; note = 2'-O-methyladenosine
  modified_base 19: mod_base = OTHER; note = 2'-fluoroguanosine with phosphorothioate linkage
  modified_base 20: mod_base = OTHER; note = 2'-O-methyladenosine with phosphorothioate linkage
  modified_base 21: mod_base = OTHER; note = 2'-fluorocytidine
catgggattcatattgcagac

SEQ ID NO: 2759 - RNA, 21 nt, synthetic construct
  source 1..21: mol_type = other RNA
  modified_base 1: mod_base = OTHER; note = 2'-fluoroadenosine with phosphorothioate linkage
  modified_base 2: mod_base = OTHER; note = 2'-O-methyluridine with phosphorothioate linkage
  modified_base 3: mod_base = OTHER; note = 2'-fluoroguanosine
  modified_base 4: mod_base = OTHER; note = 2'-O-methylguanosine
  modified_base 5: mod_base = OTHER; note = 2'-fluoroguanosine
  modified_base 6: mod_base = OTHER; note = 2'-O-methyladenosine
  modified_base 7: mod_base = OTHER; note = 2'-fluorouridine
  modified_base 8: mod_base = OTHER; note = 2'-O-methyluridine
  modified_base 9: mod_base = OTHER; note = 2'-fluorocytidine
  modified_base 10: mod_base = OTHER; note = 2'-O-methyladenosine
  modified_base 11: mod_base = OTHER; note = 2'-fluorouridine
  modified_base 12: mod_base = OTHER; note = 2'-O-methyladenosine
  modified_base 13: mod_base = OTHER; note = 2'-fluorouridine
  modified_base 14: mod_base = OTHER; note = 2'-O-methyluridine
  modified_base 15: mod_base = OTHER; note = 2'-fluoroguanosine
  modified_base 16: mod_base = OTHER; note = 2'-O-methylcytidine
  modified_base 17: mod_base = OTHER; note = 2'-fluoroadenosine
  modified_base 18: mod_base = OTHER; note = 2'-O-methylguanosine
  modified_base 19: mod_base = OTHER; note = 2'-fluoroadenosine with phosphorothioate linkage
  modified_base 20: mod_base = OTHER; note = 2'-O-methylcytidine with phosphorothioate linkage
  modified_base 21: mod_base = OTHER; note = 2'-fluoroadenosine
atgggattcatattgcagaca

SEQ ID NO: 2760 - RNA, 21 nt, synthetic construct
  source 1..21: mol_type = other RNA
  modified_base 1: mod_base = OTHER; note = 2'-fluorouridine with phosphorothioate linkage
  modified_base 2: mod_base = OTHER; note = 2'-O-methylguanosine with phosphorothioate linkage
  modified_base 3: mod_base = OTHER; note = 2'-fluoroguanosine
  modified_base 4: mod_base = OTHER; note = 2'-O-methylguanosine
  modified_base 5: mod_base = OTHER; note = 2'-fluoroadenosine
  modified_base 6: mod_base = OTHER; note = 2'-O-methyluridine
  modified_base 7: mod_base = OTHER; note = 2'-fluorouridine
  modified_base 8: mod_base = OTHER; note = 2'-O-methylcytidine
  modified_base 9: mod_base = OTHER; note = 2'-fluoroadenosine
  modified_base 10: mod_base = OTHER; note = 2'-O-methyluridine
  modified_base 11: mod_base = OTHER; note = 2'-fluoroadenosine
  modified_base 12: mod_base = OTHER; note = 2'-O-methyluridine
  modified_base 13: mod_base = OTHER; note = 2'-fluorouridine
  modified_base 14: mod_base = OTHER; note = 2'-O-methylguanosine
  modified_base 15: mod_base = OTHER; note = 2'-fluorocytidine
  modified_base 16: mod_base = OTHER; note = 2'-O-methyladenosine
  modified_base 17: mod_base = OTHER; note = 2'-fluoroguanosine
  modified_base 18: mod_base = OTHER; note = 2'-O-methyladenosine
  modified_base 19: mod_base = OTHER; note = 2'-fluorocytidine with phosphorothioate linkage
  modified_base 20: mod_base = OTHER; note = 2'-O-methyladenosine with phosphorothioate linkage
  modified_base 21: mod_base = OTHER; note = 2'-fluoroadenosine
tgggattcatattgcagacaa

SEQ ID NO: 2761 - RNA, 21 nt, synthetic construct
  source 1..21: mol_type = other RNA
  modified_base 1: mod_base = OTHER; note = 2'-fluoroguanosine with phosphorothioate linkage
  modified_base 2: mod_base = OTHER; note = 2'-O-methylguanosine with phosphorothioate linkage
  modified_base 3: mod_base = OTHER; note = 2'-fluoroguanosine
  modified_base 4: mod_base = OTHER; note = 2'-O-methyladenosine
  modified_base 5: mod_base = OTHER; note = 2'-fluorouridine
  modified_base 6: mod_base = OTHER; note = 2'-O-methyluridine
  modified_base 7: mod_base = OTHER; note = 2'-fluorocytidine
  modified_base 8: mod_base = OTHER; note = 2'-O-methyladenosine
  modified_base 9: mod_base = OTHER; note = 2'-fluorouridine
  modified_base 10: mod_base = OTHER; note = 2'-O-methyladenosine
  modified_base 11: mod_base = OTHER; note = 2'-fluorouridine
  modified_base 12: mod_base = OTHER; note = 2'-O-methyluridine
  modified_base 13: mod_base = OTHER; note = 2'-fluoroguanosine
  modified_base 14: mod_base = OTHER; note = 2'-O-methylcytidine
  modified_base 15: mod_base = OTHER; note = 2'-fluoroadenosine
  modified_base 16: mod_base = OTHER; note = 2'-O-methylguanosine
  modified_base 17: mod_base = OTHER; note = 2'-fluoroadenosine
  modified_base 18: mod_base = OTHER; note = 2'-O-methylcytidine
  modified_base 19: mod_base = OTHER; note = 2'-fluoroadenosine with phosphorothioate linkage
  modified_base 20: mod_base = OTHER; note = 2'-O-methyladenosine with phosphorothioate linkage
  modified_base 21: mod_base = OTHER; note = 2'-fluorouridine
gggattcatattgcagacaat

SEQ ID NO: 2762 - RNA, 21 nt, synthetic construct
  source 1..21: mol_type = other RNA
  modified_base 1: mod_base = OTHER; note = 2'-fluoroguanosine with phosphorothioate linkage
  modified_base 2: mod_base = OTHER; note = 2'-O-methylguanosine with phosphorothioate linkage
  modified_base 3: mod_base = OTHER; note = 2'-fluoroadenosine
  modified_base 4: mod_base = OTHER; note = 2'-O-methyluridine
  modified_base 5: mod_base = OTHER; note = 2'-fluorouridine
  modified_base 6: mod_base = OTHER; note = 2'-O-methylcytidine
  modified_base 7: mod_base = OTHER; note = 2'-fluoroadenosine
  modified_base 8: mod_base = OTHER; note = 2'-O-methyluridine
  modified_base 9: mod_base = OTHER; note = 2'-fluoroadenosine
  modified_base 10: mod_base = OTHER; note = 2'-O-methyluridine
  modified_base 11: mod_base = OTHER; note = 2'-fluorouridine
  modified_base 12: mod_base = OTHER; note = 2'-O-methylguanosine
  modified_base 13: mod_base = OTHER; note = 2'-fluorocytidine
  modified_base 14: mod_base = OTHER; note = 2'-O-methyladenosine
  modified_base 15: mod_base = OTHER; note = 2'-fluoroguanosine
  modified_base 16: mod_base = OTHER; note = 2'-O-methyladenosine
  modified_base 17: mod_base = OTHER; note = 2'-fluorocytidine
  modified_base 18: mod_base = OTHER; note = 2'-O-methyladenosine
  modified_base 19: mod_base = OTHER; note = 2'-fluoroadenosine with phosphorothioate linkage
  modified_base 20: mod_base = OTHER; note = 2'-O-methyluridine with phosphorothioate linkage
  modified_base 21: mod_base = OTHER; note = 2'-fluoroadenosine
ggattcatattgcagacaata

SEQ ID NO: 2763 - RNA, 21 nt, synthetic construct
  source 1..21: mol_type = other RNA
  modified_base 1: mod_base = OTHER; note = 2'-fluoroguanosine with phosphorothioate linkage
  modified_base 2: mod_base = OTHER; note = 2'-O-methyladenosine with phosphorothioate linkage
  modified_base 3: mod_base = OTHER; note = 2'-fluorouridine
  modified_base 4: mod_base = OTHER; note = 2'-O-methyluridine
  modified_base 5: mod_base = OTHER; note = 2'-fluorocytidine
  modified_base 6: mod_base = OTHER; note = 2'-O-methyladenosine
  modified_base 7: mod_base = OTHER; note = 2'-fluorouridine
  modified_base 8: mod_base = OTHER; note = 2'-O-methyladenosine
  modified_base 9: mod_base = OTHER; note = 2'-fluorouridine
  modified_base 10: mod_base = OTHER; note = 2'-O-methyluridine
  modified_base 11: mod_base = OTHER; note = 2'-fluoroguanosine
  modified_base 12: mod_base = OTHER; note = 2'-O-methylcytidine
  modified_base 13: mod_base = OTHER; note = 2'-fluoroadenosine
  modified_base 14: mod_base = OTHER; note = 2'-O-methylguanosine
  modified_base 15: mod_base = OTHER; note = 2'-fluoroadenosine
  modified_base 16: mod_base = OTHER; note = 2'-O-methylcytidine
  modified_base 17: mod_base = OTHER; note = 2'-fluoroadenosine
  modified_base 18: mod_base = OTHER; note = 2'-O-methyladenosine
  modified_base 19: mod_base = OTHER; note = 2'-fluorouridine with phosphorothioate linkage
  modified_base 20: mod_base = OTHER; note = 2'-O-methyladenosine with phosphorothioate linkage
  modified_base 21: mod_base = OTHER; note = 2'-fluoroadenosine
gattcatattgcagacaataa

SEQ ID NO: 2764 - RNA, 21 nt, synthetic construct
  source 1..21: mol_type = other RNA
  modified_base 1: mod_base = OTHER; note = 2'-fluoroadenosine with phosphorothioate linkage
  modified_base 2: mod_base = OTHER; note = 2'-O-methyluridine with phosphorothioate linkage
  modified_base 3: mod_base = OTHER; note = 2'-fluorouridine
  modified_base 4: mod_base = OTHER; note = 2'-O-methylcytidine
  modified_base 5: mod_base = OTHER; note = 2'-fluoroadenosine
  modified_base 6: mod_base = OTHER; note = 2'-O-methyluridine
  modified_base 7: mod_base = OTHER; note = 2'-fluoroadenosine
  modified_base 8: mod_base = OTHER; note = 2'-O-methyluridine
  modified_base 9: mod_base = OTHER; note = 2'-fluorouridine
  modified_base 10: mod_base = OTHER; note = 2'-O-methylguanosine
  modified_base 11: mod_base = OTHER; note = 2'-fluorocytidine
  modified_base 12: mod_base = OTHER; note = 2'-O-methyladenosine
  modified_base 13: mod_base = OTHER; note = 2'-fluoroguanosine
  modified_base 14: mod_base = OTHER; note = 2'-O-methyladenosine
  modified_base 15: mod_base = OTHER; note = 2'-fluorocytidine
  modified_base 16: mod_base = OTHER; note = 2'-O-methyladenosine
  modified_base 17: mod_base = OTHER; note = 2'-fluoroadenosine
  modified_base 18: mod_base = OTHER; note = 2'-O-methyluridine
  modified_base 19: mod_base = OTHER; note = 2'-fluoroadenosine with phosphorothioate linkage
  modified_base 20: mod_base = OTHER; note = 2'-O-methyladenosine with phosphorothioate linkage
  modified_base 21: mod_base = OTHER; note = 2'-fluorocytidine
attcatattgcagacaataac

SEQ ID NO: 2765 - RNA, 21 nt, synthetic construct
  source 1..21: mol_type = other RNA
  modified_base 1: mod_base = OTHER; note = 2'-fluorouridine with phosphorothioate linkage
  modified_base 2: mod_base = OTHER; note = 2'-O-methyluridine with phosphorothioate linkage
  modified_base 3: mod_base = OTHER; note = 2'-fluorocytidine
  modified_base 4: mod_base = OTHER; note = 2'-O-methyladenosine
  modified_base 5: mod_base = OTHER; note = 2'-fluorouridine
  modified_base 6: mod_base = OTHER; note = 2'-O-methyladenosine
  modified_base 7: mod_base = OTHER; note = 2'-fluorouridine
  modified_base 8: mod_base = OTHER; note = 2'-O-methyluridine
  modified_base 9: mod_base = OTHER; note = 2'-fluoroguanosine
  modified_base 10: mod_base = OTHER; note = 2'-O-methylcytidine
  modified_base 11: mod_base = OTHER; note = 2'-fluoroadenosine
  modified_base 12: mod_base = OTHER; note = 2'-O-methylguanosine
  modified_base 13: mod_base = OTHER; note = 2'-fluoroadenosine
  modified_base 14: mod_base = OTHER; note = 2'-O-methylcytidine
  modified_base 15: mod_base = OTHER; note = 2'-fluoroadenosine
  modified_base 16: mod_base = OTHER; note = 2'-O-methyladenosine
  modified_base 17: mod_base = OTHER; note = 2'-fluorouridine
  modified_base 18: mod_base = OTHER; note = 2'-O-methyladenosine
  modified_base 19: mod_base = OTHER; note = 2'-fluoroadenosine with phosphorothioate linkage
  modified_base 20: mod_base = OTHER; note = 2'-O-methylcytidine with phosphorothioate linkage
  modified_base 21: mod_base = OTHER; note = 2'-fluorocytidine
ttcatattgcagacaataacc

SEQ ID NO: 2766 - RNA, 21 nt, synthetic construct
  source 1..21: mol_type = other RNA
  modified_base 1: mod_base = OTHER; note = 2'-fluorouridine with phosphorothioate linkage
  modified_base 2: mod_base = OTHER; note = 2'-O-methylcytidine with phosphorothioate linkage
  modified_base 3: mod_base = OTHER; note = 2'-fluoroadenosine
  modified_base 4: mod_base = OTHER; note = 2'-O-methyluridine
  modified_base 5: mod_base = OTHER; note = 2'-fluoroadenosine
  modified_base 6: mod_base = OTHER; note = 2'-O-methyluridine
  modified_base 7: mod_base = OTHER; note = 2'-fluorouridine
  modified_base 8: mod_base = OTHER; note = 2'-O-methylguanosine
  modified_base 9: mod_base = OTHER; note = 2'-fluorocytidine
  modified_base 10: mod_base = OTHER; note = 2'-O-methyladenosine
  modified_base 11: mod_base = OTHER; note = 2'-fluoroguanosine
  modified_base 12: mod_base = OTHER; note = 2'-O-methyladenosine
  modified_base 13: mod_base = OTHER; note = 2'-fluorocytidine
  modified_base 14: mod_base = OTHER; note = 2'-O-methyladenosine
  modified_base 15: mod_base = OTHER; note = 2'-fluoroadenosine
  modified_base 16: mod_base = OTHER; note = 2'-O-methyluridine
  modified_base 17: mod_base = OTHER; note = 2'-fluoroadenosine
  modified_base 18: mod_base = OTHER; note = 2'-O-methyladenosine
  modified_base 19: mod_base = OTHER; note = 2'-fluorocytidine with phosphorothioate linkage
  modified_base 20: mod_base = OTHER; note = 2'-O-methylcytidine with phosphorothioate linkage
  modified_base 21: mod_base = OTHER; note = 2'-fluorocytidine
tcatattgcagacaataaccc

SEQ ID NO: 2767 - RNA, 21 nt, synthetic construct
  source 1..21: mol_type = other RNA
  modified_base 1: mod_base = OTHER; note = 2'-fluorocytidine with phosphorothioate linkage
  modified_base 2: mod_base = OTHER; note = 2'-O-methyluridine with phosphorothioate linkage
  modified_base 3: mod_base = OTHER; note = 2'-fluorouridine
  modified_base 4: mod_base = OTHER; note = 2'-O-methyluridine
  modified_base 5: mod_base = OTHER; note = 2'-fluoroadenosine
  modified_base 6: mod_base = OTHER; note = 2'-O-methyladenosine
  modified_base 7: mod_base = OTHER; note = 2'-fluorocytidine
  modified_base 8: mod_base = OTHER; note = 2'-O-methylcytidine
  modified_base 9: mod_base = OTHER; note = 2'-fluorouridine
  modified_base 10: mod_base = OTHER; note = 2'-O-methylguanosine
  modified_base 11: mod_base = OTHER; note = 2'-fluorocytidine
  modified_base 12: mod_base = OTHER; note = 2'-O-methyluridine
  modified_base 13: mod_base = OTHER; note = 2'-fluoroadenosine
  modified_base 14: mod_base = OTHER; note = 2'-O-methyladenosine
  modified_base 15: mod_base = OTHER; note = 2'-fluoroguanosine
  modified_base 16: mod_base = OTHER; note = 2'-O-methyladenosine
  modified_base 17: mod_base = OTHER; note = 2'-fluoroadenosine
  modified_base 18: mod_base = OTHER; note = 2'-O-methyluridine
  modified_base 19: mod_base = OTHER; note = 2'-fluoroadenosine with phosphorothioate linkage
  modified_base 20: mod_base = OTHER; note = 2'-O-methylcytidine with phosphorothioate linkage
  modified_base 21: mod_base = OTHER; note = 2'-fluorocytidine
ctttaacctgctaagaatacc

SEQ ID NO: 2768 - RNA, 21 nt, synthetic construct
  source 1..21: mol_type = other RNA
  modified_base 1: mod_base = OTHER; note = 2'-fluorouridine with phosphorothioate linkage
  modified_base 2: mod_base = OTHER; note = 2'-O-methyluridine with phosphorothioate linkage
  modified_base 3: mod_base = OTHER; note = 2'-fluorouridine
  modified_base 4: mod_base = OTHER; note = 2'-O-methyladenosine
  modified_base 5: mod_base = OTHER; note = 2'-fluoroadenosine
  modified_base 6: mod_base = OTHER; note = 2'-O-methylcytidine
  modified_base 7: mod_base = OTHER; note = 2'-fluorocytidine
  modified_base 8: mod_base = OTHER; note = 2'-O-methyluridine
  modified_base 9: mod_base = OTHER; note = 2'-fluoroguanosine
  modified_base 10: mod_base = OTHER; note = 2'-O-methylcytidine
  modified_base 11: mod_base = OTHER; note = 2'-fluorouridine
  modified_base 12: mod_base = OTHER; note = 2'-O-methyladenosine
  modified_base 13: mod_base = OTHER; note = 2'-fluoroadenosine
  modified_base 14: mod_base = OTHER; note = 2'-O-methylguanosine
  modified_base 15: mod_base = OTHER; note = 2'-fluoroadenosine
  modified_base 16: mod_base = OTHER; note = 2'-O-methyladenosine
  modified_base 17: mod_base = OTHER; note = 2'-fluorouridine
  modified_base 18: mod_base = OTHER; note = 2'-O-methyladenosine
  modified_base 19: mod_base = OTHER; note = 2'-fluorocytidine with phosphorothioate linkage
  modified_base 20: mod_base = OTHER; note = 2'-O-methylcytidine with phosphorothioate linkage
  modified_base 21: mod_base = OTHER; note = 2'-fluoroadenosine
tttaacctgctaagaatacca

SEQ ID NO: 2769 - RNA, 21 nt, synthetic construct
  source 1..21: mol_type = other RNA
  modified_base 1: mod_base = OTHER; note = 2'-fluorouridine with phosphorothioate linkage
  modified_base 2: mod_base = OTHER; note = 2'-O-methyluridine with phosphorothioate linkage
  modified_base 3: mod_base = OTHER; note = 2'-fluoroadenosine
  modified_base 4: mod_base = OTHER; note = 2'-O-methyladenosine
  modified_base 5: mod_base = OTHER; note = 2'-fluorocytidine
  modified_base 6: mod_base = OTHER; note = 2'-O-methylcytidine
  modified_base 7: mod_base = OTHER; note = 2'-fluorouridine
  modified_base 8: mod_base = OTHER; note = 2'-O-methylguanosine
  modified_base 9: mod_base = OTHER; note = 2'-fluorocytidine
  modified_base 10: mod_base = OTHER; note = 2'-O-methyluridine
  modified_base 11: mod_base = OTHER; note = 2'-fluoroadenosine
  modified_base 12: mod_base = OTHER; note = 2'-O-methyladenosine
  modified_base 13: mod_base = OTHER; note = 2'-fluoroguanosine
  modified_base 14: mod_base = OTHER; note = 2'-O-methyladenosine
  modified_base 15: mod_base = OTHER; note = 2'-fluoroadenosine
  modified_base 16: mod_base = OTHER; note = 2'-O-methyluridine
  modified_base 17: mod_base = OTHER; note = 2'-fluoroadenosine
  modified_base 18: mod_base = OTHER; note = 2'-O-methylcytidine
  modified_base 19: mod_base = OTHER; note = 2'-fluorocytidine with phosphorothioate linkage
  modified_base 20: mod_base = OTHER; note = 2'-O-methyladenosine with phosphorothioate linkage
  modified_base 21: mod_base = OTHER; note = 2'-fluorouridine
ttaacctgctaagaataccat

SEQ ID NO: 2770 - RNA, 21 nt, synthetic construct
  source 1..21: mol_type = other RNA
  modified_base 1: mod_base = OTHER; note = 2'-fluorouridine with phosphorothioate linkage
  modified_base 2: mod_base = OTHER; note = 2'-O-methyladenosine with phosphorothioate linkage
  modified_base 3: mod_base = OTHER; note = 2'-fluoroadenosine
  modified_base 4: mod_base = OTHER; note = 2'-O-methylcytidine
  modified_base 5: mod_base = OTHER; note = 2'-fluorocytidine
  modified_base 6: mod_base = OTHER; note = 2'-O-methyluridine
  modified_base 7: mod_base = OTHER; note = 2'-fluoroguanosine
  modified_base 8: mod_base = OTHER; note = 2'-O-methylcytidine
  modified_base 9: mod_base = OTHER; note = 2'-fluorouridine
  modified_base 10: mod_base = OTHER; note = 2'-O-methyladenosine
  modified_base 11: mod_base = OTHER; note = 2'-fluoroadenosine
  modified_base 12: mod_base = OTHER; note = 2'-O-methylguanosine
  modified_base 13: mod_base = OTHER; note = 2'-fluoroadenosine
  modified_base 14: mod_base = OTHER; note = 2'-O-methyladenosine
  modified_base 15: mod_base = OTHER; note = 2'-fluorouridine
  modified_base 16: mod_base = OTHER; note = 2'-O-methyladenosine
  modified_base 17: mod_base = OTHER; note = 2'-fluorocytidine
  modified_base 18: mod_base = OTHER; note = 2'-O-methylcytidine
  modified_base 19: mod_base = OTHER; note = 2'-fluoroadenosine with phosphorothioate linkage
  modified_base 20: mod_base = OTHER; note = 2'-O-methylguanosine with phosphorothioate linkage
  modified_base 21: mod_base = OTHER; note = 2'-fluorouridine
taacctgctaagaataccagt

SEQ ID NO: 2771 - RNA, 21 nt, synthetic construct
  source 1..21: mol_type = other RNA
  modified_base 1: mod_base = OTHER; note = 2'-fluoroadenosine with phosphorothioate linkage
  modified_base 2: mod_base = OTHER; note = 2'-O-methyladenosine with phosphorothioate linkage
  modified_base 3: mod_base = OTHER; note = 2'-fluorocytidine
  modified_base 4: mod_base = OTHER; note = 2'-O-methylcytidine
  modified_base 5: mod_base = OTHER; note = 2'-fluorouridine
  modified_base 6: mod_base = OTHER; note = 2'-O-methylguanosine
  modified_base 7: mod_base = OTHER; note = 2'-fluorocytidine
  modified_base 8: mod_base = OTHER; note = 2'-O-methyluridine
  modified_base 9: mod_base = OTHER; note = 2'-fluoroadenosine
  modified_base 10: mod_base = OTHER; note = 2'-O-methyladenosine
  modified_base 11: mod_base = OTHER; note = 2'-fluoroguanosine
  modified_base 12: mod_base = OTHER; note = 2'-O-methyladenosine
  modified_base 13: mod_base = OTHER; note = 2'-fluoroadenosine
  modified_base 14: mod_base = OTHER; note = 2'-O-methyluridine
  modified_base 15: mod_base = OTHER; note = 2'-fluoroadenosine
  modified_base 16: mod_base = OTHER; note = 2'-O-methylcytidine
  modified_base 17: mod_base = OTHER; note = 2'-fluorocytidine
  modified_base 18: mod_base = OTHER; note = 2'-O-methyladenosine
  modified_base 19: mod_base = OTHER; note = 2'-fluoroguanosine with phosphorothioate linkage
  modified_base 20: mod_base = OTHER; note = 2'-O-methylguanosine with phosphorothioate linkage
  modified_base 21: mod_base = OTHER; note = 2'-fluoroadenosine
aacctgctaagaataccagga

SEQ ID NO: 2772 - RNA, 21 nt, synthetic construct
  source 1..21: mol_type = other RNA
  modified_base 1: mod_base = OTHER; note = 2'-fluoroadenosine with phosphorothioate linkage
  modified_base 2: mod_base = OTHER; note = 2'-O-methylcytidine with phosphorothioate linkage
  modified_base 3: mod_base = OTHER; note = 2'-fluorocytidine
  modified_base 4: mod_base = OTHER; note = 2'-O-methyluridine
  modified_base 5: mod_base = OTHER; note = 2'-fluoroguanosine
  modified_base 6: mod_base = OTHER; note = 2'-O-methylcytidine
  modified_base 7: mod_base = OTHER; note = 2'-fluorouridine
  modified_base 8: mod_base = OTHER; note = 2'-O-methyladenosine
  modified_base 9: mod_base = OTHER; note = 2'-fluoroadenosine
  modified_base 10: mod_base = OTHER; note = 2'-O-methylguanosine
  modified_base 11: mod_base = OTHER; note = 2'-fluoroadenosine
  modified_base 12: mod_base = OTHER; note = 2'-O-methyladenosine
  modified_base 13: mod_base = OTHER; note = 2'-fluorouridine
  modified_base 14: mod_base = OTHER; note = 2'-O-methyladenosine
  modified_base 15: mod_base = OTHER; note = 2'-fluorocytidine
  modified_base 16: mod_base = OTHER; note = 2'-O-methylcytidine
  modified_base 17: mod_base = OTHER; note = 2'-fluoroadenosine
  modified_base 18: mod_base = OTHER; note = 2'-O-methylguanosine
  modified_base 19: mod_base = OTHER; note = 2'-fluoroguanosine with phosphorothioate linkage
  modified_base 20: mod_base = OTHER; note = 2'-O-methyladenosine with phosphorothioate linkage
  modified_base 21: mod_base = OTHER; note = 2'-fluorouridine
acctgctaagaataccaggat

SEQ ID NO: 2773 - RNA, 21 nt, synthetic construct
  source 1..21: mol_type = other RNA
  modified_base 1: mod_base = OTHER; note = 2'-fluorocytidine with phosphorothioate linkage
  modified_base 2: mod_base = OTHER; note = 2'-O-methylcytidine with phosphorothioate linkage
  modified_base 3: mod_base = OTHER; note = 2'-fluorouridine
  modified_base 4: mod_base = OTHER; note = 2'-O-methylguanosine
  modified_base 5: mod_base = OTHER; note = 2'-fluorocytidine
  modified_base 6: mod_base = OTHER; note = 2'-O-methyluridine
  modified_base 7: mod_base = OTHER; note = 2'-fluoroadenosine
  modified_base 8: mod_base = OTHER; note = 2'-O-methyladenosine
  modified_base 9: mod_base = OTHER; note = 2'-fluoroguanosine
  modified_base 10: mod_base = OTHER; note = 2'-O-methyladenosine
  modified_base 11: mod_base = OTHER; note = 2'-fluoroadenosine
  modified_base 12: mod_base = OTHER; note = 2'-O-methyluridine
  modified_base 13: mod_base = OTHER; note = 2'-fluoroadenosine
  modified_base 14: mod_base = OTHER; note = 2'-O-methylcytidine
  modified_base 15: mod_base = OTHER; note = 2'-fluorocytidine
  modified_base 16: mod_base = OTHER; note = 2'-O-methyladenosine
  modified_base 17: mod_base = OTHER; note = 2'-fluoroguanosine
  modified_base 18: mod_base = OTHER; note = 2'-O-methylguanosine
  modified_base 19: mod_base = OTHER; note = 2'-fluoroadenosine with phosphorothioate linkage
  modified_base 20: mod_base = OTHER; note = 2'-O-methyluridine with phosphorothioate linkage
  modified_base 21: mod_base = OTHER; note = 2'-fluorocytidine
cctgctaagaataccaggatc

SEQ ID NO: 2774 - RNA, 21 nt, synthetic construct
  source 1..21: mol_type = other RNA
  modified_base 1: mod_base = OTHER; note = 2'-fluorocytidine with phosphorothioate linkage
  modified_base 2: mod_base = OTHER; note = 2'-O-methyluridine with phosphorothioate linkage
  modified_base 3: mod_base = OTHER; note = 2'-fluoroguanosine
  modified_base 4: mod_base = OTHER; note = 2'-O-methylcytidine
  modified_base 5: mod_base = OTHER; note = 2'-fluorouridine
  modified_base 6: mod_base = OTHER; note = 2'-O-methyladenosine
  modified_base 7: mod_base = OTHER; note = 2'-fluoroadenosine
  modified_base 8: mod_base = OTHER; note = 2'-O-methylguanosine
  modified_base 9: mod_base = OTHER; note = 2'-fluoroadenosine
  modified_base 10: mod_base = OTHER; note = 2'-O-methyladenosine
  modified_base 11: mod_base = OTHER; note = 2'-fluorouridine
  modified_base 12: mod_base = OTHER; note = 2'-O-methyladenosine
  modified_base 13: mod_base = OTHER; note = 2'-fluorocytidine
  modified_base 14: mod_base = OTHER; note = 2'-O-methylcytidine
  modified_base 15: mod_base = OTHER; note = 2'-fluoroadenosine
  modified_base 16: mod_base = OTHER; note = 2'-O-methylguanosine
  modified_base 17: mod_base = OTHER; note = 2'-fluoroguanosine
  modified_base 18: mod_base = OTHER; note = 2'-O-methyladenosine
  modified_base 19: mod_base = OTHER; note = 2'-fluorouridine with phosphorothioate linkage
  modified_base 20: mod_base = OTHER; note = 2'-O-methylcytidine with phosphorothioate linkage
  modified_base 21: mod_base = OTHER; note = 2'-fluoroadenosine
ctgctaagaataccaggatca

SEQ ID NO: 2775 - RNA, 21 nt, synthetic construct
  source 1..21: mol_type = other RNA
  modified_base 1: mod_base = OTHER; note = 2'-fluorouridine with phosphorothioate linkage
  modified_base 2: mod_base = OTHER; note = 2'-O-methylguanosine with phosphorothioate linkage
  modified_base 3: mod_base = OTHER; note = 2'-fluorocytidine
  modified_base 4: mod_base = OTHER; note = 2'-O-methyluridine
  modified_base 5: mod_base = OTHER; note = 2'-fluoroadenosine
  modified_base 6: mod_base = OTHER; note = 2'-O-methyladenosine
  modified_base 7: mod_base = OTHER; note = 2'-fluoroguanosine
  modified_base 8: mod_base = OTHER; note = 2'-O-methyladenosine
  modified_base 9: mod_base = OTHER; note = 2'-fluoroadenosine
  modified_base 10: mod_base = OTHER; note = 2'-O-methyluridine
  modified_base 11: mod_base = OTHER; note = 2'-fluoroadenosine
  modified_base 12: mod_base = OTHER; note = 2'-O-methylcytidine
  modified_base 13: mod_base = OTHER; note = 2'-fluorocytidine
  modified_base 14: mod_base = OTHER; note = 2'-O-methyladenosine
  modified_base 15: mod_base = OTHER; note = 2'-fluoroguanosine
  modified_base 16: mod_base = OTHER; note = 2'-O-methylguanosine
  modified_base 17: mod_base = OTHER; note = 2'-fluoroadenosine
  modified_base 18: mod_base = OTHER; note = 2'-O-methyluridine
  modified_base 19: mod_base = OTHER; note = 2'-fluorocytidine with phosphorothioate linkage
  modified_base 20: mod_base = OTHER; note = 2'-O-methyladenosine with phosphorothioate linkage
  modified_base 21: mod_base = OTHER; note = 2'-fluorouridine
tgctaagaataccaggatcat

SEQ ID NO: 2776 - RNA, 21 nt, synthetic construct
  source 1..21: mol_type = other RNA
  modified_base 1: mod_base = OTHER; note = 2'-fluoroguanosine with phosphorothioate linkage
  modified_base 2: mod_base = OTHER; note = 2'-O-methylcytidine with phosphorothioate linkage
  modified_base 3: mod_base = OTHER; note = 2'-fluorouridine
  modified_base 4: mod_base = OTHER; note = 2'-O-methyladenosine
  modified_base 5: mod_base = OTHER; note = 2'-fluoroadenosine
  modified_base 6: mod_base = OTHER; note = 2'-O-methylguanosine
  modified_base 7: mod_base = OTHER; note = 2'-fluoroadenosine
  modified_base 8: mod_base = OTHER; note = 2'-O-methyladenosine
  modified_base 9: mod_base = OTHER; note = 2'-fluorouridine
  modified_base 10: mod_base = OTHER; note = 2'-O-methyladenosine
  modified_base 11: mod_base = OTHER; note = 2'-fluorocytidine
  modified_base 12: mod_base = OTHER; note = 2'-O-methylcytidine
  modified_base 13: mod_base = OTHER; note = 2'-fluoroadenosine
  modified_base 14: mod_base = OTHER; note = 2'-O-methylguanosine
  modified_base 15: mod_base = OTHER; note = 2'-fluoroguanosine
  modified_base 16: mod_base = OTHER; note = 2'-O-methyladenosine
  modified_base 17: mod_base = OTHER; note = 2'-fluorouridine
  modified_base 18: mod_base = OTHER; note = 2'-O-methylcytidine
  modified_base 19: mod_base = OTHER; note = 2'-fluoroadenosine with phosphorothioate linkage
  modified_base 20: mod_base = OTHER; note = 2'-O-methylguanosine with phosphorothioate linkage
  modified_base 21: mod_base = OTHER; note = 2'-fluorouridine
gctaagaataccaggatcagt

SEQ ID NO: 2777 - RNA, 21 nt, synthetic construct
  source 1..21: mol_type = other RNA
  modified_base 1: mod_base = OTHER; note = 2'-fluorocytidine with phosphorothioate linkage
  modified_base 2: mod_base = OTHER; note = 2'-O-methyluridine with phosphorothioate linkage
  modified_base 3: mod_base = OTHER; note = 2'-fluoroadenosine
  modified_base 4: mod_base = OTHER; note = 2'-O-methyladenosine
  modified_base 5: mod_base = OTHER; note = 2'-fluoroguanosine
  modified_base 6: mod_base = OTHER; note = 2'-O-methyladenosine
  modified_base 7: mod_base = OTHER; note = 2'-fluoroadenosine
  modified_base 8: mod_base = OTHER; note = 2'-O-methyluridine
  modified_base 9: mod_base = OTHER; note = 2'-fluoroadenosine
  modified_base 10: mod_base = OTHER; note = 2'-O-methylcytidine
  modified_base 11: mod_base = OTHER; note = 2'-fluorocytidine
  modified_base 12: mod_base = OTHER; note = 2'-O-methyladenosine
  modified_base 13: mod_base = OTHER; note = 2'-fluoroguanosine
  modified_base 14: mod_base = OTHER; note = 2'-O-methylguanosine
  modified_base 15: mod_base = OTHER; note = 2'-fluoroadenosine
  modified_base 16: mod_base = OTHER; note = 2'-O-methyluridine
  modified_base 17: mod_base = OTHER; note = 2'-fluorocytidine
  modified_base 18: mod_base = OTHER; note = 2'-O-methyladenosine
  modified_base 19: mod_base = OTHER; note = 2'-fluoroguanosine with phosphorothioate linkage
  modified_base 20: mod_base = OTHER; note = 2'-O-methyluridine with phosphorothioate linkage
  modified_base 21: mod_base = OTHER; note = 2'-fluoroadenosine
ctaagaataccaggatcagta

SEQ ID NO: 2778 - RNA, 21 nt, synthetic construct
  source 1..21: mol_type = other RNA
  modified_base 1: mod_base = OTHER; note = 2'-fluorouridine with phosphorothioate linkage
  modified_base 2: mod_base = OTHER; note = 2'-O-methyladenosine with phosphorothioate linkage
  modified_base 3: mod_base = OTHER; note = 2'-fluoroadenosine
  modified_base 4: mod_base = OTHER; note = 2'-O-methylguanosine
  modified_base 5: mod_base = OTHER; note = 2'-fluoroadenosine
  modified_base 6: mod_base = OTHER; note = 2'-O-methyladenosine
  modified_base 7: mod_base = OTHER; note = 2'-fluorouridine
  modified_base 8: mod_base = OTHER; note = 2'-O-methyladenosine
  modified_base 9: mod_base = OTHER; note = 2'-fluorocytidine
  modified_base 10: mod_base = OTHER; note = 2'-O-methylcytidine
  modified_base 11: mod_base = OTHER; note = 2'-fluoroadenosine
  modified_base 12: mod_base = OTHER; note = 2'-O-methylguanosine
  modified_base 13: mod_base = OTHER; note = 2'-fluoroguanosine
  modified_base 14: mod_base = OTHER; note = 2'-O-methyladenosine
  modified_base 15: mod_base = OTHER; note = 2'-fluorouridine
  modified_base 16: mod_base = OTHER; note = 2'-O-methylcytidine
  modified_base 17: mod_base = OTHER; note = 2'-fluoroadenosine
  modified_base 18: mod_base = OTHER; note = 2'-O-methylguanosine
  modified_base 19: mod_base = OTHER; note = 2'-fluorouridine with phosphorothioate linkage
  modified_base 20: mod_base = OTHER; note = 2'-O-methyladenosine with phosphorothioate linkage
  modified_base 21: mod_base = OTHER; note = 2'-fluorouridine
taagaataccaggatcagtat

SEQ ID NO: 2779 - RNA, 21 nt, synthetic construct
  source 1..21: mol_type = other RNA
  modified_base 1: mod_base = OTHER; note = 2'-fluoroadenosine with phosphorothioate linkage
  modified_base 2: mod_base = OTHER; note = 2'-O-methyladenosine with phosphorothioate linkage
  modified_base 3: mod_base = OTHER; note = 2'-fluoroguanosine
  modified_base 4: mod_base = OTHER; note = 2'-O-methyladenosine
  modified_base 5: mod_base = OTHER; note = 2'-fluoroadenosine
  modified_base 6: mod_base = OTHER; note = 2'-O-methyluridine
  modified_base 7: mod_base = OTHER; note = 2'-fluoroadenosine
  modified_base 8: mod_base = OTHER; note = 2'-O-methylcytidine
  modified_base 9: mod_base = OTHER; note = 2'-fluorocytidine
  modified_base 10: mod_base = OTHER; note = 2'-O-methyladenosine
  modified_base 11: mod_base = OTHER; note = 2'-fluoroguanosine
  modified_base 12: mod_base = OTHER; note = 2'-O-methylguanosine
  modified_base 13: mod_base = OTHER; note = 2'-fluoroadenosine
  modified_base 14: mod_base = OTHER; note = 2'-O-methyluridine
  modified_base 15: mod_base = OTHER; note = 2'-fluorocytidine
  modified_base 16: mod_base = OTHER; note = 2'-O-methyladenosine
  modified_base 17: mod_base = OTHER; note = 2'-fluoroguanosine
  modified_base 18: mod_base = OTHER; note = 2'-O-methyluridine
  modified_base 19: mod_base = OTHER; note = 2'-fluoroadenosine with phosphorothioate linkage
  modified_base 20: mod_base = OTHER; note = 2'-O-methyluridine with phosphorothioate linkage
  modified_base 21: mod_base = OTHER; note = 2'-fluorocytidine
aagaataccaggatcagtatc

SEQ ID NO: 2780 - RNA, 21 nt, synthetic construct
  source 1..21: mol_type = other RNA
  modified_base 1: mod_base = OTHER; note = 2'-fluoroadenosine with phosphorothioate linkage
  modified_base 2: mod_base = OTHER; note = 2'-O-methylguanosine with phosphorothioate linkage
  modified_base 3: mod_base = OTHER; note = 2'-fluoroadenosine
  modified_base 4: mod_base = OTHER; note = 2'-O-methyladenosine
  modified_base 5: mod_base = OTHER; note = 2'-fluorouridine
  modified_base 6: mod_base = OTHER; note = 2'-O-methyladenosine
  modified_base 7: mod_base = OTHER; note = 2'-fluorocytidine
  modified_base 8: mod_base = OTHER; note = 2'-O-methylcytidine
  modified_base 9: mod_base = OTHER; note = 2'-fluoroadenosine
  modified_base 10: mod_base = OTHER; note = 2'-O-methylguanosine
  modified_base 11: mod_base = OTHER; note = 2'-fluoroguanosine
  modified_base 12: mod_base = OTHER; note = 2'-O-methyladenosine
  modified_base 13: mod_base = OTHER; note = 2'-fluorouridine
  modified_base 14: mod_base = OTHER; note = 2'-O-methylcytidine
  modified_base 15: mod_base = OTHER; note = 2'-fluoroadenosine
  modified_base 16: mod_base = OTHER; note = 2'-O-methylguanosine
  modified_base 17: mod_base = OTHER; note = 2'-fluorouridine
  modified_base 18: mod_base = OTHER; note = 2'-O-methyladenosine
  modified_base 19: mod_base = OTHER; note = 2'-fluorouridine with phosphorothioate linkage
  modified_base 20: mod_base = OTHER; note = 2'-O-methylcytidine with phosphorothioate linkage
  modified_base 21: mod_base = OTHER; note = 2'-fluorouridine
agaataccaggatcagtatct

SEQ ID NO: 2781 - RNA, 21 nt, synthetic construct
  source 1..21: mol_type = other RNA
  modified_base 1: mod_base = OTHER; note = 2'-fluoroguanosine with phosphorothioate linkage
  modified_base 2: mod_base = OTHER; note = 2'-O-methyladenosine with phosphorothioate linkage
  modified_base 3: mod_base = OTHER; note = 2'-fluoroadenosine
  modified_base 4: mod_base = OTHER; note = 2'-O-methyluridine
  modified_base 5: mod_base = OTHER; note = 2'-fluoroadenosine
  modified_base 6: mod_base = OTHER; note = 2'-O-methylcytidine
  modified_base 7: mod_base = OTHER; note = 2'-fluorocytidine
  modified_base 8: mod_base = OTHER; note = 2'-O-methyladenosine
  modified_base 9: mod_base = OTHER; note = 2'-fluoroguanosine
  modified_base 10: mod_base = OTHER; note = 2'-O-methylguanosine
  modified_base 11: mod_base = OTHER; note = 2'-fluoroadenosine
  modified_base 12: mod_base = OTHER; note = 2'-O-methyluridine
  modified_base 13: mod_base = OTHER; note = 2'-fluorocytidine
  modified_base 14: mod_base = OTHER; note = 2'-O-methyladenosine
  modified_base 15: mod_base = OTHER; note = 2'-fluoroguanosine
  modified_base 16: mod_base = OTHER; note = 2'-O-methyluridine
  modified_base 17: mod_base = OTHER; note = 2'-fluoroadenosine
  modified_base 18: mod_base = OTHER; note = 2'-O-methyluridine
  modified_base 19: mod_base = OTHER; note = 2'-fluorocytidine with phosphorothioate linkage
  modified_base 20: mod_base = OTHER; note = 2'-O-methylguanosine with phosphorothioate linkage
  modified_base 21: mod_base = OTHER; note = 2'-fluoroadenosine
gaataccaggatcagtatcga

SEQ ID NO: 2782 - RNA, 21 nt, synthetic construct
  source 1..21: mol_type = other RNA
  modified_base 1: mod_base = OTHER; note = 2'-fluoroadenosine with phosphorothioate linkage
  modified_base 2: mod_base = OTHER; note = 2'-O-methyladenosine with phosphorothioate linkage
  modified_base 3: mod_base = OTHER; note = 2'-fluorouridine
  modified_base 4: mod_base = OTHER; note = 2'-O-methyladenosine
  modified_base 5: mod_base = OTHER; note = 2'-fluorocytidine
  modified_base 6: mod_base = OTHER; note = 2'-O-methylcytidine
  modified_base 7: mod_base = OTHER; note = 2'-fluoroadenosine
  modified_base 8: mod_base = OTHER; note = 2'-O-methylguanosine
  modified_base 9: mod_base = OTHER; note = 2'-fluoroguanosine
  modified_base 10: mod_base = OTHER; note = 2'-O-methyladenosine
  modified_base 11: mod_base = OTHER; note = 2'-fluorouridine
  modified_base 12: mod_base = OTHER; note = 2'-O-methylcytidine
  modified_base 13: mod_base = OTHER; note = 2'-fluoroadenosine
  modified_base 14: mod_base = OTHER; note = 2'-O-methylguanosine
  modified_base 15: mod_base = OTHER; note = 2'-fluorouridine
  modified_base 16: mod_base = OTHER; note = 2'-O-methyladenosine
  modified_base 17: mod_base = OTHER; note = 2'-fluorouridine
  modified_base 18: mod_base = OTHER; note = 2'-O-methylcytidine
  modified_base 19: mod_base = OTHER; note = 2'-fluoroguanosine with phosphorothioate linkage
  modified_base 20: mod_base = OTHER; note = 2'-O-methyladenosine with phosphorothioate linkage
  modified_base 21: mod_base = OTHER; note = 2'-fluorouridine
aataccaggatcagtatcgat

SEQ ID NO: 2783 - RNA, 21 nt, synthetic construct
  source 1..21: mol_type = other RNA
  modified_base 1: mod_base = OTHER; note = 2'-fluoroadenosine with phosphorothioate linkage
  modified_base 2: mod_base = OTHER; note = 2'-O-methyluridine with phosphorothioate linkage
  modified_base 3: mod_base = OTHER; note = 2'-fluoroadenosine
  modified_base 4: mod_base = OTHER; note = 2'-O-methylcytidine
  modified_base 5: mod_base = OTHER; note = 2'-fluorocytidine
  modified_base 6: mod_base = OTHER; note = 2'-O-methyladenosine
  modified_base 7: mod_base = OTHER; note = 2'-fluoroguanosine
  modified_base 8: mod_base = OTHER; note = 2'-O-methylguanosine
  modified_base 9: mod_base = OTHER; note = 2'-fluoroadenosine
  modified_base 10: mod_base = OTHER; note = 2'-O-methyluridine
  modified_base 11: mod_base = OTHER; note = 2'-fluorocytidine
  modified_base 12: mod_base = OTHER; note = 2'-O-methyladenosine
  modified_base 13: mod_base = OTHER; note = 2'-fluoroguanosine
  modified_base 14: mod_base = OTHER; note = 2'-O-methyluridine
  modified_base 15: mod_base = OTHER; note = 2'-fluoroadenosine
  modified_base 16: mod_base = OTHER; note = 2'-O-methyluridine
  modified_base 17: mod_base = OTHER; note = 2'-fluorocytidine
  modified_base 18: mod_base = OTHER; note = 2'-O-methylguanosine
  modified_base 19: mod_base = OTHER; note = 2'-fluoroadenosine with phosphorothioate linkage
  modified_base 20: mod_base = OTHER; note = 2'-O-methylguanosine with phosphorothioate linkage
  modified_base 21: mod_base = OTHER; note = 2'-fluoroadenosine
ataccaggatcagtatcgaga

SEQ ID NO: 2784 - RNA, 21 nt, synthetic construct
  source 1..21: mol_type = other RNA
  modified_base 1: mod_base = OTHER; note = 2'-fluorouridine with phosphorothioate linkage
  modified_base 2: mod_base = OTHER; note = 2'-O-methyladenosine with phosphorothioate linkage
  modified_base 3: mod_base = OTHER; note = 2'-fluorocytidine
  modified_base 4: mod_base = OTHER; note = 2'-O-methylcytidine
  modified_base 5: mod_base = OTHER; note = 2'-fluoroadenosine
  modified_base 6: mod_base = OTHER; note = 2'-O-methylguanosine
  modified_base 7: mod_base = OTHER; note = 2'-fluoroguanosine
  modified_base 8: mod_base = OTHER; note = 2'-O-methyladenosine
  modified_base 9: mod_base = OTHER; note = 2'-fluorouridine
  modified_base 10: mod_base = OTHER; note = 2'-O-methylcytidine
  modified_base 11: mod_base = OTHER; note = 2'-fluoroadenosine
  modified_base 12: mod_base = OTHER; note = 2'-O-methylguanosine
  modified_base 13: mod_base = OTHER; note = 2'-fluorouridine
  modified_base 14: mod_base = OTHER; note = 2'-O-methyladenosine
  modified_base 15: mod_base = OTHER; note = 2'-fluorouridine
  modified_base 16: mod_base = OTHER; note = 2'-O-methylcytidine
  modified_base 17: mod_base = OTHER; note = 2'-fluoroguanosine
  modified_base 18: mod_base = OTHER; note = 2'-O-methyladenosine
  modified_base 19: mod_base = OTHER; note = 2'-fluoroguanosine with phosphorothioate linkage
  modified_base 20: mod_base = OTHER; note = 2'-O-methyladenosine with phosphorothioate linkage
  modified_base 21: mod_base = OTHER; note = 2'-fluorouridine
taccaggatcagtatcgagat

SEQ ID NO: 2785 - RNA, 21 nt, synthetic construct
  source 1..21: mol_type = other RNA
  modified_base 1: mod_base = OTHER; note = 2'-fluoroadenosine with phosphorothioate linkage
  modified_base 2: mod_base = OTHER; note = 2'-O-methylcytidine with phosphorothioate linkage
  modified_base 3: mod_base = OTHER; note = 2'-fluorocytidine
  modified_base 4: mod_base = OTHER; note = 2'-O-methyladenosine
  modified_base 5: mod_base = OTHER; note = 2'-fluoroguanosine
  modified_base 6: mod_base = OTHER; note = 2'-O-methylguanosine
  modified_base 7: mod_base = OTHER; note = 2'-fluoroadenosine
  modified_base 8: mod_base = OTHER; note = 2'-O-methyluridine
  modified_base 9: mod_base = OTHER; note = 2'-fluorocytidine
  modified_base 10: mod_base = OTHER; note = 2'-O-methyladenosine
  modified_base 11: mod_base = OTHER; note = 2'-fluoroguanosine
  modified_base 12: mod_base = OTHER; note = 2'-O-methyluridine
  modified_base 13: mod_base = OTHER; note = 2'-fluoroadenosine
  modified_base 14: mod_base = OTHER; note = 2'-O-methyluridine
  modified_base 15: mod_base = OTHER; note = 2'-fluorocytidine
  modified_base 16: mod_base = OTHER; note = 2'-O-methylguanosine
  modified_base 17: mod_base = OTHER; note = 2'-fluoroadenosine
  modified_base 18: mod_base = OTHER; note = 2'-O-methylguanosine
  modified_base 19: mod_base = OTHER; note = 2'-fluoroadenosine with phosphorothioate linkage
  modified_base 20: mod_base = OTHER; note = 2'-O-methylguanosine with phosphorothioate linkage
  modified_base 21: mod_base = OTHER; note = 2'-fluoroadenosine
accaggatcagtatcgagaga

SEQ ID NO: 2786 - RNA, 21 nt, synthetic construct
  source 1..21: mol_type = other RNA
  modified_base 1: mod_base = OTHER; note = 2'-fluorocytidine with phosphorothioate linkage
  modified_base 2: mod_base = OTHER; note = 2'-O-methylcytidine with phosphorothioate linkage
  modified_base 3: mod_base = OTHER; note = 2'-fluoroadenosine
  modified_base 4: mod_base = OTHER; note = 2'-O-methylguanosine
  modified_base 5: mod_base = OTHER; note = 2'-fluoroguanosine
  modified_base 6: mod_base = OTHER; note = 2'-O-methyladenosine
  modified_base 7: mod_base = OTHER; note = 2'-fluorouridine
  modified_base 8: mod_base = OTHER; note = 2'-O-methylcytidine
  modified_base 9: mod_base = OTHER; note = 2'-fluoroadenosine
  modified_base 10: mod_base = OTHER; note = 2'-O-methylguanosine
  modified_base 11: mod_base = OTHER; note = 2'-fluorouridine
  modified_base 12: mod_base = OTHER; note = 2'-O-methyladenosine
  modified_base 13: mod_base = OTHER; note = 2'-fluorouridine
  modified_base 14: mod_base = OTHER; note = 2'-O-methylcytidine
  modified_base 15: mod_base = OTHER; note = 2'-fluoroguanosine
  modified_base 16: mod_base = OTHER; note = 2'-O-methyladenosine
  modified_base 17: mod_base = OTHER; note = 2'-fluoroguanosine
  modified_base 18: mod_base = OTHER; note = 2'-O-methyladenosine
  modified_base 19: mod_base = OTHER; note = 2'-fluoroguanosine with phosphorothioate linkage
  modified_base 20: mod_base = OTHER; note = 2'-O-methyladenosine with phosphorothioate linkage
  modified_base 21: mod_base = OTHER; note = 2'-fluorouridine
ccaggatcagtatcgagagat

SEQ ID NO: 2787 - RNA, 21 nt, synthetic construct
  source 1..21: mol_type = other RNA
  modified_base 1: mod_base = OTHER; note = 2'-fluorocytidine with phosphorothioate linkage
  modified_base 2: mod_base = OTHER; note = 2'-O-methyladenosine with phosphorothioate linkage
  modified_base 3: mod_base = OTHER; note = 2'-fluoroguanosine
  modified_base 4: mod_base = OTHER; note = 2'-O-methylguanosine
  modified_base 5: mod_base = OTHER; note = 2'-fluoroadenosine
  modified_base 6: mod_base = OTHER; note = 2'-O-methyluridine
  modified_base 7: mod_base = OTHER; note = 2'-fluorocytidine
  modified_base 8: mod_base = OTHER; note = 2'-O-methyladenosine
  modified_base 9: mod_base = OTHER; note = 2'-fluoroguanosine
  modified_base 10: mod_base = OTHER; note = 2'-O-methyluridine
  modified_base 11: mod_base = OTHER; note = 2'-fluoroadenosine
  modified_base 12: mod_base = OTHER; note = 2'-O-methyluridine
  modified_base 13: mod_base = OTHER; note = 2'-fluorocytidine
  modified_base 14: mod_base = OTHER; note = 2'-O-methylguanosine
  modified_base 15: mod_base = OTHER; note = 2'-fluoroadenosine
  modified_base 16: mod_base = OTHER; note = 2'-O-methylguanosine
  modified_base 17: mod_base = OTHER; note = 2'-fluoroadenosine
  modified_base 18: mod_base = OTHER; note = 2'-O-methylguanosine
  modified_base 19: mod_base = OTHER; note = 2'-fluoroadenosine with phosphorothioate linkage
  modified_base 20: mod_base = OTHER; note = 2'-O-methylguanosine with phosphorothioate linkage
  modified_base 21: mod_base = OTHER; note = 2'-fluorouridine
caggatcagtatcgagagagt

SEQ ID NO: 2788 - RNA, 21 nt, synthetic construct
  source 1..21: mol_type = other RNA
  modified_base 1: mod_base = OTHER; note = 2'-fluoroadenosine with phosphorothioate linkage
  modified_base 2: mod_base = OTHER; note = 2'-O-methylguanosine with phosphorothioate linkage
  modified_base 3: mod_base = OTHER; note = 2'-fluoroguanosine
  modified_base 4: mod_base = OTHER; note = 2'-O-methyladenosine
  modified_base 5: mod_base = OTHER; note = 2'-fluorouridine
  modified_base 6: mod_base = OTHER; note = 2'-O-methylcytidine
  modified_base 7: mod_base = OTHER; note = 2'-fluoroadenosine
  modified_base 8: mod_base = OTHER; note = 2'-O-methylguanosine
  modified_base 9: mod_base = OTHER; note = 2'-fluorouridine
  modified_base 10: mod_base = OTHER; note = 2'-O-methyladenosine
  modified_base 11: mod_base = OTHER; note = 2'-fluorouridine
  modified_base 12: mod_base = OTHER; note = 2'-O-methylcytidine
  modified_base 13: mod_base = OTHER; note = 2'-fluoroguanosine
  modified_base 14: mod_base = OTHER; note = 2'-O-methyladenosine
  modified_base 15: mod_base = OTHER; note = 2'-fluoroguanosine
  modified_base 16: mod_base = OTHER; note = 2'-O-methyladenosine
  modified_base 17: mod_base = OTHER; note = 2'-fluoroguanosine
  modified_base 18: mod_base = OTHER; note = 2'-O-methyladenosine
  modified_base 19: mod_base = OTHER; note = 2'-fluoroguanosine with phosphorothioate linkage
  modified_base 20: mod_base = OTHER; note = 2'-O-methylguanosine with phosphorothioate linkage
  modified_base 21: mod_base = OTHER; note = 2'-fluorocytidine
aggatcagtatcgagagaggc

SEQ ID NO: 2789 - RNA, 21 nt, synthetic construct
  source 1..21: mol_type = other RNA
  modified_base 1: mod_base = OTHER; note = 2'-fluorocytidine with phosphorothioate linkage
  modified_base 2: mod_base = OTHER; note = 2'-O-methylcytidine with phosphorothioate linkage
  modified_base 3: mod_base = OTHER; note = 2'-fluorouridine
  modified_base 4: mod_base = OTHER; note = 2'-O-methylguanosine
  modified_base 5: mod_base = OTHER; note = 2'-fluoroguanosine
  modified_base 6: mod_base = OTHER; note = 2'-O-methylcytidine
  modified_base 7: mod_base = OTHER; note = 2'-fluoroadenosine
  modified_base 8: mod_base = OTHER; note = 2'-O-methylguanosine
  modified_base 9: mod_base = OTHER; note = 2'-fluoroadenosine
  modified_base 10: mod_base = OTHER; note = 2'-O-methyladenosine
  modified_base 11: mod_base = OTHER; note = 2'-fluoroguanosine
  modified_base 12: mod_base = OTHER; note = 2'-O-methylguanosine
  modified_base 13: mod_base = OTHER; note = 2'-fluoroguanosine
  modified_base 14: mod_base = OTHER; note = 2'-O-methylcytidine
  modified_base 15: mod_base = OTHER; note = 2'-fluoroguanosine
  modified_base 16: mod_base = OTHER; note = 2'-O-methylcytidine
  modified_base 17: mod_base = OTHER; note = 2'-fluorouridine
  modified_base 18: mod_base = OTHER; note = 2'-O-methyluridine
  modified_base 19: mod_base = OTHER; note = 2'-fluorouridine with phosphorothioate linkage
  modified_base 20: mod_base = OTHER; note = 2'-O-methylcytidine with phosphorothioate linkage
  modified_base 21: mod_base = OTHER; note = 2'-fluorocytidine
cctggcagaagggcgctttcc

SEQ ID NO: 2790 - RNA, 21 nt, synthetic construct
  source 1..21: mol_type = other RNA
  modified_base 1: mod_base = OTHER; note = 2'-fluoroadenosine with phosphorothioate linkage
  modified_base 2: mod_base = OTHER; note = 2'-O-methylguanosine with phosphorothioate linkage
  modified_base 3: mod_base = OTHER; note = 2'-fluoroadenosine
  modified_base 4: mod_base = OTHER; note = 2'-O-methyladenosine
  modified_base 5: mod_base = OTHER; note = 2'-fluoroguanosine
  modified_base 6: mod_base = OTHER; note = 2'-O-methylguanosine
  modified_base 7: mod_base = OTHER; note = 2'-fluoroguanosine
  modified_base 8: mod_base = OTHER; note = 2'-O-methylcytidine
  modified_base 9: mod_base = OTHER; note = 2'-fluoroguanosine
  modified_base 10: mod_base = OTHER; note = 2'-O-methylcytidine
  modified_base 11: mod_base = OTHER; note = 2'-fluorouridine
  modified_base 12: mod_base = OTHER; note = 2'-O-methyluridine
  modified_base 13: mod_base = OTHER; note = 2'-fluorouridine
  modified_base 14: mod_base = OTHER; note = 2'-O-methylcytidine
  modified_base 15: mod_base = OTHER; note = 2'-fluorocytidine
  modified_base 16: mod_base = OTHER; note = 2'-O-methyladenosine
  modified_base 17: mod_base = OTHER; note = 2'-fluorocytidine
  modified_base 18: mod_base = OTHER; note = 2'-O-methylcytidine
  modified_base 19: mod_base = OTHER; note = 2'-fluorocytidine with phosphorothioate linkage
  modified_base 20: mod_base = OTHER; note = 2'-O-methyladenosine with phosphorothioate linkage
  modified_base 21: mod_base = OTHER; note = 2'-fluorocytidine
agaagggcgctttccacccac

SEQ ID NO: 2791 - RNA, 21 nt, synthetic construct
  source 1..21: mol_type = other RNA
  modified_base 1: mod_base = OTHER; note = 2'-fluoroguanosine with phosphorothioate linkage
  modified_base 2: mod_base = OTHER; note = 2'-O-methyladenosine with phosphorothioate linkage
  modified_base 3: mod_base = OTHER; note = 2'-fluoroadenosine
  modified_base 4: mod_base = OTHER; note = 2'-O-methylguanosine
  modified_base 5: mod_base = OTHER; note = 2'-fluoroguanosine
  modified_base 6: mod_base = OTHER; note = 2'-O-methylguanosine
  modified_base 7: mod_base = OTHER; note = 2'-fluorocytidine
  modified_base 8: mod_base = OTHER; note = 2'-O-methylguanosine
  modified_base 9: mod_base = OTHER; note = 2'-fluorocytidine
  modified_base 10: mod_base = OTHER; note = 2'-O-methyluridine
  modified_base 11: mod_base = OTHER; note = 2'-fluorouridine
  modified_base 12: mod_base = OTHER; note = 2'-O-methyluridine
  modified_base 13: mod_base = OTHER; note = 2'-fluorocytidine
  modified_base 14: mod_base = OTHER; note = 2'-O-methylcytidine
  modified_base 15: mod_base = OTHER; note = 2'-fluoroadenosine
  modified_base 16: mod_base = OTHER; note = 2'-O-methylcytidine
  modified_base 17: mod_base = OTHER; note = 2'-fluorocytidine
  modified_base 18: mod_base = OTHER; note = 2'-O-methylcytidine
  modified_base 19: mod_base = OTHER; note = 2'-fluoroadenosine with phosphorothioate linkage
  modified_base 20: mod_base = OTHER; note = 2'-O-methylcytidine with phosphorothioate linkage
  modified_base 21: mod_base = OTHER; note = 2'-fluorouridine
gaagggcgctttccacccact

SEQ ID NO: 2792 - RNA, 21 nt, synthetic construct
  source 1..21: mol_type = other RNA
  modified_base 1: mod_base = OTHER; note = 2'-fluorocytidine with phosphorothioate linkage
  modified_base 2: mod_base = OTHER; note = 2'-O-methyluridine with phosphorothioate linkage
  modified_base 3: mod_base = OTHER; note = 2'-fluoroguanosine
  modified_base 4: mod_base = OTHER; note = 2'-O-methyluridine
  modified_base 5: mod_base = OTHER; note = 2'-fluorouridine
  modified_base 6: mod_base = OTHER; note = 2'-O-methyluridine
  modified_base 7: mod_base = OTHER; note = 2'-fluoroadenosine
  modified_base 8: mod_base = OTHER; note = 2'-O-methylguanosine
  modified_base 9: mod_base = OTHER; note = 2'-fluorouridine
  modified_base 10: mod_base = OTHER; note = 2'-O-methylcytidine
  modified_base 11: mod_base = OTHER; note = 2'-fluorocytidine
  modified_base 12: mod_base = OTHER; note = 2'-O-methyladenosine
  modified_base 13: mod_base = OTHER; note = 2'-fluorocytidine
  modified_base 14: mod_base = OTHER; note = 2'-O-methylcytidine
  modified_base 15: mod_base = OTHER; note = 2'-fluoroadenosine
  modified_base 16: mod_base = OTHER; note = 2'-O-methylcytidine
  modified_base 17: mod_base = OTHER; note = 2'-fluorocytidine
  modified_base 18: mod_base = OTHER; note = 2'-O-methylguanosine
  modified_base 19: mod_base = OTHER; note = 2'-fluoroadenosine with phosphorothioate linkage
  modified_base 20: mod_base = OTHER; note = 2'-O-methylguanosine with phosphorothioate linkage
  modified_base 21: mod_base = OTHER; note = 2'-fluoroadenosine
ctgtttagtccaccaccgaga

SEQ ID NO: 2793 - RNA, 21 nt, synthetic construct
  source 1..21: mol_type = other RNA
  modified_base 1: mod_base = OTHER; note = 2'-fluorouridine with phosphorothioate linkage
  modified_base 2: mod_base = OTHER; note = 2'-O-methylguanosine with phosphorothioate linkage
  modified_base 3: mod_base = OTHER; note = 2'-fluorouridine
  modified_base 4: mod_base = OTHER; note = 2'-O-methyluridine
  modified_base 5: mod_base = OTHER; note = 2'-fluorouridine
  modified_base 6: mod_base = OTHER; note = 2'-O-methyladenosine
  modified_base 7: mod_base = OTHER; note = 2'-fluoroguanosine
  modified_base 8: mod_base = OTHER; note = 2'-O-methyluridine
  modified_base 9: mod_base = OTHER; note = 2'-fluorocytidine
  modified_base 10: mod_base = OTHER; note = 2'-O-methylcytidine
  modified_base 11: mod_base = OTHER; note = 2'-fluoroadenosine
  modified_base 12: mod_base = OTHER; note = 2'-O-methylcytidine
  modified_base 13: mod_base = OTHER; note = 2'-fluorocytidine
  modified_base 14: mod_base = OTHER; note = 2'-O-methyladenosine
  modified_base 15: mod_base = OTHER; note = 2'-fluorocytidine
  modified_base 16: mod_base = OTHER; note = 2'-O-methylcytidine
  modified_base 17: mod_base = OTHER; note = 2'-fluoroguanosine
  modified_base 18: mod_base = OTHER; note = 2'-O-methyladenosine
  modified_base 19: mod_base = OTHER; note = 2'-fluoroguanosine with phosphorothioate linkage
  modified_base 20: mod_base = OTHER; note = 2'-O-methyladenosine with phosphorothioate linkage
  modified_base 21: mod_base = OTHER; note = 2'-fluorocytidine
tgtttagtccaccaccgagac

SEQ ID NO: 2794 - RNA, 21 nt, synthetic construct
  source 1..21: mol_type = other RNA
  modified_base 1: mod_base = OTHER; note = 2'-fluoroguanosine with phosphorothioate linkage
  modified_base 2: mod_base = OTHER; note = 2'-O-methyluridine with phosphorothioate linkage
  modified_base 3: mod_base = OTHER; note = 2'-fluorouridine
  modified_base 4: mod_base = OTHER; note = 2'-O-methyluridine
  modified_base 5: mod_base = OTHER; note = 2'-fluoroadenosine
  modified_base 6: mod_base = OTHER; note = 2'-O-methylguanosine
  modified_base 7: mod_base = OTHER; note = 2'-fluorouridine
  modified_base 8: mod_base = OTHER; note = 2'-O-methylcytidine
  modified_base 9: mod_base = OTHER; note = 2'-fluorocytidine
  modified_base 10: mod_base = OTHER; note = 2'-O-methyladenosine
  modified_base 11: mod_base = OTHER; note = 2'-fluorocytidine
  modified_base 12: mod_base = OTHER; note = 2'-O-methylcytidine
  modified_base 13: mod_base = OTHER; note = 2'-fluoroadenosine
  modified_base 14: mod_base = OTHER; note = 2'-O-methylcytidine
  modified_base 15: mod_base = OTHER; note = 2'-fluorocytidine
  modified_base 16: mod_base = OTHER; note = 2'-O-methylguanosine
  modified_base 17: mod_base = OTHER; note = 2'-fluoroadenosine
  modified_base 18: mod_base = OTHER; note = 2'-O-methylguanosine
  modified_base 19: mod_base = OTHER; note = 2'-fluoroadenosine with phosphorothioate linkage
  modified_base 20: mod_base = OTHER; note = 2'-O-methylcytidine with phosphorothioate linkage
  modified_base 21: mod_base = OTHER; note = 2'-fluoroadenosine
gtttagtccaccaccgagaca

SEQ ID NO: 2795 - RNA, 21 nt, synthetic construct
  source 1..21: mol_type = other RNA
  modified_base 1: mod_base = OTHER; note = 2'-fluorouridine with phosphorothioate linkage
  modified_base 2: mod_base = OTHER; note = 2'-O-methyluridine with phosphorothioate linkage
  modified_base 3: mod_base = OTHER; note = 2'-fluorouridine
  modified_base 4: mod_base = OTHER; note = 2'-O-methyladenosine
  modified_base 5: mod_base = OTHER; note = 2'-fluoroguanosine
  modified_base 6: mod_base = OTHER; note = 2'-O-methyluridine
  modified_base 7: mod_base = OTHER; note = 2'-fluorocytidine
  modified_base 8: mod_base = OTHER; note = 2'-O-methylcytidine
  modified_base 9: mod_base = OTHER; note = 2'-fluoroadenosine
  modified_base 10: mod_base = OTHER; note = 2'-O-methylcytidine
  modified_base 11: mod_base = OTHER; note = 2'-fluorocytidine
  modified_base 12: mod_base = OTHER; note = 2'-O-methyladenosine
  modified_base 13: mod_base = OTHER; note = 2'-fluorocytidine
  modified_base 14: mod_base = OTHER; note = 2'-O-methylcytidine
  modified_base 15: mod_base = OTHER; note = 2'-fluoroguanosine
  modified_base 16: mod_base = OTHER; note = 2'-O-methyladenosine
  modified_base 17: mod_base = OTHER; note = 2'-fluoroguanosine
  modified_base 18: mod_base = OTHER; note = 2'-O-methyladenosine
  modified_base 19: mod_base = OTHER; note = 2'-fluorocytidine with phosphorothioate linkage
  modified_base 20: mod_base = OTHER; note = 2'-O-methyladenosine with phosphorothioate linkage
  modified_base 21: mod_base = OTHER; note = 2'-fluorouridine
tttagtccaccaccgagacat

SEQ ID NO: 2796 - RNA, 21 nt, synthetic construct
  source 1..21: mol_type = other RNA
  modified_base 1: mod_base = OTHER; note = 2'-fluorouridine with phosphorothioate linkage
  modified_base 2: mod_base = OTHER; note = 2'-O-methyluridine with phosphorothioate linkage
  modified_base 3: mod_base = OTHER; note = 2'-fluoroadenosine
  modified_base 4: mod_base = OTHER; note = 2'-O-methylguanosine
  modified_base 5: mod_base = OTHER; note = 2'-fluorouridine
  modified_base 6: mod_base = OTHER; note = 2'-O-methylcytidine
  modified_base 7: mod_base = OTHER; note = 2'-fluorocytidine
  modified_base 8: mod_base = OTHER; note = 2'-O-methyladenosine
  modified_base 9: mod_base = OTHER; note = 2'-fluorocytidine
  modified_base 10: mod_base = OTHER; note = 2'-O-methylcytidine
  modified_base 11: mod_base = OTHER; note = 2'-fluoroadenosine
  modified_base 12: mod_base = OTHER; note = 2'-O-methylcytidine
  modified_base 13: mod_base = OTHER; note = 2'-fluorocytidine
  modified_base 14: mod_base = OTHER; note = 2'-O-methylguanosine
  modified_base 15: mod_base = OTHER; note = 2'-fluoroadenosine
  modified_base 16: mod_base = OTHER; note = 2'-O-methylguanosine
  modified_base 17: mod_base = OTHER; note = 2'-fluoroadenosine
  modified_base 18: mod_base = OTHER; note = 2'-O-methylcytidine
  modified_base 19: mod_base = OTHER; note = 2'-fluoroadenosine with phosphorothioate linkage
  modified_base 20: mod_base = OTHER; note = 2'-O-methyluridine with phosphorothioate linkage
  modified_base 21: mod_base = OTHER; note = 2'-fluorocytidine
ttagtccaccaccgagacatc

SEQ ID NO: 2797 - RNA, 21 nt, synthetic construct
  source 1..21: mol_type = other RNA
  modified_base 1: mod_base = OTHER; note = 2'-fluorouridine with phosphorothioate linkage
  modified_base 2: mod_base = OTHER; note = 2'-O-methyladenosine with phosphorothioate linkage
  modified_base 3: mod_base = OTHER; note = 2'-fluoroguanosine
  modified_base 4: mod_base = OTHER; note = 2'-O-methyluridine
  modified_base 5: mod_base = OTHER; note = 2'-fluorocytidine
  modified_base 6: mod_base = OTHER; note = 2'-O-methylcytidine
  modified_base 7: mod_base = OTHER; note = 2'-fluoroadenosine
  modified_base 8: mod_base = OTHER; note = 2'-O-methylcytidine
  modified_base 9: mod_base = OTHER; note = 2'-fluorocytidine
  modified_base 10: mod_base = OTHER; note = 2'-O-methyladenosine
  modified_base 11: mod_base = OTHER; note = 2'-fluorocytidine
  modified_base 12: mod_base = OTHER; note = 2'-O-methylcytidine
  modified_base 13: mod_base = OTHER; note = 2'-fluoroguanosine
  modified_base 14: mod_base = OTHER; note = 2'-O-methyladenosine
  modified_base 15: mod_base = OTHER; note = 2'-fluoroguanosine
  modified_base 16: mod_base = OTHER; note = 2'-O-methyladenosine
  modified_base 17: mod_base = OTHER; note = 2'-fluorocytidine
  modified_base 18: mod_base = OTHER; note = 2'-O-methyladenosine
  modified_base 19: mod_base = OTHER; note = 2'-fluorouridine with phosphorothioate linkage
  modified_base 20: mod_base = OTHER; note = 2'-O-methylcytidine with phosphorothioate linkage
  modified_base 21: mod_base = OTHER; note = 2'-fluoroadenosine
tagtccaccaccgagacatca

SEQ ID NO: 2798 - RNA, 21 nt, synthetic construct
  source 1..21: mol_type = other RNA
  modified_base 1: mod_base = OTHER; note = 2'-fluoroadenosine with phosphorothioate linkage
  modified_base 2: mod_base = OTHER; note = 2'-O-methylguanosine with phosphorothioate linkage
  modified_base 3: mod_base = OTHER; note = 2'-fluorouridine
  modified_base 4: mod_base = OTHER; note = 2'-O-methylcytidine
  modified_base 5: mod_base = OTHER; note = 2'-fluorocytidine
  modified_base 6: mod_base = OTHER; note = 2'-O-methyladenosine
  modified_base 7: mod_base = OTHER; note = 2'-fluorocytidine
  modified_base 8: mod_base = OTHER; note = 2'-O-methylcytidine
  modified_base 9: mod_base = OTHER; note = 2'-fluoroadenosine
  modified_base 10: mod_base = OTHER; note = 2'-O-methylcytidine
  modified_base 11: mod_base = OTHER; note = 2'-fluorocytidine
  modified_base 12: mod_base = OTHER; note = 2'-O-methylguanosine
  modified_base 13: mod_base = OTHER; note = 2'-fluoroadenosine
  modified_base 14: mod_base = OTHER; note = 2'-O-methylguanosine
  modified_base 15: mod_base = OTHER; note = 2'-fluoroadenosine
  modified_base 16: mod_base = OTHER; note = 2'-O-methylcytidine
  modified_base 17: mod_base = OTHER; note = 2'-fluoroadenosine
  modified_base 18: mod_base = OTHER; note = 2'-O-methyluridine
  modified_base 19: mod_base = OTHER; note = 2'-fluorocytidine with phosphorothioate linkage
  modified_base 20: mod_base = OTHER; note = 2'-O-methyladenosine with phosphorothioate linkage
  modified_base 21: mod_base = OTHER; note = 2'-fluorocytidine
agtccaccaccgagacatcac

SEQ ID NO: 2799 - RNA, 21 nt, synthetic construct
  source 1..21: mol_type = other RNA
  modified_base 1: mod_base = OTHER; note = 2'-fluoroguanosine with phosphorothioate linkage
  modified_base 2: mod_base = OTHER; note = 2'-O-methyluridine with phosphorothioate linkage
  modified_base 3: mod_base = OTHER; note = 2'-fluorocytidine
  modified_base 4: mod_base = OTHER; note = 2'-O-methylcytidine
  modified_base 5: mod_base = OTHER; note = 2'-fluoroadenosine
  modified_base 6: mod_base = OTHER; note = 2'-O-methylcytidine
  modified_base 7: mod_base = OTHER; note = 2'-fluorocytidine
  modified_base 8: mod_base = OTHER; note = 2'-O-methyladenosine
  modified_base 9: mod_base = OTHER; note = 2'-fluorocytidine
  modified_base 10: mod_base = OTHER; note = 2'-O-methylcytidine
  modified_base 11: mod_base = OTHER; note = 2'-fluoroguanosine
  modified_base 12: mod_base = OTHER; note = 2'-O-methyladenosine
  modified_base 13: mod_base = OTHER; note = 2'-fluoroguanosine
  modified_base 14: mod_base = OTHER; note = 2'-O-methyladenosine
  modified_base 15: mod_base = OTHER; note = 2'-fluorocytidine
  modified_base 16: mod_base = OTHER; note = 2'-O-methyladenosine
  modified_base 17: mod_base = OTHER; note = 2'-fluorouridine
  modified_base 18: mod_base = OTHER; note = 2'-O-methylcytidine
  modified_base 19: mod_base = OTHER; note = 2'-fluoroadenosine with phosphorothioate linkage
  modified_base 20: mod_base = OTHER; note = 2'-O-methylcytidine with phosphorothioate linkage
  modified_base 21: mod_base = OTHER; note = 2'-fluorouridine
gtccaccaccgagacatcact

SEQ ID NO: 2800 - RNA, 21 nt, synthetic construct
  source 1..21: mol_type = other RNA
  modified_base 1: mod_base = OTHER; note = 2'-fluorocytidine with phosphorothioate linkage
  modified_base 2: mod_base = OTHER; note = 2'-O-methylcytidine with phosphorothioate linkage
  modified_base 3: mod_base = OTHER; note = 2'-fluoroadenosine
  modified_base 4: mod_base = OTHER; note = 2'-O-methylcytidine
  modified_base 5: mod_base = OTHER; note = 2'-fluorocytidine
  modified_base 6: mod_base = OTHER; note = 2'-O-methyladenosine
  modified_base 7: mod_base = OTHER; note = 2'-fluorocytidine
  modified_base 8: mod_base = OTHER; note = 2'-O-methylcytidine
  modified_base 9: mod_base = OTHER; note = 2'-fluoroguanosine
  modified_base 10: mod_base = OTHER; note = 2'-O-methyladenosine
  modified_base 11: mod_base = OTHER; note = 2'-fluoroguanosine
  modified_base 12: mod_base = OTHER; note = 2'-O-methyladenosine
  modified_base 13: mod_base = OTHER; note = 2'-fluorocytidine
  modified_base 14: mod_base = OTHER; note = 2'-O-methyladenosine
  modified_base 15: mod_base = OTHER; note = 2'-fluorouridine
  modified_base 16: mod_base = OTHER; note = 2'-O-methylcytidine
  modified_base 17: mod_base = OTHER; note = 2'-fluoroadenosine
  modified_base 18: mod_base = OTHER; note = 2'-O-methylcytidine
  modified_base 19: mod_base = OTHER; note = 2'-fluorouridine with phosphorothioate linkage
  modified_base 20: mod_base = OTHER; note = 2'-O-methyluridine with phosphorothioate linkage
  modified_base 21: mod_base = OTHER; note = 2'-fluorouridine
ccaccaccgagacatcacttt

SEQ ID NO: 2801 - RNA, 21 nt, synthetic construct
  source 1..21: mol_type = other RNA
  modified_base 1: mod_base = OTHER; note = 2'-fluorocytidine with phosphorothioate linkage
  modified_base 2: mod_base = OTHER; note = 2'-O-methyladenosine with phosphorothioate linkage
  modified_base 3: mod_base = OTHER; note = 2'-fluorocytidine
  modified_base 4: mod_base = OTHER; note = 2'-O-methylcytidine
  modified_base 5: mod_base = OTHER; note = 2'-fluoroadenosine
  modified_base 6: mod_base = OTHER; note = 2'-O-methylcytidine
  modified_base 7: mod_base = OTHER; note = 2'-fluorocytidine
  modified_base 8: mod_base = OTHER; note = 2'-O-methylguanosine
  modified_base 9: mod_base = OTHER; note = 2'-fluoroadenosine
  modified_base 10: mod_base = OTHER; note = 2'-O-methylguanosine
  modified_base 11: mod_base = OTHER; note = 2'-fluoroadenosine
  modified_base 12: mod_base = OTHER; note = 2'-O-methylcytidine
  modified_base 13: mod_base = OTHER; note = 2'-fluoroadenosine
  modified_base 14: mod_base = OTHER; note = 2'-O-methyluridine
  modified_base 15: mod_base = OTHER; note = 2'-fluorocytidine
  modified_base 16: mod_base = OTHER; note = 2'-O-methyladenosine
  modified_base 17: mod_base = OTHER; note = 2'-fluorocytidine
  modified_base 18: mod_base = OTHER; note = 2'-O-methyluridine
  modified_base 19: mod_base = OTHER; note = 2'-fluorouridine with phosphorothioate linkage
  modified_base 20: mod_base = OTHER; note = 2'-O-methylguanosine with phosphorothioate linkage
  modified_base 21: mod_base = OTHER; note = 2'-fluorouridine
caccaccgagacatcacttgt

SEQ ID NO: 2802 - RNA, 21 nt, synthetic construct
  source 1..21: mol_type = other RNA
  modified_base 1: mod_base = OTHER; note = 2'-fluoroadenosine with phosphorothioate linkage
  modified_base 2: mod_base = OTHER; note = 2'-O-methylcytidine with phosphorothioate linkage
  modified_base 3: mod_base = OTHER; note = 2'-fluorocytidine
  modified_base 4: mod_base = OTHER; note = 2'-O-methyladenosine
  modified_base 5: mod_base = OTHER; note = 2'-fluorocytidine
  modified_base 6: mod_base = OTHER; note = 2'-O-methylcytidine
  modified_base 7: mod_base = OTHER; note = 2'-fluoroguanosine
  modified_base 8: mod_base = OTHER; note = 2'-O-methyladenosine
  modified_base 9: mod_base = OTHER; note = 2'-fluoroguanosine
  modified_base 10: mod_base = OTHER; note = 2'-O-methyladenosine
  modified_base 11: mod_base = OTHER; note = 2'-fluorocytidine
  modified_base 12: mod_base = OTHER; note = 2'-O-methyladenosine
  modified_base 13: mod_base = OTHER; note = 2'-fluorouridine
  modified_base 14: mod_base = OTHER; note = 2'-O-methylcytidine
  modified_base 15: mod_base = OTHER; note = 2'-fluoroadenosine
  modified_base 16: mod_base = OTHER; note = 2'-O-methylcytidine
  modified_base 17: mod_base = OTHER; note = 2'-fluorouridine
  modified_base 18: mod_base = OTHER; note = 2'-O-methyluridine
  modified_base 19: mod_base = OTHER; note = 2'-fluoroguanosine with phosphorothioate linkage
  modified_base 20: mod_base = OTHER; note = 2'-O-methylguanosine with phosphorothioate linkage
  modified_base 21: mod_base = OTHER; note = 2'-fluoroadenosine
accaccgagacatcacttgga

SEQ ID NO: 2803 - RNA, 21 nt, synthetic construct
  source 1..21: mol_type = other RNA
  modified_base 1: mod_base = OTHER; note = 2'-fluorocytidine with phosphorothioate linkage
  modified_base 2: mod_base = OTHER; note = 2'-O-methylcytidine with phosphorothioate linkage
  modified_base 3: mod_base = OTHER; note = 2'-fluoroadenosine
  modified_base 4: mod_base = OTHER; note = 2'-O-methylcytidine
  modified_base 5: mod_base = OTHER; note = 2'-fluorocytidine
  modified_base 6: mod_base = OTHER; note = 2'-O-methylguanosine
  modified_base 7: mod_base = OTHER; note = 2'-fluoroadenosine
  modified_base 8: mod_base = OTHER; note = 2'-O-methylguanosine
  modified_base 9: mod_base = OTHER; note = 2'-fluoroadenosine
  modified_base 10: mod_base = OTHER; note = 2'-O-methylcytidine
  modified_base 11: mod_base = OTHER; note = 2'-fluoroadenosine
  modified_base 12: mod_base = OTHER; note = 2'-O-methyluridine
  modified_base 13: mod_base = OTHER; note = 2'-fluorocytidine
  modified_base 14: mod_base = OTHER; note = 2'-O-methyladenosine
  modified_base 15: mod_base = OTHER; note = 2'-fluorocytidine
  modified_base 16: mod_base = OTHER; note = 2'-O-methyluridine
  modified_base 17: mod_base = OTHER; note = 2'-fluorouridine
  modified_base 18: mod_base = OTHER; note = 2'-O-methylguanosine
  modified_base 19: mod_base = OTHER; note = 2'-fluoroguanosine with phosphorothioate linkage
  modified_base 20: mod_base = OTHER; note = 2'-O-methyladenosine with phosphorothioate linkage
  modified_base 21: mod_base = OTHER; note = 2'-fluorocytidine
ccaccgagacatcacttggac

SEQ ID NO: 2804 - RNA, 21 nt, synthetic construct
  source 1..21: mol_type = other RNA
  modified_base 1: mod_base = OTHER; note = 2'-fluorouridine with phosphorothioate linkage
  modified_base 2: mod_base = OTHER; note = 2'-O-methylguanosine with phosphorothioate linkage
  modified_base 3: mod_base = OTHER; note = 2'-fluorocytidine
  modified_base 4: mod_base = OTHER; note = 2'-O-methyluridine
  modified_base 5: mod_base = OTHER; note = 2'-fluoroguanosine
  modified_base 6: mod_base = OTHER; note = 2'-O-methylcytidine
  modified_base 7: mod_base = OTHER; note = 2'-fluoroguanosine
  modified_base 8: mod_base = OTHER; note = 2'-O-methylguanosine
  modified_base 9: mod_base = OTHER; note = 2'-fluorouridine
  modified_base 10: mod_base = OTHER; note = 2'-O-methyluridine
  modified_base 11: mod_base = OTHER; note = 2'-fluoroguanosine
  modified_base 12: mod_base = OTHER; note = 2'-O-methyladenosine
  modified_base 13: mod_base = OTHER; note = 2'-fluoroadenosine
  modified_base 14: mod_base = OTHER; note = 2'-O-methyluridine
  modified_base 15: mod_base = OTHER; note = 2'-fluorocytidine
  modified_base 16: mod_base = OTHER; note = 2'-O-methylcytidine
  modified_base 17: mod_base = OTHER; note = 2'-fluoroadenosine
  modified_base 18: mod_base = OTHER; note = 2'-O-methyladenosine
  modified_base 19: mod_base = OTHER; note = 2'-fluorouridine with phosphorothioate linkage
  modified_base 20: mod_base = OTHER; note = 2'-O-methylguanosine with phosphorothioate linkage
  modified_base 21: mod_base = OTHER; note = 2'-fluorouridine
tgctgcggttgaatccaatgt

SEQ ID NO: 2805 - RNA, 21 nt, synthetic construct
  source 1..21: mol_type = other RNA
  modified_base 1: mod_base = OTHER; note = 2'-fluoroadenosine with phosphorothioate linkage
  modified_base 2: mod_base = OTHER; note = 2'-O-methylguanosine with phosphorothioate linkage
  modified_base 3: mod_base = OTHER; note = 2'-fluorocytidine
  modified_base 4: mod_base = OTHER; note = 2'-O-methylcytidine
  modified_base 5: mod_base = OTHER; note = 2'-fluorouridine
  modified_base 6: mod_base = OTHER; note = 2'-O-methylcytidine
  modified_base 7: mod_base = OTHER; note = 2'-fluorocytidine
  modified_base 8: mod_base = OTHER; note = 2'-O-methylcytidine
  modified_base 9: mod_base = OTHER; note = 2'-fluoroguanosine
  modified_base 10: mod_base = OTHER; note = 2'-O-methylcytidine
  modified_base 11: mod_base = OTHER; note = 2'-fluorocytidine
  modified_base 12: mod_base = OTHER; note = 2'-O-methyladenosine
  modified_base 13: mod_base = OTHER; note = 2'-fluorouridine
  modified_base 14: mod_base = OTHER; note = 2'-O-methylguanosine
  modified_base 15: mod_base = OTHER; note = 2'-fluoroguanosine
  modified_base 16: mod_base = OTHER; note = 2'-O-methyladenosine
  modified_base 17: mod_base = OTHER; note = 2'-fluorouridine
  modified_base 18: mod_base = OTHER; note = 2'-O-methyluridine
  modified_base 19: mod_base = OTHER; note = 2'-fluorouridine with phosphorothioate linkage
  modified_base 20: mod_base = OTHER; note = 2'-O-methylcytidine with phosphorothioate linkage
  modified_base 21: mod_base = OTHER; note = 2'-fluorouridine
agcctcccgccatggatttct

SEQ ID NO: 2806 - RNA, 21 nt, synthetic construct
  source 1..21: mol_type = other RNA
  modified_base 1: mod_base = OTHER; note = 2'-fluoroguanosine with phosphorothioate linkage
  modified_base 2: mod_base = OTHER; note = 2'-O-methylcytidine with phosphorothioate linkage
  modified_base 3: mod_base = OTHER; note = 2'-fluorocytidine
  modified_base 4: mod_base = OTHER; note = 2'-O-methyluridine
  modified_base 5: mod_base = OTHER; note = 2'-fluorocytidine
  modified_base 6: mod_base = OTHER; note = 2'-O-methylcytidine
  modified_base 7: mod_base = OTHER; note = 2'-fluorocytidine
  modified_base 8: mod_base = OTHER; note = 2'-O-methylguanosine
  modified_base 9: mod_base = OTHER; note = 2'-fluorocytidine
  modified_base 10: mod_base = OTHER; note = 2'-O-methylcytidine
  modified_base 11: mod_base = OTHER; note = 2'-fluoroadenosine
  modified_base 12: mod_base = OTHER; note = 2'-O-methyluridine
  modified_base 13: mod_base = OTHER; note = 2'-fluoroguanosine
  modified_base 14: mod_base = OTHER; note = 2'-O-methylguanosine
  modified_base 15: mod_base = OTHER; note = 2'-fluoroadenosine
  modified_base 16: mod_base = OTHER; note = 2'-O-methyluridine
  modified_base 17: mod_base = OTHER; note = 2'-fluorouridine
  modified_base 18: mod_base = OTHER; note = 2'-O-methyluridine
  modified_base 19: mod_base = OTHER; note = 2'-fluorocytidine with phosphorothioate linkage
  modified_base 20: mod_base = OTHER; note = 2'-O-methyluridine with phosphorothioate linkage
  modified_base 21: mod_base = OTHER; note = 2'-fluorocytidine
gcctcccgccatggatttctc

SEQ ID NO: 2807 - RNA, 21 nt, synthetic construct
  source 1..21: mol_type = other RNA
  modified_base 1: mod_base = OTHER; note = 2'-fluorocytidine with phosphorothioate linkage
  modified_base 2: mod_base = OTHER; note = 2'-O-methyluridine with phosphorothioate linkage
  modified_base 3: mod_base = OTHER; note = 2'-fluorocytidine
  modified_base 4: mod_base = OTHER; note = 2'-O-methylcytidine
  modified_base 5: mod_base = OTHER; note = 2'-fluorocytidine
  modified_base 6: mod_base = OTHER; note = 2'-O-methylguanosine
  modified_base 7: mod_base = OTHER; note = 2'-fluorocytidine
  modified_base 8: mod_base = OTHER; note = 2'-O-methylcytidine
  modified_base 9: mod_base = OTHER; note = 2'-fluoroadenosine
  modified_base 10: mod_base = OTHER; note = 2'-O-methyluridine
  modified_base 11: mod_base = OTHER; note = 2'-fluoroguanosine
  modified_base 12: mod_base = OTHER; note = 2'-O-methylguanosine
  modified_base 13: mod_base = OTHER; note = 2'-fluoroadenosine
  modified_base 14: mod_base = OTHER; note = 2'-O-methyluridine
  modified_base 15: mod_base = OTHER; note = 2'-fluorouridine
  modified_base 16: mod_base = OTHER; note = 2'-O-methyluridine
  modified_base 17: mod_base = OTHER; note = 2'-fluorocytidine
  modified_base 18: mod_base = OTHER; note = 2'-O-methyluridine
  modified_base 19: mod_base = OTHER; note = 2'-fluorocytidine with phosphorothioate linkage
  modified_base 20: mod_base = OTHER; note = 2'-O-methyluridine with phosphorothioate linkage
  modified_base 21: mod_base = OTHER; note = 2'-fluoroadenosine
ctcccgccatggatttctcta

SEQ ID NO: 2808 - RNA, 21 nt, synthetic construct
  source 1..21: mol_type = other RNA
  modified_base 1: mod_base = OTHER; note = 2'-fluorouridine with phosphorothioate linkage
  modified_base 2: mod_base = OTHER; note = 2'-O-methylcytidine with phosphorothioate linkage
  modified_base 3: mod_base = OTHER; note = 2'-fluorocytidine
  modified_base 4: mod_base = OTHER; note = 2'-O-methylcytidine
  modified_base 5: mod_base = OTHER; note = 2'-fluoroguanosine
  modified_base 6: mod_base = OTHER; note = 2'-O-methylcytidine
  modified_base 7: mod_base = OTHER; note = 2'-fluorocytidine
  modified_base 8: mod_base = OTHER; note = 2'-O-methyladenosine
  modified_base 9: mod_base = OTHER; note = 2'-fluorouridine
  modified_base 10: mod_base = OTHER; note = 2'-O-methylguanosine
  modified_base 11: mod_base = OTHER; note = 2'-fluoroguanosine
  modified_base 12: mod_base = OTHER; note = 2'-O-methyladenosine
  modified_base 13: mod_base = OTHER; note = 2'-fluorouridine
  modified_base 14: mod_base = OTHER; note = 2'-O-methyluridine
  modified_base 15: mod_base = OTHER; note = 2'-fluorouridine
  modified_base 16: mod_base = OTHER; note = 2'-O-methylcytidine
  modified_base 17: mod_base = OTHER; note = 2'-fluorouridine
  modified_base 18: mod_base = OTHER; note = 2'-O-methylcytidine
  modified_base 19: mod_base = OTHER; note = 2'-fluorouridine with phosphorothioate linkage
  modified_base 20: mod_base = OTHER; note = 2'-O-methyladenosine with phosphorothioate linkage
  modified_base 21: mod_base = OTHER; note = 2'-fluorouridine
tcccgccatggatttctctat

SEQ ID NO: 2809 - RNA, 21 nt, synthetic construct
  source 1..21: mol_type = other RNA
  modified_base 1: mod_base = OTHER; note = 2'-fluorocytidine with phosphorothioate linkage
  modified_base 2: mod_base = OTHER; note = 2'-O-methylcytidine with phosphorothioate linkage
  modified_base 3: mod_base = OTHER; note = 2'-fluorocytidine
  modified_base 4: mod_base = OTHER; note = 2'-O-methylguanosine
  modified_base 5: mod_base = OTHER; note = 2'-fluorocytidine
  modified_base 6: mod_base = OTHER; note = 2'-O-methylcytidine
  modified_base 7: mod_base = OTHER; note = 2'-fluoroadenosine
  modified_base 8: mod_base = OTHER; note = 2'-O-methyluridine
  modified_base 9: mod_base = OTHER; note = 2'-fluoroguanosine
  modified_base 10: mod_base = OTHER; note = 2'-O-methylguanosine
  modified_base 11: mod_base = OTHER; note = 2'-fluoroadenosine
  modified_base 12: mod_base = OTHER; note = 2'-O-methyluridine
  modified_base 13: mod_base = OTHER; note = 2'-fluorouridine
  modified_base 14: mod_base = OTHER; note = 2'-O-methyluridine
  modified_base 15: mod_base = OTHER; note = 2'-fluorocytidine
  modified_base 16: mod_base = OTHER; note = 2'-O-methyluridine
  modified_base 17: mod_base = OTHER; note = 2'-fluorocytidine
  modified_base 18: mod_base = OTHER; note = 2'-O-methyluridine
  modified_base 19: mod_base = OTHER; note = 2'-fluoroadenosine with phosphorothioate linkage
  modified_base 20: mod_base = OTHER; note = 2'-O-methylguanosine with phosphorothioate linkage
  modified_base 21: mod_base = OTHER; note = 2'-fluorouridine
cccgccatggatttctctagt

SEQ ID NO: 2810 - RNA, 21 nt, synthetic construct
  source 1..21: mol_type = other RNA
  modified_base 1: mod_base = OTHER; note = 2'-fluorocytidine with phosphorothioate linkage
  modified_base 2: mod_base = OTHER; note = 2'-O-methylguanosine with phosphorothioate linkage
  modified_base 3: mod_base = OTHER; note = 2'-fluorocytidine
  modified_base 4: mod_base = OTHER; note = 2'-O-methylcytidine
  modified_base 5: mod_base = OTHER; note = 2'-fluoroadenosine
  modified_base 6: mod_base = OTHER; note = 2'-O-methyluridine
  modified_base 7: mod_base = OTHER; note = 2'-fluoroguanosine
  modified_base 8: mod_base = OTHER; note = 2'-O-methylguanosine
  modified_base 9: mod_base = OTHER; note = 2'-fluoroadenosine
  modified_base 10: mod_base = OTHER; note = 2'-O-methyluridine
  modified_base 11: mod_base = OTHER; note = 2'-fluorouridine
  modified_base 12: mod_base = OTHER; note = 2'-O-methyluridine
  modified_base 13: mod_base = OTHER; note = 2'-fluorocytidine
  modified_base 14: mod_base = OTHER; note = 2'-O-methyluridine
  modified_base 15: mod_base = OTHER; note = 2'-fluorocytidine
  modified_base 16: mod_base = OTHER; note = 2'-O-methyluridine
  modified_base 17: mod_base = OTHER; note = 2'-fluoroadenosine
  modified_base 18: mod_base = OTHER; note = 2'-O-methylguanosine
  modified_base 19: mod_base = OTHER; note = 2'-fluoroguanosine with phosphorothioate linkage
  modified_base 20: mod_base = OTHER; note = 2'-O-methyladenosine with phosphorothioate linkage
  modified_base 21: mod_base = OTHER; note = 2'-fluorouridine
cgccatggatttctctaggat

SEQ ID NO: 2811 - RNA, 21 nt, synthetic construct
  source 1..21: mol_type = other RNA
  modified_base 1: mod_base = OTHER; note = 2'-fluorouridine with phosphorothioate linkage
  modified_base 2: mod_base = OTHER; note = 2'-O-methyladenosine with phosphorothioate linkage
  modified_base 3: mod_base = OTHER; note = 2'-fluoroguanosine
  modified_base 4: mod_base = OTHER; note = 2'-O-methylguanosine
  modified_base 5: mod_base = OTHER; note = 2'-fluoroadenosine
  modified_base 6: mod_base = OTHER; note = 2'-O-methylguanosine
  modified_base 7: mod_base = OTHER; note = 2'-fluoroadenosine
  modified_base 8: mod_base = OTHER; note = 2'-O-methylcytidine
  modified_base 9: mod_base = OTHER; note = 2'-fluorouridine
  modified_base 10: mod_base = OTHER; note = 2'-O-methyluridine
  modified_base 11: mod_base = OTHER; note = 2'-fluoroadenosine
  modified_base 12: mod_base = OTHER; note = 2'-O-methylguanosine
  modified_base 13: mod_base = OTHER; note = 2'-fluoroadenosine
  modified_base 14: mod_base = OTHER; note = 2'-O-methylguanosine
  modified_base 15: mod_base = OTHER; note = 2'-fluoroadenosine
  modified_base 16: mod_base = OTHER; note = 2'-O-methylguanosine
  modified_base 17: mod_base = OTHER; note = 2'-fluorocytidine
  modified_base 18: mod_base = OTHER; note = 2'-O-methyluridine
  modified_base 19: mod_base = OTHER; note = 2'-fluoroguanosine with phosphorothioate linkage
  modified_base 20: mod_base = OTHER; note = 2'-O-methylguanosine with phosphorothioate linkage
  modified_base 21: mod_base = OTHER; note = 2'-fluorocytidine
taggagacttagagagctggc

SEQ ID NO: 2812 - RNA, 21 nt, synthetic construct
  source 1..21: mol_type = other RNA
  modified_base 1: mod_base = OTHER; note = 2'-fluoroadenosine with phosphorothioate linkage
  modified_base 2: mod_base = OTHER; note = 2'-O-methylguanosine with phosphorothioate linkage
  modified_base 3: mod_base = OTHER; note = 2'-fluoroguanosine
  modified_base 4: mod_base = OTHER; note = 2'-O-methyladenosine
  modified_base 5: mod_base = OTHER; note = 2'-fluoroguanosine
  modified_base 6: mod_base = OTHER; note = 2'-O-methyladenosine
  modified_base 7: mod_base = OTHER; note = 2'-fluorocytidine
  modified_base 8: mod_base = OTHER; note = 2'-O-methyluridine
  modified_base 9: mod_base = OTHER; note = 2'-fluorouridine
  modified_base 10: mod_base = OTHER; note = 2'-O-methyladenosine
  modified_base 11: mod_base = OTHER; note = 2'-fluoroguanosine
  modified_base 12: mod_base = OTHER; note = 2'-O-methyladenosine
  modified_base 13: mod_base = OTHER; note = 2'-fluoroguanosine
  modified_base 14: mod_base = OTHER; note = 2'-O-methyladenosine
  modified_base 15: mod_base = OTHER; note = 2'-fluoroguanosine
  modified_base 16: mod_base = OTHER; note = 2'-O-methylcytidine
  modified_base 17: mod_base = OTHER; note = 2'-fluorouridine
  modified_base 18: mod_base = OTHER; note = 2'-O-methylguanosine
  modified_base 19: mod_base = OTHER; note = 2'-fluoroguanosine with phosphorothioate linkage
  modified_base 20: mod_base = OTHER; note = 2'-O-methylcytidine with phosphorothioate linkage
  modified_base 21: mod_base = OTHER; note = 2'-fluoroadenosine
aggagacttagagagctggca

SEQ ID NO: 2813 - RNA, 21 nt, synthetic construct
  source 1..21: mol_type = other RNA
  modified_base 1: mod_base = OTHER; note = 2'-fluoroguanosine with phosphorothioate linkage
  modified_base 2: mod_base = OTHER; note = 2'-O-methylguanosine with phosphorothioate linkage
  modified_base 3: mod_base = OTHER; note = 2'-fluoroadenosine
  modified_base 4: mod_base = OTHER; note = 2'-O-methyladenosine
  modified_base 5: mod_base = OTHER; note = 2'-fluorocytidine
  modified_base 6: mod_base = OTHER; note = 2'-O-methyladenosine
  modified_base 7: mod_base = OTHER; note = 2'-fluorocytidine
  modified_base 8: mod_base = OTHER; note = 2'-O-methylguanosine
  modified_base 9: mod_base = OTHER; note = 2'-fluorouridine
  modified_base 10: mod_base = OTHER; note = 2'-O-methylcytidine
  modified_base 11: mod_base = OTHER; note = 2'-fluorouridine
  modified_base 12: mod_base = OTHER; note = 2'-O-methyladenosine
  modified_base 13: mod_base = OTHER; note = 2'-fluoroguanosine
  modified_base 14: mod_base = OTHER; note = 2'-O-methylcytidine
  modified_base 15: mod_base = OTHER; note = 2'-fluorocytidine
  modified_base 16: mod_base = OTHER; note = 2'-O-methylcytidine
  modified_base 17: mod_base = OTHER; note = 2'-fluoroadenosine
  modified_base 18: mod_base = OTHER; note = 2'-O-methylcytidine
  modified_base 19: mod_base = OTHER; note = 2'-fluorocytidine with phosphorothioate linkage
  modified_base 20: mod_base = OTHER; note = 2'-O-methylguanosine with phosphorothioate linkage
  modified_base 21: mod_base = OTHER; note = 2'-fluorocytidine
ggaacacgtctagcccaccgc

SEQ ID NO: 2814 - RNA, 21 nt, synthetic construct
  source 1..21: mol_type = other RNA
  modified_base 1: mod_base = OTHER; note = 2'-fluorocytidine with phosphorothioate linkage
  modified_base 2: mod_base = OTHER; note = 2'-O-methylcytidine with phosphorothioate linkage
  modified_base 3: mod_base = OTHER; note = 2'-fluorouridine
  modified_base 4: mod_base = OTHER; note = 2'-O-methyladenosine
  modified_base 5: mod_base = OTHER; note = 2'-fluorouridine
  modified_base 6: mod_base = OTHER; note = 2'-O-methylguanosine
  modified_base 7: mod_base = OTHER; note = 2'-fluorocytidine
  modified_base 8: mod_base = OTHER; note = 2'-O-methyladenosine
  modified_base 9: mod_base = OTHER; note = 2'-fluoroadenosine
  modified_base 10: mod_base = OTHER; note = 2'-O-methyladenosine
  modified_base 11: mod_base = OTHER; note = 2'-fluoroguanosine
  modified_base 12: mod_base = OTHER; note = 2'-O-methylguanosine
  modified_base 13: mod_base = OTHER; note = 2'-fluorouridine
  modified_base 14: mod_base = OTHER; note = 2'-O-methyluridine
  modified_base 15: mod_base = OTHER; note = 2'-fluoroadenosine
  modified_base 16: mod_base = OTHER; note = 2'-O-methylcytidine
  modified_base 17: mod_base = OTHER; note = 2'-fluorouridine
  modified_base 18: mod_base = OTHER; note = 2'-O-methylguanosine
  modified_base 19: mod_base = OTHER; note = 2'-fluorocytidine with phosphorothioate linkage
  modified_base 20: mod_base = OTHER; note = 2'-O-methyladenosine with phosphorothioate linkage
  modified_base 21: mod_base = OTHER; note = 2'-fluoroadenosine
cctatgcaaaggttactgcaa

SEQ ID NO: 2815 - RNA, 21 nt, synthetic construct
  source 1..21: mol_type = other RNA
  modified_base 1: mod_base = OTHER; note = 2'-fluorocytidine with phosphorothioate linkage
  modified_base 2: mod_base = OTHER; note = 2'-O-methyluridine with phosphorothioate linkage
  modified_base 3: mod_base = OTHER; note = 2'-fluoroadenosine
  modified_base 4: mod_base = OTHER; note = 2'-O-methyluridine
  modified_base 5: mod_base = OTHER; note = 2'-fluoroguanosine
  modified_base 6: mod_base = OTHER; note = 2'-O-methylcytidine
  modified_base 7: mod_base = OTHER; note = 2'-fluoroadenosine
  modified_base 8: mod_base = OTHER; note = 2'-O-methyladenosine
  modified_base 9: mod_base = OTHER; note = 2'-fluoroadenosine
  modified_base 10: mod_base = OTHER; note = 2'-O-methylguanosine
  modified_base 11: mod_base = OTHER; note = 2'-fluoroguanosine
  modified_base 12: mod_base = OTHER; note = 2'-O-methyluridine
  modified_base 13: mod_base = OTHER; note = 2'-fluorouridine
  modified_base 14: mod_base = OTHER; note = 2'-O-methyladenosine
  modified_base 15: mod_base = OTHER; note = 2'-fluorocytidine
  modified_base 16: mod_base = OTHER; note = 2'-O-methyluridine
  modified_base 17: mod_base = OTHER; note = 2'-fluoroguanosine
  modified_base 18: mod_base = OTHER; note = 2'-O-methylcytidine
  modified_base 19: mod_base = OTHER; note = 2'-fluoroadenosine with phosphorothioate linkage
  modified_base 20: mod_base = OTHER; note = 2'-O-methyladenosine with phosphorothioate linkage
  modified_base 21: mod_base = OTHER; note = 2'-fluorocytidine
ctatgcaaaggttactgcaac

SEQ ID NO: 2816 - RNA, 21 nt, synthetic construct
  source 1..21: mol_type = other RNA
  modified_base 1: mod_base = OTHER; note = 2'-fluorouridine with phosphorothioate linkage
  modified_base 2: mod_base = OTHER; note = 2'-O-methyladenosine with phosphorothioate linkage
  modified_base 3: mod_base = OTHER; note = 2'-fluorouridine
  modified_base 4: mod_base = OTHER; note = 2'-O-methylguanosine
  modified_base 5: mod_base = OTHER; note = 2'-fluorocytidine
  modified_base 6: mod_base = OTHER; note = 2'-O-methyladenosine
  modified_base 7: mod_base = OTHER; note = 2'-fluoroadenosine
  modified_base 8: mod_base = OTHER; note = 2'-O-methyladenosine
  modified_base 9: mod_base = OTHER; note = 2'-fluoroguanosine
  modified_base 10: mod_base = OTHER; note = 2'-O-methylguanosine
  modified_base 11: mod_base = OTHER; note = 2'-fluorouridine
  modified_base 12: mod_base = OTHER; note = 2'-O-methyluridine
  modified_base 13: mod_base = OTHER; note = 2'-fluoroadenosine
  modified_base 14: mod_base = OTHER; note = 2'-O-methylcytidine
  modified_base 15: mod_base = OTHER; note = 2'-fluorouridine
  modified_base 16: mod_base = OTHER; note = 2'-O-methylguanosine
  modified_base 17: mod_base = OTHER; note = 2'-fluorocytidine
  modified_base 18: mod_base = OTHER; note = 2'-O-methyladenosine
  modified_base 19: mod_base = OTHER; note = 2'-fluoroadenosine with phosphorothioate linkage
  modified_base 20: mod_base = OTHER; note = 2'-O-methylcytidine with phosphorothioate linkage
  modified_base 21: mod_base = OTHER; note = 2'-fluorocytidine
tatgcaaaggttactgcaacc

SEQ ID NO: 2817 - RNA, 21 nt, synthetic construct
  source 1..21: mol_type = other RNA
  modified_base 1: mod_base = OTHER; note = 2'-fluorouridine with phosphorothioate linkage
  modified_base 2: mod_base = OTHER; note = 2'-O-methylguanosine with phosphorothioate linkage
  modified_base 3: mod_base = OTHER; note = 2'-fluorocytidine
  modified_base 4: mod_base = OTHER; note = 2'-O-methyladenosine
  modified_base 5: mod_base = OTHER; note = 2'-fluoroadenosine
  modified_base 6: mod_base = OTHER; note = 2'-O-methyladenosine
  modified_base 7: mod_base = OTHER; note = 2'-fluoroguanosine
  modified_base 8: mod_base = OTHER; note = 2'-O-methylguanosine
  modified_base 9: mod_base = OTHER; note = 2'-fluorouridine
  modified_base 10: mod_base = OTHER; note = 2'-O-methyluridine
  modified_base 11: mod_base = OTHER; note = 2'-fluoroadenosine
  modified_base 12: mod_base = OTHER; note = 2'-O-methylcytidine
  modified_base 13: mod_base = OTHER; note = 2'-fluorouridine
  modified_base 14: mod_base = OTHER; note = 2'-O-methylguanosine
  modified_base 15: mod_base = OTHER; note = 2'-fluorocytidine
  modified_base 16: mod_base = OTHER; note = 2'-O-methyladenosine
  modified_base 17: mod_base = OTHER; note = 2'-fluoroadenosine
  modified_base 18: mod_base = OTHER; note = 2'-O-methylcytidine
  modified_base 19: mod_base = OTHER; note = 2'-fluorocytidine with phosphorothioate linkage
  modified_base 20: mod_base = OTHER; note = 2'-O-methyladenosine with phosphorothioate linkage
  modified_base 21: mod_base = OTHER; note = 2'-fluorouridine
tgcaaaggttactgcaaccat

SEQ ID NO: 2818 - RNA, 21 nt, synthetic construct
  source 1..21: mol_type = other RNA
  modified_base 1: mod_base = OTHER; note = 2'-fluoroguanosine with phosphorothioate linkage
  modified_base 2: mod_base = OTHER; note = 2'-O-methylcytidine with phosphorothioate linkage
  modified_base 3: mod_base = OTHER; note = 2'-fluoroadenosine
  modified_base 4: mod_base = OTHER; note = 2'-O-methyladenosine
  modified_base 5: mod_base = OTHER; note = 2'-fluoroadenosine
  modified_base 6: mod_base = OTHER; note = 2'-O-methylguanosine
  modified_base 7: mod_base = OTHER; note = 2'-fluoroguanosine
  modified_base 8: mod_base = OTHER; note = 2'-O-methyluridine
  modified_base 9: mod_base = OTHER; note = 2'-fluorouridine
  modified_base 10: mod_base = OTHER; note = 2'-O-methyladenosine
  modified_base 11: mod_base = OTHER; note = 2'-fluorocytidine
  modified_base 12: mod_base = OTHER; note = 2'-O-methyluridine
  modified_base 13: mod_base = OTHER; note = 2'-fluoroguanosine
  modified_base 14: mod_base = OTHER; note = 2'-O-methylcytidine
  modified_base 15: mod_base = OTHER; note = 2'-fluoroadenosine
  modified_base 16: mod_base = OTHER; note = 2'-O-methyladenosine
  modified_base 17: mod_base = OTHER; note = 2'-fluorocytidine
  modified_base 18: mod_base = OTHER; note = 2'-O-methylcytidine
  modified_base 19: mod_base = OTHER; note = 2'-fluoroadenosine with phosphorothioate linkage
  modified_base 20: mod_base = OTHER; note = 2'-O-methyluridine with phosphorothioate linkage
  modified_base 21: mod_base = OTHER; note = 2'-fluorouridine
gcaaaggttactgcaaccatt

SEQ ID NO: 2819 - RNA, 21 nt, synthetic construct
  source 1..21: mol_type = other RNA
  modified_base 1: mod_base = OTHER; note = 2'-fluorocytidine with phosphorothioate linkage
  modified_base 2: mod_base = OTHER; note = 2'-O-methyladenosine with phosphorothioate linkage
  modified_base 3: mod_base = OTHER; note = 2'-fluoroadenosine
  modified_base 4: mod_base = OTHER; note = 2'-O-methyladenosine
  modified_base 5: mod_base = OTHER; note = 2'-fluoroguanosine
  modified_base 6: mod_base = OTHER; note = 2'-O-methylguanosine
  modified_base 7: mod_base = OTHER; note = 2'-fluorouridine
  modified_base 8: mod_base = OTHER; note = 2'-O-methyluridine
  modified_base 9: mod_base = OTHER; note = 2'-fluoroadenosine
  modified_base 10: mod_base = OTHER; note = 2'-O-methylcytidine
  modified_base 11: mod_base = OTHER; note = 2'-fluorouridine
  modified_base 12: mod_base = OTHER; note = 2'-O-methylguanosine
  modified_base 13: mod_base = OTHER; note = 2'-fluorocytidine
  modified_base 14: mod_base = OTHER; note = 2'-O-methyladenosine
  modified_base 15: mod_base = OTHER; note = 2'-fluoroadenosine
  modified_base 16: mod_base = OTHER; note = 2'-O-methylcytidine
  modified_base 17: mod_base = OTHER; note = 2'-fluorocytidine
  modified_base 18: mod_base = OTHER; note = 2'-O-methyladenosine
  modified_base 19: mod_base = OTHER; note = 2'-fluorouridine with phosphorothioate linkage
  modified_base 20: mod_base = OTHER; note = 2'-O-methyluridine with phosphorothioate linkage
  modified_base 21: mod_base = OTHER; note = 2'-fluorocytidine
caaaggttactgcaaccattc

SEQ ID NO: 2820 - RNA, 21 nt, synthetic construct
  source 1..21: mol_type = other RNA
  modified_base 1: mod_base = OTHER; note = 2'-fluoroadenosine with phosphorothioate linkage
  modified_base 2: mod_base = OTHER; note = 2'-O-methyladenosine with phosphorothioate linkage
  modified_base 3: mod_base = OTHER; note = 2'-fluoroadenosine
  modified_base 4: mod_base = OTHER; note = 2'-O-methylguanosine
  modified_base 5: mod_base = OTHER; note = 2'-fluoroguanosine
  modified_base 6: mod_base = OTHER; note = 2'-O-methyluridine
  modified_base 7: mod_base = OTHER; note = 2'-fluorouridine
  modified_base 8: mod_base = OTHER; note = 2'-O-methyladenosine
  modified_base 9: mod_base = OTHER; note = 2'-fluorocytidine
  modified_base 10: mod_base = OTHER; note = 2'-O-methyluridine
  modified_base 11: mod_base = OTHER; note = 2'-fluoroguanosine
  modified_base 12: mod_base = OTHER; note = 2'-O-methylcytidine
  modified_base 13: mod_base = OTHER; note = 2'-fluoroadenosine
  modified_base 14: mod_base = OTHER; note = 2'-O-methyladenosine
  modified_base 15: mod_base = OTHER; note = 2'-fluorocytidine
  modified_base 16: mod_base = OTHER; note = 2'-O-methylcytidine
  modified_base 17: mod_base = OTHER; note = 2'-fluoroadenosine
  modified_base 18: mod_base = OTHER; note = 2'-O-methyluridine
  modified_base 19: mod_base = OTHER; note = 2'-fluorouridine with phosphorothioate linkage
  modified_base 20: mod_base = OTHER; note = 2'-O-methylcytidine with phosphorothioate linkage
  modified_base 21: mod_base = OTHER; note = 2'-fluorocytidine
aaaggttactgcaaccattcc

SEQ ID NO: 2821 - RNA, 21 nt, synthetic construct
  source 1..21: mol_type = other RNA
  modified_base 1: mod_base = OTHER; note = 2'-fluoroadenosine with phosphorothioate linkage
  modified_base 2: mod_base = OTHER; note = 2'-O-methyladenosine with phosphorothioate linkage
  modified_base 3: mod_base = OTHER; note = 2'-fluoroguanosine
  modified_base 4: mod_base = OTHER; note = 2'-O-methylguanosine
  modified_base 5: mod_base = OTHER; note = 2'-fluorouridine
  modified_base 6: mod_base = OTHER; note = 2'-O-methyluridine
  modified_base 7: mod_base = OTHER; note = 2'-fluoroadenosine
  modified_base 8: mod_base = OTHER; note = 2'-O-methylcytidine
  modified_base 9: mod_base = OTHER; note = 2'-fluorouridine
  modified_base 10: mod_base = OTHER; note = 2'-O-methylguanosine
  modified_base 11: mod_base = OTHER; note = 2'-fluorocytidine
  modified_base 12: mod_base = OTHER; note = 2'-O-methyladenosine
  modified_base 13: mod_base = OTHER; note = 2'-fluoroadenosine
  modified_base 14: mod_base = OTHER; note = 2'-O-methylcytidine
  modified_base 15: mod_base = OTHER; note = 2'-fluorocytidine
  modified_base 16: mod_base = OTHER; note = 2'-O-methyladenosine
  modified_base 17: mod_base = OTHER; note = 2'-fluorouridine
  modified_base 18: mod_base = OTHER; note = 2'-O-methyluridine
  modified_base 19: mod_base = OTHER; note = 2'-fluorocytidine with phosphorothioate linkage
  modified_base 20: mod_base = OTHER; note = 2'-O-methylcytidine with phosphorothioate linkage
  modified_base 21: mod_base = OTHER; note = 2'-fluoroadenosine
aaggttactgcaaccattcca

SEQ ID NO: 2822 - RNA, 21 nt, synthetic construct
  source 1..21: mol_type = other RNA
  modified_base 1: mod_base = OTHER; note = 2'-fluoroadenosine with phosphorothioate linkage
  modified_base 2: mod_base = OTHER; note = 2'-O-methylguanosine with phosphorothioate linkage
  modified_base 3: mod_base = OTHER; note = 2'-fluoroguanosine
  modified_base 4: mod_base = OTHER; note = 2'-O-methyluridine
  modified_base 5: mod_base = OTHER; note = 2'-fluorouridine
  modified_base 6: mod_base = OTHER; note = 2'-O-methyladenosine
  modified_base 7: mod_base = OTHER; note = 2'-fluorocytidine
  modified_base 8: mod_base = OTHER; note = 2'-O-methyluridine
  modified_base 9: mod_base = OTHER; note = 2'-fluoroguanosine
  modified_base 10: mod_base = OTHER; note = 2'-O-methylcytidine
  modified_base 11: mod_base = OTHER; note = 2'-fluoroadenosine
  modified_base 12: mod_base = OTHER; note = 2'-O-methyladenosine
  modified_base 13: mod_base = OTHER; note = 2'-fluorocytidine
  modified_base 14: mod_base = OTHER; note = 2'-O-methylcytidine
  modified_base 15: mod_base = OTHER; note = 2'-fluoroadenosine
  modified_base 16: mod_base = OTHER; note = 2'-O-methyluridine
  modified_base 17: mod_base = OTHER; note = 2'-fluorouridine
  modified_base 18: mod_base = OTHER; note = 2'-O-methylcytidine
  modified_base 19: mod_base = OTHER; note = 2'-fluorocytidine with phosphorothioate linkage
  modified_base 20: mod_base = OTHER; note = 2'-O-methyladenosine with phosphorothioate linkage
  modified_base 21: mod_base = OTHER; note = 2'-fluorouridine
aggttactgcaaccattccat

SEQ ID NO: 2823 - RNA, 21 nt, synthetic construct
  source 1..21: mol_type = other RNA
  modified_base 1: mod_base = OTHER; note = 2'-fluoroguanosine with phosphorothioate linkage
  modified_base 2: mod_base = OTHER; note = 2'-O-methylguanosine with phosphorothioate linkage
  modified_base 3: mod_base = OTHER; note = 2'-fluorouridine
  modified_base 4: mod_base = OTHER; note = 2'-O-methyluridine
  modified_base 5: mod_base = OTHER; note = 2'-fluoroadenosine
  modified_base 6: mod_base = OTHER; note = 2'-O-methylcytidine
  modified_base 7: mod_base = OTHER; note = 2'-fluorouridine
  modified_base 8: mod_base = OTHER; note = 2'-O-methylguanosine
  modified_base 9: mod_base = OTHER; note = 2'-fluorocytidine
  modified_base 10: mod_base = OTHER; note = 2'-O-methyladenosine
  modified_base 11: mod_base = OTHER; note = 2'-fluoroadenosine
  modified_base 12: mod_base = OTHER; note = 2'-O-methylcytidine
  modified_base 13: mod_base = OTHER; note = 2'-fluorocytidine
  modified_base 14: mod_base = OTHER; note = 2'-O-methyladenosine
  modified_base 15: mod_base = OTHER; note = 2'-fluorouridine
  modified_base 16: mod_base = OTHER; note = 2'-O-methyluridine
  modified_base 17: mod_base = OTHER; note = 2'-fluorocytidine
  modified_base 18: mod_base = OTHER; note = 2'-O-methylcytidine
  modified_base 19: mod_base = OTHER; note = 2'-fluoroadenosine with phosphorothioate linkage
  modified_base 20: mod_base = OTHER; note = 2'-O-methylguanosine with phosphorothioate linkage
  modified_base 21: mod_base = OTHER; note = 2'-fluorocytidine
ggttactgcaaccattccagc

SEQ ID NO: 2824 - RNA, 21 nt, synthetic construct
  source 1..21: mol_type = other RNA
  modified_base 1: mod_base = OTHER; note = 2'-fluorouridine with phosphorothioate linkage
  modified_base 2: mod_base = OTHER; note = 2'-O-methyladenosine with phosphorothioate linkage
  modified_base 3: mod_base = OTHER; note = 2'-fluorocytidine
  modified_base 4: mod_base = OTHER; note = 2'-O-methyluridine
  modified_base 5: mod_base = OTHER; note = 2'-fluoroguanosine
  modified_base 6: mod_base = OTHER; note = 2'-O-methylcytidine
  modified_base 7: mod_base = OTHER; note = 2'-fluoroadenosine
  modified_base 8: mod_base = OTHER; note = 2'-O-methyladenosine
  modified_base 9: mod_base = OTHER; note = 2'-fluorocytidine
  modified_base 10: mod_base = OTHER; note = 2'-O-methylcytidine
  modified_base 11: mod_base = OTHER; note = 2'-fluoroadenosine
  modified_base 12: mod_base = OTHER; note = 2'-O-methyluridine
  modified_base 13: mod_base = OTHER; note = 2'-fluorouridine
  modified_base 14: mod_base = OTHER; note = 2'-O-methylcytidine
  modified_base 15: mod_base = OTHER; note = 2'-fluorocytidine
  modified_base 16: mod_base = OTHER; note = 2'-O-methyladenosine
  modified_base 17: mod_base = OTHER; note = 2'-fluoroguanosine
  modified_base 18: mod_base = OTHER; note = 2'-O-methylcytidine
  modified_base 19: mod_base = OTHER; note = 2'-fluorocytidine with phosphorothioate linkage
  modified_base 20: mod_base = OTHER; note = 2'-O-methyladenosine with phosphorothioate linkage
  modified_base 21: mod_base = OTHER; note = 2'-fluorouridine
tactgcaaccattccagccat

SEQ ID NO: 2825 - RNA, 21 nt, synthetic construct
  source 1..21: mol_type = other RNA
  modified_base 1: mod_base = OTHER; note = 2'-fluorocytidine with phosphorothioate linkage
  modified_base 2: mod_base = OTHER; note = 2'-O-methylguanosine with phosphorothioate linkage
  modified_base 3: mod_base = OTHER; note = 2'-fluoroguanosine
  modified_base 4: mod_base = OTHER; note = 2'-O-methyluridine
  modified_base 5: mod_base = OTHER; note = 2'-fluorocytidine
  modified_base 6: mod_base = OTHER; note = 2'-O-methyladenosine
  modified_base 7: mod_base = OTHER; note = 2'-fluoroadenosine
  modified_base 8: mod_base = OTHER; note = 2'-O-methylguanosine
  modified_base 9: mod_base = OTHER; note = 2'-fluorouridine
  modified_base 10: mod_base = OTHER; note = 2'-O-methylcytidine
  modified_base 11: mod_base = OTHER; note = 2'-fluorocytidine
  modified_base 12: mod_base = OTHER; note = 2'-O-methyladenosine
  modified_base 13: mod_base = OTHER; note = 2'-fluoroadenosine
  modified_base 14: mod_base = OTHER; note = 2'-O-methylguanosine
  modified_base 15: mod_base = OTHER; note = 2'-fluorouridine
  modified_base 16: mod_base = OTHER; note = 2'-O-methylcytidine
  modified_base 17: mod_base = OTHER; note = 2'-fluoroadenosine
  modified_base 18: mod_base = OTHER; note = 2'-O-methyluridine
  modified_base 19: mod_base = OTHER; note = 2'-fluoroguanosine with phosphorothioate linkage
  modified_base 20: mod_base = OTHER; note = 2'-O-methylcytidine with phosphorothioate linkage
  modified_base 21: mod_base = OTHER; note = 2'-fluorouridine
cggtcaagtccaagtcatgct

SEQ ID NO: 2826 - RNA, 21 nt, synthetic construct
  source 1..21: mol_type = other RNA
  modified_base 1: mod_base = OTHER; note = 2'-fluoroguanosine with phosphorothioate linkage
  modified_base 2: mod_base = OTHER; note = 2'-O-methylguanosine with phosphorothioate linkage
  modified_base 3: mod_base = OTHER; note = 2'-fluorouridine
  modified_base 4: mod_base = OTHER; note = 2'-O-methylcytidine
  modified_base 5: mod_base = OTHER; note = 2'-fluoroadenosine
  modified_base 6: mod_base = OTHER; note = 2'-O-methyladenosine
  modified_base 7: mod_base = OTHER; note = 2'-fluoroguanosine
  modified_base 8: mod_base = OTHER; note = 2'-O-methyluridine
  modified_base 9: mod_base = OTHER; note = 2'-fluorocytidine
  modified_base 10: mod_base = OTHER; note = 2'-O-methylcytidine
  modified_base 11: mod_base = OTHER; note = 2'-fluoroadenosine
  modified_base 12: mod_base = OTHER; note = 2'-O-methyladenosine
  modified_base 13: mod_base = OTHER; note = 2'-fluoroguanosine
  modified_base 14: mod_base = OTHER; note = 2'-O-methyluridine
  modified_base 15: mod_base = OTHER; note = 2'-fluorocytidine
  modified_base 16: mod_base = OTHER; note = 2'-O-methyladenosine
  modified_base 17: mod_base = OTHER; note = 2'-fluorouridine
  modified_base 18: mod_base = OTHER; note = 2'-O-methylguanosine
  modified_base 19: mod_base = OTHER; note = 2'-fluorocytidine with phosphorothioate linkage
  modified_base 20: mod_base = OTHER; note = 2'-O-methylguanosine with phosphorothioate linkage
  modified_base 21: mod_base = OTHER; note = 2'-fluoroadenosine
ggtcaagtccaagtcatgcga

SEQ ID NO: 2827 - RNA, 21 nt, synthetic construct
  source 1..21: mol_type = other RNA
  modified_base 1: mod_base = OTHER; note = 2'-fluoroguanosine with phosphorothioate linkage
  modified_base 2: mod_base = OTHER; note = 2'-O-methyluridine with phosphorothioate linkage
  modified_base 3: mod_base = OTHER; note = 2'-fluorocytidine
  modified_base 4: mod_base = OTHER; note = 2'-O-methyladenosine
  modified_base 5: mod_base = OTHER; note = 2'-fluoroadenosine
  modified_base 6: mod_base = OTHER; note = 2'-O-methylguanosine
  modified_base 7: mod_base = OTHER; note = 2'-fluorouridine
  modified_base 8: mod_base = OTHER; note = 2'-O-methylcytidine
  modified_base 9: mod_base = OTHER; note = 2'-fluorocytidine
  modified_base 10: mod_base = OTHER; note = 2'-O-methyladenosine
  modified_base 11: mod_base = OTHER; note = 2'-fluoroadenosine
  modified_base 12: mod_base = OTHER; note = 2'-O-methylguanosine
  modified_base 13: mod_base = OTHER; note = 2'-fluorouridine
  modified_base 14: mod_base = OTHER; note = 2'-O-methylcytidine
  modified_base 15: mod_base = OTHER; note = 2'-fluoroadenosine
  modified_base 16: mod_base = OTHER; note = 2'-O-methyluridine
  modified_base 17: mod_base = OTHER; note = 2'-fluoroguanosine
  modified_base 18: mod_base = OTHER; note = 2'-O-methylcytidine
  modified_base 19: mod_base = OTHER; note = 2'-fluoroguanosine with phosphorothioate linkage
  modified_base 20: mod_base = OTHER; note = 2'-O-methyladenosine with phosphorothioate linkage
  modified_base 21: mod_base = OTHER; note = 2'-fluorouridine
gtcaagtccaagtcatgcgat

SEQ ID NO: 2828 - RNA, 21 nt, synthetic construct
  source 1..21: mol_type = other RNA
  modified_base 1: mod_base = OTHER; note = 2'-fluorouridine with phosphorothioate linkage
  modified_base 2: mod_base = OTHER; note = 2'-O-methylcytidine with phosphorothioate linkage
  modified_base 3: mod_base = OTHER; note = 2'-fluoroadenosine
  modified_base 4: mod_base = OTHER; note = 2'-O-methyladenosine
  modified_base 5: mod_base = OTHER; note = 2'-fluoroguanosine
  modified_base 6: mod_base = OTHER; note = 2'-O-methyluridine
  modified_base 7: mod_base = OTHER; note = 2'-fluorocytidine
  modified_base 8: mod_base = OTHER; note = 2'-O-methylcytidine
  modified_base 9: mod_base = OTHER; note = 2'-fluoroadenosine
  modified_base 10: mod_base = OTHER; note = 2'-O-methyladenosine
  modified_base 11: mod_base = OTHER; note = 2'-fluoroguanosine
  modified_base 12: mod_base = OTHER; note = 2'-O-methyluridine
  modified_base 13: mod_base = OTHER; note = 2'-fluorocytidine
  modified_base 14: mod_base = OTHER; note = 2'-O-methyladenosine
  modified_base 15: mod_base = OTHER; note = 2'-fluorouridine
  modified_base 16: mod_base = OTHER; note = 2'-O-methylguanosine
  modified_base 17: mod_base = OTHER; note = 2'-fluorocytidine
  modified_base 18: mod_base = OTHER; note = 2'-O-methylguanosine
  modified_base 19: mod_base = OTHER; note = 2'-fluoroadenosine with phosphorothioate linkage
  modified_base 20: mod_base = OTHER; note = 2'-O-methylguanosine with phosphorothioate linkage
  modified_base 21: mod_base = OTHER; note = 2'-fluorouridine
tcaagtccaagtcatgcgagt

SEQ ID NO: 2829 - RNA, 21 nt, synthetic construct
  source 1..21: mol_type = other RNA
  modified_base 1: mod_base = OTHER; note = 2'-fluorocytidine with phosphorothioate linkage
  modified_base 2: mod_base = OTHER; note = 2'-O-methyladenosine with phosphorothioate linkage
  modified_base 3: mod_base = OTHER; note = 2'-fluoroadenosine
  modified_base 4: mod_base = OTHER; note = 2'-O-methylguanosine
  modified_base 5: mod_base = OTHER; note = 2'-fluorouridine
  modified_base 6: mod_base = OTHER; note = 2'-O-methylcytidine
  modified_base 7: mod_base = OTHER; note = 2'-fluorocytidine
  modified_base 8: mod_base = OTHER; note = 2'-O-methyladenosine
  modified_base 9: mod_base = OTHER; note = 2'-fluoroadenosine
  modified_base 10: mod_base = OTHER; note = 2'-O-methylguanosine
  modified_base 11: mod_base = OTHER; note = 2'-fluorouridine
  modified_base 12: mod_base = OTHER; note = 2'-O-methylcytidine
  modified_base 13: mod_base = OTHER; note = 2'-fluoroadenosine
  modified_base 14: mod_base = OTHER; note = 2'-O-methyluridine
  modified_base 15: mod_base = OTHER; note = 2'-fluoroguanosine
  modified_base 16: mod_base = OTHER; note = 2'-O-methylcytidine
  modified_base 17: mod_base = OTHER; note = 2'-fluoroguanosine
  modified_base 18: mod_base = OTHER; note = 2'-O-methyladenosine
  modified_base 19: mod_base = OTHER; note = 2'-fluoroguanosine with phosphorothioate linkage
  modified_base 20: mod_base = OTHER; note = 2'-O-methyluridine with phosphorothioate linkage
  modified_base 21: mod_base = OTHER; note = 2'-fluorouridine
caagtccaagtcatgcgagtt

SEQ ID NO: 2830 - RNA, 21 nt, synthetic construct
  source 1..21: mol_type = other RNA
  modified_base 1: mod_base = OTHER; note = 2'-fluoroadenosine with phosphorothioate linkage
  modified_base 2: mod_base = OTHER; note = 2'-O-methyladenosine with phosphorothioate linkage
  modified_base 3: mod_base = OTHER; note = 2'-fluoroguanosine
  modified_base 4: mod_base = OTHER; note = 2'-O-methyluridine
  modified_base 5: mod_base = OTHER; note = 2'-fluorocytidine
  modified_base 6: mod_base = OTHER; note = 2'-O-methylcytidine
  modified_base 7: mod_base = OTHER; note = 2'-fluoroadenosine
  modified_base 8: mod_base = OTHER; note = 2'-O-methyladenosine
  modified_base 9: mod_base = OTHER; note = 2'-fluoroguanosine
  modified_base 10: mod_base = OTHER; note = 2'-O-methyluridine
  modified_base 11: mod_base = OTHER; note = 2'-fluorocytidine
  modified_base 12: mod_base = OTHER; note = 2'-O-methyladenosine
  modified_base 13: mod_base = OTHER; note = 2'-fluorouridine
  modified_base 14: mod_base = OTHER; note = 2'-O-methylguanosine
  modified_base 15: mod_base = OTHER; note = 2'-fluorocytidine
  modified_base 16: mod_base = OTHER; note = 2'-O-methylguanosine
  modified_base 17: mod_base = OTHER; note = 2'-fluoroadenosine
  modified_base 18: mod_base = OTHER; note = 2'-O-methylguanosine
  modified_base 19: mod_base = OTHER; note = 2'-fluorouridine with phosphorothioate linkage
  modified_base 20: mod_base = OTHER; note = 2'-O-methyluridine with phosphorothioate linkage
  modified_base 21: mod_base = OTHER; note = 2'-fluorocytidine
aagtccaagtcatgcgagttc

SEQ ID NO: 2831 - RNA, 21 nt, synthetic construct
  source 1..21: mol_type = other RNA
  modified_base 1: mod_base = OTHER; note = 2'-fluoroadenosine with phosphorothioate linkage
  modified_base 2: mod_base = OTHER; note = 2'-O-methylguanosine with phosphorothioate linkage
  modified_base 3: mod_base = OTHER; note = 2'-fluorouridine
  modified_base 4: mod_base = OTHER; note = 2'-O-methylcytidine
  modified_base 5: mod_base = OTHER; note = 2'-fluorocytidine
  modified_base 6: mod_base = OTHER; note = 2'-O-methyladenosine
  modified_base 7: mod_base = OTHER; note = 2'-fluoroadenosine
  modified_base 8: mod_base = OTHER; note = 2'-O-methylguanosine
  modified_base 9: mod_base = OTHER; note = 2'-fluorouridine
  modified_base 10: mod_base = OTHER; note = 2'-O-methylcytidine
  modified_base 11: mod_base = OTHER; note = 2'-fluoroadenosine
  modified_base 12: mod_base = OTHER; note = 2'-O-methyluridine
  modified_base 13: mod_base = OTHER; note = 2'-fluoroguanosine
  modified_base 14: mod_base = OTHER; note = 2'-O-methylcytidine
  modified_base 15: mod_base = OTHER; note = 2'-fluoroguanosine
  modified_base 16: mod_base = OTHER; note = 2'-O-methyladenosine
  modified_base 17: mod_base = OTHER; note = 2'-fluoroguanosine
  modified_base 18: mod_base = OTHER; note = 2'-O-methyluridine
  modified_base 19: mod_base = OTHER; note = 2'-fluorouridine with phosphorothioate linkage
  modified_base 20: mod_base = OTHER; note = 2'-O-methylcytidine with phosphorothioate linkage
  modified_base 21: mod_base = OTHER; note = 2'-fluorouridine
agtccaagtcatgcgagttct

SEQ ID NO: 2832 - RNA, 21 nt, synthetic construct
  source 1..21: mol_type = other RNA
  modified_base 1: mod_base = OTHER; note = 2'-fluoroguanosine with phosphorothioate linkage
  modified_base 2: mod_base = OTHER; note = 2'-O-methyluridine with phosphorothioate linkage
  modified_base 3: mod_base = OTHER; note = 2'-fluorocytidine
  modified_base 4: mod_base = OTHER; note = 2'-O-methylcytidine
  modified_base 5: mod_base = OTHER; note = 2'-fluoroadenosine
  modified_base 6: mod_base = OTHER; note = 2'-O-methyladenosine
  modified_base 7: mod_base = OTHER; note = 2'-fluoroguanosine
  modified_base 8: mod_base = OTHER; note = 2'-O-methyluridine
  modified_base 9: mod_base = OTHER; note = 2'-fluorocytidine
  modified_base 10: mod_base = OTHER; note = 2'-O-methyladenosine
  modified_base 11: mod_base = OTHER; note = 2'-fluorouridine
  modified_base 12: mod_base = OTHER; note = 2'-O-methylguanosine
  modified_base 13: mod_base = OTHER; note = 2'-fluorocytidine
  modified_base 14: mod_base = OTHER; note = 2'-O-methylguanosine
  modified_base 15: mod_base = OTHER; note = 2'-fluoroadenosine
  modified_base 16: mod_base = OTHER; note = 2'-O-methylguanosine
  modified_base 17: mod_base = OTHER; note = 2'-fluorouridine
  modified_base 18: mod_base = OTHER; note = 2'-O-methyluridine
  modified_base 19: mod_base = OTHER; note = 2'-fluorocytidine with phosphorothioate linkage
  modified_base 20: mod_base = OTHER; note = 2'-O-methyluridine with phosphorothioate linkage
  modified_base 21: mod_base = OTHER; note = 2'-fluorouridine
gtccaagtcatgcgagttctt

SEQ ID NO: 2833 - RNA, 21 nt, synthetic construct
  source 1..21: mol_type = other RNA
  modified_base 1: mod_base = OTHER; note = 2'-fluorouridine with phosphorothioate linkage
  modified_base 2: mod_base = OTHER; note = 2'-O-methylcytidine with phosphorothioate linkage
  modified_base 3: mod_base = OTHER; note = 2'-fluorocytidine
  modified_base 4: mod_base = OTHER; note = 2'-O-methyladenosine
  modified_base 5: mod_base = OTHER; note = 2'-fluoroadenosine
  modified_base 6: mod_base = OTHER; note = 2'-O-methylguanosine
  modified_base 7: mod_base = OTHER; note = 2'-fluorouridine
  modified_base 8: mod_base = OTHER; note = 2'-O-methylcytidine
  modified_base 9: mod_base = OTHER; note = 2'-fluoroadenosine
  modified_base 10: mod_base = OTHER; note = 2'-O-methyluridine
  modified_base 11: mod_base = OTHER; note = 2'-fluoroguanosine
  modified_base 12: mod_base = OTHER; note = 2'-O-methylcytidine
  modified_base 13: mod_base = OTHER; note = 2'-fluoroguanosine
  modified_base 14: mod_base = OTHER; note = 2'-O-methyladenosine
  modified_base 15: mod_base = OTHER; note = 2'-fluoroguanosine
  modified_base 16: mod_base = OTHER; note = 2'-O-methyluridine
  modified_base 17: mod_base = OTHER; note = 2'-fluorouridine
  modified_base 18: mod_base = OTHER; note = 2'-O-methylcytidine
  modified_base 19: mod_base = OTHER; note = 2'-fluorouridine with phosphorothioate linkage
  modified_base 20: mod_base = OTHER; note = 2'-O-methylguanosine with phosphorothioate linkage
  modified_base 21: mod_base = OTHER; note = 2'-fluorocytidine
tccaagtcatgcgagttctgc

SEQ ID NO: 2834 - RNA, 21 nt, synthetic construct
  source 1..21: mol_type = other RNA
  modified_base 1: mod_base = OTHER; note = 2'-fluorocytidine with phosphorothioate linkage
  modified_base 2: mod_base = OTHER; note = 2'-O-methylcytidine with phosphorothioate linkage
  modified_base 3: mod_base = OTHER; note = 2'-fluoroadenosine
  modified_base 4: mod_base = OTHER; note = 2'-O-methyladenosine
  modified_base 5: mod_base = OTHER; note = 2'-fluoroguanosine
  modified_base 6: mod_base = OTHER; note = 2'-O-methyluridine
  modified_base 7: mod_base = OTHER; note = 2'-fluorocytidine
  modified_base 8: mod_base = OTHER; note = 2'-O-methyladenosine
  modified_base 9: mod_base = OTHER; note = 2'-fluorouridine
  modified_base 10: mod_base = OTHER; note = 2'-O-methylguanosine
  modified_base 11: mod_base = OTHER; note = 2'-fluorocytidine
  modified_base 12: mod_base = OTHER; note = 2'-O-methylguanosine
  modified_base 13: mod_base = OTHER; note = 2'-fluoroadenosine
  modified_base 14: mod_base = OTHER; note = 2'-O-methylguanosine
  modified_base 15: mod_base = OTHER; note = 2'-fluorouridine
  modified_base 16: mod_base = OTHER; note = 2'-O-methyluridine
  modified_base 17: mod_base = OTHER; note = 2'-fluorocytidine
  modified_base 18: mod_base = OTHER; note = 2'-O-methyluridine
  modified_base 19: mod_base = OTHER; note = 2'-fluoroguanosine with phosphorothioate linkage
  modified_base 20: mod_base = OTHER; note = 2'-O-methylcytidine with phosphorothioate linkage
  modified_base 21: mod_base = OTHER; note = 2'-fluorouridine
ccaagtcatgcgagttctgct

SEQ ID NO: 2835 - RNA, 21 nt, synthetic construct
  source 1..21: mol_type = other RNA
  modified_base 1: mod_base = OTHER; note = 2'-fluorocytidine with phosphorothioate linkage
  modified_base 2: mod_base = OTHER; note = 2'-O-methyladenosine with phosphorothioate linkage
  modified_base 3: mod_base = OTHER; note = 2'-fluoroadenosine
  modified_base 4: mod_base = OTHER; note = 2'-O-methylguanosine
  modified_base 5: mod_base = OTHER; note = 2'-fluorouridine
  modified_base 6: mod_base = OTHER; note = 2'-O-methylcytidine
  modified_base 7: mod_base = OTHER; note = 2'-fluoroadenosine
  modified_base 8: mod_base = OTHER; note = 2'-O-methyluridine
  modified_base 9: mod_base = OTHER; note = 2'-fluoroguanosine
  modified_base 10: mod_base = OTHER; note = 2'-O-methylcytidine
  modified_base 11: mod_base = OTHER; note = 2'-fluoroguanosine
  modified_base 12: mod_base = OTHER; note = 2'-O-methyladenosine
  modified_base 13: mod_base = OTHER; note = 2'-fluoroguanosine
  modified_base 14: mod_base = OTHER; note = 2'-O-methyluridine
  modified_base 15: mod_base = OTHER; note = 2'-fluorouridine
  modified_base 16: mod_base = OTHER; note = 2'-O-methylcytidine
  modified_base 17: mod_base = OTHER; note = 2'-fluorouridine
  modified_base 18: mod_base = OTHER; note = 2'-O-methylguanosine
  modified_base 19: mod_base = OTHER; note = 2'-fluorocytidine with phosphorothioate linkage
  modified_base 20: mod_base = OTHER; note = 2'-O-methylguanosine with phosphorothioate linkage
  modified_base 21: mod_base = OTHER; note = 2'-fluorouridine
caagtcatgcgagttctgcgt

SEQ ID NO: 2836 - RNA, 21 nt, synthetic construct
  source 1..21: mol_type = other RNA
  modified_base 1: mod_base = OTHER; note = 2'-fluoroadenosine with phosphorothioate linkage
  modified_base 2: mod_base = OTHER; note = 2'-O-methylguanosine with phosphorothioate linkage
  modified_base 3: mod_base = OTHER; note = 2'-fluorouridine
  modified_base 4: mod_base = OTHER; note = 2'-O-methylcytidine
  modified_base 5: mod_base = OTHER; note = 2'-fluoroadenosine
  modified_base 6: mod_base = OTHER; note = 2'-O-methyluridine
  modified_base 7: mod_base = OTHER; note = 2'-fluoroguanosine
  modified_base 8: mod_base = OTHER; note = 2'-O-methylcytidine
  modified_base 9: mod_base = OTHER; note = 2'-fluoroguanosine
  modified_base 10: mod_base = OTHER; note = 2'-O-methyladenosine
  modified_base 11: mod_base = OTHER; note = 2'-fluoroguanosine
  modified_base 12: mod_base = OTHER; note = 2'-O-methyluridine
  modified_base 13: mod_base = OTHER; note = 2'-fluorouridine
  modified_base 14: mod_base = OTHER; note = 2'-O-methylcytidine
  modified_base 15: mod_base = OTHER; note = 2'-fluorouridine
  modified_base 16: mod_base = OTHER; note = 2'-O-methylguanosine
  modified_base 17: mod_base = OTHER; note = 2'-fluorocytidine
  modified_base 18: mod_base = OTHER; note = 2'-O-methylguanosine
  modified_base 19: mod_base = OTHER; note = 2'-fluoroguanosine with phosphorothioate linkage
  modified_base 20: mod_base = OTHER; note = 2'-O-methylcytidine with phosphorothioate linkage
  modified_base 21: mod_base = OTHER; note = 2'-fluoroadenosine
agtcatgcgagttctgcggca

SEQ ID NO: 2837 - RNA, 21 nt, synthetic construct
  source 1..21: mol_type = other RNA
  modified_base 1: mod_base = OTHER; note = 2'-fluoroguanosine with phosphorothioate linkage
  modified_base 2: mod_base = OTHER; note = 2'-O-methyluridine with phosphorothioate linkage
  modified_base 3: mod_base = OTHER; note = 2'-fluorocytidine
  modified_base 4: mod_base = OTHER; note = 2'-O-methyladenosine
  modified_base 5: mod_base = OTHER; note = 2'-fluorouridine
  modified_base 6: mod_base = OTHER; note = 2'-O-methylguanosine
  modified_base 7: mod_base = OTHER; note = 2'-fluorocytidine
  modified_base 8: mod_base = OTHER; note = 2'-O-methylguanosine
  modified_base 9: mod_base = OTHER; note = 2'-fluoroadenosine
  modified_base 10: mod_base = OTHER; note = 2'-O-methylguanosine
  modified_base 11: mod_base = OTHER; note = 2'-fluorouridine
  modified_base 12: mod_base = OTHER; note = 2'-O-methyluridine
  modified_base 13: mod_base = OTHER; note = 2'-fluorocytidine
  modified_base 14: mod_base = OTHER; note = 2'-O-methyluridine
  modified_base 15: mod_base = OTHER; note = 2'-fluoroguanosine
  modified_base 16: mod_base = OTHER; note = 2'-O-methylcytidine
  modified_base 17: mod_base = OTHER; note = 2'-fluoroguanosine
  modified_base 18: mod_base = OTHER; note = 2'-O-methylguanosine
  modified_base 19: mod_base = OTHER; note = 2'-fluorocytidine with phosphorothioate linkage
  modified_base 20: mod_base = OTHER; note = 2'-O-methyladenosine with phosphorothioate linkage
  modified_base 21: mod_base = OTHER; note = 2'-fluoroadenosine
gtcatgcgagttctgcggcaa

SEQ ID NO: 2838 - RNA, 21 nt, synthetic construct
  source 1..21: mol_type = other RNA
  modified_base 1: mod_base = OTHER; note = 2'-fluorouridine with phosphorothioate linkage
  modified_base 2: mod_base = OTHER; note = 2'-O-methylcytidine with phosphorothioate linkage
  modified_base 3: mod_base = OTHER; note = 2'-fluoroadenosine
  modified_base 4: mod_base = OTHER; note = 2'-O-methyluridine
  modified_base 5: mod_base = OTHER; note = 2'-fluoroguanosine
  modified_base 6: mod_base = OTHER; note = 2'-O-methylcytidine
  modified_base 7: mod_base = OTHER; note = 2'-fluoroguanosine
  modified_base 8: mod_base = OTHER; note = 2'-O-methyladenosine
  modified_base 9: mod_base = OTHER; note = 2'-fluoroguanosine
  modified_base 10: mod_base = OTHER; note = 2'-O-methyluridine
  modified_base 11: mod_base = OTHER; note = 2'-fluorouridine
  modified_base 12: mod_base = OTHER; note = 2'-O-methylcytidine
  modified_base 13: mod_base = OTHER; note = 2'-fluorouridine
  modified_base 14: mod_base = OTHER; note = 2'-O-methylguanosine
  modified_base 15: mod_base = OTHER; note = 2'-fluorocytidine
  modified_base 16: mod_base = OTHER; note = 2'-O-methylguanosine
  modified_base 17: mod_base = OTHER; note = 2'-fluoroguanosine
  modified_base 18: mod_base = OTHER; note = 2'-O-methylcytidine
  modified_base 19: mod_base = OTHER; note = 2'-fluoroadenosine with phosphorothioate linkage
  modified_base 20: mod_base = OTHER; note = 2'-O-methyladenosine with phosphorothioate linkage
  modified_base 21: mod_base = OTHER; note = 2'-fluorouridine
tcatgcgagttctgcggcaat

SEQ ID NO: 2839 - RNA, 21 nt, synthetic construct
  source 1..21: mol_type = other RNA
  modified_base 1: mod_base = OTHER; note = 2'-fluoroguanosine with phosphorothioate linkage
  modified_base 2: mod_base = OTHER; note = 2'-O-methylcytidine with phosphorothioate linkage
  modified_base 3: mod_base = OTHER; note = 2'-fluoroguanosine
  modified_base 4: mod_base = OTHER; note = 2'-O-methyladenosine
  modified_base 5: mod_base = OTHER; note = 2'-fluoroguanosine
  modified_base 6: mod_base = OTHER; note = 2'-O-methyluridine
  modified_base 7: mod_base = OTHER; note = 2'-fluorouridine
  modified_base 8: mod_base = OTHER; note = 2'-O-methylcytidine
  modified_base 9: mod_base = OTHER; note = 2'-fluorouridine
  modified_base 10: mod_base = OTHER; note = 2'-O-methylguanosine
  modified_base 11: mod_base = OTHER; note = 2'-fluorocytidine
  modified_base 12: mod_base = OTHER; note = 2'-O-methylguanosine
  modified_base 13: mod_base = OTHER; note = 2'-fluoroguanosine
  modified_base 14: mod_base = OTHER; note = 2'-O-methylcytidine
  modified_base 15: mod_base = OTHER; note = 2'-fluoroadenosine
  modified_base 16: mod_base = OTHER; note = 2'-O-methyladenosine
  modified_base 17: mod_base = OTHER; note = 2'-fluoroguanosine
  modified_base 18: mod_base = OTHER; note = 2'-O-methyladenosine
  modified_base 19: mod_base = OTHER; note = 2'-fluorocytidine with phosphorothioate linkage
  modified_base 20: mod_base = OTHER; note = 2'-O-methylguanosine with phosphorothioate linkage
  modified_base 21: mod_base = OTHER; note = 2'-fluorouridine
gcgagttctgcggcaagacgt

SEQ ID NO: 2840 - RNA, 21 nt, synthetic construct
  source 1..21: mol_type = other RNA
  modified_base 1: mod_base = OTHER; note = 2'-fluorocytidine with phosphorothioate linkage
  modified_base 2: mod_base = OTHER; note = 2'-O-methylguanosine with phosphorothioate linkage
  modified_base 3: mod_base = OTHER; note = 2'-fluoroadenosine
  modified_base 4: mod_base = OTHER; note = 2'-O-methylguanosine
  modified_base 5: mod_base = OTHER; note = 2'-fluorouridine
  modified_base 6: mod_base = OTHER; note = 2'-O-methyluridine
  modified_base 7: mod_base = OTHER; note = 2'-fluorocytidine
  modified_base 8: mod_base = OTHER; note = 2'-O-methyluridine
  modified_base 9: mod_base = OTHER; note = 2'-fluoroguanosine
  modified_base 10: mod_base = OTHER; note = 2'-O-methylcytidine
  modified_base 11: mod_base = OTHER; note = 2'-fluoroguanosine
  modified_base 12: mod_base = OTHER; note = 2'-O-methylguanosine
  modified_base 13: mod_base = OTHER; note = 2'-fluorocytidine
  modified_base 14: mod_base = OTHER; note = 2'-O-methyladenosine
  modified_base 15: mod_base = OTHER; note = 2'-fluoroadenosine
  modified_base 16: mod_base = OTHER; note = 2'-O-methylguanosine
  modified_base 17: mod_base = OTHER; note = 2'-fluoroadenosine
  modified_base 18: mod_base = OTHER; note = 2'-O-methylcytidine
  modified_base 19: mod_base = OTHER; note = 2'-fluoroguanosine with phosphorothioate linkage
  modified_base 20: mod_base = OTHER; note = 2'-O-methyluridine with phosphorothioate linkage
  modified_base 21: mod_base = OTHER; note = 2'-fluorouridine
cgagttctgcggcaagacgtt

SEQ ID NO: 2841 - RNA, 21 nt, synthetic construct
  source 1..21: mol_type = other RNA
  modified_base 1: mod_base = OTHER; note = 2'-fluoroguanosine with phosphorothioate linkage
  modified_base 2: mod_base = OTHER; note = 2'-O-methyladenosine with phosphorothioate linkage
  modified_base 3: mod_base = OTHER; note = 2'-fluoroguanosine
  modified_base 4: mod_base = OTHER; note = 2'-O-methyluridine
  modified_base 5: mod_base = OTHER; note = 2'-fluorouridine
  modified_base 6: mod_base = OTHER; note = 2'-O-methylcytidine
  modified_base 7: mod_base = OTHER; note = 2'-fluorouridine
  modified_base 8: mod_base = OTHER; note = 2'-O-methylguanosine
  modified_base 9: mod_base = OTHER; note = 2'-fluorocytidine
  modified_base 10: mod_base = OTHER; note = 2'-O-methylguanosine
  modified_base 11: mod_base = OTHER; note = 2'-fluoroguanosine
  modified_base 12: mod_base = OTHER; note = 2'-O-methylcytidine
  modified_base 13: mod_base = OTHER; note = 2'-fluoroadenosine
  modified_base 14: mod_base = OTHER; note = 2'-O-methyladenosine
  modified_base 15: mod_base = OTHER; note = 2'-fluoroguanosine
  modified_base 16: mod_base = OTHER; note = 2'-O-methyladenosine
  modified_base 17: mod_base = OTHER; note = 2'-fluorocytidine
  modified_base 18: mod_base = OTHER; note = 2'-O-methylguanosine
  modified_base 19: mod_base = OTHER; note = 2'-fluorouridine with phosphorothioate linkage
  modified_base 20: mod_base = OTHER; note = 2'-O-methyluridine with phosphorothioate linkage
  modified_base 21: mod_base = OTHER; note = 2'-fluorocytidine
gagttctgcggcaagacgttc

SEQ ID NO: 2842 - RNA, 21 nt, synthetic construct
  source 1..21: mol_type = other RNA
  modified_base 1: mod_base = OTHER; note = 2'-fluoroadenosine with phosphorothioate linkage
  modified_base 2: mod_base = OTHER; note = 2'-O-methylguanosine with phosphorothioate linkage
  modified_base 3: mod_base = OTHER; note = 2'-fluorouridine
  modified_base 4: mod_base = OTHER; note = 2'-O-methyluridine
  modified_base 5: mod_base = OTHER; note = 2'-fluorocytidine
  modified_base 6: mod_base = OTHER; note = 2'-O-methyluridine
  modified_base 7: mod_base = OTHER; note = 2'-fluoroguanosine
  modified_base 8: mod_base = OTHER; note = 2'-O-methylcytidine
  modified_base 9: mod_base = OTHER; note = 2'-fluoroguanosine
  modified_base 10: mod_base = OTHER; note = 2'-O-methylguanosine
  modified_base 11: mod_base = OTHER; note = 2'-fluorocytidine
  modified_base 12: mod_base = OTHER; note = 2'-O-methyladenosine
  modified_base 13: mod_base = OTHER; note = 2'-fluoroadenosine
  modified_base 14: mod_base = OTHER; note = 2'-O-methylguanosine
  modified_base 15: mod_base = OTHER; note = 2'-fluoroadenosine
  modified_base 16: mod_base = OTHER; note = 2'-O-methylcytidine
  modified_base 17: mod_base = OTHER; note = 2'-fluoroguanosine
  modified_base 18: mod_base = OTHER; note = 2'-O-methyluridine
  modified_base 19: mod_base = OTHER; note = 2'-fluorouridine with phosphorothioate linkage
  modified_base 20: mod_base = OTHER; note = 2'-O-methylcytidine with phosphorothioate linkage
  modified_base 21: mod_base = OTHER; note = 2'-fluoroadenosine
agttctgcggcaagacgttca

SEQ ID NO: 2843 - RNA, 21 nt, synthetic construct
  source 1..21: mol_type = other RNA
  modified_base 1: mod_base = OTHER; note = 2'-fluoroguanosine with phosphorothioate linkage
  modified_base 2: mod_base = OTHER; note = 2'-O-methyluridine with phosphorothioate linkage
  modified_base 3: mod_base = OTHER; note = 2'-fluorouridine
  modified_base 4: mod_base = OTHER; note = 2'-O-methylcytidine
  modified_base 5: mod_base = OTHER; note = 2'-fluorouridine
  modified_base 6: mod_base = OTHER; note = 2'-O-methylguanosine
  modified_base 7: mod_base = OTHER; note = 2'-fluorocytidine
  modified_base 8: mod_base = OTHER; note = 2'-O-methylguanosine
  modified_base 9: mod_base = OTHER; note = 2'-fluoroguanosine
  modified_base 10: mod_base = OTHER; note = 2'-O-methylcytidine
  modified_base 11: mod_base = OTHER; note = 2'-fluoroadenosine
  modified_base 12: mod_base = OTHER; note = 2'-O-methyladenosine
  modified_base 13: mod_base = OTHER; note = 2'-fluoroguanosine
  modified_base 14: mod_base = OTHER; note = 2'-O-methyladenosine
  modified_base 15: mod_base = OTHER; note = 2'-fluorocytidine
  modified_base 16: mod_base = OTHER; note = 2'-O-methylguanosine
  modified_base 17: mod_base = OTHER; note = 2'-fluorouridine
  modified_base 18: mod_base = OTHER; note = 2'-O-methyluridine
  modified_base 19: mod_base = OTHER; note = 2'-fluorocytidine with phosphorothioate linkage
  modified_base 20: mod_base = OTHER; note = 2'-O-methyladenosine with phosphorothioate linkage
  modified_base 21: mod_base = OTHER; note = 2'-fluoroadenosine
gttctgcggcaagacgttcaa

SEQ ID NO: 2844 - RNA, 21 nt, synthetic construct
  source 1..21: mol_type = other RNA
  modified_base 1: mod_base = OTHER; note = 2'-fluorouridine with phosphorothioate linkage
  modified_base 2: mod_base = OTHER; note = 2'-O-methyluridine with phosphorothioate linkage
  modified_base 3: mod_base = OTHER; note = 2'-fluorocytidine
  modified_base 4: mod_base = OTHER; note = 2'-O-methyluridine
  modified_base 5: mod_base = OTHER; note = 2'-fluoroguanosine
  modified_base 6: mod_base = OTHER; note = 2'-O-methylcytidine
  modified_base 7: mod_base = OTHER; note = 2'-fluoroguanosine
  modified_base 8: mod_base = OTHER; note = 2'-O-methylguanosine
  modified_base 9: mod_base = OTHER; note = 2'-fluorocytidine
  modified_base 10: mod_base = OTHER; note = 2'-O-methyladenosine
  modified_base 11: mod_base = OTHER; note = 2'-fluoroadenosine
  modified_base 12: mod_base = OTHER; note = 2'-O-methylguanosine
  modified_base 13: mod_base = OTHER; note = 2'-fluoroadenosine
  modified_base 14: mod_base = OTHER; note = 2'-O-methylcytidine
  modified_base 15: mod_base = OTHER; note = 2'-fluoroguanosine
  modified_base 16: mod_base = OTHER; note = 2'-O-methyluridine
  modified_base 17: mod_base = OTHER; note = 2'-fluorouridine
  modified_base 18: mod_base = OTHER; note = 2'-O-methylcytidine
  modified_base 19: mod_base = OTHER; note = 2'-fluoroadenosine with phosphorothioate linkage
  modified_base 20: mod_base = OTHER; note = 2'-O-methyladenosine with phosphorothioate linkage
  modified_base 21: mod_base = OTHER; note = 2'-fluoroadenosine
ttctgcggcaagacgttcaaa

SEQ ID NO: 2845 - RNA, 21 nt, synthetic construct
  source 1..21: mol_type = other RNA
  modified_base 1: mod_base = OTHER; note = 2'-fluorouridine with phosphorothioate linkage
  modified_base 2: mod_base = OTHER; note = 2'-O-methylcytidine with phosphorothioate linkage
  modified_base 3: mod_base = OTHER; note = 2'-fluorouridine
  modified_base 4: mod_base = OTHER; note = 2'-O-methylguanosine
  modified_base 5: mod_base = OTHER; note = 2'-fluorocytidine
  modified_base 6: mod_base = OTHER; note = 2'-O-methylguanosine
  modified_base 7: mod_base = OTHER; note = 2'-fluoroguanosine
  modified_base 8: mod_base = OTHER; note = 2'-O-methylcytidine
  modified_base 9: mod_base = OTHER; note = 2'-fluoroadenosine
  modified_base 10: mod_base = OTHER; note = 2'-O-methyladenosine
  modified_base 11: mod_base = OTHER; note = 2'-fluoroguanosine
  modified_base 12: mod_base = OTHER; note = 2'-O-methyladenosine
  modified_base 13: mod_base = OTHER; note = 2'-fluorocytidine
  modified_base 14: mod_base = OTHER; note = 2'-O-methylguanosine
  modified_base 15: mod_base = OTHER; note = 2'-fluorouridine
  modified_base 16: mod_base = OTHER; note = 2'-O-methyluridine
  modified_base 17: mod_base = OTHER; note = 2'-fluorocytidine
  modified_base 18: mod_base = OTHER; note = 2'-O-methyladenosine
  modified_base 19: mod_base = OTHER; note = 2'-fluoroadenosine with phosphorothioate linkage
  modified_base 20: mod_base = OTHER; note = 2'-O-methyladenosine with phosphorothioate linkage
  modified_base 21: mod_base = OTHER; note = 2'-fluorouridine
tctgcggcaagacgttcaaat

SEQ ID NO: 2846 - RNA, 21 nt, synthetic construct
  source 1..21: mol_type = other RNA
  modified_base 1: mod_base = OTHER; note = 2'-fluorocytidine with phosphorothioate linkage
  modified_base 2: mod_base = OTHER; note = 2'-O-methyluridine with phosphorothioate linkage
  modified_base 3: mod_base = OTHER; note = 2'-fluoroguanosine
  modified_base 4: mod_base = OTHER; note = 2'-O-methylcytidine
  modified_base 5: mod_base = OTHER; note = 2'-fluoroguanosine
  modified_base 6: mod_base = OTHER; note = 2'-O-methylguanosine
  modified_base 7: mod_base = OTHER; note = 2'-fluorocytidine
  modified_base 8: mod_base = OTHER; note = 2'-O-methyladenosine
  modified_base 9: mod_base = OTHER; note = 2'-fluoroadenosine
  modified_base 10: mod_base = OTHER; note = 2'-O-methylguanosine
  modified_base 11: mod_base = OTHER; note = 2'-fluoroadenosine
  modified_base 12: mod_base = OTHER; note = 2'-O-methylcytidine
  modified_base 13: mod_base = OTHER; note = 2'-fluoroguanosine
  modified_base 14: mod_base = OTHER; note = 2'-O-methyluridine
  modified_base 15: mod_base = OTHER; note = 2'-fluorouridine
  modified_base 16: mod_base = OTHER; note = 2'-O-methylcytidine
  modified_base 17: mod_base = OTHER; note = 2'-fluoroadenosine
  modified_base 18: mod_base = OTHER; note = 2'-O-methyladenosine
  modified_base 19: mod_base = OTHER; note = 2'-fluoroadenosine with phosphorothioate linkage
  modified_base 20: mod_base = OTHER; note = 2'-O-methyluridine with phosphorothioate linkage
  modified_base 21: mod_base = OTHER; note = 2'-fluorouridine
ctgcggcaagacgttcaaatt

SEQ ID NO: 2847 - RNA, 21 nt, synthetic construct
  source 1..21: mol_type = other RNA
  modified_base 1: mod_base = OTHER; note = 2'-fluorouridine with phosphorothioate linkage
  modified_base 2: mod_base = OTHER; note = 2'-O-methylguanosine with phosphorothioate linkage
  modified_base 3: mod_base = OTHER; note = 2'-fluorocytidine
  modified_base 4: mod_base = OTHER; note = 2'-O-methylguanosine
  modified_base 5: mod_base = OTHER; note = 2'-fluoroguanosine
  modified_base 6: mod_base = OTHER; note = 2'-O-methylcytidine
  modified_base 7: mod_base = OTHER; note = 2'-fluoroadenosine
  modified_base 8: mod_base = OTHER; note = 2'-O-methyladenosine
  modified_base 9: mod_base = OTHER; note = 2'-fluoroguanosine
  modified_base 10: mod_base = OTHER; note = 2'-O-methyladenosine
  modified_base 11: mod_base = OTHER; note = 2'-fluorocytidine
  modified_base 12: mod_base = OTHER; note = 2'-O-methylguanosine
  modified_base 13: mod_base = OTHER; note = 2'-fluorouridine
  modified_base 14: mod_base = OTHER; note = 2'-O-methyluridine
  modified_base 15: mod_base = OTHER; note = 2'-fluorocytidine
  modified_base 16: mod_base = OTHER; note = 2'-O-methyladenosine
  modified_base 17: mod_base = OTHER; note = 2'-fluoroadenosine
  modified_base 18: mod_base = OTHER; note = 2'-O-methyladenosine
  modified_base 19: mod_base = OTHER; note = 2'-fluorouridine with phosphorothioate linkage
  modified_base 20: mod_base = OTHER; note = 2'-O-methyluridine with phosphorothioate linkage
  modified_base 21: mod_base = OTHER; note = 2'-fluorouridine
tgcggcaagacgttcaaattt

SEQ ID NO: 2848 - RNA, 21 nt, synthetic construct
  source 1..21: mol_type = other RNA
  modified_base 1: mod_base = OTHER; note = 2'-fluoroguanosine with phosphorothioate linkage
  modified_base 2: mod_base = OTHER; note = 2'-O-methylcytidine with phosphorothioate linkage
  modified_base 3: mod_base = OTHER; note = 2'-fluoroguanosine
  modified_base 4: mod_base = OTHER; note = 2'-O-methylguanosine
  modified_base 5: mod_base = OTHER; note = 2'-fluorocytidine
  modified_base 6: mod_base = OTHER; note = 2'-O-methyladenosine
  modified_base 7: mod_base = OTHER; note = 2'-fluoroadenosine
  modified_base 8: mod_base = OTHER; note = 2'-O-methylguanosine
  modified_base 9: mod_base = OTHER; note = 2'-fluoroadenosine
  modified_base 10: mod_base = OTHER; note = 2'-O-methylcytidine
  modified_base 11: mod_base = OTHER; note = 2'-fluoroguanosine
  modified_base 12: mod_base = OTHER; note = 2'-O-methyluridine
  modified_base 13: mod_base = OTHER; note = 2'-fluorouridine
  modified_base 14: mod_base = OTHER; note = 2'-O-methylcytidine
  modified_base 15: mod_base = OTHER; note = 2'-fluoroadenosine
  modified_base 16: mod_base = OTHER; note = 2'-O-methyladenosine
  modified_base 17: mod_base = OTHER; note = 2'-fluoroadenosine
  modified_base 18: mod_base = OTHER; note = 2'-O-methyluridine
  modified_base 19: mod_base = OTHER; note = 2'-fluorouridine with phosphorothioate linkage
  modified_base 20: mod_base = OTHER; note = 2'-O-methyluridine with phosphorothioate linkage
  modified_base 21: mod_base = OTHER; note = 2'-fluorocytidine
gcggcaagacgttcaaatttc

SEQ ID NO: 2849 - RNA, 21 nt, synthetic construct
  source 1..21: mol_type = other RNA
  modified_base 1: mod_base = OTHER; note = 2'-fluorocytidine with phosphorothioate linkage
  modified_base 2: mod_base = OTHER; note = 2'-O-methyladenosine with phosphorothioate linkage
  modified_base 3: mod_base = OTHER; note = 2'-fluorouridine
  modified_base 4: mod_base = OTHER; note = 2'-O-methylguanosine
  modified_base 5: mod_base = OTHER; note = 2'-fluoroadenosine
  modified_base 6: mod_base = OTHER; note = 2'-O-methylcytidine
  modified_base 7: mod_base = OTHER; note = 2'-fluoroguanosine
  modified_base 8: mod_base = OTHER; note = 2'-O-methylguanosine
  modified_base 9: mod_base = OTHER; note = 2'-fluorouridine
  modified_base 10: mod_base = OTHER; note = 2'-O-methylcytidine
  modified_base 11: mod_base = OTHER; note = 2'-fluoroadenosine
  modified_base 12: mod_base = OTHER; note = 2'-O-methyladenosine
  modified_base 13: mod_base = OTHER; note = 2'-fluoroguanosine
  modified_base 14: mod_base = OTHER; note = 2'-O-methyluridine
  modified_base 15: mod_base = OTHER; note = 2'-fluorocytidine
  modified_base 16: mod_base = OTHER; note = 2'-O-methylcytidine
  modified_base 17: mod_base = OTHER; note = 2'-fluoroguanosine
  modified_base 18: mod_base = OTHER; note = 2'-O-methyladenosine
  modified_base 19: mod_base = OTHER; note = 2'-fluorocytidine with phosphorothioate linkage
  modified_base 20: mod_base = OTHER; note = 2'-O-methylguanosine with phosphorothioate linkage
  modified_base 21: mod_base = OTHER; note = 2'-fluoroadenosine
catgacggtcaagtccgacga

SEQ ID NO: 2850 - RNA, 21 nt, synthetic construct
  source 1..21: mol_type = other RNA
  modified_base 1: mod_base = OTHER; note = 2'-fluorocytidine with phosphorothioate linkage
  modified_base 2: mod_base = OTHER; note = 2'-O-methyladenosine with phosphorothioate linkage
  modified_base 3: mod_base = OTHER; note = 2'-fluoroadenosine
  modified_base 4: mod_base = OTHER; note = 2'-O-methylguanosine
  modified_base 5: mod_base = OTHER; note = 2'-fluorouridine
  modified_base 6: mod_base = OTHER; note = 2'-O-methylcytidine
  modified_base 7: mod_base = OTHER; note = 2'-fluorocytidine
  modified_base 8: mod_base = OTHER; note = 2'-O-methylguanosine
  modified_base 9: mod_base = OTHER; note = 2'-fluorouridine
  modified_base 10: mod_base = OTHER; note = 2'-O-methylguanosine
  modified_base 11: mod_base = OTHER; note = 2'-fluoroguanosine
  modified_base 12: mod_base = OTHER; note = 2'-O-methyluridine
  modified_base 13: mod_base = OTHER; note = 2'-fluoroguanosine
  modified_base 14: mod_base = OTHER; note = 2'-O-methylguanosine
  modified_base 15: mod_base = OTHER; note = 2'-fluorocytidine
  modified_base 16: mod_base = OTHER; note = 2'-O-methylcytidine
  modified_base 17: mod_base = OTHER; note = 2'-fluoroadenosine
  modified_base 18: mod_base = OTHER; note = 2'-O-methyladenosine
  modified_base 19: mod_base = OTHER; note = 2'-fluoroguanosine with phosphorothioate linkage
  modified_base 20: mod_base = OTHER; note = 2'-O-methyluridine with phosphorothioate linkage
  modified_base 21: mod_base = OTHER; note = 2'-fluorouridine
caagtccgtggtggccaagtt

SEQ ID NO: 2851 - RNA, 21 nt, synthetic construct
  source 1..21: mol_type = other RNA
  modified_base 1: mod_base = OTHER; note = 2'-fluoroadenosine with phosphorothioate linkage
  modified_base 2: mod_base = OTHER; note = 2'-O-methyladenosine with phosphorothioate linkage
  modified_base 3: mod_base = OTHER; note = 2'-fluoroguanosine
  modified_base 4: mod_base = OTHER; note = 2'-O-methyluridine
  modified_base 5: mod_base = OTHER; note = 2'-fluorocytidine
  modified_base 6: mod_base = OTHER; note = 2'-O-methylcytidine
  modified_base 7: mod_base = OTHER; note = 2'-fluoroguanosine
  modified_base 8: mod_base = OTHER; note = 2'-O-methyluridine
  modified_base 9: mod_base = OTHER; note = 2'-fluoroguanosine
  modified_base 10: mod_base = OTHER; note = 2'-O-methylguanosine
  modified_base 11: mod_base = OTHER; note = 2'-fluorouridine
  modified_base 12: mod_base = OTHER; note = 2'-O-methylguanosine
  modified_base 13: mod_base = OTHER; note = 2'-fluoroguanosine
  modified_base 14: mod_base = OTHER; note = 2'-O-methylcytidine
  modified_base 15: mod_base = OTHER; note = 2'-fluorocytidine
  modified_base 16: mod_base = OTHER; note = 2'-O-methyladenosine
  modified_base 17: mod_base = OTHER; note = 2'-fluoroadenosine
  modified_base 18: mod_base = OTHER; note = 2'-O-methylguanosine
  modified_base 19: mod_base = OTHER; note = 2'-fluorouridine with phosphorothioate linkage
  modified_base 20: mod_base = OTHER; note = 2'-O-methyluridine with phosphorothioate linkage
  modified_base 21: mod_base = OTHER; note = 2'-fluorocytidine
aagtccgtggtggccaagttc

SEQ ID NO: 2852 - RNA, 21 nt, synthetic construct
  source 1..21: mol_type = other RNA
  modified_base 1: mod_base = OTHER; note = 2'-fluorouridine with phosphorothioate linkage
  modified_base 2: mod_base = OTHER; note = 2'-O-methylcytidine with phosphorothioate linkage
  modified_base 3: mod_base = OTHER; note = 2'-fluorocytidine
  modified_base 4: mod_base = OTHER; note = 2'-O-methylguanosine
  modified_base 5: mod_base = OTHER; note = 2'-fluorouridine
  modified_base 6: mod_base = OTHER; note = 2'-O-methylguanosine
  modified_base 7: mod_base = OTHER; note = 2'-fluoroguanosine
  modified_base 8: mod_base = OTHER; note = 2'-O-methyluridine
  modified_base 9: mod_base = OTHER; note = 2'-fluoroguanosine
  modified_base 10: mod_base = OTHER; note = 2'-O-methylguanosine
  modified_base 11: mod_base = OTHER; note = 2'-fluorocytidine
  modified_base 12: mod_base = OTHER; note = 2'-O-methylcytidine
  modified_base 13: mod_base = OTHER; note = 2'-fluoroadenosine
  modified_base 14: mod_base = OTHER; note = 2'-O-methyladenosine
  modified_base 15: mod_base = OTHER; note = 2'-fluoroguanosine
  modified_base 16: mod_base = OTHER; note = 2'-O-methyluridine
  modified_base 17: mod_base = OTHER; note = 2'-fluorouridine
  modified_base 18: mod_base = OTHER; note = 2'-O-methylcytidine
  modified_base 19: mod_base = OTHER; note = 2'-fluoroadenosine with phosphorothioate linkage
  modified_base 20: mod_base = OTHER; note = 2'-O-methyladenosine with phosphorothioate linkage
  modified_base 21: mod_base = OTHER; note = 2'-fluorouridine
tccgtggtggccaagttcaat

SEQ ID NO: 2853 - RNA, 21 nt, synthetic construct
  source 1..21: mol_type = other RNA
  modified_base 1: mod_base = OTHER; note = 2'-fluoroadenosine with phosphorothioate linkage
  modified_base 2: mod_base = OTHER; note = 2'-O-methylguanosine with phosphorothioate linkage
  modified_base 3: mod_base = OTHER; note = 2'-fluoroadenosine
  modified_base 4: mod_base = OTHER; note = 2'-O-methylguanosine
  modified_base 5: mod_base = OTHER; note = 2'-fluoroguanosine
  modified_base 6: mod_base = OTHER; note = 2'-O-methyladenosine
  modified_base 7: mod_base = OTHER; note = 2'-fluoroguanosine
  modified_base 8: mod_base = OTHER; note = 2'-O-methylguanosine
  modified_base 9: mod_base = OTHER; note = 2'-fluoroadenosine
  modified_base 10: mod_base = OTHER; note = 2'-O-methylcytidine
  modified_base 11: mod_base = OTHER; note = 2'-fluoroguanosine
  modified_base 12: mod_base = OTHER; note = 2'-O-methyladenosine
  modified_base 13: mod_base = OTHER; note = 2'-fluorocytidine
  modified_base 14: mod_base = OTHER; note = 2'-O-methylguanosine
  modified_base 15: mod_base = OTHER; note = 2'-fluoroadenosine
  modified_base 16: mod_base = OTHER; note = 2'-O-methylguanosine
  modified_base 17: mod_base = OTHER; note = 2'-fluoroguanosine
  modified_base 18: mod_base = OTHER; note = 2'-O-methyladenosine
  modified_base 19: mod_base = OTHER; note = 2'-fluoroadenosine with phosphorothioate linkage
  modified_base 20: mod_base = OTHER; note = 2'-O-methylguanosine with phosphorothioate linkage
  modified_base 21: mod_base = OTHER; note = 2'-fluoroadenosine
agaggaggacgacgaggaaga

SEQ ID NO: 2854 - RNA, 21 nt, synthetic construct
  source 1..21: mol_type = other RNA
  modified_base 1: mod_base = OTHER; note = 2'-fluoroguanosine with phosphorothioate linkage
  modified_base 2: mod_base = OTHER; note = 2'-O-methyladenosine with phosphorothioate linkage
  modified_base 3: mod_base = OTHER; note = 2'-fluoroguanosine
  modified_base 4: mod_base = OTHER; note = 2'-O-methylguanosine
  modified_base 5: mod_base = OTHER; note = 2'-fluoroadenosine
  modified_base 6: mod_base = OTHER; note = 2'-O-methylguanosine
  modified_base 7: mod_base = OTHER; note = 2'-fluoroguanosine
  modified_base 8: mod_base = OTHER; note = 2'-O-methyladenosine
  modified_base 9: mod_base = OTHER; note = 2'-fluorocytidine
  modified_base 10: mod_base = OTHER; note = 2'-O-methylguanosine
  modified_base 11: mod_base = OTHER; note = 2'-fluoroadenosine
  modified_base 12: mod_base = OTHER; note = 2'-O-methylcytidine
  modified_base 13: mod_base = OTHER; note = 2'-fluoroguanosine
  modified_base 14: mod_base = OTHER; note = 2'-O-methyladenosine
  modified_base 15: mod_base = OTHER; note = 2'-fluoroguanosine
  modified_base 16: mod_base = OTHER; note = 2'-O-methylguanosine
  modified_base 17: mod_base = OTHER; note = 2'-fluoroadenosine
  modified_base 18: mod_base = OTHER; note = 2'-O-methyladenosine
  modified_base 19: mod_base = OTHER; note = 2'-fluoroguanosine with phosphorothioate linkage
  modified_base 20: mod_base = OTHER; note = 2'-O-methyladenosine with phosphorothioate linkage
  modified_base 21: mod_base = OTHER; note = 2'-fluorouridine
gaggaggacgacgaggaagat

SEQ ID NO: 2855 - RNA, 21 nt, synthetic construct
  source 1..21: mol_type = other RNA
  modified_base 1: mod_base = OTHER; note = 2'-fluoroguanosine with phosphorothioate linkage
  modified_base 2: mod_base = OTHER; note = 2'-O-methylguanosine with phosphorothioate linkage
  modified_base 3: mod_base = OTHER; note = 2'-fluoroadenosine
  modified_base 4: mod_base = OTHER; note = 2'-O-methylguanosine
  modified_base 5: mod_base = OTHER; note = 2'-fluorocytidine
  modified_base 6: mod_base = OTHER; note = 2'-O-methyluridine
  modified_base 7: mod_base = OTHER; note = 2'-fluoroguanosine
  modified_base 8: mod_base = OTHER; note = 2'-O-methyladenosine
  modified_base 9: mod_base = OTHER; note = 2'-fluorocytidine
  modified_base 10: mod_base = OTHER; note = 2'-O-methylguanosine
  modified_base 11: mod_base = OTHER; note = 2'-fluoroguanosine
  modified_base 12: mod_base = OTHER; note = 2'-O-methyladenosine
  modified_base 13: mod_base = OTHER; note = 2'-fluoroguanosine
  modified_base 14: mod_base = OTHER; note = 2'-O-methyladenosine
  modified_base 15: mod_base = OTHER; note = 2'-fluoroguanosine
  modified_base 16: mod_base = OTHER; note = 2'-O-methylcytidine
  modified_base 17: mod_base = OTHER; note = 2'-fluoroguanosine
  modified_base 18: mod_base = OTHER; note = 2'-O-methyladenosine
  modified_base 19: mod_base = OTHER; note = 2'-fluoroguanosine with phosphorothioate linkage
  modified_base 20: mod_base = OTHER; note = 2'-O-methyladenosine with phosphorothioate linkage
  modified_base 21: mod_base = OTHER; note = 2'-fluorouridine
ggagctgacggagagcgagat

SEQ ID NO: 2856 - RNA, 21 nt, synthetic construct
  source 1..21: mol_type = other RNA
  modified_base 1: mod_base = OTHER; note = 2'-fluoroadenosine with phosphorothioate linkage
  modified_base 2: mod_base = OTHER; note = 2'-O-methylguanosine with phosphorothioate linkage
  modified_base 3: mod_base = OTHER; note = 2'-fluorocytidine
  modified_base 4: mod_base = OTHER; note = 2'-O-methyluridine
  modified_base 5: mod_base = OTHER; note = 2'-fluoroguanosine
  modified_base 6: mod_base = OTHER; note = 2'-O-methyladenosine
  modified_base 7: mod_base = OTHER; note = 2'-fluorocytidine
  modified_base 8: mod_base = OTHER; note = 2'-O-methylguanosine
  modified_base 9: mod_base = OTHER; note = 2'-fluoroguanosine
  modified_base 10: mod_base = OTHER; note = 2'-O-methyladenosine
  modified_base 11: mod_base = OTHER; note = 2'-fluoroguanosine
  modified_base 12: mod_base = OTHER; note = 2'-O-methyladenosine
  modified_base 13: mod_base = OTHER; note = 2'-fluoroguanosine
  modified_base 14: mod_base = OTHER; note = 2'-O-methylcytidine
  modified_base 15: mod_base = OTHER; note = 2'-fluoroguanosine
  modified_base 16: mod_base = OTHER; note = 2'-O-methyladenosine
  modified_base 17: mod_base = OTHER; note = 2'-fluoroguanosine
  modified_base 18: mod_base = OTHER; note = 2'-O-methyladenosine
  modified_base 19: mod_base = OTHER; note = 2'-fluoroguanosine with phosphorothioate linkage
  modified_base 20: mod_base = OTHER; note = 2'-O-methylguanosine with phosphorothioate linkage
  modified_base 21: mod_base = OTHER; note = 2'-fluorouridine
agctgacggagagcgagaggt

SEQ ID NO: 2857 - RNA, 21 nt, synthetic construct
  source 1..21: mol_type = other RNA
  modified_base 1: mod_base = OTHER; note = 2'-fluoroguanosine with phosphorothioate linkage
  modified_base 2: mod_base = OTHER; note = 2'-O-methylcytidine with phosphorothioate linkage
  modified_base 3: mod_base = OTHER; note = 2'-fluorouridine
  modified_base 4: mod_base = OTHER; note = 2'-O-methylguanosine
  modified_base 5: mod_base = OTHER; note = 2'-fluoroadenosine
  modified_base 6: mod_base = OTHER; note = 2'-O-methylcytidine
  modified_base 7: mod_base = OTHER; note = 2'-fluoroguanosine
  modified_base 8: mod_base = OTHER; note = 2'-O-methylguanosine
  modified_base 9: mod_base = OTHER; note = 2'-fluoroadenosine
  modified_base 10: mod_base = OTHER; note = 2'-O-methylguanosine
  modified_base 11: mod_base = OTHER; note = 2'-fluoroadenosine
  modified_base 12: mod_base = OTHER; note = 2'-O-methylguanosine
  modified_base 13: mod_base = OTHER; note = 2'-fluorocytidine
  modified_base 14: mod_base = OTHER; note = 2'-O-methylguanosine
  modified_base 15: mod_base = OTHER; note = 2'-fluoroadenosine
  modified_base 16: mod_base = OTHER; note = 2'-O-methylguanosine
  modified_base 17: mod_base = OTHER; note = 2'-fluoroadenosine
  modified_base 18: mod_base = OTHER; note = 2'-O-methylguanosine
  modified_base 19: mod_base = OTHER; note = 2'-fluoroguanosine with phosphorothioate linkage
  modified_base 20: mod_base = OTHER; note = 2'-O-methylguanosine with phosphorothioate linkage
  modified_base 21: mod_base = OTHER; note = 2'-fluorouridine
gctgacggagagcgagagggt

SEQ ID NO: 2858 - RNA, 21 nt, synthetic construct
  source 1..21: mol_type = other RNA
  modified_base 1: mod_base = OTHER; note = 2'-fluorocytidine with phosphorothioate linkage
  modified_base 2: mod_base = OTHER; note = 2'-O-methyluridine with phosphorothioate linkage
  modified_base 3: mod_base = OTHER; note = 2'-fluoroguanosine
  modified_base 4: mod_base = OTHER; note = 2'-O-methyladenosine
  modified_base 5: mod_base = OTHER; note = 2'-fluorocytidine
  modified_base 6: mod_base = OTHER; note = 2'-O-methylguanosine
  modified_base 7: mod_base = OTHER; note = 2'-fluoroguanosine
  modified_base 8: mod_base = OTHER; note = 2'-O-methyladenosine
  modified_base 9: mod_base = OTHER; note = 2'-fluoroguanosine
  modified_base 10: mod_base = OTHER; note = 2'-O-methyladenosine
  modified_base 11: mod_base = OTHER; note = 2'-fluoroguanosine
  modified_base 12: mod_base = OTHER; note = 2'-O-methylcytidine
  modified_base 13: mod_base = OTHER; note = 2'-fluoroguanosine
  modified_base 14: mod_base = OTHER; note = 2'-O-methyladenosine
  modified_base 15: mod_base = OTHER; note = 2'-fluoroguanosine
  modified_base 16: mod_base = OTHER; note = 2'-O-methyladenosine
  modified_base 17: mod_base = OTHER; note = 2'-fluoroguanosine
  modified_base 18: mod_base = OTHER; note = 2'-O-methylguanosine
  modified_base 19: mod_base = OTHER; note = 2'-fluoroguanosine with phosphorothioate linkage
  modified_base 20: mod_base = OTHER; note = 2'-O-methyluridine with phosphorothioate linkage
  modified_base 21: mod_base = OTHER; note = 2'-fluorouridine
ctgacggagagcgagagggtt

SEQ ID NO: 2859 - RNA, 21 nt, synthetic construct
  source 1..21: mol_type = other RNA
  modified_base 1: mod_base = OTHER; note = 2'-fluorocytidine with phosphorothioate linkage
  modified_base 2: mod_base = OTHER; note = 2'-O-methyladenosine with phosphorothioate linkage
  modified_base 3: mod_base = OTHER; note = 2'-fluorouridine
  modified_base 4: mod_base = OTHER; note = 2'-O-methylguanosine
  modified_base 5: mod_base = OTHER; note = 2'-fluorocytidine
  modified_base 6: mod_base = OTHER; note = 2'-O-methyladenosine
  modified_base 7: mod_base = OTHER; note = 2'-fluoroguanosine
  modified_base 8: mod_base = OTHER; note = 2'-O-methylcytidine
  modified_base 9: mod_base = OTHER; note = 2'-fluoroadenosine
  modified_base 10: mod_base = OTHER; note = 2'-O-methylcytidine
  modified_base 11: mod_base = OTHER; note = 2'-fluorouridine
  modified_base 12: mod_base = OTHER; note = 2'-O-methyluridine
  modified_base 13: mod_base = OTHER; note = 2'-fluorocytidine
  modified_base 14: mod_base = OTHER; note = 2'-O-methyladenosine
  modified_base 15: mod_base = OTHER; note = 2'-fluoroguanosine
  modified_base 16: mod_base = OTHER; note = 2'-O-methylcytidine
  modified_base 17: mod_base = OTHER; note = 2'-fluoroguanosine
  modified_base 18: mod_base = OTHER; note = 2'-O-methyladenosine
  modified_base 19: mod_base = OTHER; note = 2'-fluoroguanosine with phosphorothioate linkage
  modified_base 20: mod_base = OTHER; note = 2'-O-methylguanosine with phosphorothioate linkage
  modified_base 21: mod_base = OTHER; note = 2'-fluorocytidine
catgcagcacttcagcgaggc

SEQ ID NO: 2860 - RNA, 21 nt, synthetic construct
  source 1..21: mol_type = other RNA
  modified_base 1: mod_base = OTHER; note = 2'-fluorouridine with phosphorothioate linkage
  modified_base 2: mod_base = OTHER; note = 2'-O-methylguanosine with phosphorothioate linkage
  modified_base 3: mod_base = OTHER; note = 2'-fluorocytidine
  modified_base 4: mod_base = OTHER; note = 2'-O-methyladenosine
  modified_base 5: mod_base = OTHER; note = 2'-fluoroguanosine
  modified_base 6: mod_base = OTHER; note = 2'-O-methylcytidine
  modified_base 7: mod_base = OTHER; note = 2'-fluoroadenosine
  modified_base 8: mod_base = OTHER; note = 2'-O-methylcytidine
  modified_base 9: mod_base = OTHER; note = 2'-fluorouridine
  modified_base 10: mod_base = OTHER; note = 2'-O-methyluridine
  modified_base 11: mod_base = OTHER; note = 2'-fluorocytidine
  modified_base 12: mod_base = OTHER; note = 2'-O-methyladenosine
  modified_base 13: mod_base = OTHER; note = 2'-fluoroguanosine
  modified_base 14: mod_base = OTHER; note = 2'-O-methylcytidine
  modified_base 15: mod_base = OTHER; note = 2'-fluoroguanosine
  modified_base 16: mod_base = OTHER; note = 2'-O-methyladenosine
  modified_base 17: mod_base = OTHER; note = 2'-fluoroguanosine
  modified_base 18: mod_base = OTHER; note = 2'-O-methylguanosine
  modified_base 19: mod_base = OTHER; note = 2'-fluorocytidine with phosphorothioate linkage
  modified_base 20: mod_base = OTHER; note = 2'-O-methylcytidine with phosphorothioate linkage
  modified_base 21: mod_base = OTHER; note = 2'-fluorouridine
tgcagcacttcagcgaggcct

SEQ ID NO: 2861 - RNA, 21 nt, synthetic construct
  source 1..21: mol_type = other RNA
  modified_base 1: mod_base = OTHER; note = 2'-fluorouridine with phosphorothioate linkage
  modified_base 2: mod_base = OTHER; note = 2'-O-methylcytidine with phosphorothioate linkage
  modified_base 3: mod_base = OTHER; note = 2'-fluoroadenosine
  modified_base 4: mod_base = OTHER; note = 2'-O-methylguanosine
  modified_base 5: mod_base = OTHER; note = 2'-fluorocytidine
  modified_base 6: mod_base = OTHER; note = 2'-O-methylguanosine
  modified_base 7: mod_base = OTHER; note = 2'-fluoroadenosine
  modified_base 8: mod_base = OTHER; note = 2'-O-methylguanosine
  modified_base 9: mod_base = OTHER; note = 2'-fluoroguanosine
  modified_base 10: mod_base = OTHER; note = 2'-O-methylcytidine
  modified_base 11: mod_base = OTHER; note = 2'-fluorocytidine
  modified_base 12: mod_base = OTHER; note = 2'-O-methyluridine
  modified_base 13: mod_base = OTHER; note = 2'-fluorouridine
  modified_base 14: mod_base = OTHER; note = 2'-O-methylcytidine
  modified_base 15: mod_base = OTHER; note = 2'-fluorocytidine
  modified_base 16: mod_base = OTHER; note = 2'-O-methyladenosine
  modified_base 17: mod_base = OTHER; note = 2'-fluorocytidine
  modified_base 18: mod_base = OTHER; note = 2'-O-methylcytidine
  modified_base 19: mod_base = OTHER; note = 2'-fluoroadenosine with phosphorothioate linkage
  modified_base 20: mod_base = OTHER; note = 2'-O-methylguanosine with phosphorothioate linkage
  modified_base 21: mod_base = OTHER; note = 2'-fluorouridine
tcagcgaggccttccaccagt

SEQ ID NO: 2862 - RNA, 21 nt, synthetic construct
  source 1..21: mol_type = other RNA
  modified_base 1: mod_base = OTHER; note = 2'-fluoroadenosine with phosphorothioate linkage
  modified_base 2: mod_base = OTHER; note = 2'-O-methylcytidine with phosphorothioate linkage
  modified_base 3: mod_base = OTHER; note = 2'-fluorocytidine
  modified_base 4: mod_base = OTHER; note = 2'-O-methylguanosine
  modified_base 5: mod_base = OTHER; note = 2'-fluorocytidine
  modified_base 6: mod_base = OTHER; note = 2'-O-methyladenosine
  modified_base 7: mod_base = OTHER; note = 2'-fluorouridine
  modified_base 8: mod_base = OTHER; note = 2'-O-methyladenosine
  modified_base 9: mod_base = OTHER; note = 2'-fluoroguanosine
  modified_base 10: mod_base = OTHER; note = 2'-O-methyladenosine
  modified_base 11: mod_base = OTHER; note = 2'-fluorocytidine
  modified_base 12: mod_base = OTHER; note = 2'-O-methylguanosine
  modified_base 13: mod_base = OTHER; note = 2'-fluoroadenosine
  modified_base 14: mod_base = OTHER; note = 2'-O-methyluridine
  modified_base 15: mod_base = OTHER; note = 2'-fluoroguanosine
  modified_base 16: mod_base = OTHER; note = 2'-O-methylguanosine
  modified_base 17: mod_base = OTHER; note = 2'-fluorocytidine
  modified_base 18: mod_base = OTHER; note = 2'-O-methyladenosine
  modified_base 19: mod_base = OTHER; note = 2'-fluorocytidine with phosphorothioate linkage
  modified_base 20: mod_base = OTHER; note = 2'-O-methyluridine with phosphorothioate linkage
  modified_base 21: mod_base = OTHER; note = 2'-fluorouridine
accgcatagacgatggcactt

SEQ ID NO: 2863 - RNA, 21 nt, synthetic construct
  source 1..21: mol_type = other RNA
  modified_base 1: mod_base = OTHER; note = 2'-fluorocytidine with phosphorothioate linkage
  modified_base 2: mod_base = OTHER; note = 2'-O-methylguanosine with phosphorothioate linkage
  modified_base 3: mod_base = OTHER; note = 2'-fluorocytidine
  modified_base 4: mod_base = OTHER; note = 2'-O-methyladenosine
  modified_base 5: mod_base = OTHER; note = 2'-fluorouridine
  modified_base 6: mod_base = OTHER; note = 2'-O-methyladenosine
  modified_base 7: mod_base = OTHER; note = 2'-fluoroguanosine
  modified_base 8: mod_base = OTHER; note = 2'-O-methyladenosine
  modified_base 9: mod_base = OTHER; note = 2'-fluorocytidine
  modified_base 10: mod_base = OTHER; note = 2'-O-methylguanosine
  modified_base 11: mod_base = OTHER; note = 2'-fluoroadenosine
  modified_base 12: mod_base = OTHER; note = 2'-O-methyluridine
  modified_base 13: mod_base = OTHER; note = 2'-fluoroguanosine
  modified_base 14: mod_base = OTHER; note = 2'-O-methylguanosine
  modified_base 15: mod_base = OTHER; note = 2'-fluorocytidine
  modified_base 16: mod_base = OTHER; note = 2'-O-methyladenosine
  modified_base 17: mod_base = OTHER; note = 2'-fluorocytidine
  modified_base 18: mod_base = OTHER; note = 2'-O-methyluridine
  modified_base 19: mod_base = OTHER; note = 2'-fluoroguanosine with phosphorothioate linkage
  modified_base 20: mod_base = OTHER; note = 2'-O-methyluridine with phosphorothioate linkage
  modified_base 21: mod_base = OTHER; note = 2'-fluorouridine
cgcatagacgatggcactgtt

SEQ ID NO: 2864 - RNA, 21 nt, synthetic construct
  source 1..21: mol_type = other RNA
  modified_base 1: mod_base = OTHER; note = 2'-fluorocytidine with phosphorothioate linkage
  modified_base 2: mod_base = OTHER; note = 2'-O-methyladenosine with phosphorothioate linkage
  modified_base 3: mod_base = OTHER; note = 2'-fluorouridine
  modified_base 4: mod_base = OTHER; note = 2'-O-methyladenosine
  modified_base 5: mod_base = OTHER; note = 2'-fluoroguanosine
  modified_base 6: mod_base = OTHER; note = 2'-O-methyladenosine
  modified_base 7: mod_base = OTHER; note = 2'-fluorocytidine
  modified_base 8: mod_base = OTHER; note = 2'-O-methylguanosine
  modified_base 9: mod_base = OTHER; note = 2'-fluoroadenosine
  modified_base 10: mod_base = OTHER; note = 2'-O-methyluridine
  modified_base 11: mod_base = OTHER; note = 2'-fluoroguanosine
  modified_base 12: mod_base = OTHER; note = 2'-O-methylguanosine
  modified_base 13: mod_base = OTHER; note = 2'-fluorocytidine
  modified_base 14: mod_base = OTHER; note = 2'-O-methyladenosine
  modified_base 15: mod_base = OTHER; note = 2'-fluorocytidine
  modified_base 16: mod_base = OTHER; note = 2'-O-methyluridine
  modified_base 17: mod_base = OTHER; note = 2'-fluoroguanosine
  modified_base 18: mod_base = OTHER; note = 2'-O-methyluridine
  modified_base 19: mod_base = OTHER; note = 2'-fluorouridine with phosphorothioate linkage
  modified_base 20: mod_base = OTHER; note = 2'-O-methyladenosine with phosphorothioate linkage
  modified_base 21: mod_base = OTHER; note = 2'-fluoroadenosine
catagacgatggcactgttaa

SEQ ID NO: 2865 - RNA, 21 nt, synthetic construct
  source 1..21: mol_type = other RNA
  modified_base 1: mod_base = OTHER; note = 2'-fluoroadenosine with phosphorothioate linkage
  modified_base 2: mod_base = OTHER; note = 2'-O-methylguanosine with phosphorothioate linkage
  modified_base 3: mod_base = OTHER; note = 2'-fluoroguanosine
  modified_base 4: mod_base = OTHER; note = 2'-O-methylcytidine
  modified_base 5: mod_base = OTHER; note = 2'-fluoroadenosine
  modified_base 6: mod_base = OTHER; note = 2'-O-methylguanosine
  modified_base 7: mod_base = OTHER; note = 2'-fluorocytidine
  modified_base 8: mod_base = OTHER; note = 2'-O-methyluridine
  modified_base 9: mod_base = OTHER; note = 2'-fluorocytidine
  modified_base 10: mod_base = OTHER; note = 2'-O-methyladenosine
  modified_base 11: mod_base = OTHER; note = 2'-fluoroadenosine
  modified_base 12: mod_base = OTHER; note = 2'-O-methyladenosine
  modified_base 13: mod_base = OTHER; note = 2'-fluoroguanosine
  modified_base 14: mod_base = OTHER; note = 2'-O-methyladenosine
  modified_base 15: mod_base = OTHER; note = 2'-fluorouridine
  modified_base 16: mod_base = OTHER; note = 2'-O-methylcytidine
  modified_base 17: mod_base = OTHER; note = 2'-fluorocytidine
  modified_base 18: mod_base = OTHER; note = 2'-O-methylcytidine
  modified_base 19: mod_base = OTHER; note = 2'-fluorouridine with phosphorothioate linkage
  modified_base 20: mod_base = OTHER; note = 2'-O-methyluridine with phosphorothioate linkage
  modified_base 21: mod_base = OTHER; note = 2'-fluorocytidine
aggcagctcaaagatcccttc

SEQ ID NO: 2866 - RNA, 21 nt, synthetic construct
  source 1..21: mol_type = other RNA
  modified_base 1: mod_base = OTHER; note = 2'-fluoroguanosine with phosphorothioate linkage
  modified_base 2: mod_base = OTHER; note = 2'-O-methylguanosine with phosphorothioate linkage
  modified_base 3: mod_base = OTHER; note = 2'-fluorocytidine
  modified_base 4: mod_base = OTHER; note = 2'-O-methyladenosine
  modified_base 5: mod_base = OTHER; note = 2'-fluoroguanosine
  modified_base 6: mod_base = OTHER; note = 2'-O-methylcytidine
  modified_base 7: mod_base = OTHER; note = 2'-fluorouridine
  modified_base 8: mod_base = OTHER; note = 2'-O-methylcytidine
  modified_base 9: mod_base = OTHER; note = 2'-fluoroadenosine
  modified_base 10: mod_base = OTHER; note = 2'-O-methyladenosine
  modified_base 11: mod_base = OTHER; note = 2'-fluoroadenosine
  modified_base 12: mod_base = OTHER; note = 2'-O-methylguanosine
  modified_base 13: mod_base = OTHER; note = 2'-fluoroadenosine
  modified_base 14: mod_base = OTHER; note = 2'-O-methyluridine
  modified_base 15: mod_base = OTHER; note = 2'-fluorocytidine
  modified_base 16: mod_base = OTHER; note = 2'-O-methylcytidine
  modified_base 17: mod_base = OTHER; note = 2'-fluorocytidine
  modified_base 18: mod_base = OTHER; note = 2'-O-methyluridine
  modified_base 19: mod_base = OTHER; note = 2'-fluorouridine with phosphorothioate linkage
  modified_base 20: mod_base = OTHER; note = 2'-O-methylcytidine with phosphorothioate linkage
  modified_base 21: mod_base = OTHER; note = 2'-fluorocytidine
ggcagctcaaagatcccttcc

SEQ ID NO: 2867 - RNA, 21 nt, synthetic construct
  source 1..21: mol_type = other RNA
  modified_base 1: mod_base = OTHER; note = 2'-fluoroguanosine with phosphorothioate linkage
  modified_base 2: mod_base = OTHER; note = 2'-O-methylcytidine with phosphorothioate linkage
  modified_base 3: mod_base = OTHER; note = 2'-fluoroadenosine
  modified_base 4: mod_base = OTHER; note = 2'-O-methylguanosine
  modified_base 5: mod_base = OTHER; note = 2'-fluorocytidine
  modified_base 6: mod_base = OTHER; note = 2'-O-methyluridine
  modified_base 7: mod_base = OTHER; note = 2'-fluorocytidine
  modified_base 8: mod_base = OTHER; note = 2'-O-methyladenosine
  modified_base 9: mod_base = OTHER; note = 2'-fluoroadenosine
  modified_base 10: mod_base = OTHER; note = 2'-O-methyladenosine
  modified_base 11: mod_base = OTHER; note = 2'-fluoroguanosine
  modified_base 12: mod_base = OTHER; note = 2'-O-methyladenosine
  modified_base 13: mod_base = OTHER; note = 2'-fluorouridine
  modified_base 14: mod_base = OTHER; note = 2'-O-methylcytidine
  modified_base 15: mod_base = OTHER; note = 2'-fluorocytidine
  modified_base 16: mod_base = OTHER; note = 2'-O-methylcytidine
  modified_base 17: mod_base = OTHER; note = 2'-fluorouridine
  modified_base 18: mod_base = OTHER; note = 2'-O-methyluridine
  modified_base 19: mod_base = OTHER; note = 2'-fluorocytidine with phosphorothioate linkage
  modified_base 20: mod_base = OTHER; note = 2'-O-methylcytidine with phosphorothioate linkage
  modified_base 21: mod_base = OTHER; note = 2'-fluorouridine
gcagctcaaagatcccttcct

SEQ ID NO: 2868 - RNA, 21 nt, synthetic construct
  source 1..21: mol_type = other RNA
  modified_base 1: mod_base = OTHER; note = 2'-fluorouridine with phosphorothioate linkage
  modified_base 2: mod_base = OTHER; note = 2'-O-methylcytidine with phosphorothioate linkage
  modified_base 3: mod_base = OTHER; note = 2'-fluoroguanosine
  modified_base 4: mod_base = OTHER; note = 2'-O-methylguanosine
  modified_base 5: mod_base = OTHER; note = 2'-fluoroadenosine
  modified_base 6: mod_base = OTHER; note = 2'-O-methylguanosine
  modified_base 7: mod_base = OTHER; note = 2'-fluoroadenosine
  modified_base 8: mod_base = OTHER; note = 2'-O-methylcytidine
  modified_base 9: mod_base = OTHER; note = 2'-fluorouridine
  modified_base 10: mod_base = OTHER; note = 2'-O-methylcytidine
  modified_base 11: mod_base = OTHER; note = 2'-fluorocytidine
  modified_base 12: mod_base = OTHER; note = 2'-O-methyladenosine
  modified_base 13: mod_base = OTHER; note = 2'-fluoroguanosine
  modified_base 14: mod_base = OTHER; note = 2'-O-methyladenosine
  modified_base 15: mod_base = OTHER; note = 2'-fluorocytidine
  modified_base 16: mod_base = OTHER; note = 2'-O-methyladenosine
  modified_base 17: mod_base = OTHER; note = 2'-fluoroadenosine
  modified_base 18: mod_base = OTHER; note = 2'-O-methyluridine
  modified_base 19: mod_base = OTHER; note = 2'-fluorocytidine with phosphorothioate linkage
  modified_base 20: mod_base = OTHER; note = 2'-O-methylguanosine with phosphorothioate linkage
  modified_base 21: mod_base = OTHER; note = 2'-fluorocytidine
tcggagactccagacaatcgc

SEQ ID NO: 2869 - RNA, 21 nt, synthetic construct
  source 1..21: mol_type = other RNA
  modified_base 1: mod_base = OTHER; note = 2'-fluorocytidine with phosphorothioate linkage
  modified_base 2: mod_base = OTHER; note = 2'-O-methylguanosine with phosphorothioate linkage
  modified_base 3: mod_base = OTHER; note = 2'-fluoroguanosine
  modified_base 4: mod_base = OTHER; note = 2'-O-methyladenosine
  modified_base 5: mod_base = OTHER; note = 2'-fluoroguanosine
  modified_base 6: mod_base = OTHER; note = 2'-O-methyladenosine
  modified_base 7: mod_base = OTHER; note = 2'-fluorocytidine
  modified_base 8: mod_base = OTHER; note = 2'-O-methyluridine
  modified_base 9: mod_base = OTHER; note = 2'-fluorocytidine
  modified_base 10: mod_base = OTHER; note = 2'-O-methylcytidine
  modified_base 11: mod_base = OTHER; note = 2'-fluoroadenosine
  modified_base 12: mod_base = OTHER; note = 2'-O-methylguanosine
  modified_base 13: mod_base = OTHER; note = 2'-fluoroadenosine
  modified_base 14: mod_base = OTHER; note = 2'-O-methylcytidine
  modified_base 15: mod_base = OTHER; note = 2'-fluoroadenosine
  modified_base 16: mod_base = OTHER; note = 2'-O-methyladenosine
  modified_base 17: mod_base = OTHER; note = 2'-fluorouridine
  modified_base 18: mod_base = OTHER; note = 2'-O-methylcytidine
  modified_base 19: mod_base = OTHER; note = 2'-fluoroguanosine with phosphorothioate linkage
  modified_base 20: mod_base = OTHER; note = 2'-O-methylcytidine with phosphorothioate linkage
  modified_base 21: mod_base = OTHER; note = 2'-fluorocytidine
cggagactccagacaatcgcc

SEQ ID NO: 2870 - RNA, 21 nt, synthetic construct
  source 1..21: mol_type = other RNA
  modified_base 1: mod_base = OTHER; note = 2'-fluoroguanosine with phosphorothioate linkage
  modified_base 2: mod_base = OTHER; note = 2'-O-methylguanosine with phosphorothioate linkage
  modified_base 3: mod_base = OTHER; note = 2'-fluoroadenosine
  modified_base 4: mod_base = OTHER; note = 2'-O-methylguanosine
  modified_base 5: mod_base = OTHER; note = 2'-fluoroadenosine
  modified_base 6: mod_base = OTHER; note = 2'-O-methylcytidine
  modified_base 7: mod_base = OTHER; note = 2'-fluorouridine
  modified_base 8: mod_base = OTHER; note = 2'-O-methylcytidine
  modified_base 9: mod_base = OTHER; note = 2'-fluorocytidine
  modified_base 10: mod_base = OTHER; note = 2'-O-methyladenosine
  modified_base 11: mod_base = OTHER; note = 2'-fluoroguanosine
  modified_base 12: mod_base = OTHER; note = 2'-O-methyladenosine
  modified_base 13: mod_base = OTHER; note = 2'-fluorocytidine
  modified_base 14: mod_base = OTHER; note = 2'-O-methyladenosine
  modified_base 15: mod_base = OTHER; note = 2'-fluoroadenosine
  modified_base 16: mod_base = OTHER; note = 2'-O-methyluridine
  modified_base 17: mod_base = OTHER; note = 2'-fluorocytidine
  modified_base 18: mod_base = OTHER; note = 2'-O-methylguanosine
  modified_base 19: mod_base = OTHER; note = 2'-fluorocytidine with phosphorothioate linkage
  modified_base 20: mod_base = OTHER; note = 2'-O-methylcytidine with phosphorothioate linkage
  modified_base 21: mod_base = OTHER; note = 2'-fluorouridine
ggagactccagacaatcgcct

SEQ ID NO: 2871 - RNA, 21 nt, synthetic construct
  source 1..21: mol_type = other RNA
  modified_base 1: mod_base = OTHER; note = 2'-fluoroguanosine with phosphorothioate linkage
  modified_base 2: mod_base = OTHER; note = 2'-O-methyladenosine with phosphorothioate linkage
  modified_base 3: mod_base = OTHER; note = 2'-fluoroguanosine
  modified_base 4: mod_base = OTHER; note = 2'-O-methyladenosine
  modified_base 5: mod_base = OTHER; note = 2'-fluorocytidine
  modified_base 6: mod_base = OTHER; note = 2'-O-methyluridine
  modified_base 7: mod_base = OTHER; note = 2'-fluorocytidine
  modified_base 8: mod_base = OTHER; note = 2'-O-methylcytidine
  modified_base 9: mod_base = OTHER; note = 2'-fluoroadenosine
  modified_base 10: mod_base = OTHER; note = 2'-O-methylguanosine
  modified_base 11: mod_base = OTHER; note = 2'-fluoroadenosine
  modified_base 12: mod_base = OTHER; note = 2'-O-methylcytidine
  modified_base 13: mod_base = OTHER; note = 2'-fluoroadenosine
  modified_base 14: mod_base = OTHER; note = 2'-O-methyladenosine
  modified_base 15: mod_base = OTHER; note = 2'-fluorouridine
  modified_base 16: mod_base = OTHER; note = 2'-O-methylcytidine
  modified_base 17: mod_base = OTHER; note = 2'-fluoroguanosine
  modified_base 18: mod_base = OTHER; note = 2'-O-methylcytidine
  modified_base 19: mod_base = OTHER; note = 2'-fluorocytidine with phosphorothioate linkage
  modified_base 20: mod_base = OTHER; note = 2'-O-methyluridine with phosphorothioate linkage
  modified_base 21: mod_base = OTHER; note = 2'-fluorouridine
gagactccagacaatcgcctt

SEQ ID NO: 2872 - RNA, 21 nt, synthetic construct
  source 1..21: mol_type = other RNA
  modified_base 1: mod_base = OTHER; note = 2'-fluoroadenosine with phosphorothioate linkage
  modified_base 2: mod_base = OTHER; note = 2'-O-methylguanosine with phosphorothioate linkage
  modified_base 3: mod_base = OTHER; note = 2'-fluoroadenosine
  modified_base 4: mod_base = OTHER; note = 2'-O-methylcytidine
  modified_base 5: mod_base = OTHER; note = 2'-fluorouridine
  modified_base 6: mod_base = OTHER; note = 2'-O-methylcytidine
  modified_base 7: mod_base = OTHER; note = 2'-fluorocytidine
  modified_base 8: mod_base = OTHER; note = 2'-O-methyladenosine
  modified_base 9: mod_base = OTHER; note = 2'-fluoroguanosine
  modified_base 10: mod_base = OTHER; note = 2'-O-methyladenosine
  modified_base 11: mod_base = OTHER; note = 2'-fluorocytidine
  modified_base 12: mod_base = OTHER; note = 2'-O-methyladenosine
  modified_base 13: mod_base = OTHER; note = 2'-fluoroadenosine
  modified_base 14: mod_base = OTHER; note = 2'-O-methyluridine
  modified_base 15: mod_base = OTHER; note = 2'-fluorocytidine
  modified_base 16: mod_base = OTHER; note = 2'-O-methylguanosine
  modified_base 17: mod_base = OTHER; note = 2'-fluorocytidine
  modified_base 18: mod_base = OTHER; note = 2'-O-methylcytidine
  modified_base 19: mod_base = OTHER; note = 2'-fluorouridine with phosphorothioate linkage
  modified_base 20: mod_base = OTHER; note = 2'-O-methyluridine with phosphorothioate linkage
  modified_base 21: mod_base = OTHER; note = 2'-fluorouridine
agactccagacaatcgccttt

SEQ ID NO: 2873 - RNA, 21 nt, synthetic construct
  source 1..21: mol_type = other RNA
  modified_base 1: mod_base = OTHER; note = 2'-fluoroguanosine with phosphorothioate linkage
  modified_base 2: mod_base = OTHER; note = 2'-O-methyladenosine with phosphorothioate linkage
  modified_base 3: mod_base = OTHER; note = 2'-fluorocytidine
  modified_base 4: mod_base = OTHER; note = 2'-O-methyluridine
  modified_base 5: mod_base = OTHER; note = 2'-fluorocytidine
  modified_base 6: mod_base = OTHER; note = 2'-O-methylcytidine
  modified_base 7: mod_base = OTHER; note = 2'-fluoroadenosine
  modified_base 8: mod_base = OTHER; note = 2'-O-methylguanosine
  modified_base 9: mod_base = OTHER; note = 2'-fluoroadenosine
  modified_base 10: mod_base = OTHER; note = 2'-O-methylcytidine
  modified_base 11: mod_base = OTHER; note = 2'-fluoroadenosine
  modified_base 12: mod_base = OTHER; note = 2'-O-methyladenosine
  modified_base 13: mod_base = OTHER; note = 2'-fluorouridine
  modified_base 14: mod_base = OTHER; note = 2'-O-methylcytidine
  modified_base 15: mod_base = OTHER; note = 2'-fluoroguanosine
  modified_base 16: mod_base = OTHER; note = 2'-O-methylcytidine
  modified_base 17: mod_base = OTHER; note = 2'-fluorocytidine
  modified_base 18: mod_base = OTHER; note = 2'-O-methyluridine
  modified_base 19: mod_base = OTHER; note = 2'-fluorouridine with phosphorothioate linkage
  modified_base 20: mod_base = OTHER; note = 2'-O-methyluridine with phosphorothioate linkage
  modified_base 21: mod_base = OTHER; note = 2'-fluorouridine
gactccagacaatcgcctttt

SEQ ID NO: 2874 - RNA, 21 nt, synthetic construct
  source 1..21: mol_type = other RNA
  modified_base 1: mod_base = OTHER; note = 2'-fluoroadenosine with phosphorothioate linkage
  modified_base 2: mod_base = OTHER; note = 2'-O-methylcytidine with phosphorothioate linkage
  modified_base 3: mod_base = OTHER; note = 2'-fluorouridine
  modified_base 4: mod_base = OTHER; note = 2'-O-methylcytidine
  modified_base 5: mod_base = OTHER; note = 2'-fluorocytidine
  modified_base 6: mod_base = OTHER; note = 2'-O-methyladenosine
  modified_base 7: mod_base = OTHER; note = 2'-fluoroguanosine
  modified_base 8: mod_base = OTHER; note = 2'-O-methyladenosine
  modified_base 9: mod_base = OTHER; note = 2'-fluorocytidine
  modified_base 10: mod_base = OTHER; note = 2'-O-methyladenosine
  modified_base 11: mod_base = OTHER; note = 2'-fluoroadenosine
  modified_base 12: mod_base = OTHER; note = 2'-O-methyluridine
  modified_base 13: mod_base = OTHER; note = 2'-fluorocytidine
  modified_base 14: mod_base = OTHER; note = 2'-O-methylguanosine
  modified_base 15: mod_base = OTHER; note = 2'-fluorocytidine
  modified_base 16: mod_base = OTHER; note = 2'-O-methylcytidine
  modified_base 17: mod_base = OTHER; note = 2'-fluorouridine
  modified_base 18: mod_base = OTHER; note = 2'-O-methyluridine
  modified_base 19: mod_base = OTHER; note = 2'-fluorouridine with phosphorothioate linkage
  modified_base 20: mod_base = OTHER; note = 2'-O-methyluridine with phosphorothioate linkage
  modified_base 21: mod_base = OTHER; note = 2'-fluorouridine
actccagacaatcgccttttt

SEQ ID NO: 2875 - RNA, 21 nt, synthetic construct
  source 1..21: mol_type = other RNA
  modified_base 1: mod_base = OTHER; note = 2'-fluorocytidine with phosphorothioate linkage
  modified_base 2: mod_base = OTHER; note = 2'-O-methyluridine with phosphorothioate linkage
  modified_base 3: mod_base = OTHER; note = 2'-fluorocytidine
  modified_base 4: mod_base = OTHER; note = 2'-O-methylcytidine
  modified_base 5: mod_base = OTHER; note = 2'-fluoroadenosine
  modified_base 6: mod_base = OTHER; note = 2'-O-methylguanosine
  modified_base 7: mod_base = OTHER; note = 2'-fluoroadenosine
  modified_base 8: mod_base = OTHER; note = 2'-O-methylcytidine
  modified_base 9: mod_base = OTHER; note = 2'-fluoroadenosine
  modified_base 10: mod_base = OTHER; note = 2'-O-methyladenosine
  modified_base 11: mod_base = OTHER; note = 2'-fluorouridine
  modified_base 12: mod_base = OTHER; note = 2'-O-methylcytidine
  modified_base 13: mod_base = OTHER; note = 2'-fluoroguanosine
  modified_base 14: mod_base = OTHER; note = 2'-O-methylcytidine
  modified_base 15: mod_base = OTHER; note = 2'-fluorocytidine
  modified_base 16: mod_base = OTHER; note = 2'-O-methyluridine
  modified_base 17: mod_base = OTHER; note = 2'-fluorouridine
  modified_base 18: mod_base = OTHER; note = 2'-O-methyluridine
  modified_base 19: mod_base = OTHER; note = 2'-fluorouridine with phosphorothioate linkage
  modified_base 20: mod_base = OTHER; note = 2'-O-methylguanosine with phosphorothioate linkage
  modified_base 21: mod_base = OTHER; note = 2'-fluorocytidine
ctccagacaatcgccttttgc

SEQ ID NO: 2876 - RNA, 21 nt, synthetic construct
  source 1..21: mol_type = other RNA
  modified_base 1: mod_base = OTHER; note = 2'-fluorocytidine with phosphorothioate linkage
  modified_base 2: mod_base = OTHER; note = 2'-O-methylcytidine with phosphorothioate linkage
  modified_base 3: mod_base = OTHER; note = 2'-fluoroadenosine
  modified_base 4: mod_base = OTHER; note = 2'-O-methylguanosine
  modified_base 5: mod_base = OTHER; note = 2'-fluoroadenosine
  modified_base 6: mod_base = OTHER; note = 2'-O-methylcytidine
  modified_base 7: mod_base = OTHER; note = 2'-fluoroadenosine
  modified_base 8: mod_base = OTHER; note = 2'-O-methyladenosine
  modified_base 9: mod_base = OTHER; note = 2'-fluorouridine
  modified_base 10: mod_base = OTHER; note = 2'-O-methylcytidine
  modified_base 11: mod_base = OTHER; note = 2'-fluoroguanosine
  modified_base 12: mod_base = OTHER; note = 2'-O-methylcytidine
  modified_base 13: mod_base = OTHER; note = 2'-fluorocytidine
  modified_base 14: mod_base = OTHER; note = 2'-O-methyluridine
  modified_base 15: mod_base = OTHER; note = 2'-fluorouridine
  modified_base 16: mod_base = OTHER; note = 2'-O-methyluridine
  modified_base 17: mod_base = OTHER; note = 2'-fluorouridine
  modified_base 18: mod_base = OTHER; note = 2'-O-methylguanosine
  modified_base 19: mod_base = OTHER; note = 2'-fluorocytidine with phosphorothioate linkage
  modified_base 20: mod_base = OTHER; note = 2'-O-methylcytidine with phosphorothioate linkage
  modified_base 21: mod_base = OTHER; note = 2'-fluorouridine
ccagacaatcgccttttgcct

SEQ ID NO: 2877 - RNA, 21 nt, synthetic construct
  source 1..21: mol_type = other RNA
  modified_base 1: mod_base = OTHER; note = 2'-fluorocytidine with phosphorothioate linkage
  modified_base 2: mod_base = OTHER; note = 2'-O-methyladenosine with phosphorothioate linkage
  modified_base 3: mod_base = OTHER; note = 2'-fluoroguanosine
  modified_base 4: mod_base = OTHER; note = 2'-O-methyladenosine
  modified_base 5: mod_base = OTHER; note = 2'-fluorocytidine
  modified_base 6: mod_base = OTHER; note = 2'-O-methyladenosine
  modified_base 7: mod_base = OTHER; note = 2'-fluoroadenosine
  modified_base 8: mod_base = OTHER; note = 2'-O-methyluridine
  modified_base 9: mod_base = OTHER; note = 2'-fluorocytidine
  modified_base 10: mod_base = OTHER; note = 2'-O-methylguanosine
  modified_base 11: mod_base = OTHER; note = 2'-fluorocytidine
  modified_base 12: mod_base = OTHER; note = 2'-O-methylcytidine
  modified_base 13: mod_base = OTHER; note = 2'-fluorouridine
  modified_base 14: mod_base = OTHER; note = 2'-O-methyluridine
  modified_base 15: mod_base = OTHER; note = 2'-fluorouridine
  modified_base 16: mod_base = OTHER; note = 2'-O-methyluridine
  modified_base 17: mod_base = OTHER; note = 2'-fluoroguanosine
  modified_base 18: mod_base = OTHER; note = 2'-O-methylcytidine
  modified_base 19: mod_base = OTHER; note = 2'-fluorocytidine with phosphorothioate linkage
  modified_base 20: mod_base = OTHER; note = 2'-O-methyluridine with phosphorothioate linkage
  modified_base 21: mod_base = OTHER; note = 2'-fluorocytidine
cagacaatcgccttttgcctc

SEQ ID NO: 2878 - RNA, 21 nt, synthetic construct
  source 1..21: mol_type = other RNA
  modified_base 1: mod_base = OTHER; note = 2'-fluoroguanosine with phosphorothioate linkage
  modified_base 2: mod_base = OTHER; note = 2'-O-methyladenosine with phosphorothioate linkage
  modified_base 3: mod_base = OTHER; note = 2'-fluorocytidine
  modified_base 4: mod_base = OTHER; note = 2'-O-methylguanosine
  modified_base 5: mod_base = OTHER; note = 2'-fluorocytidine
  modified_base 6: mod_base = OTHER; note = 2'-O-methyladenosine
  modified_base 7: mod_base = OTHER; note = 2'-fluoroguanosine
  modified_base 8: mod_base = OTHER; note = 2'-O-methylcytidine
  modified_base 9: mod_base = OTHER; note = 2'-fluoroguanosine
  modified_base 10: mod_base = OTHER; note = 2'-O-methyladenosine
  modified_base 11: mod_base = OTHER; note = 2'-fluorocytidine
  modified_base 12: mod_base = OTHER; note = 2'-O-methyladenosine
  modified_base 13: mod_base = OTHER; note = 2'-fluorocytidine
  modified_base 14: mod_base = OTHER; note = 2'-O-methyluridine
  modified_base 15: mod_base = OTHER; note = 2'-fluorouridine
  modified_base 16: mod_base = OTHER; note = 2'-O-methylguanosine
  modified_base 17: mod_base = OTHER; note = 2'-fluorouridine
  modified_base 18: mod_base = OTHER; note = 2'-O-methylguanosine
  modified_base 19: mod_base = OTHER; note = 2'-fluoroadenosine with phosphorothioate linkage
  modified_base 20: mod_base = OTHER; note = 2'-O-methylguanosine with phosphorothioate linkage
  modified_base 21: mod_base = OTHER; note = 2'-fluorouridine
gacgcagcgacacttgtgagt

SEQ ID NO: 2879 - RNA, 21 nt, synthetic construct
  source 1..21: mol_type = other RNA
  modified_base 1: mod_base = OTHER; note = 2'-fluorocytidine with phosphorothioate linkage
  modified_base 2: mod_base = OTHER; note = 2'-O-methylguanosine with phosphorothioate linkage
  modified_base 3: mod_base = OTHER; note = 2'-fluorocytidine
  modified_base 4: mod_base = OTHER; note = 2'-O-methyladenosine
  modified_base 5: mod_base = OTHER; note = 2'-fluoroguanosine
  modified_base 6: mod_base = OTHER; note = 2'-O-methylcytidine
  modified_base 7: mod_base = OTHER; note = 2'-fluoroguanosine
  modified_base 8: mod_base = OTHER; note = 2'-O-methyladenosine
  modified_base 9: mod_base = OTHER; note = 2'-fluorocytidine
  modified_base 10: mod_base = OTHER; note = 2'-O-methyladenosine
  modified_base 11: mod_base = OTHER; note = 2'-fluorocytidine
  modified_base 12: mod_base = OTHER; note = 2'-O-methyluridine
  modified_base 13: mod_base = OTHER; note = 2'-fluorouridine
  modified_base 14: mod_base = OTHER; note = 2'-O-methylguanosine
  modified_base 15: mod_base = OTHER; note = 2'-fluorouridine
  modified_base 16: mod_base = OTHER; note = 2'-O-methylguanosine
  modified_base 17: mod_base = OTHER; note = 2'-fluoroadenosine
  modified_base 18: mod_base = OTHER; note = 2'-O-methylguanosine
  modified_base 19: mod_base = OTHER; note = 2'-fluorouridine with phosphorothioate linkage
  modified_base 20: mod_base = OTHER; note = 2'-O-methyladenosine with phosphorothioate linkage
  modified_base 21: mod_base = OTHER; note = 2'-fluorocytidine
cgcagcgacacttgtgagtac

SEQ ID NO: 2880 - RNA, 21 nt, synthetic construct
  source 1..21: mol_type = other RNA
  modified_base 1: mod_base = OTHER; note = 2'-fluoroguanosine with phosphorothioate linkage
  modified_base 2: mod_base = OTHER; note = 2'-O-methylcytidine with phosphorothioate linkage
  modified_base 3: mod_base = OTHER; note = 2'-fluoroadenosine
  modified_base 4: mod_base = OTHER; note = 2'-O-methylguanosine
  modified_base 5: mod_base = OTHER; note = 2'-fluorocytidine
  modified_base 6: mod_base = OTHER; note = 2'-O-methylguanosine
  modified_base 7: mod_base = OTHER; note = 2'-fluoroadenosine
  modified_base 8: mod_base = OTHER; note = 2'-O-methylcytidine
  modified_base 9: mod_base = OTHER; note = 2'-fluoroadenosine
  modified_base 10: mod_base = OTHER; note = 2'-O-methylcytidine
  modified_base 11: mod_base = OTHER; note = 2'-fluorouridine
  modified_base 12: mod_base = OTHER; note = 2'-O-methyluridine
  modified_base 13: mod_base = OTHER; note = 2'-fluoroguanosine
  modified_base 14: mod_base = OTHER; note = 2'-O-methyluridine
  modified_base 15: mod_base = OTHER; note = 2'-fluoroguanosine
  modified_base 16: mod_base = OTHER; note = 2'-O-methyladenosine
  modified_base 17: mod_base = OTHER; note = 2'-fluoroguanosine
  modified_base 18: mod_base = OTHER; note = 2'-O-methyluridine
  modified_base 19: mod_base = OTHER; note = 2'-fluoroadenosine with phosphorothioate linkage
  modified_base 20: mod_base = OTHER; note = 2'-O-methylcytidine with phosphorothioate linkage
  modified_base 21: mod_base = OTHER; note = 2'-fluorouridine
gcagcgacacttgtgagtact

SEQ ID NO: 2881 - RNA, 21 nt, synthetic construct
  source 1..21: mol_type = other RNA
  modified_base 1: mod_base = OTHER; note = 2'-fluorocytidine with phosphorothioate linkage
  modified_base 2: mod_base = OTHER; note = 2'-O-methyladenosine with phosphorothioate linkage
  modified_base 3: mod_base = OTHER; note = 2'-fluoroguanosine
  modified_base 4: mod_base = OTHER; note = 2'-O-methylcytidine
  modified_base 5: mod_base = OTHER; note = 2'-fluoroguanosine
  modified_base 6: mod_base = OTHER; note = 2'-O-methyladenosine
  modified_base 7: mod_base = OTHER; note = 2'-fluorocytidine
  modified_base 8: mod_base = OTHER; note = 2'-O-methyladenosine
  modified_base 9: mod_base = OTHER; note = 2'-fluorocytidine
  modified_base 10: mod_base = OTHER; note = 2'-O-methyluridine
  modified_base 11: mod_base = OTHER; note = 2'-fluorouridine
  modified_base 12: mod_base = OTHER; note = 2'-O-methylguanosine
  modified_base 13: mod_base = OTHER; note = 2'-fluorouridine
  modified_base 14: mod_base = OTHER; note = 2'-O-methylguanosine
  modified_base 15: mod_base = OTHER; note = 2'-fluoroadenosine
  modified_base 16: mod_base = OTHER; note = 2'-O-methylguanosine
  modified_base 17: mod_base = OTHER; note = 2'-fluorouridine
  modified_base 18: mod_base = OTHER; note = 2'-O-methyladenosine
  modified_base 19: mod_base = OTHER; note = 2'-fluorocytidine with phosphorothioate linkage
  modified_base 20: mod_base = OTHER; note = 2'-O-methyluridine with phosphorothioate linkage
  modified_base 21: mod_base = OTHER; note = 2'-fluorouridine
cagcgacacttgtgagtactt

SEQ ID NO: 2882 - RNA, 21 nt, synthetic construct
  source 1..21: mol_type = other RNA
  modified_base 1: mod_base = OTHER; note = 2'-fluoroguanosine with phosphorothioate linkage
  modified_base 2: mod_base = OTHER; note = 2'-O-methyladenosine with phosphorothioate linkage
  modified_base 3: mod_base = OTHER; note = 2'-fluorocytidine
  modified_base 4: mod_base = OTHER; note = 2'-O-methyladenosine
  modified_base 5: mod_base = OTHER; note = 2'-fluorocytidine
  modified_base 6: mod_base = OTHER; note = 2'-O-methyluridine
  modified_base 7: mod_base = OTHER; note = 2'-fluorouridine
  modified_base 8: mod_base = OTHER; note = 2'-O-methylguanosine
  modified_base 9: mod_base = OTHER; note = 2'-fluorouridine
  modified_base 10: mod_base = OTHER; note = 2'-O-methylguanosine
  modified_base 11: mod_base = OTHER; note = 2'-fluoroadenosine
  modified_base 12: mod_base = OTHER; note = 2'-O-methylguanosine
  modified_base 13: mod_base = OTHER; note = 2'-fluorouridine
  modified_base 14: mod_base = OTHER; note = 2'-O-methyladenosine
  modified_base 15: mod_base = OTHER; note = 2'-fluorocytidine
  modified_base 16: mod_base = OTHER; note = 2'-O-methyluridine
  modified_base 17: mod_base = OTHER; note = 2'-fluoroguanosine
  modified_base 18: mod_base = OTHER; note = 2'-O-methyluridine
  modified_base 19: mod_base = OTHER; note = 2'-fluoroguanosine with phosphorothioate linkage
  modified_base 20: mod_base = OTHER; note = 2'-O-methylguanosine with phosphorothioate linkage
  modified_base 21: mod_base = OTHER; note = 2'-fluorouridine
gacacttgtgagtactgtggt

SEQ ID NO: 2883 - RNA, 21 nt, synthetic construct
  source 1..21: mol_type = other RNA
  modified_base 1: mod_base = OTHER; note = 2'-fluoroadenosine with phosphorothioate linkage
  modified_base 2: mod_base = OTHER; note = 2'-O-methylcytidine with phosphorothioate linkage
  modified_base 3: mod_base = OTHER; note = 2'-fluoroadenosine
  modified_base 4: mod_base = OTHER; note = 2'-O-methylcytidine
  modified_base 5: mod_base = OTHER; note = 2'-fluorouridine
  modified_base 6: mod_base = OTHER; note = 2'-O-methyluridine
  modified_base 7: mod_base = OTHER; note = 2'-fluoroguanosine
  modified_base 8: mod_base = OTHER; note = 2'-O-methyluridine
  modified_base 9: mod_base = OTHER; note = 2'-fluoroguanosine
  modified_base 10: mod_base = OTHER; note = 2'-O-methyladenosine
  modified_base 11: mod_base = OTHER; note = 2'-fluoroguanosine
  modified_base 12: mod_base = OTHER; note = 2'-O-methyluridine
  modified_base 13: mod_base = OTHER; note = 2'-fluoroadenosine
  modified_base 14: mod_base = OTHER; note = 2'-O-methylcytidine
  modified_base 15: mod_base = OTHER; note = 2'-fluorouridine
  modified_base 16: mod_base = OTHER; note = 2'-O-methylguanosine
  modified_base 17: mod_base = OTHER; note = 2'-fluorouridine
  modified_base 18: mod_base = OTHER; note = 2'-O-methylguanosine
  modified_base 19: mod_base = OTHER; note = 2'-fluoroguanosine with phosphorothioate linkage
  modified_base 20: mod_base = OTHER; note = 2'-O-methylguanosine with phosphorothioate linkage
  modified_base 21: mod_base = OTHER; note = 2'-fluoroadenosine
acacttgtgagtactgtggga

SEQ ID NO: 2884 - RNA, 21 nt, synthetic construct
  source 1..21: mol_type = other RNA
  modified_base 1: mod_base = OTHER; note = 2'-fluorocytidine with phosphorothioate linkage
  modified_base 2: mod_base = OTHER; note = 2'-O-methyladenosine with phosphorothioate linkage
  modified_base 3: mod_base = OTHER; note = 2'-fluorocytidine
  modified_base 4: mod_base = OTHER; note = 2'-O-methyluridine
  modified_base 5: mod_base = OTHER; note = 2'-fluorouridine
  modified_base 6: mod_base = OTHER; note = 2'-O-methylguanosine
  modified_base 7: mod_base = OTHER; note = 2'-fluorouridine
  modified_base 8: mod_base = OTHER; note = 2'-O-methylguanosine
  modified_base 9: mod_base = OTHER; note = 2'-fluoroadenosine
  modified_base 10: mod_base = OTHER; note = 2'-O-methylguanosine
  modified_base 11: mod_base = OTHER; note = 2'-fluorouridine
  modified_base 12: mod_base = OTHER; note = 2'-O-methyladenosine
  modified_base 13: mod_base = OTHER; note = 2'-fluorocytidine
  modified_base 14: mod_base = OTHER; note = 2'-O-methyluridine
  modified_base 15: mod_base = OTHER; note = 2'-fluoroguanosine
  modified_base 16: mod_base = OTHER; note = 2'-O-methyluridine
  modified_base 17: mod_base = OTHER; note = 2'-fluoroguanosine
  modified_base 18: mod_base = OTHER; note = 2'-O-methylguanosine
  modified_base 19: mod_base = OTHER; note = 2'-fluoroguanosine with phosphorothioate linkage
  modified_base 20: mod_base = OTHER; note = 2'-O-methyladenosine with phosphorothioate linkage
  modified_base 21: mod_base = OTHER; note = 2'-fluoroadenosine
cacttgtgagtactgtgggaa

SEQ ID NO: 2885 - RNA, 21 nt, synthetic construct
  source 1..21: mol_type = other RNA
  modified_base 1: mod_base = OTHER; note = 2'-fluoroadenosine with phosphorothioate linkage
  modified_base 2: mod_base = OTHER; note = 2'-O-methylcytidine with phosphorothioate linkage
  modified_base 3: mod_base = OTHER; note = 2'-fluorouridine
  modified_base 4: mod_base = OTHER; note = 2'-O-methyluridine
  modified_base 5: mod_base = OTHER; note = 2'-fluoroguanosine
  modified_base 6: mod_base = OTHER; note = 2'-O-methyluridine
  modified_base 7: mod_base = OTHER; note = 2'-fluoroguanosine
  modified_base 8: mod_base = OTHER; note = 2'-O-methyladenosine
  modified_base 9: mod_base = OTHER; note = 2'-fluoroguanosine
  modified_base 10: mod_base = OTHER; note = 2'-O-methyluridine
  modified_base 11: mod_base = OTHER; note = 2'-fluoroadenosine
  modified_base 12: mod_base = OTHER; note = 2'-O-methylcytidine
  modified_base 13: mod_base = OTHER; note = 2'-fluorouridine
  modified_base 14: mod_base = OTHER; note = 2'-O-methylguanosine
  modified_base 15: mod_base = OTHER; note = 2'-fluorouridine
  modified_base 16: mod_base = OTHER; note = 2'-O-methylguanosine
  modified_base 17: mod_base = OTHER; note = 2'-fluoroguanosine
  modified_base 18: mod_base = OTHER; note = 2'-O-methylguanosine
  modified_base 19: mod_base = OTHER; note = 2'-fluoroadenosine with phosphorothioate linkage
  modified_base 20: mod_base = OTHER; note = 2'-O-methyladenosine with phosphorothioate linkage
  modified_base 21: mod_base = OTHER; note = 2'-fluoroadenosine
acttgtgagtactgtgggaaa

SEQ ID NO: 2886 - RNA, 21 nt, synthetic construct
  source 1..21: mol_type = other RNA
  modified_base 1: mod_base = OTHER; note = 2'-fluorocytidine with phosphorothioate linkage
  modified_base 2: mod_base = OTHER; note = 2'-O-methyluridine with phosphorothioate linkage
  modified_base 3: mod_base = OTHER; note = 2'-fluorouridine
  modified_base 4: mod_base = OTHER; note = 2'-O-methylguanosine
  modified_base 5: mod_base = OTHER; note = 2'-fluorouridine
  modified_base 6: mod_base = OTHER; note = 2'-O-methylguanosine
  modified_base 7: mod_base = OTHER; note = 2'-fluoroadenosine
  modified_base 8: mod_base = OTHER; note = 2'-O-methylguanosine
  modified_base 9: mod_base = OTHER; note = 2'-fluorouridine
  modified_base 10: mod_base = OTHER; note = 2'-O-methyladenosine
  modified_base 11: mod_base = OTHER; note = 2'-fluorocytidine
  modified_base 12: mod_base = OTHER; note = 2'-O-methyluridine
  modified_base 13: mod_base = OTHER; note = 2'-fluoroguanosine
  modified_base 14: mod_base = OTHER; note = 2'-O-methyluridine
  modified_base 15: mod_base = OTHER; note = 2'-fluoroguanosine
  modified_base 16: mod_base = OTHER; note = 2'-O-methylguanosine
  modified_base 17: mod_base = OTHER; note = 2'-fluoroguanosine
  modified_base 18: mod_base = OTHER; note = 2'-O-methyladenosine
  modified_base 19: mod_base = OTHER; note = 2'-fluoroadenosine with phosphorothioate linkage
  modified_base 20: mod_base = OTHER; note = 2'-O-methyladenosine with phosphorothioate linkage
  modified_base 21: mod_base = OTHER; note = 2'-fluorouridine
cttgtgagtactgtgggaaat

SEQ ID NO: 2887 - RNA, 21 nt, synthetic construct
  source 1..21: mol_type = other RNA
  modified_base 1: mod_base = OTHER; note = 2'-fluorouridine with phosphorothioate linkage
  modified_base 2: mod_base = OTHER; note = 2'-O-methyluridine with phosphorothioate linkage
  modified_base 3: mod_base = OTHER; note = 2'-fluoroguanosine
  modified_base 4: mod_base = OTHER; note = 2'-O-methyluridine
  modified_base 5: mod_base = OTHER; note = 2'-fluoroguanosine
  modified_base 6: mod_base = OTHER; note = 2'-O-methyladenosine
  modified_base 7: mod_base = OTHER; note = 2'-fluoroguanosine
  modified_base 8: mod_base = OTHER; note = 2'-O-methyluridine
  modified_base 9: mod_base = OTHER; note = 2'-fluoroadenosine
  modified_base 10: mod_base = OTHER; note = 2'-O-methylcytidine
  modified_base 11: mod_base = OTHER; note = 2'-fluorouridine
  modified_base 12: mod_base = OTHER; note = 2'-O-methylguanosine
  modified_base 13: mod_base = OTHER; note = 2'-fluorouridine
  modified_base 14: mod_base = OTHER; note = 2'-O-methylguanosine
  modified_base 15: mod_base = OTHER; note = 2'-fluoroguanosine
  modified_base 16: mod_base = OTHER; note = 2'-O-methylguanosine
  modified_base 17: mod_base = OTHER; note = 2'-fluoroadenosine
  modified_base 18: mod_base = OTHER; note = 2'-O-methyladenosine
  modified_base 19: mod_base = OTHER; note = 2'-fluoroadenosine with phosphorothioate linkage
  modified_base 20: mod_base = OTHER; note = 2'-O-methylguanosine with phosphorothioate linkage
  modified_base 21: mod_base = OTHER; note = 2'-fluorouridine
ttgtgagtactgtgggaaagt

SEQ ID NO: 2888 - RNA, 21 nt, synthetic construct
  source 1..21: mol_type = other RNA
  modified_base 1: mod_base = OTHER; note = 2'-fluorouridine with phosphorothioate linkage
  modified_base 2: mod_base = OTHER; note = 2'-O-methylguanosine with phosphorothioate linkage
  modified_base 3: mod_base = OTHER; note = 2'-fluorouridine
  modified_base 4: mod_base = OTHER; note = 2'-O-methylguanosine
  modified_base 5: mod_base = OTHER; note = 2'-fluoroadenosine
  modified_base 6: mod_base = OTHER; note = 2'-O-methylguanosine
  modified_base 7: mod_base = OTHER; note = 2'-fluorouridine
  modified_base 8: mod_base = OTHER; note = 2'-O-methyladenosine
  modified_base 9: mod_base = OTHER; note = 2'-fluorocytidine
  modified_base 10: mod_base = OTHER; note = 2'-O-methyluridine
  modified_base 11: mod_base = OTHER; note = 2'-fluoroguanosine
  modified_base 12: mod_base = OTHER; note = 2'-O-methyluridine
  modified_base 13: mod_base = OTHER; note = 2'-fluoroguanosine
  modified_base 14: mod_base = OTHER; note = 2'-O-methylguanosine
  modified_base 15: mod_base = OTHER; note = 2'-fluoroguanosine
  modified_base 16: mod_base = OTHER; note = 2'-O-methyladenosine
  modified_base 17: mod_base = OTHER; note = 2'-fluoroadenosine
  modified_base 18: mod_base = OTHER; note = 2'-O-methyladenosine
  modified_base 19: mod_base = OTHER; note = 2'-fluoroguanosine with phosphorothioate linkage
  modified_base 20: mod_base = OTHER; note = 2'-O-methyluridine with phosphorothioate linkage
  modified_base 21: mod_base = OTHER; note = 2'-fluorocytidine
tgtgagtactgtgggaaagtc

SEQ ID NO: 2889 - RNA, 21 nt, synthetic construct
  source 1..21: mol_type = other RNA
  modified_base 1: mod_base = OTHER; note = 2'-fluoroguanosine with phosphorothioate linkage
  modified_base 2: mod_base = OTHER; note = 2'-O-methyluridine with phosphorothioate linkage
  modified_base 3: mod_base = OTHER; note = 2'-fluoroguanosine
  modified_base 4: mod_base = OTHER; note = 2'-O-methyladenosine
  modified_base 5: mod_base = OTHER; note = 2'-fluoroguanosine
  modified_base 6: mod_base = OTHER; note = 2'-O-methyluridine
  modified_base 7: mod_base = OTHER; note = 2'-fluoroadenosine
  modified_base 8: mod_base = OTHER; note = 2'-O-methylcytidine
  modified_base 9: mod_base = OTHER; note = 2'-fluorouridine
  modified_base 10: mod_base = OTHER; note = 2'-O-methylguanosine
  modified_base 11: mod_base = OTHER; note = 2'-fluorouridine
  modified_base 12: mod_base = OTHER; note = 2'-O-methylguanosine
  modified_base 13: mod_base = OTHER; note = 2'-fluoroguanosine
  modified_base 14: mod_base = OTHER; note = 2'-O-methylguanosine
  modified_base 15: mod_base = OTHER; note = 2'-fluoroadenosine
  modified_base 16: mod_base = OTHER; note = 2'-O-methyladenosine
  modified_base 17: mod_base = OTHER; note = 2'-fluoroadenosine
  modified_base 18: mod_base = OTHER; note = 2'-O-methylguanosine
  modified_base 19: mod_base = OTHER; note = 2'-fluorouridine with phosphorothioate linkage
  modified_base 20: mod_base = OTHER; note = 2'-O-methylcytidine with phosphorothioate linkage
  modified_base 21: mod_base = OTHER; note = 2'-fluorouridine
gtgagtactgtgggaaagtct

SEQ ID NO: 2890 - RNA, 21 nt, synthetic construct
  source 1..21: mol_type = other RNA
  modified_base 1: mod_base = OTHER; note = 2'-fluoroguanosine with phosphorothioate linkage
  modified_base 2: mod_base = OTHER; note = 2'-O-methyluridine with phosphorothioate linkage
  modified_base 3: mod_base = OTHER; note = 2'-fluorocytidine
  modified_base 4: mod_base = OTHER; note = 2'-O-methyluridine
  modified_base 5: mod_base = OTHER; note = 2'-fluorouridine
  modified_base 6: mod_base = OTHER; note = 2'-O-methylcytidine
  modified_base 7: mod_base = OTHER; note = 2'-fluoroadenosine
  modified_base 8: mod_base = OTHER; note = 2'-O-methyladenosine
  modified_base 9: mod_base = OTHER; note = 2'-fluoroguanosine
  modified_base 10: mod_base = OTHER; note = 2'-O-methyladenosine
  modified_base 11: mod_base = OTHER; note = 2'-fluoroadenosine
  modified_base 12: mod_base = OTHER; note = 2'-O-methylcytidine
  modified_base 13: mod_base = OTHER; note = 2'-fluorouridine
  modified_base 14: mod_base = OTHER; note = 2'-O-methylguanosine
  modified_base 15: mod_base = OTHER; note = 2'-fluorouridine
  modified_base 16: mod_base = OTHER; note = 2'-O-methyladenosine
  modified_base 17: mod_base = OTHER; note = 2'-fluoroguanosine
  modified_base 18: mod_base = OTHER; note = 2'-O-methylcytidine
  modified_base 19: mod_base = OTHER; note = 2'-fluoroadenosine with phosphorothioate linkage
  modified_base 20: mod_base = OTHER; note = 2'-O-methyladenosine with phosphorothioate linkage
  modified_base 21: mod_base = OTHER; note = 2'-fluorouridine
gtcttcaagaactgtagcaat

SEQ ID NO: 2891 - RNA, 21 nt, synthetic construct
  source 1..21: mol_type = other RNA
  modified_base 1: mod_base = OTHER; note = 2'-fluorouridine with phosphorothioate linkage
  modified_base 2: mod_base = OTHER; note = 2'-O-methylcytidine with phosphorothioate linkage
  modified_base 3: mod_base = OTHER; note = 2'-fluorouridine
  modified_base 4: mod_base = OTHER; note = 2'-O-methyluridine
  modified_base 5: mod_base = OTHER; note = 2'-fluorocytidine
  modified_base 6: mod_base = OTHER; note = 2'-O-methyladenosine
  modified_base 7: mod_base = OTHER; note = 2'-fluoroadenosine
  modified_base 8: mod_base = OTHER; note = 2'-O-methylguanosine
  modified_base 9: mod_base = OTHER; note = 2'-fluoroadenosine
  modified_base 10: mod_base = OTHER; note = 2'-O-methyladenosine
  modified_base 11: mod_base = OTHER; note = 2'-fluorocytidine
  modified_base 12: mod_base = OTHER; note = 2'-O-methyluridine
  modified_base 13: mod_base = OTHER; note = 2'-fluoroguanosine
  modified_base 14: mod_base = OTHER; note = 2'-O-methyluridine
  modified_base 15: mod_base = OTHER; note = 2'-fluoroadenosine
  modified_base 16: mod_base = OTHER; note = 2'-O-methylguanosine
  modified_base 17: mod_base = OTHER; note = 2'-fluorocytidine
  modified_base 18: mod_base = OTHER; note = 2'-O-methyladenosine
  modified_base 19: mod_base = OTHER; note = 2'-fluoroadenosine with phosphorothioate linkage
  modified_base 20: mod_base = OTHER; note = 2'-O-methyluridine with phosphorothioate linkage
  modified_base 21: mod_base = OTHER; note = 2'-fluorocytidine
tcttcaagaactgtagcaatc

SEQ ID NO: 2892 - RNA, 21 nt, synthetic construct
  source 1..21: mol_type = other RNA
  modified_base 1: mod_base = OTHER; note = 2'-fluorocytidine with phosphorothioate linkage
  modified_base 2: mod_base = OTHER; note = 2'-O-methyluridine with phosphorothioate linkage
  modified_base 3: mod_base = OTHER; note = 2'-fluorouridine
  modified_base 4: mod_base = OTHER; note = 2'-O-methylcytidine
  modified_base 5: mod_base = OTHER; note = 2'-fluoroadenosine
  modified_base 6: mod_base = OTHER; note = 2'-O-methyladenosine
  modified_base 7: mod_base = OTHER; note = 2'-fluoroguanosine
  modified_base 8: mod_base = OTHER; note = 2'-O-methyladenosine
  modified_base 9: mod_base = OTHER; note = 2'-fluoroadenosine
  modified_base 10: mod_base = OTHER; note = 2'-O-methylcytidine
  modified_base 11: mod_base = OTHER; note = 2'-fluorouridine
  modified_base 12: mod_base = OTHER; note = 2'-O-methylguanosine
  modified_base 13: mod_base = OTHER; note = 2'-fluorouridine
  modified_base 14: mod_base = OTHER; note = 2'-O-methyladenosine
  modified_base 15: mod_base = OTHER; note = 2'-fluoroguanosine
  modified_base 16: mod_base = OTHER; note = 2'-O-methylcytidine
  modified_base 17: mod_base = OTHER; note = 2'-fluoroadenosine
  modified_base 18: mod_base = OTHER; note = 2'-O-methyladenosine
  modified_base 19: mod_base = OTHER; note = 2'-fluorouridine with phosphorothioate linkage
  modified_base 20: mod_base = OTHER; note = 2'-O-methylcytidine with phosphorothioate linkage
  modified_base 21: mod_base = OTHER; note = 2'-fluorouridine
cttcaagaactgtagcaatct

SEQ ID NO: 2893 - RNA, 21 nt, synthetic construct
  source 1..21: mol_type = other RNA
  modified_base 1: mod_base = OTHER; note = 2'-fluorouridine with phosphorothioate linkage
  modified_base 2: mod_base = OTHER; note = 2'-O-methyluridine with phosphorothioate linkage
  modified_base 3: mod_base = OTHER; note = 2'-fluorocytidine
  modified_base 4: mod_base = OTHER; note = 2'-O-methyladenosine
  modified_base 5: mod_base = OTHER; note = 2'-fluoroadenosine
  modified_base 6: mod_base = OTHER; note = 2'-O-methylguanosine
  modified_base 7: mod_base = OTHER; note = 2'-fluoroadenosine
  modified_base 8: mod_base = OTHER; note = 2'-O-methyladenosine
  modified_base 9: mod_base = OTHER; note = 2'-fluorocytidine
  modified_base 10: mod_base = OTHER; note = 2'-O-methyluridine
  modified_base 11: mod_base = OTHER; note = 2'-fluoroguanosine
  modified_base 12: mod_base = OTHER; note = 2'-O-methyluridine
  modified_base 13: mod_base = OTHER; note = 2'-fluoroadenosine
  modified_base 14: mod_base = OTHER; note = 2'-O-methylguanosine
  modified_base 15: mod_base = OTHER; note = 2'-fluorocytidine
  modified_base 16: mod_base = OTHER; note = 2'-O-methyladenosine
  modified_base 17: mod_base = OTHER; note = 2'-fluoroadenosine
  modified_base 18: mod_base = OTHER; note = 2'-O-methyluridine
  modified_base 19: mod_base = OTHER; note = 2'-fluorocytidine with phosphorothioate linkage
  modified_base 20: mod_base = OTHER; note = 2'-O-methyluridine with phosphorothioate linkage
  modified_base 21: mod_base = OTHER; note = 2'-fluorocytidine
ttcaagaactgtagcaatctc

SEQ ID NO: 2894 - RNA, 21 nt, synthetic construct
  source 1..21: mol_type = other RNA
  modified_base 1: mod_base = OTHER; note = 2'-fluorouridine with phosphorothioate linkage
  modified_base 2: mod_base = OTHER; note = 2'-O-methylcytidine with phosphorothioate linkage
  modified_base 3: mod_base = OTHER; note = 2'-fluoroadenosine
  modified_base 4: mod_base = OTHER; note = 2'-O-methyladenosine
  modified_base 5: mod_base = OTHER; note = 2'-fluoroguanosine
  modified_base 6: mod_base = OTHER; note = 2'-O-methyladenosine
  modified_base 7: mod_base = OTHER; note = 2'-fluoroadenosine
  modified_base 8: mod_base = OTHER; note = 2'-O-methylcytidine
  modified_base 9: mod_base = OTHER; note = 2'-fluorouridine
  modified_base 10: mod_base = OTHER; note = 2'-O-methylguanosine
  modified_base 11: mod_base = OTHER; note = 2'-fluorouridine
  modified_base 12: mod_base = OTHER; note = 2'-O-methyladenosine
  modified_base 13: mod_base = OTHER; note = 2'-fluoroguanosine
  modified_base 14: mod_base = OTHER; note = 2'-O-methylcytidine
  modified_base 15: mod_base = OTHER; note = 2'-fluoroadenosine
  modified_base 16: mod_base = OTHER; note = 2'-O-methyladenosine
  modified_base 17: mod_base = OTHER; note = 2'-fluorouridine
  modified_base 18: mod_base = OTHER; note = 2'-O-methylcytidine
  modified_base 19: mod_base = OTHER; note = 2'-fluorouridine with phosphorothioate linkage
  modified_base 20: mod_base = OTHER; note = 2'-O-methylcytidine with phosphorothioate linkage
  modified_base 21: mod_base = OTHER; note = 2'-fluoroadenosine
tcaagaactgtagcaatctca

SEQ ID NO: 2895 - RNA, 21 nt, synthetic construct
  source 1..21: mol_type = other RNA
  modified_base 1: mod_base = OTHER; note = 2'-fluorocytidine with phosphorothioate linkage
  modified_base 2: mod_base = OTHER; note = 2'-O-methyladenosine with phosphorothioate linkage
  modified_base 3: mod_base = OTHER; note = 2'-fluoroadenosine
  modified_base 4: mod_base = OTHER; note = 2'-O-methylguanosine
  modified_base 5: mod_base = OTHER; note = 2'-fluoroadenosine
  modified_base 6: mod_base = OTHER; note = 2'-O-methyladenosine
  modified_base 7: mod_base = OTHER; note = 2'-fluorocytidine
  modified_base 8: mod_base = OTHER; note = 2'-O-methyluridine
  modified_base 9: mod_base = OTHER; note = 2'-fluoroguanosine
  modified_base 10: mod_base = OTHER; note = 2'-O-methyluridine
  modified_base 11: mod_base = OTHER; note = 2'-fluoroadenosine
  modified_base 12: mod_base = OTHER; note = 2'-O-methylguanosine
  modified_base 13: mod_base = OTHER; note = 2'-fluorocytidine
  modified_base 14: mod_base = OTHER; note = 2'-O-methyladenosine
  modified_base 15: mod_base = OTHER; note = 2'-fluoroadenosine
  modified_base 16: mod_base = OTHER; note = 2'-O-methyluridine
  modified_base 17: mod_base = OTHER; note = 2'-fluorocytidine
  modified_base 18: mod_base = OTHER; note = 2'-O-methyluridine
  modified_base 19: mod_base = OTHER; note = 2'-fluorocytidine with phosphorothioate linkage
  modified_base 20: mod_base = OTHER; note = 2'-O-methyladenosine with phosphorothioate linkage
  modified_base 21: mod_base = OTHER; note = 2'-fluorocytidine
caagaactgtagcaatctcac

SEQ ID NO: 2896 - RNA, 21 nt, synthetic construct
  source 1..21: mol_type = other RNA
  modified_base 1: mod_base = OTHER; note = 2'-fluoroadenosine with phosphorothioate linkage
  modified_base 2: mod_base = OTHER; note = 2'-O-methyladenosine with phosphorothioate linkage
  modified_base 3: mod_base = OTHER; note = 2'-fluoroguanosine
  modified_base 4: mod_base = OTHER; note = 2'-O-methyladenosine
  modified_base 5: mod_base = OTHER; note = 2'-fluoroadenosine
  modified_base 6: mod_base = OTHER; note = 2'-O-methylcytidine
  modified_base 7: mod_base = OTHER; note = 2'-fluorouridine
  modified_base 8: mod_base = OTHER; note = 2'-O-methylguanosine
  modified_base 9: mod_base = OTHER; note = 2'-fluorouridine
  modified_base 10: mod_base = OTHER; note = 2'-O-methyladenosine
  modified_base 11: mod_base = OTHER; note = 2'-fluoroguanosine
  modified_base 12: mod_base = OTHER; note = 2'-O-methylcytidine
  modified_base 13: mod_base = OTHER; note = 2'-fluoroadenosine
  modified_base 14: mod_base = OTHER; note = 2'-O-methyladenosine
  modified_base 15: mod_base = OTHER; note = 2'-fluorouridine
  modified_base 16: mod_base = OTHER; note = 2'-O-methylcytidine
  modified_base 17: mod_base = OTHER; note = 2'-fluorouridine
  modified_base 18: mod_base = OTHER; note = 2'-O-methylcytidine
  modified_base 19: mod_base = OTHER; note = 2'-fluoroadenosine with phosphorothioate linkage
  modified_base 20: mod_base = OTHER; note = 2'-O-methylcytidine with phosphorothioate linkage
  modified_base 21: mod_base = OTHER; note = 2'-fluorouridine
aagaactgtagcaatctcact

SEQ ID NO: 2897 - RNA, 21 nt, synthetic construct
  source 1..21: mol_type = other RNA
  modified_base 1: mod_base = OTHER; note = 2'-fluoroguanosine with phosphorothioate linkage
  modified_base 2: mod_base = OTHER; note = 2'-O-methyladenosine with phosphorothioate linkage
  modified_base 3: mod_base = OTHER; note = 2'-fluoroguanosine
  modified_base 4: mod_base = OTHER; note = 2'-O-methyladenosine
  modified_base 5: mod_base = OTHER; note = 2'-fluoroadenosine
  modified_base 6: mod_base = OTHER; note = 2'-O-methylguanosine
  modified_base 7: mod_base = OTHER; note = 2'-fluorocytidine
  modified_base 8: mod_base = OTHER; note = 2'-O-methylcytidine
  modified_base 9: mod_base = OTHER; note = 2'-fluoroadenosine
  modified_base 10: mod_base = OTHER; note = 2'-O-methylcytidine
  modified_base 11: mod_base = OTHER; note = 2'-fluoroadenosine
  modified_base 12: mod_base = OTHER; note = 2'-O-methylcytidine
  modified_base 13: mod_base = OTHER; note = 2'-fluoroguanosine
  modified_base 14: mod_base = OTHER; note = 2'-O-methylguanosine
  modified_base 15: mod_base = OTHER; note = 2'-fluoroguanosine
  modified_base 16: mod_base = OTHER; note = 2'-O-methylcytidine
  modified_base 17: mod_base = OTHER; note = 2'-fluoroguanosine
  modified_base 18: mod_base = OTHER; note = 2'-O-methyladenosine
  modified_base 19: mod_base = OTHER; note = 2'-fluoroadenosine with phosphorothioate linkage
  modified_base 20: mod_base = OTHER; note = 2'-O-methyladenosine with phosphorothioate linkage
  modified_base 21: mod_base = OTHER; note = 2'-fluorouridine
gagaagccacacgggcgaaat

SEQ ID NO: 2898 - RNA, 21 nt, synthetic construct
  source 1..21: mol_type = other RNA
  modified_base 1: mod_base = OTHER; note = 2'-fluoroadenosine with phosphorothioate linkage
  modified_base 2: mod_base = OTHER; note = 2'-O-methylguanosine with phosphorothioate linkage
  modified_base 3: mod_base = OTHER; note = 2'-fluorocytidine
  modified_base 4: mod_base = OTHER; note = 2'-O-methylcytidine
  modified_base 5: mod_base = OTHER; note = 2'-fluoroadenosine
  modified_base 6: mod_base = OTHER; note = 2'-O-methylcytidine
  modified_base 7: mod_base = OTHER; note = 2'-fluoroadenosine
  modified_base 8: mod_base = OTHER; note = 2'-O-methylcytidine
  modified_base 9: mod_base = OTHER; note = 2'-fluoroguanosine
  modified_base 10: mod_base = OTHER; note = 2'-O-methylguanosine
  modified_base 11: mod_base = OTHER; note = 2'-fluoroguanosine
  modified_base 12: mod_base = OTHER; note = 2'-O-methylcytidine
  modified_base 13: mod_base = OTHER; note = 2'-fluoroguanosine
  modified_base 14: mod_base = OTHER; note = 2'-O-methyladenosine
  modified_base 15: mod_base = OTHER; note = 2'-fluoroadenosine
  modified_base 16: mod_base = OTHER; note = 2'-O-methyladenosine
  modified_base 17: mod_base = OTHER; note = 2'-fluoroguanosine
  modified_base 18: mod_base = OTHER; note = 2'-O-methylguanosine
  modified_base 19: mod_base = OTHER; note = 2'-fluorocytidine with phosphorothioate linkage
  modified_base 20: mod_base = OTHER; note = 2'-O-methylcytidine with phosphorothioate linkage
  modified_base 21: mod_base = OTHER; note = 2'-fluorouridine
agccacacgggcgaaaggcct

SEQ ID NO: 2899 - RNA, 21 nt, synthetic construct
  source 1..21: mol_type = other RNA
  modified_base 1: mod_base = OTHER; note = 2'-fluoroguanosine with phosphorothioate linkage
  modified_base 2: mod_base = OTHER; note = 2'-O-methylcytidine with phosphorothioate linkage
  modified_base 3: mod_base = OTHER; note = 2'-fluorocytidine
  modified_base 4: mod_base = OTHER; note = 2'-O-methyladenosine
  modified_base 5: mod_base = OTHER; note = 2'-fluorocytidine
  modified_base 6: mod_base = OTHER; note = 2'-O-methyladenosine
  modified_base 7: mod_base = OTHER; note = 2'-fluorocytidine
  modified_base 8: mod_base = OTHER; note = 2'-O-methylguanosine
  modified_base 9: mod_base = OTHER; note = 2'-fluoroguanosine
  modified_base 10: mod_base = OTHER; note = 2'-O-methylguanosine
  modified_base 11: mod_base = OTHER; note = 2'-fluorocytidine
  modified_base 12: mod_base = OTHER; note = 2'-O-methylguanosine
  modified_base 13: mod_base = OTHER; note = 2'-fluoroadenosine
  modified_base 14: mod_base = OTHER; note = 2'-O-methyladenosine
  modified_base 15: mod_base = OTHER; note = 2'-fluoroadenosine
  modified_base 16: mod_base = OTHER; note = 2'-O-methylguanosine
  modified_base 17: mod_base = OTHER; note = 2'-fluoroguanosine
  modified_base 18: mod_base = OTHER; note = 2'-O-methylcytidine
  modified_base 19: mod_base = OTHER; note = 2'-fluorocytidine with phosphorothioate linkage
  modified_base 20: mod_base = OTHER; note = 2'-O-methyluridine with phosphorothioate linkage
  modified_base 21: mod_base = OTHER; note = 2'-fluorouridine
gccacacgggcgaaaggcctt

SEQ ID NO: 2900 - RNA, 21 nt, synthetic construct
  source 1..21: mol_type = other RNA
  modified_base 1: mod_base = OTHER; note = 2'-fluoroadenosine with phosphorothioate linkage
  modified_base 2: mod_base = OTHER; note = 2'-O-methylcytidine with phosphorothioate linkage
  modified_base 3: mod_base = OTHER; note = 2'-fluoroadenosine
  modified_base 4: mod_base = OTHER; note = 2'-O-methylcytidine
  modified_base 5: mod_base = OTHER; note = 2'-fluoroguanosine
  modified_base 6: mod_base = OTHER; note = 2'-O-methylguanosine
  modified_base 7: mod_base = OTHER; note = 2'-fluoroguanosine
  modified_base 8: mod_base = OTHER; note = 2'-O-methylcytidine
  modified_base 9: mod_base = OTHER; note = 2'-fluoroguanosine
  modified_base 10: mod_base = OTHER; note = 2'-O-methyladenosine
  modified_base 11: mod_base = OTHER; note = 2'-fluoroadenosine
  modified_base 12: mod_base = OTHER; note = 2'-O-methyladenosine
  modified_base 13: mod_base = OTHER; note = 2'-fluoroguanosine
  modified_base 14: mod_base = OTHER; note = 2'-O-methylguanosine
  modified_base 15: mod_base = OTHER; note = 2'-fluorocytidine
  modified_base 16: mod_base = OTHER; note = 2'-O-methylcytidine
  modified_base 17: mod_base = OTHER; note = 2'-fluorouridine
  modified_base 18: mod_base = OTHER; note = 2'-O-methyluridine
  modified_base 19: mod_base = OTHER; note = 2'-fluoroadenosine with phosphorothioate linkage
  modified_base 20: mod_base = OTHER; note = 2'-O-methyluridine with phosphorothioate linkage
  modified_base 21: mod_base = OTHER; note = 2'-fluoroadenosine
acacgggcgaaaggccttata

SEQ ID NO: 2901 - RNA, 21 nt, synthetic construct
  source 1..21: mol_type = other RNA
  modified_base 1: mod_base = OTHER; note = 2'-fluorocytidine with phosphorothioate linkage
  modified_base 2: mod_base = OTHER; note = 2'-O-methyladenosine with phosphorothioate linkage
  modified_base 3: mod_base = OTHER; note = 2'-fluorocytidine
  modified_base 4: mod_base = OTHER; note = 2'-O-methylguanosine
  modified_base 5: mod_base = OTHER; note = 2'-fluoroguanosine
  modified_base 6: mod_base = OTHER; note = 2'-O-methylguanosine
  modified_base 7: mod_base = OTHER; note = 2'-fluorocytidine
  modified_base 8: mod_base = OTHER; note = 2'-O-methylguanosine
  modified_base 9: mod_base = OTHER; note = 2'-fluoroadenosine
  modified_base 10: mod_base = OTHER; note = 2'-O-methyladenosine
  modified_base 11: mod_base = OTHER; note = 2'-fluoroadenosine
  modified_base 12: mod_base = OTHER; note = 2'-O-methylguanosine
  modified_base 13: mod_base = OTHER; note = 2'-fluoroguanosine
  modified_base 14: mod_base = OTHER; note = 2'-O-methylcytidine
  modified_base 15: mod_base = OTHER; note = 2'-fluorocytidine
  modified_base 16: mod_base = OTHER; note = 2'-O-methyluridine
  modified_base 17: mod_base = OTHER; note = 2'-fluorouridine
  modified_base 18: mod_base = OTHER; note = 2'-O-methyladenosine
  modified_base 19: mod_base = OTHER; note = 2'-fluorouridine with phosphorothioate linkage
  modified_base 20: mod_base = OTHER; note = 2'-O-methyladenosine with phosphorothioate linkage
  modified_base 21: mod_base = OTHER; note = 2'-fluoroadenosine
cacgggcgaaaggccttataa

SEQ ID NO: 2902 - RNA, 21 nt, synthetic construct
  source 1..21: mol_type = other RNA
  modified_base 1: mod_base = OTHER; note = 2'-fluoroadenosine with phosphorothioate linkage
  modified_base 2: mod_base = OTHER; note = 2'-O-methylcytidine with phosphorothioate linkage
  modified_base 3: mod_base = OTHER; note = 2'-fluoroguanosine
  modified_base 4: mod_base = OTHER; note = 2'-O-methylguanosine
  modified_base 5: mod_base = OTHER; note = 2'-fluoroguanosine
  modified_base 6: mod_base = OTHER; note = 2'-O-methylcytidine
  modified_base 7: mod_base = OTHER; note = 2'-fluoroguanosine
  modified_base 8: mod_base = OTHER; note = 2'-O-methyladenosine
  modified_base 9: mod_base = OTHER; note = 2'-fluoroadenosine
  modified_base 10: mod_base = OTHER; note = 2'-O-methyladenosine
  modified_base 11: mod_base = OTHER; note = 2'-fluoroguanosine
  modified_base 12: mod_base = OTHER; note = 2'-O-methylguanosine
  modified_base 13: mod_base = OTHER; note = 2'-fluorocytidine
  modified_base 14: mod_base = OTHER; note = 2'-O-methylcytidine
  modified_base 15: mod_base = OTHER; note = 2'-fluorouridine
  modified_base 16: mod_base = OTHER; note = 2'-O-methyluridine
  modified_base 17: mod_base = OTHER; note = 2'-fluoroadenosine
  modified_base 18: mod_base = OTHER; note = 2'-O-methyluridine
  modified_base 19: mod_base = OTHER; note = 2'-fluoroadenosine with phosphorothioate linkage
  modified_base 20: mod_base = OTHER; note = 2'-O-methyladenosine with phosphorothioate linkage
  modified_base 21: mod_base = OTHER; note = 2'-fluoroadenosine
acgggcgaaaggccttataaa

SEQ ID NO: 2903 - RNA, 21 nt, synthetic construct
  source 1..21: mol_type = other RNA
  modified_base 1: mod_base = OTHER; note = 2'-fluorocytidine with phosphorothioate linkage
  modified_base 2: mod_base = OTHER; note = 2'-O-methylguanosine with phosphorothioate linkage
  modified_base 3: mod_base = OTHER; note = 2'-fluoroguanosine
  modified_base 4: mod_base = OTHER; note = 2'-O-methylguanosine
  modified_base 5: mod_base = OTHER; note = 2'-fluorocytidine
  modified_base 6: mod_base = OTHER; note = 2'-O-methylguanosine
  modified_base 7: mod_base = OTHER; note = 2'-fluoroadenosine
  modified_base 8: mod_base = OTHER; note = 2'-O-methyladenosine
  modified_base 9: mod_base = OTHER; note = 2'-fluoroadenosine
  modified_base 10: mod_base = OTHER; note = 2'-O-methylguanosine
  modified_base 11: mod_base = OTHER; note = 2'-fluoroguanosine
  modified_base 12: mod_base = OTHER; note = 2'-O-methylcytidine
  modified_base 13: mod_base = OTHER; note = 2'-fluorocytidine
  modified_base 14: mod_base = OTHER; note = 2'-O-methyluridine
  modified_base 15: mod_base = OTHER; note = 2'-fluorouridine
  modified_base 16: mod_base = OTHER; note = 2'-O-methyladenosine
  modified_base 17: mod_base = OTHER; note = 2'-fluorouridine
  modified_base 18: mod_base = OTHER; note = 2'-O-methyladenosine
  modified_base 19: mod_base = OTHER; note = 2'-fluoroadenosine with phosphorothioate linkage
  modified_base 20: mod_base = OTHER; note = 2'-O-methyladenosine with phosphorothioate linkage
  modified_base 21: mod_base = OTHER; note = 2'-fluorouridine
cgggcgaaaggccttataaat

SEQ ID NO: 2904 - RNA, 21 nt, synthetic construct
  source 1..21: mol_type = other RNA
  modified_base 1: mod_base = OTHER; note = 2'-fluoroguanosine with phosphorothioate linkage
  modified_base 2: mod_base = OTHER; note = 2'-O-methylguanosine with phosphorothioate linkage
  modified_base 3: mod_base = OTHER; note = 2'-fluoroguanosine
  modified_base 4: mod_base = OTHER; note = 2'-O-methylcytidine
  modified_base 5: mod_base = OTHER; note = 2'-fluoroguanosine
  modified_base 6: mod_base = OTHER; note = 2'-O-methyladenosine
  modified_base 7: mod_base = OTHER; note = 2'-fluoroadenosine
  modified_base 8: mod_base = OTHER; note = 2'-O-methyladenosine
  modified_base 9: mod_base = OTHER; note = 2'-fluoroguanosine
  modified_base 10: mod_base = OTHER; note = 2'-O-methylguanosine
  modified_base 11: mod_base = OTHER; note = 2'-fluorocytidine
  modified_base 12: mod_base = OTHER; note = 2'-O-methylcytidine
  modified_base 13: mod_base = OTHER; note = 2'-fluorouridine
  modified_base 14: mod_base = OTHER; note = 2'-O-methyluridine
  modified_base 15: mod_base = OTHER; note = 2'-fluoroadenosine
  modified_base 16: mod_base = OTHER; note = 2'-O-methyluridine
  modified_base 17: mod_base = OTHER; note = 2'-fluoroadenosine
  modified_base 18: mod_base = OTHER; note = 2'-O-methyladenosine
  modified_base 19: mod_base = OTHER; note = 2'-fluoroadenosine with phosphorothioate linkage
  modified_base 20: mod_base = OTHER; note = 2'-O-methyluridine with phosphorothioate linkage
  modified_base 21: mod_base = OTHER; note = 2'-fluorouridine
gggcgaaaggccttataaatt

SEQ ID NO: 2905 - RNA, 21 nt, synthetic construct
  source 1..21: mol_type = other RNA
  modified_base 1: mod_base = OTHER; note = 2'-fluoroguanosine with phosphorothioate linkage
  modified_base 2: mod_base = OTHER; note = 2'-O-methylguanosine with phosphorothioate linkage
  modified_base 3: mod_base = OTHER; note = 2'-fluorocytidine
  modified_base 4: mod_base = OTHER; note = 2'-O-methylguanosine
  modified_base 5: mod_base = OTHER; note = 2'-fluoroadenosine
  modified_base 6: mod_base = OTHER; note = 2'-O-methyladenosine
  modified_base 7: mod_base = OTHER; note = 2'-fluoroadenosine
  modified_base 8: mod_base = OTHER; note = 2'-O-methylguanosine
  modified_base 9: mod_base = OTHER; note = 2'-fluoroguanosine
  modified_base 10: mod_base = OTHER; note = 2'-O-methylcytidine
  modified_base 11: mod_base = OTHER; note = 2'-fluorocytidine
  modified_base 12: mod_base = OTHER; note = 2'-O-methyluridine
  modified_base 13: mod_base = OTHER; note = 2'-fluorouridine
  modified_base 14: mod_base = OTHER; note = 2'-O-methyladenosine
  modified_base 15: mod_base = OTHER; note = 2'-fluorouridine
  modified_base 16: mod_base = OTHER; note = 2'-O-methyladenosine
  modified_base 17: mod_base = OTHER; note = 2'-fluoroadenosine
  modified_base 18: mod_base = OTHER; note = 2'-O-methyladenosine
  modified_base 19: mod_base = OTHER; note = 2'-fluorouridine with phosphorothioate linkage
  modified_base 20: mod_base = OTHER; note = 2'-O-methylguanosine with phosphorothioate linkage
  modified_base 21: mod_base = OTHER; note = 2'-fluorocytidine
ggcgaaaggccttataaatgc

SEQ ID NO: 2906 - RNA, 21 nt, synthetic construct
  source 1..21: mol_type = other RNA
  modified_base 1: mod_base = OTHER; note = 2'-fluoroguanosine with phosphorothioate linkage
  modified_base 2: mod_base = OTHER; note = 2'-O-methylcytidine with phosphorothioate linkage
  modified_base 3: mod_base = OTHER; note = 2'-fluoroguanosine
  modified_base 4: mod_base = OTHER; note = 2'-O-methyladenosine
  modified_base 5: mod_base = OTHER; note = 2'-fluoroadenosine
  modified_base 6: mod_base = OTHER; note = 2'-O-methyladenosine
  modified_base 7: mod_base = OTHER; note = 2'-fluoroguanosine
  modified_base 8: mod_base = OTHER; note = 2'-O-methylguanosine
  modified_base 9: mod_base = OTHER; note = 2'-fluorocytidine
  modified_base 10: mod_base = OTHER; note = 2'-O-methylcytidine
  modified_base 11: mod_base = OTHER; note = 2'-fluorouridine
  modified_base 12: mod_base = OTHER; note = 2'-O-methyluridine
  modified_base 13: mod_base = OTHER; note = 2'-fluoroadenosine
  modified_base 14: mod_base = OTHER; note = 2'-O-methyluridine
  modified_base 15: mod_base = OTHER; note = 2'-fluoroadenosine
  modified_base 16: mod_base = OTHER; note = 2'-O-methyladenosine
  modified_base 17: mod_base = OTHER; note = 2'-fluoroadenosine
  modified_base 18: mod_base = OTHER; note = 2'-O-methyluridine
  modified_base 19: mod_base = OTHER; note = 2'-fluoroguanosine with phosphorothioate linkage
  modified_base 20: mod_base = OTHER; note = 2'-O-methylcytidine with phosphorothioate linkage
  modified_base 21: mod_base = OTHER; note = 2'-fluorouridine
gcgaaaggccttataaatgct

SEQ ID NO: 2907 - RNA, 21 nt, synthetic construct
  source 1..21: mol_type = other RNA
  modified_base 1: mod_base = OTHER; note = 2'-fluoroguanosine with phosphorothioate linkage
  modified_base 2: mod_base = OTHER; note = 2'-O-methyladenosine with phosphorothioate linkage
  modified_base 3: mod_base = OTHER; note = 2'-fluoroadenosine
  modified_base 4: mod_base = OTHER; note = 2'-O-methyladenosine
  modified_base 5: mod_base = OTHER; note = 2'-fluoroguanosine
  modified_base 6: mod_base = OTHER; note = 2'-O-methylguanosine
  modified_base 7: mod_base = OTHER; note = 2'-fluorocytidine
  modified_base 8: mod_base = OTHER; note = 2'-O-methylcytidine
  modified_base 9: mod_base = OTHER; note = 2'-fluorouridine
  modified_base 10: mod_base = OTHER; note = 2'-O-methyluridine
  modified_base 11: mod_base = OTHER; note = 2'-fluoroadenosine
  modified_base 12: mod_base = OTHER; note = 2'-O-methyluridine
  modified_base 13: mod_base = OTHER; note = 2'-fluoroadenosine
  modified_base 14: mod_base = OTHER; note = 2'-O-methyladenosine
  modified_base 15: mod_base = OTHER; note = 2'-fluoroadenosine
  modified_base 16: mod_base = OTHER; note = 2'-O-methyluridine
  modified_base 17: mod_base = OTHER; note = 2'-fluoroguanosine
  modified_base 18: mod_base = OTHER; note = 2'-O-methylcytidine
  modified_base 19: mod_base = OTHER; note = 2'-fluoroguanosine with phosphorothioate linkage
  modified_base 20: mod_base = OTHER; note = 2'-O-methyladenosine with phosphorothioate linkage
  modified_base 21: mod_base = OTHER; note = 2'-fluorouridine
gaaaggccttataaatgcgat

SEQ ID NO: 2908 - RNA, 21 nt, synthetic construct
  source 1..21: mol_type = other RNA
  modified_base 1: mod_base = OTHER; note = 2'-fluoroadenosine with phosphorothioate linkage
  modified_base 2: mod_base = OTHER; note = 2'-O-methyladenosine with phosphorothioate linkage
  modified_base 3: mod_base = OTHER; note = 2'-fluoroadenosine
  modified_base 4: mod_base = OTHER; note = 2'-O-methylguanosine
  modified_base 5: mod_base = OTHER; note = 2'-fluoroguanosine
  modified_base 6: mod_base = OTHER; note = 2'-O-methylcytidine
  modified_base 7: mod_base = OTHER; note = 2'-fluorocytidine
  modified_base 8: mod_base = OTHER; note = 2'-O-methyluridine
  modified_base 9: mod_base = OTHER; note = 2'-fluorouridine
  modified_base 10: mod_base = OTHER; note = 2'-O-methyladenosine
  modified_base 11: mod_base = OTHER; note = 2'-fluorouridine
  modified_base 12: mod_base = OTHER; note = 2'-O-methyladenosine
  modified_base 13: mod_base = OTHER; note = 2'-fluoroadenosine
  modified_base 14: mod_base = OTHER; note = 2'-O-methyladenosine
  modified_base 15: mod_base = OTHER; note = 2'-fluorouridine
  modified_base 16: mod_base = OTHER; note = 2'-O-methylguanosine
  modified_base 17: mod_base = OTHER; note = 2'-fluorocytidine
  modified_base 18: mod_base = OTHER; note = 2'-O-methylguanosine
  modified_base 19: mod_base = OTHER; note = 2'-fluoroadenosine with phosphorothioate linkage
  modified_base 20: mod_base = OTHER; note = 2'-O-methylguanosine with phosphorothioate linkage
  modified_base 21: mod_base = OTHER; note = 2'-fluorocytidine
aaaggccttataaatgcgagc

SEQ ID NO: 2909 - RNA, 21 nt, synthetic construct
  source 1..21: mol_type = other RNA
  modified_base 1: mod_base = OTHER; note = 2'-fluoroadenosine with phosphorothioate linkage
  modified_base 2: mod_base = OTHER; note = 2'-O-methyladenosine with phosphorothioate linkage
  modified_base 3: mod_base = OTHER; note = 2'-fluoroguanosine
  modified_base 4: mod_base = OTHER; note = 2'-O-methylguanosine
  modified_base 5: mod_base = OTHER; note = 2'-fluorocytidine
  modified_base 6: mod_base = OTHER; note = 2'-O-methylcytidine
  modified_base 7: mod_base = OTHER; note = 2'-fluorouridine
  modified_base 8: mod_base = OTHER; note = 2'-O-methyluridine
  modified_base 9: mod_base = OTHER; note = 2'-fluoroadenosine
  modified_base 10: mod_base = OTHER; note = 2'-O-methyluridine
  modified_base 11: mod_base = OTHER; note = 2'-fluoroadenosine
  modified_base 12: mod_base = OTHER; note = 2'-O-methyladenosine
  modified_base 13: mod_base = OTHER; note = 2'-fluoroadenosine
  modified_base 14: mod_base = OTHER; note = 2'-O-methyluridine
  modified_base 15: mod_base = OTHER; note = 2'-fluoroguanosine
  modified_base 16: mod_base = OTHER; note = 2'-O-methylcytidine
  modified_base 17: mod_base = OTHER; note = 2'-fluoroguanosine
  modified_base 18: mod_base = OTHER; note = 2'-O-methyladenosine
  modified_base 19: mod_base = OTHER; note = 2'-fluoroguanosine with phosphorothioate linkage
  modified_base 20: mod_base = OTHER; note = 2'-O-methylcytidine with phosphorothioate linkage
  modified_base 21: mod_base = OTHER; note = 2'-fluorouridine
aaggccttataaatgcgagct

SEQ ID NO: 2910 - RNA, 21 nt, synthetic construct
  source 1..21: mol_type = other RNA
  modified_base 1: mod_base = OTHER; note = 2'-fluoroadenosine with phosphorothioate linkage
  modified_base 2: mod_base = OTHER; note = 2'-O-methylguanosine with phosphorothioate linkage
  modified_base 3: mod_base = OTHER; note = 2'-fluoroguanosine
  modified_base 4: mod_base = OTHER; note = 2'-O-methylcytidine
  modified_base 5: mod_base = OTHER; note = 2'-fluorocytidine
  modified_base 6: mod_base = OTHER; note = 2'-O-methyluridine
  modified_base 7: mod_base = OTHER; note = 2'-fluorouridine
  modified_base 8: mod_base = OTHER; note = 2'-O-methyladenosine
  modified_base 9: mod_base = OTHER; note = 2'-fluorouridine
  modified_base 10: mod_base = OTHER; note = 2'-O-methyladenosine
  modified_base 11: mod_base = OTHER; note = 2'-fluoroadenosine
  modified_base 12: mod_base = OTHER; note = 2'-O-methyladenosine
  modified_base 13: mod_base = OTHER; note = 2'-fluorouridine
  modified_base 14: mod_base = OTHER; note = 2'-O-methylguanosine
  modified_base 15: mod_base = OTHER; note = 2'-fluorocytidine
  modified_base 16: mod_base = OTHER; note = 2'-O-methylguanosine
  modified_base 17: mod_base = OTHER; note = 2'-fluoroadenosine
  modified_base 18: mod_base = OTHER; note = 2'-O-methylguanosine
  modified_base 19: mod_base = OTHER; note = 2'-fluorocytidine with phosphorothioate linkage
  modified_base 20: mod_base = OTHER; note = 2'-O-methyluridine with phosphorothioate linkage
  modified_base 21: mod_base = OTHER; note = 2'-fluorouridine
aggccttataaatgcgagctt

SEQ ID NO: 2911 - RNA, 21 nt, synthetic construct
  source 1..21: mol_type = other RNA
  modified_base 1: mod_base = OTHER; note = 2'-fluoroguanosine with phosphorothioate linkage
  modified_base 2: mod_base = OTHER; note = 2'-O-methylguanosine with phosphorothioate linkage
  modified_base 3: mod_base = OTHER; note = 2'-fluorocytidine
  modified_base 4: mod_base = OTHER; note = 2'-O-methylcytidine
  modified_base 5: mod_base = OTHER; note = 2'-fluorouridine
  modified_base 6: mod_base = OTHER; note = 2'-O-methyluridine
  modified_base 7: mod_base = OTHER; note = 2'-fluoroadenosine
  modified_base 8: mod_base = OTHER; note = 2'-O-methyluridine
  modified_base 9: mod_base = OTHER; note = 2'-fluoroadenosine
  modified_base 10: mod_base = OTHER; note = 2'-O-methyladenosine
  modified_base 11: mod_base = OTHER; note = 2'-fluoroadenosine
  modified_base 12: mod_base = OTHER; note = 2'-O-methyluridine
  modified_base 13: mod_base = OTHER; note = 2'-fluoroguanosine
  modified_base 14: mod_base = OTHER; note = 2'-O-methylcytidine
  modified_base 15: mod_base = OTHER; note = 2'-fluoroguanosine
  modified_base 16: mod_base = OTHER; note = 2'-O-methyladenosine
  modified_base 17: mod_base = OTHER; note = 2'-fluoroguanosine
  modified_base 18: mod_base = OTHER; note = 2'-O-methylcytidine
  modified_base 19: mod_base = OTHER; note = 2'-fluorouridine with phosphorothioate linkage
  modified_base 20: mod_base = OTHER; note = 2'-O-methylguanosine with phosphorothioate linkage
  modified_base 21: mod_base = OTHER; note = 2'-fluorouridine
ggccttataaatgcgagctgt

SEQ ID NO: 2912 - RNA, 21 nt, synthetic construct
  source 1..21: mol_type = other RNA
  modified_base 1: mod_base = OTHER; note = 2'-fluoroguanosine with phosphorothioate linkage
  modified_base 2: mod_base = OTHER; note = 2'-O-methylcytidine with phosphorothioate linkage
  modified_base 3: mod_base = OTHER; note = 2'-fluorocytidine
  modified_base 4: mod_base = OTHER; note = 2'-O-methyluridine
  modified_base 5: mod_base = OTHER; note = 2'-fluorouridine
  modified_base 6: mod_base = OTHER; note = 2'-O-methyladenosine
  modified_base 7: mod_base = OTHER; note = 2'-fluorouridine
  modified_base 8: mod_base = OTHER; note = 2'-O-methyladenosine
  modified_base 9: mod_base = OTHER; note = 2'-fluoroadenosine
  modified_base 10: mod_base = OTHER; note = 2'-O-methyladenosine
  modified_base 11: mod_base = OTHER; note = 2'-fluorouridine
  modified_base 12: mod_base = OTHER; note = 2'-O-methylguanosine
  modified_base 13: mod_base = OTHER; note = 2'-fluorocytidine
  modified_base 14: mod_base = OTHER; note = 2'-O-methylguanosine
  modified_base 15: mod_base = OTHER; note = 2'-fluoroadenosine
  modified_base 16: mod_base = OTHER; note = 2'-O-methylguanosine
  modified_base 17: mod_base = OTHER; note = 2'-fluorocytidine
  modified_base 18: mod_base = OTHER; note = 2'-O-methyluridine
  modified_base 19: mod_base = OTHER; note = 2'-fluoroguanosine with phosphorothioate linkage
  modified_base 20: mod_base = OTHER; note = 2'-O-methyluridine with phosphorothioate linkage
  modified_base 21: mod_base = OTHER; note = 2'-fluorouridine
gccttataaatgcgagctgtt

SEQ ID NO: 2913 - RNA, 21 nt, synthetic construct
  source 1..21: mol_type = other RNA
  modified_base 1: mod_base = OTHER; note = 2'-fluorocytidine with phosphorothioate linkage
  modified_base 2: mod_base = OTHER; note = 2'-O-methylcytidine with phosphorothioate linkage
  modified_base 3: mod_base = OTHER; note = 2'-fluorouridine
  modified_base 4: mod_base = OTHER; note = 2'-O-methyluridine
  modified_base 5: mod_base = OTHER; note = 2'-fluoroadenosine
  modified_base 6: mod_base = OTHER; note = 2'-O-methyluridine
  modified_base 7: mod_base = OTHER; note = 2'-fluoroadenosine
  modified_base 8: mod_base = OTHER; note = 2'-O-methyladenosine
  modified_base 9: mod_base = OTHER; note = 2'-fluoroadenosine
  modified_base 10: mod_base = OTHER; note = 2'-O-methyluridine
  modified_base 11: mod_base = OTHER; note = 2'-fluoroguanosine
  modified_base 12: mod_base = OTHER; note = 2'-O-methylcytidine
  modified_base 13: mod_base = OTHER; note = 2'-fluoroguanosine
  modified_base 14: mod_base = OTHER; note = 2'-O-methyladenosine
  modified_base 15: mod_base = OTHER; note = 2'-fluoroguanosine
  modified_base 16: mod_base = OTHER; note = 2'-O-methylcytidine
  modified_base 17: mod_base = OTHER; note = 2'-fluorouridine
  modified_base 18: mod_base = OTHER; note = 2'-O-methylguanosine
  modified_base 19: mod_base = OTHER; note = 2'-fluorouridine with phosphorothioate linkage
  modified_base 20: mod_base = OTHER; note = 2'-O-methylguanosine with phosphorothioate linkage
  modified_base 21: mod_base = OTHER; note = 2'-fluorocytidine
ccttataaatgcgagctgtgc

SEQ ID NO: 2914 - RNA, 21 nt, synthetic construct
  source 1..21: mol_type = other RNA
  modified_base 1: mod_base = OTHER; note = 2'-fluorocytidine with phosphorothioate linkage
  modified_base 2: mod_base = OTHER; note = 2'-O-methyluridine with phosphorothioate linkage
  modified_base 3: mod_base = OTHER; note = 2'-fluorouridine
  modified_base 4: mod_base = OTHER; note = 2'-O-methyladenosine
  modified_base 5: mod_base = OTHER; note = 2'-fluorouridine
  modified_base 6: mod_base = OTHER; note = 2'-O-methyladenosine
  modified_base 7: mod_base = OTHER; note = 2'-fluoroadenosine
  modified_base 8: mod_base = OTHER; note = 2'-O-methyladenosine
  modified_base 9: mod_base = OTHER; note = 2'-fluorouridine
  modified_base 10: mod_base = OTHER; note = 2'-O-methylguanosine
  modified_base 11: mod_base = OTHER; note = 2'-fluorocytidine
  modified_base 12: mod_base = OTHER; note = 2'-O-methylguanosine
  modified_base 13: mod_base = OTHER; note = 2'-fluoroadenosine
  modified_base 14: mod_base = OTHER; note = 2'-O-methylguanosine
  modified_base 15: mod_base = OTHER; note = 2'-fluorocytidine
  modified_base 16: mod_base = OTHER; note = 2'-O-methyluridine
  modified_base 17: mod_base = OTHER; note = 2'-fluoroguanosine
  modified_base 18: mod_base = OTHER; note = 2'-O-methyluridine
  modified_base 19: mod_base = OTHER; note = 2'-fluoroguanosine with phosphorothioate linkage
  modified_base 20: mod_base = OTHER; note = 2'-O-methylcytidine with phosphorothioate linkage
  modified_base 21: mod_base = OTHER; note = 2'-fluoroadenosine
cttataaatgcgagctgtgca

SEQ ID NO: 2915 - RNA, 21 nt, synthetic construct
  source 1..21: mol_type = other RNA
  modified_base 1: mod_base = OTHER; note = 2'-fluorouridine with phosphorothioate linkage
  modified_base 2: mod_base = OTHER; note = 2'-O-methyluridine with phosphorothioate linkage
  modified_base 3: mod_base = OTHER; note = 2'-fluoroadenosine
  modified_base 4: mod_base = OTHER; note = 2'-O-methyluridine
  modified_base 5: mod_base = OTHER; note = 2'-fluoroadenosine
  modified_base 6: mod_base = OTHER; note = 2'-O-methyladenosine
  modified_base 7: mod_base = OTHER; note = 2'-fluoroadenosine
  modified_base 8: mod_base = OTHER; note = 2'-O-methyluridine
  modified_base 9: mod_base = OTHER; note = 2'-fluoroguanosine
  modified_base 10: mod_base = OTHER; note = 2'-O-methylcytidine
  modified_base 11: mod_base = OTHER; note = 2'-fluoroguanosine
  modified_base 12: mod_base = OTHER; note = 2'-O-methyladenosine
  modified_base 13: mod_base = OTHER; note = 2'-fluoroguanosine
  modified_base 14: mod_base = OTHER; note = 2'-O-methylcytidine
  modified_base 15: mod_base = OTHER; note = 2'-fluorouridine
  modified_base 16: mod_base = OTHER; note = 2'-O-methylguanosine
  modified_base 17: mod_base = OTHER; note = 2'-fluorouridine
  modified_base 18: mod_base = OTHER; note = 2'-O-methylguanosine
  modified_base 19: mod_base = OTHER; note = 2'-fluorocytidine with phosphorothioate linkage
  modified_base 20: mod_base = OTHER; note = 2'-O-methyladenosine with phosphorothioate linkage
  modified_base 21: mod_base = OTHER; note = 2'-fluoroadenosine
ttataaatgcgagctgtgcaa

SEQ ID NO: 2916 - RNA, 21 nt, synthetic construct
  source 1..21: mol_type = other RNA
  modified_base 1: mod_base = OTHER; note = 2'-fluorouridine with phosphorothioate linkage
  modified_base 2: mod_base = OTHER; note = 2'-O-methyladenosine with phosphorothioate linkage
  modified_base 3: mod_base = OTHER; note = 2'-fluorouridine
  modified_base 4: mod_base = OTHER; note = 2'-O-methyladenosine
  modified_base 5: mod_base = OTHER; note = 2'-fluoroadenosine
  modified_base 6: mod_base = OTHER; note = 2'-O-methyladenosine
  modified_base 7: mod_base = OTHER; note = 2'-fluorouridine
  modified_base 8: mod_base = OTHER; note = 2'-O-methylguanosine
  modified_base 9: mod_base = OTHER; note = 2'-fluorocytidine
  modified_base 10: mod_base = OTHER; note = 2'-O-methylguanosine
  modified_base 11: mod_base = OTHER; note = 2'-fluoroadenosine
  modified_base 12: mod_base = OTHER; note = 2'-O-methylguanosine
  modified_base 13: mod_base = OTHER; note = 2'-fluorocytidine
  modified_base 14: mod_base = OTHER; note = 2'-O-methyluridine
  modified_base 15: mod_base = OTHER; note = 2'-fluoroguanosine
  modified_base 16: mod_base = OTHER; note = 2'-O-methyluridine
  modified_base 17: mod_base = OTHER; note = 2'-fluoroguanosine
  modified_base 18: mod_base = OTHER; note = 2'-O-methylcytidine
  modified_base 19: mod_base = OTHER; note = 2'-fluoroadenosine with phosphorothioate linkage
  modified_base 20: mod_base = OTHER; note = 2'-O-methyladenosine with phosphorothioate linkage
  modified_base 21: mod_base = OTHER; note = 2'-fluorocytidine
tataaatgcgagctgtgcaac

SEQ ID NO: 2917 - RNA, 21 nt, synthetic construct
  source 1..21: mol_type = other RNA
  modified_base 1: mod_base = OTHER; note = 2'-fluoroadenosine with phosphorothioate linkage
  modified_base 2: mod_base = OTHER; note = 2'-O-methyluridine with phosphorothioate linkage
  modified_base 3: mod_base = OTHER; note = 2'-fluoroadenosine
  modified_base 4: mod_base = OTHER; note = 2'-O-methyladenosine
  modified_base 5: mod_base = OTHER; note = 2'-fluoroadenosine
  modified_base 6: mod_base = OTHER; note = 2'-O-methyluridine
  modified_base 7: mod_base = OTHER; note = 2'-fluoroguanosine
  modified_base 8: mod_base = OTHER; note = 2'-O-methylcytidine
  modified_base 9: mod_base = OTHER; note = 2'-fluoroguanosine
  modified_base 10: mod_base = OTHER; note = 2'-O-methyladenosine
  modified_base 11: mod_base = OTHER; note = 2'-fluoroguanosine
  modified_base 12: mod_base = OTHER; note = 2'-O-methylcytidine
  modified_base 13: mod_base = OTHER; note = 2'-fluorouridine
  modified_base 14: mod_base = OTHER; note = 2'-O-methylguanosine
  modified_base 15: mod_base = OTHER; note = 2'-fluorouridine
  modified_base 16: mod_base = OTHER; note = 2'-O-methylguanosine
  modified_base 17: mod_base = OTHER; note = 2'-fluorocytidine
  modified_base 18: mod_base = OTHER; note = 2'-O-methyladenosine
  modified_base 19: mod_base = OTHER; note = 2'-fluoroadenosine with phosphorothioate linkage
  modified_base 20: mod_base = OTHER; note = 2'-O-methylcytidine with phosphorothioate linkage
  modified_base 21: mod_base = OTHER; note = 2'-fluorouridine
ataaatgcgagctgtgcaact

SEQ ID NO: 2918 - RNA, 21 nt, synthetic construct
  source 1..21: mol_type = other RNA
  modified_base 1: mod_base = OTHER; note = 2'-fluorouridine with phosphorothioate linkage
  modified_base 2: mod_base = OTHER; note = 2'-O-methyladenosine with phosphorothioate linkage
  modified_base 3: mod_base = OTHER; note = 2'-fluoroadenosine
  modified_base 4: mod_base = OTHER; note = 2'-O-methyladenosine
  modified_base 5: mod_base = OTHER; note = 2'-fluorouridine
  modified_base 6: mod_base = OTHER; note = 2'-O-methylguanosine
  modified_base 7: mod_base = OTHER; note = 2'-fluorocytidine
  modified_base 8: mod_base = OTHER; note = 2'-O-methylguanosine
  modified_base 9: mod_base = OTHER; note = 2'-fluoroadenosine
  modified_base 10: mod_base = OTHER; note = 2'-O-methylguanosine
  modified_base 11: mod_base = OTHER; note = 2'-fluorocytidine
  modified_base 12: mod_base = OTHER; note = 2'-O-methyluridine
  modified_base 13: mod_base = OTHER; note = 2'-fluoroguanosine
  modified_base 14: mod_base = OTHER; note = 2'-O-methyluridine
  modified_base 15: mod_base = OTHER; note = 2'-fluoroguanosine
  modified_base 16: mod_base = OTHER; note = 2'-O-methylcytidine
  modified_base 17: mod_base = OTHER; note = 2'-fluoroadenosine
  modified_base 18: mod_base = OTHER; note = 2'-O-methyladenosine
  modified_base 19: mod_base = OTHER; note = 2'-fluorocytidine with phosphorothioate linkage
  modified_base 20: mod_base = OTHER; note = 2'-O-methyluridine with phosphorothioate linkage
  modified_base 21: mod_base = OTHER; note = 2'-fluoroadenosine
taaatgcgagctgtgcaacta

SEQ ID NO: 2919 - RNA, 21 nt, synthetic construct
  source 1..21: mol_type = other RNA
  modified_base 1: mod_base = OTHER; note = 2'-fluoroadenosine with phosphorothioate linkage
  modified_base 2: mod_base = OTHER; note = 2'-O-methyladenosine with phosphorothioate linkage
  modified_base 3: mod_base = OTHER; note = 2'-fluoroadenosine
  modified_base 4: mod_base = OTHER; note = 2'-O-methyluridine
  modified_base 5: mod_base = OTHER; note = 2'-fluoroguanosine
  modified_base 6: mod_base = OTHER; note = 2'-O-methylcytidine
  modified_base 7: mod_base = OTHER; note = 2'-fluoroguanosine
  modified_base 8: mod_base = OTHER; note = 2'-O-methyladenosine
  modified_base 9: mod_base = OTHER; note = 2'-fluoroguanosine
  modified_base 10: mod_base = OTHER; note = 2'-O-methylcytidine
  modified_base 11: mod_base = OTHER; note = 2'-fluorouridine
  modified_base 12: mod_base = OTHER; note = 2'-O-methylguanosine
  modified_base 13: mod_base = OTHER; note = 2'-fluorouridine
  modified_base 14: mod_base = OTHER; note = 2'-O-methylguanosine
  modified_base 15: mod_base = OTHER; note = 2'-fluorocytidine
  modified_base 16: mod_base = OTHER; note = 2'-O-methyladenosine
  modified_base 17: mod_base = OTHER; note = 2'-fluoroadenosine
  modified_base 18: mod_base = OTHER; note = 2'-O-methylcytidine
  modified_base 19: mod_base = OTHER; note = 2'-fluorouridine with phosphorothioate linkage
  modified_base 20: mod_base = OTHER; note = 2'-O-methyladenosine with phosphorothioate linkage
  modified_base 21: mod_base = OTHER; note = 2'-fluorouridine
aaatgcgagctgtgcaactat

SEQ ID NO: 2920 - RNA, 21 nt, synthetic construct
  source 1..21: mol_type = other RNA
  modified_base 1: mod_base = OTHER; note = 2'-fluoroadenosine with phosphorothioate linkage
  modified_base 2: mod_base = OTHER; note = 2'-O-methyladenosine with phosphorothioate linkage
  modified_base 3: mod_base = OTHER; note = 2'-fluorouridine
  modified_base 4: mod_base = OTHER; note = 2'-O-methylguanosine
  modified_base 5: mod_base = OTHER; note = 2'-fluorocytidine
  modified_base 6: mod_base = OTHER; note = 2'-O-methylguanosine
  modified_base 7: mod_base = OTHER; note = 2'-fluoroadenosine
  modified_base 8: mod_base = OTHER; note = 2'-O-methylguanosine
  modified_base 9: mod_base = OTHER; note = 2'-fluorocytidine
  modified_base 10: mod_base = OTHER; note = 2'-O-methyluridine
  modified_base 11: mod_base = OTHER; note = 2'-fluoroguanosine
  modified_base 12: mod_base = OTHER; note = 2'-O-methyluridine
  modified_base 13: mod_base = OTHER; note = 2'-fluoroguanosine
  modified_base 14: mod_base = OTHER; note = 2'-O-methylcytidine
  modified_base 15: mod_base = OTHER; note = 2'-fluoroadenosine
  modified_base 16: mod_base = OTHER; note = 2'-O-methyladenosine
  modified_base 17: mod_base = OTHER; note = 2'-fluorocytidine
  modified_base 18: mod_base = OTHER; note = 2'-O-methyluridine
  modified_base 19: mod_base = OTHER; note = 2'-fluoroadenosine with phosphorothioate linkage
  modified_base 20: mod_base = OTHER; note = 2'-O-methyluridine with phosphorothioate linkage
  modified_base 21: mod_base = OTHER; note = 2'-fluorouridine
aatgcgagctgtgcaactatt

SEQ ID NO: 2921 - RNA, 21 nt, synthetic construct
  source 1..21: mol_type = other RNA
  modified_base 1: mod_base = OTHER; note = 2'-fluoroadenosine with phosphorothioate linkage
  modified_base 2: mod_base = OTHER; note = 2'-O-methyluridine with phosphorothioate linkage
  modified_base 3: mod_base = OTHER; note = 2'-fluoroguanosine
  modified_base 4: mod_base = OTHER; note = 2'-O-methylcytidine
  modified_base 5: mod_base = OTHER; note = 2'-fluoroguanosine
  modified_base 6: mod_base = OTHER; note = 2'-O-methyladenosine
  modified_base 7: mod_base = OTHER; note = 2'-fluoroguanosine
  modified_base 8: mod_base = OTHER; note = 2'-O-methylcytidine
  modified_base 9: mod_base = OTHER; note = 2'-fluorouridine
  modified_base 10: mod_base = OTHER; note = 2'-O-methylguanosine
  modified_base 11: mod_base = OTHER; note = 2'-fluorouridine
  modified_base 12: mod_base = OTHER; note = 2'-O-methylguanosine
  modified_base 13: mod_base = OTHER; note = 2'-fluorocytidine
  modified_base 14: mod_base = OTHER; note = 2'-O-methyladenosine
  modified_base 15: mod_base = OTHER; note = 2'-fluoroadenosine
  modified_base 16: mod_base = OTHER; note = 2'-O-methylcytidine
  modified_base 17: mod_base = OTHER; note = 2'-fluorouridine
  modified_base 18: mod_base = OTHER; note = 2'-O-methyladenosine
  modified_base 19: mod_base = OTHER; note = 2'-fluorouridine with phosphorothioate linkage
  modified_base 20: mod_base = OTHER; note = 2'-O-methylguanosine with phosphorothioate linkage
  modified_base 21: mod_base = OTHER; note = 2'-fluorocytidine
atgcgagctgtgcaactatgc

SEQ ID NO: 2922 - RNA, 21 nt, synthetic construct
  source 1..21: mol_type = other RNA
  modified_base 1: mod_base = OTHER; note = 2'-fluoroguanosine with phosphorothioate linkage
  modified_base 2: mod_base = OTHER; note = 2'-O-methylcytidine with phosphorothioate linkage
  modified_base 3: mod_base = OTHER; note = 2'-fluoroguanosine
  modified_base 4: mod_base = OTHER; note = 2'-O-methyladenosine
  modified_base 5: mod_base = OTHER; note = 2'-fluoroguanosine
  modified_base 6: mod_base = OTHER; note = 2'-O-methylcytidine
  modified_base 7: mod_base = OTHER; note = 2'-fluorouridine
  modified_base 8: mod_base = OTHER; note = 2'-O-methylguanosine
  modified_base 9: mod_base = OTHER; note = 2'-fluorouridine
  modified_base 10: mod_base = OTHER; note = 2'-O-methylguanosine
  modified_base 11: mod_base = OTHER; note = 2'-fluorocytidine
  modified_base 12: mod_base = OTHER; note = 2'-O-methyladenosine
  modified_base 13: mod_base = OTHER; note = 2'-fluoroadenosine
  modified_base 14: mod_base = OTHER; note = 2'-O-methylcytidine
  modified_base 15: mod_base = OTHER; note = 2'-fluorouridine
  modified_base 16: mod_base = OTHER; note = 2'-O-methyladenosine
  modified_base 17: mod_base = OTHER; note = 2'-fluorouridine
  modified_base 18: mod_base = OTHER; note = 2'-O-methylguanosine
  modified_base 19: mod_base = OTHER; note = 2'-fluorocytidine with phosphorothioate linkage
  modified_base 20: mod_base = OTHER; note = 2'-O-methylcytidine with phosphorothioate linkage
  modified_base 21: mod_base = OTHER; note = 2'-fluorouridine
gcgagctgtgcaactatgcct

SEQ ID NO: 2923 - RNA, 21 nt, synthetic construct
  source 1..21: mol_type = other RNA
  modified_base 1: mod_base = OTHER; note = 2'-fluoroguanosine with phosphorothioate linkage
  modified_base 2: mod_base = OTHER; note = 2'-O-methyladenosine with phosphorothioate linkage
  modified_base 3: mod_base = OTHER; note = 2'-fluoroguanosine
  modified_base 4: mod_base = OTHER; note = 2'-O-methylcytidine
  modified_base 5: mod_base = OTHER; note = 2'-fluorouridine
  modified_base 6: mod_base = OTHER; note = 2'-O-methylguanosine
  modified_base 7: mod_base = OTHER; note = 2'-fluorouridine
  modified_base 8: mod_base = OTHER; note = 2'-O-methylguanosine
  modified_base 9: mod_base = OTHER; note = 2'-fluorocytidine
  modified_base 10: mod_base = OTHER; note = 2'-O-methyladenosine
  modified_base 11: mod_base = OTHER; note = 2'-fluoroadenosine
  modified_base 12: mod_base = OTHER; note = 2'-O-methylcytidine
  modified_base 13: mod_base = OTHER; note = 2'-fluorouridine
  modified_base 14: mod_base = OTHER; note = 2'-O-methyladenosine
  modified_base 15: mod_base = OTHER; note = 2'-fluorouridine
  modified_base 16: mod_base = OTHER; note = 2'-O-methylguanosine
  modified_base 17: mod_base = OTHER; note = 2'-fluorocytidine
  modified_base 18: mod_base = OTHER; note = 2'-O-methylcytidine
  modified_base 19: mod_base = OTHER; note = 2'-fluorouridine with phosphorothioate linkage
  modified_base 20: mod_base = OTHER; note = 2'-O-methylguanosine with phosphorothioate linkage
  modified_base 21: mod_base = OTHER; note = 2'-fluorouridine
gagctgtgcaactatgcctgt

SEQ ID NO: 2924 - RNA, 21 nt, synthetic construct
  source 1..21: mol_type = other RNA
  modified_base 1: mod_base = OTHER; note = 2'-fluoroguanosine with phosphorothioate linkage
  modified_base 2: mod_base = OTHER; note = 2'-O-methylcytidine with phosphorothioate linkage
  modified_base 3: mod_base = OTHER; note = 2'-fluorouridine
  modified_base 4: mod_base = OTHER; note = 2'-O-methylguanosine
  modified_base 5: mod_base = OTHER; note = 2'-fluorouridine
  modified_base 6: mod_base = OTHER; note = 2'-O-methylguanosine
  modified_base 7: mod_base = OTHER; note = 2'-fluorocytidine
  modified_base 8: mod_base = OTHER; note = 2'-O-methyladenosine
  modified_base 9: mod_base = OTHER; note = 2'-fluoroadenosine
  modified_base 10: mod_base = OTHER; note = 2'-O-methylcytidine
  modified_base 11: mod_base = OTHER; note = 2'-fluorouridine
  modified_base 12: mod_base = OTHER; note = 2'-O-methyladenosine
  modified_base 13: mod_base = OTHER; note = 2'-fluorouridine
  modified_base 14: mod_base = OTHER; note = 2'-O-methylguanosine
  modified_base 15: mod_base = OTHER; note = 2'-fluorocytidine
  modified_base 16: mod_base = OTHER; note = 2'-O-methylcytidine
  modified_base 17: mod_base = OTHER; note = 2'-fluorouridine
  modified_base 18: mod_base = OTHER; note = 2'-O-methylguanosine
  modified_base 19: mod_base = OTHER; note = 2'-fluorouridine with phosphorothioate linkage
  modified_base 20: mod_base = OTHER; note = 2'-O-methylguanosine with phosphorothioate linkage
  modified_base 21: mod_base = OTHER; note = 2'-fluorocytidine
gctgtgcaactatgcctgtgc

SEQ ID NO: 2925 - RNA, 21 nt, synthetic construct
  source 1..21: mol_type = other RNA
  modified_base 1: mod_base = OTHER; note = 2'-fluoroguanosine with phosphorothioate linkage
  modified_base 2: mod_base = OTHER; note = 2'-O-methylguanosine with phosphorothioate linkage
  modified_base 3: mod_base = OTHER; note = 2'-fluoroguanosine
  modified_base 4: mod_base = OTHER; note = 2'-O-methyladenosine
  modified_base 5: mod_base = OTHER; note = 2'-fluoroadenosine
  modified_base 6: mod_base = OTHER; note = 2'-O-methylguanosine
  modified_base 7: mod_base = OTHER; note = 2'-fluoroguanosine
  modified_base 8: mod_base = OTHER; note = 2'-O-methyladenosine
  modified_base 9: mod_base = OTHER; note = 2'-fluorocytidine
  modified_base 10: mod_base = OTHER; note = 2'-O-methylguanosine
  modified_base 11: mod_base = OTHER; note = 2'-fluorouridine
  modified_base 12: mod_base = OTHER; note = 2'-O-methyluridine
  modified_base 13: mod_base = OTHER; note = 2'-fluorouridine
  modified_base 14: mod_base = OTHER; note = 2'-O-methyladenosine
  modified_base 15: mod_base = OTHER; note = 2'-fluorocytidine
  modified_base 16: mod_base = OTHER; note = 2'-O-methyladenosine
  modified_base 17: mod_base = OTHER; note = 2'-fluoroadenosine
  modified_base 18: mod_base = OTHER; note = 2'-O-methyladenosine
  modified_base 19: mod_base = OTHER; note = 2'-fluorouridine with phosphorothioate linkage
  modified_base 20: mod_base = OTHER; note = 2'-O-methylguanosine with phosphorothioate linkage
  modified_base 21: mod_base = OTHER; note = 2'-fluorouridine
gggaaggacgtttacaaatgt

SEQ ID NO: 2926 - RNA, 21 nt, synthetic construct
  source 1..21: mol_type = other RNA
  modified_base 1: mod_base = OTHER; note = 2'-fluoroguanosine with phosphorothioate linkage
  modified_base 2: mod_base = OTHER; note = 2'-O-methylguanosine with phosphorothioate linkage
  modified_base 3: mod_base = OTHER; note = 2'-fluoroadenosine
  modified_base 4: mod_base = OTHER; note = 2'-O-methyladenosine
  modified_base 5: mod_base = OTHER; note = 2'-fluoroguanosine
  modified_base 6: mod_base = OTHER; note = 2'-O-methylguanosine
  modified_base 7: mod_base = OTHER; note = 2'-fluoroadenosine
  modified_base 8: mod_base = OTHER; note = 2'-O-methylcytidine
  modified_base 9: mod_base = OTHER; note = 2'-fluoroguanosine
  modified_base 10: mod_base = OTHER; note = 2'-O-methyluridine
  modified_base 11: mod_base = OTHER; note = 2'-fluorouridine
  modified_base 12: mod_base = OTHER; note = 2'-O-methyluridine
  modified_base 13: mod_base = OTHER; note = 2'-fluoroadenosine
  modified_base 14: mod_base = OTHER; note = 2'-O-methylcytidine
  modified_base 15: mod_base = OTHER; note = 2'-fluoroadenosine
  modified_base 16: mod_base = OTHER; note = 2'-O-methyladenosine
  modified_base 17: mod_base = OTHER; note = 2'-fluoroadenosine
  modified_base 18: mod_base = OTHER; note = 2'-O-methyluridine
  modified_base 19: mod_base = OTHER; note = 2'-fluoroguanosine with phosphorothioate linkage
  modified_base 20: mod_base = OTHER; note = 2'-O-methyluridine with phosphorothioate linkage
  modified_base 21: mod_base = OTHER; note = 2'-fluorouridine
ggaaggacgtttacaaatgtt

SEQ ID NO: 2927 - RNA, 21 nt, synthetic construct
  source 1..21: mol_type = other RNA
  modified_base 1: mod_base = OTHER; note = 2'-fluorouridine with phosphorothioate linkage
  modified_base 2: mod_base = OTHER; note = 2'-O-methyluridine with phosphorothioate linkage
  modified_base 3: mod_base = OTHER; note = 2'-fluoroguanosine
  modified_base 4: mod_base = OTHER; note = 2'-O-methyluridine
  modified_base 5: mod_base = OTHER; note = 2'-fluoroadenosine
  modified_base 6: mod_base = OTHER; note = 2'-O-methyladenosine
  modified_base 7: mod_base = OTHER; note = 2'-fluoroguanosine
  modified_base 8: mod_base = OTHER; note = 2'-O-methyladenosine
  modified_base 9: mod_base = OTHER; note = 2'-fluorouridine
  modified_base 10: mod_base = OTHER; note = 2'-O-methylguanosine
  modified_base 11: mod_base = OTHER; note = 2'-fluorocytidine
  modified_base 12: mod_base = OTHER; note = 2'-O-methylcytidine
  modified_base 13: mod_base = OTHER; note = 2'-fluorouridine
  modified_base 14: mod_base = OTHER; note = 2'-O-methyluridine
  modified_base 15: mod_base = OTHER; note = 2'-fluorouridine
  modified_base 16: mod_base = OTHER; note = 2'-O-methyluridine
  modified_base 17: mod_base = OTHER; note = 2'-fluoroadenosine
  modified_base 18: mod_base = OTHER; note = 2'-O-methylguanosine
  modified_base 19: mod_base = OTHER; note = 2'-fluorocytidine with phosphorothioate linkage
  modified_base 20: mod_base = OTHER; note = 2'-O-methylguanosine with phosphorothioate linkage
  modified_base 21: mod_base = OTHER; note = 2'-fluorouridine
ttgtaagatgccttttagcgt

SEQ ID NO: 2928 - RNA, 21 nt, synthetic construct
  source 1..21: mol_type = other RNA
  modified_base 1: mod_base = OTHER; note = 2'-fluorouridine with phosphorothioate linkage
  modified_base 2: mod_base = OTHER; note = 2'-O-methylguanosine with phosphorothioate linkage
  modified_base 3: mod_base = OTHER; note = 2'-fluorouridine
  modified_base 4: mod_base = OTHER; note = 2'-O-methyladenosine
  modified_base 5: mod_base = OTHER; note = 2'-fluoroadenosine
  modified_base 6: mod_base = OTHER; note = 2'-O-methylguanosine
  modified_base 7: mod_base = OTHER; note = 2'-fluoroadenosine
  modified_base 8: mod_base = OTHER; note = 2'-O-methyluridine
  modified_base 9: mod_base = OTHER; note = 2'-fluoroguanosine
  modified_base 10: mod_base = OTHER; note = 2'-O-methylcytidine
  modified_base 11: mod_base = OTHER; note = 2'-fluorocytidine
  modified_base 12: mod_base = OTHER; note = 2'-O-methyluridine
  modified_base 13: mod_base = OTHER; note = 2'-fluorouridine
  modified_base 14: mod_base = OTHER; note = 2'-O-methyluridine
  modified_base 15: mod_base = OTHER; note = 2'-fluorouridine
  modified_base 16: mod_base = OTHER; note = 2'-O-methyladenosine
  modified_base 17: mod_base = OTHER; note = 2'-fluoroguanosine
  modified_base 18: mod_base = OTHER; note = 2'-O-methylcytidine
  modified_base 19: mod_base = OTHER; note = 2'-fluoroguanosine with phosphorothioate linkage
  modified_base 20: mod_base = OTHER; note = 2'-O-methyluridine with phosphorothioate linkage
  modified_base 21: mod_base = OTHER; note = 2'-fluorouridine
tgtaagatgccttttagcgtt

SEQ ID NO: 2929 - RNA, 21 nt, synthetic construct
  source 1..21: mol_type = other RNA
  modified_base 1: mod_base = OTHER; note = 2'-fluoroguanosine with phosphorothioate linkage
  modified_base 2: mod_base = OTHER; note = 2'-O-methyluridine with phosphorothioate linkage
  modified_base 3: mod_base = OTHER; note = 2'-fluoroadenosine
  modified_base 4: mod_base = OTHER; note = 2'-O-methyladenosine
  modified_base 5: mod_base = OTHER; note = 2'-fluoroguanosine
  modified_base 6: mod_base = OTHER; note = 2'-O-methyladenosine
  modified_base 7: mod_base = OTHER; note = 2'-fluorouridine
  modified_base 8: mod_base = OTHER; note = 2'-O-methylguanosine
  modified_base 9: mod_base = OTHER; note = 2'-fluorocytidine
  modified_base 10: mod_base = OTHER; note = 2'-O-methylcytidine
  modified_base 11: mod_base = OTHER; note = 2'-fluorouridine
  modified_base 12: mod_base = OTHER; note = 2'-O-methyluridine
  modified_base 13: mod_base = OTHER; note = 2'-fluorouridine
  modified_base 14: mod_base = OTHER; note = 2'-O-methyluridine
  modified_base 15: mod_base = OTHER; note = 2'-fluoroadenosine
  modified_base 16: mod_base = OTHER; note = 2'-O-methylguanosine
  modified_base 17: mod_base = OTHER; note = 2'-fluorocytidine
  modified_base 18: mod_base = OTHER; note = 2'-O-methylguanosine
  modified_base 19: mod_base = OTHER; note = 2'-fluorouridine with phosphorothioate linkage
  modified_base 20: mod_base = OTHER; note = 2'-O-methylguanosine with phosphorothioate linkage
  modified_base 21: mod_base = OTHER; note = 2'-fluorouridine
gtaagatgccttttagcgtgt

SEQ ID NO: 2930 - RNA, 21 nt, synthetic construct
  source 1..21: mol_type = other RNA
  modified_base 1: mod_base = OTHER; note = 2'-fluorouridine with phosphorothioate linkage
  modified_base 2: mod_base = OTHER; note = 2'-O-methyladenosine with phosphorothioate linkage
  modified_base 3: mod_base = OTHER; note = 2'-fluoroadenosine
  modified_base 4: mod_base = OTHER; note = 2'-O-methylguanosine
  modified_base 5: mod_base = OTHER; note = 2'-fluoroadenosine
  modified_base 6: mod_base = OTHER; note = 2'-O-methyluridine
  modified_base 7: mod_base = OTHER; note = 2'-fluoroguanosine
  modified_base 8: mod_base = OTHER; note = 2'-O-methylcytidine
  modified_base 9: mod_base = OTHER; note = 2'-fluorocytidine
  modified_base 10: mod_base = OTHER; note = 2'-O-methyluridine
  modified_base 11: mod_base = OTHER; note = 2'-fluorouridine
  modified_base 12: mod_base = OTHER; note = 2'-O-methyluridine
  modified_base 13: mod_base = OTHER; note = 2'-fluorouridine
  modified_base 14: mod_base = OTHER; note = 2'-O-methyladenosine
  modified_base 15: mod_base = OTHER; note = 2'-fluoroguanosine
  modified_base 16: mod_base = OTHER; note = 2'-O-methylcytidine
  modified_base 17: mod_base = OTHER; note = 2'-fluoroguanosine
  modified_base 18: mod_base = OTHER; note = 2'-O-methyluridine
  modified_base 19: mod_base = OTHER; note = 2'-fluoroguanosine with phosphorothioate linkage
  modified_base 20: mod_base = OTHER; note = 2'-O-methyluridine with phosphorothioate linkage
  modified_base 21: mod_base = OTHER; note = 2'-fluoroadenosine
taagatgccttttagcgtgta

SEQ ID NO: 2931 - RNA, 21 nt, synthetic construct
  source 1..21: mol_type = other RNA
  modified_base 1: mod_base = OTHER; note = 2'-fluoroadenosine with phosphorothioate linkage
  modified_base 2: mod_base = OTHER; note = 2'-O-methyladenosine with phosphorothioate linkage
  modified_base 3: mod_base = OTHER; note = 2'-fluoroguanosine
  modified_base 4: mod_base = OTHER; note = 2'-O-methyladenosine
  modified_base 5: mod_base = OTHER; note = 2'-fluorouridine
  modified_base 6: mod_base = OTHER; note = 2'-O-methylguanosine
  modified_base 7: mod_base = OTHER; note = 2'-fluorocytidine
  modified_base 8: mod_base = OTHER; note = 2'-O-methylcytidine
  modified_base 9: mod_base = OTHER; note = 2'-fluorouridine
  modified_base 10: mod_base = OTHER; note = 2'-O-methyluridine
  modified_base 11: mod_base = OTHER; note = 2'-fluorouridine
  modified_base 12: mod_base = OTHER; note = 2'-O-methyluridine
  modified_base 13: mod_base = OTHER; note = 2'-fluoroadenosine
  modified_base 14: mod_base = OTHER; note = 2'-O-methylguanosine
  modified_base 15: mod_base = OTHER; note = 2'-fluorocytidine
  modified_base 16: mod_base = OTHER; note = 2'-O-methylguanosine
  modified_base 17: mod_base = OTHER; note = 2'-fluorouridine
  modified_base 18: mod_base = OTHER; note = 2'-O-methylguanosine
  modified_base 19: mod_base = OTHER; note = 2'-fluorouridine with phosphorothioate linkage
  modified_base 20: mod_base = OTHER; note = 2'-O-methyladenosine with phosphorothioate linkage
  modified_base 21: mod_base = OTHER; note = 2'-fluorocytidine
aagatgccttttagcgtgtac

SEQ ID NO: 2932 - RNA, 21 nt, synthetic construct
  source 1..21: mol_type = other RNA
  modified_base 1: mod_base = OTHER; note = 2'-fluoroadenosine with phosphorothioate linkage
  modified_base 2: mod_base = OTHER; note = 2'-O-methylguanosine with phosphorothioate linkage
  modified_base 3: mod_base = OTHER; note = 2'-fluoroadenosine
  modified_base 4: mod_base = OTHER; note = 2'-O-methyluridine
  modified_base 5: mod_base = OTHER; note = 2'-fluoroguanosine
  modified_base 6: mod_base = OTHER; note = 2'-O-methylcytidine
  modified_base 7: mod_base = OTHER; note = 2'-fluorocytidine
  modified_base 8: mod_base = OTHER; note = 2'-O-methyluridine
  modified_base 9: mod_base = OTHER; note = 2'-fluorouridine
  modified_base 10: mod_base = OTHER; note = 2'-O-methyluridine
  modified_base 11: mod_base = OTHER; note = 2'-fluorouridine
  modified_base 12: mod_base = OTHER; note = 2'-O-methyladenosine
  modified_base 13: mod_base = OTHER; note = 2'-fluoroguanosine
  modified_base 14: mod_base = OTHER; note = 2'-O-methylcytidine
  modified_base 15: mod_base = OTHER; note = 2'-fluoroguanosine
  modified_base 16: mod_base = OTHER; note = 2'-O-methyluridine
  modified_base 17: mod_base = OTHER; note = 2'-fluoroguanosine
  modified_base 18: mod_base = OTHER; note = 2'-O-methyluridine
  modified_base 19: mod_base = OTHER; note = 2'-fluoroadenosine with phosphorothioate linkage
  modified_base 20: mod_base = OTHER; note = 2'-O-methylcytidine with phosphorothioate linkage
  modified_base 21: mod_base = OTHER; note = 2'-fluoroadenosine
agatgccttttagcgtgtaca

SEQ ID NO: 2933 - RNA, 21 nt, synthetic construct
  source 1..21: mol_type = other RNA
  modified_base 1: mod_base = OTHER; note = 2'-fluoroadenosine with phosphorothioate linkage
  modified_base 2: mod_base = OTHER; note = 2'-O-methyluridine with phosphorothioate linkage
  modified_base 3: mod_base = OTHER; note = 2'-fluoroguanosine
  modified_base 4: mod_base = OTHER; note = 2'-O-methylcytidine
  modified_base 5: mod_base = OTHER; note = 2'-fluorocytidine
  modified_base 6: mod_base = OTHER; note = 2'-O-methyluridine
  modified_base 7: mod_base = OTHER; note = 2'-fluorouridine
  modified_base 8: mod_base = OTHER; note = 2'-O-methyluridine
  modified_base 9: mod_base = OTHER; note = 2'-fluorouridine
  modified_base 10: mod_base = OTHER; note = 2'-O-methyladenosine
  modified_base 11: mod_base = OTHER; note = 2'-fluoroguanosine
  modified_base 12: mod_base = OTHER; note = 2'-O-methylcytidine
  modified_base 13: mod_base = OTHER; note = 2'-fluoroguanosine
  modified_base 14: mod_base = OTHER; note = 2'-O-methyluridine
  modified_base 15: mod_base = OTHER; note = 2'-fluoroguanosine
  modified_base 16: mod_base = OTHER; note = 2'-O-methyluridine
  modified_base 17: mod_base = OTHER; note = 2'-fluoroadenosine
  modified_base 18: mod_base = OTHER; note = 2'-O-methylcytidine
  modified_base 19: mod_base = OTHER; note = 2'-fluoroadenosine with phosphorothioate linkage
  modified_base 20: mod_base = OTHER; note = 2'-O-methylguanosine with phosphorothioate linkage
  modified_base 21: mod_base = OTHER; note = 2'-fluorouridine
atgccttttagcgtgtacagt

SEQ ID NO: 2934 - RNA, 21 nt, synthetic construct
  source 1..21: mol_type = other RNA
  modified_base 1: mod_base = OTHER; note = 2'-fluorouridine with phosphorothioate linkage
  modified_base 2: mod_base = OTHER; note = 2'-O-methylguanosine with phosphorothioate linkage
  modified_base 3: mod_base = OTHER; note = 2'-fluorocytidine
  modified_base 4: mod_base = OTHER; note = 2'-O-methylcytidine
  modified_base 5: mod_base = OTHER; note = 2'-fluorouridine
  modified_base 6: mod_base = OTHER; note = 2'-O-methyluridine
  modified_base 7: mod_base = OTHER; note = 2'-fluorouridine
  modified_base 8: mod_base = OTHER; note = 2'-O-methyluridine
  modified_base 9: mod_base = OTHER; note = 2'-fluoroadenosine
  modified_base 10: mod_base = OTHER; note = 2'-O-methylguanosine
  modified_base 11: mod_base = OTHER; note = 2'-fluorocytidine
  modified_base 12: mod_base = OTHER; note = 2'-O-methylguanosine
  modified_base 13: mod_base = OTHER; note = 2'-fluorouridine
  modified_base 14: mod_base = OTHER; note = 2'-O-methylguanosine
  modified_base 15: mod_base = OTHER; note = 2'-fluorouridine
  modified_base 16: mod_base = OTHER; note = 2'-O-methyladenosine
  modified_base 17: mod_base = OTHER; note = 2'-fluorocytidine
  modified_base 18: mod_base = OTHER; note = 2'-O-methyladenosine
  modified_base 19: mod_base = OTHER; note = 2'-fluoroguanosine with phosphorothioate linkage
  modified_base 20: mod_base = OTHER; note = 2'-O-methyluridine with phosphorothioate linkage
  modified_base 21: mod_base = OTHER; note = 2'-fluoroadenosine
tgccttttagcgtgtacagta

SEQ ID NO: 2935 - RNA, 21 nt, synthetic construct
  source 1..21: mol_type = other RNA
  modified_base 1: mod_base = OTHER; note = 2'-fluoroguanosine with phosphorothioate linkage
  modified_base 2: mod_base = OTHER; note = 2'-O-methylcytidine with phosphorothioate linkage
  modified_base 3: mod_base = OTHER; note = 2'-fluorocytidine
  modified_base 4: mod_base = OTHER; note = 2'-O-methyluridine
  modified_base 5: mod_base = OTHER; note = 2'-fluorouridine
  modified_base 6: mod_base = OTHER; note = 2'-O-methyluridine
  modified_base 7: mod_base = OTHER; note = 2'-fluorouridine
  modified_base 8: mod_base = OTHER; note = 2'-O-methyladenosine
  modified_base 9: mod_base = OTHER; note = 2'-fluoroguanosine
  modified_base 10: mod_base = OTHER; note = 2'-O-methylcytidine
  modified_base 11: mod_base = OTHER; note = 2'-fluoroguanosine
  modified_base 12: mod_base = OTHER; note = 2'-O-methyluridine
  modified_base 13: mod_base = OTHER; note = 2'-fluoroguanosine
  modified_base 14: mod_base = OTHER; note = 2'-O-methyluridine
  modified_base 15: mod_base = OTHER; note = 2'-fluoroadenosine
  modified_base 16: mod_base = OTHER; note = 2'-O-methylcytidine
  modified_base 17: mod_base = OTHER; note = 2'-fluoroadenosine
  modified_base 18: mod_base = OTHER; note = 2'-O-methylguanosine
  modified_base 19: mod_base = OTHER; note = 2'-fluorouridine with phosphorothioate linkage
  modified_base 20: mod_base = OTHER; note = 2'-O-methyladenosine with phosphorothioate linkage
  modified_base 21: mod_base = OTHER; note = 2'-fluorocytidine
gccttttagcgtgtacagtac

SEQ ID NO: 2936 - RNA, 21 nt, synthetic construct
  source 1..21: mol_type = other RNA
  modified_base 1: mod_base = OTHER; note = 2'-fluorocytidine with phosphorothioate linkage
  modified_base 2: mod_base = OTHER; note = 2'-O-methylcytidine with phosphorothioate linkage
  modified_base 3: mod_base = OTHER; note = 2'-fluorouridine
  modified_base 4: mod_base = OTHER; note = 2'-O-methyluridine
  modified_base 5: mod_base = OTHER; note = 2'-fluorouridine
  modified_base 6: mod_base = OTHER; note = 2'-O-methyluridine
  modified_base 7: mod_base = OTHER; note = 2'-fluoroadenosine
  modified_base 8: mod_base = OTHER; note = 2'-O-methylguanosine
  modified_base 9: mod_base = OTHER; note = 2'-fluorocytidine
  modified_base 10: mod_base = OTHER; note = 2'-O-methylguanosine
  modified_base 11: mod_base = OTHER; note = 2'-fluorouridine
  modified_base 12: mod_base = OTHER; note = 2'-O-methylguanosine
  modified_base 13: mod_base = OTHER; note = 2'-fluorouridine
  modified_base 14: mod_base = OTHER; note = 2'-O-methyladenosine
  modified_base 15: mod_base = OTHER; note = 2'-fluorocytidine
  modified_base 16: mod_base = OTHER; note = 2'-O-methyladenosine
  modified_base 17: mod_base = OTHER; note = 2'-fluoroguanosine
  modified_base 18: mod_base = OTHER; note = 2'-O-methyluridine
  modified_base 19: mod_base = OTHER; note = 2'-fluoroadenosine with phosphorothioate linkage
  modified_base 20: mod_base = OTHER; note = 2'-O-methylcytidine with phosphorothioate linkage
  modified_base 21: mod_base = OTHER; note = 2'-fluorocytidine
ccttttagcgtgtacagtacc

SEQ ID NO: 2937 - RNA, 21 nt, synthetic construct
  source 1..21: mol_type = other RNA
  modified_base 1: mod_base = OTHER; note = 2'-fluorocytidine with phosphorothioate linkage
  modified_base 2: mod_base = OTHER; note = 2'-O-methyluridine with phosphorothioate linkage
  modified_base 3: mod_base = OTHER; note = 2'-fluorouridine
  modified_base 4: mod_base = OTHER; note = 2'-O-methyluridine
  modified_base 5: mod_base = OTHER; note = 2'-fluorouridine
  modified_base 6: mod_base = OTHER; note = 2'-O-methyladenosine
  modified_base 7: mod_base = OTHER; note = 2'-fluoroguanosine
  modified_base 8: mod_base = OTHER; note = 2'-O-methylcytidine
  modified_base 9: mod_base = OTHER; note = 2'-fluoroguanosine
  modified_base 10: mod_base = OTHER; note = 2'-O-methyluridine
  modified_base 11: mod_base = OTHER; note = 2'-fluoroguanosine
  modified_base 12: mod_base = OTHER; note = 2'-O-methyluridine
  modified_base 13: mod_base = OTHER; note = 2'-fluoroadenosine
  modified_base 14: mod_base = OTHER; note = 2'-O-methylcytidine
  modified_base 15: mod_base = OTHER; note = 2'-fluoroadenosine
  modified_base 16: mod_base = OTHER; note = 2'-O-methylguanosine
  modified_base 17: mod_base = OTHER; note = 2'-fluorouridine
  modified_base 18: mod_base = OTHER; note = 2'-O-methyladenosine
  modified_base 19: mod_base = OTHER; note = 2'-fluorocytidine with phosphorothioate linkage
  modified_base 20: mod_base = OTHER; note = 2'-O-methylcytidine with phosphorothioate linkage
  modified_base 21: mod_base = OTHER; note = 2'-fluorocytidine
cttttagcgtgtacagtaccc

SEQ ID NO: 2938 - RNA, 21 nt, synthetic construct
  source 1..21: mol_type = other RNA
  modified_base 1: mod_base = OTHER; note = 2'-fluorouridine with phosphorothioate linkage
  modified_base 2: mod_base = OTHER; note = 2'-O-methyluridine with phosphorothioate linkage
  modified_base 3: mod_base = OTHER; note = 2'-fluorouridine
  modified_base 4: mod_base = OTHER; note = 2'-O-methyluridine
  modified_base 5: mod_base = OTHER; note = 2'-fluoroadenosine
  modified_base 6: mod_base = OTHER; note = 2'-O-methylguanosine
  modified_base 7: mod_base = OTHER; note = 2'-fluorocytidine
  modified_base 8: mod_base = OTHER; note = 2'-O-methylguanosine
  modified_base 9: mod_base = OTHER; note = 2'-fluorouridine
  modified_base 10: mod_base = OTHER; note = 2'-O-methylguanosine
  modified_base 11: mod_base = OTHER; note = 2'-fluorouridine
  modified_base 12: mod_base = OTHER; note = 2'-O-methyladenosine
  modified_base 13: mod_base = OTHER; note = 2'-fluorocytidine
  modified_base 14: mod_base = OTHER; note = 2'-O-methyladenosine
  modified_base 15: mod_base = OTHER; note = 2'-fluoroguanosine
  modified_base 16: mod_base = OTHER; note = 2'-O-methyluridine
  modified_base 17: mod_base = OTHER; note = 2'-fluoroadenosine
  modified_base 18: mod_base = OTHER; note = 2'-O-methylcytidine
  modified_base 19: mod_base = OTHER; note = 2'-fluorocytidine with phosphorothioate linkage
  modified_base 20: mod_base = OTHER; note = 2'-O-methylcytidine with phosphorothioate linkage
  modified_base 21: mod_base = OTHER; note = 2'-fluorouridine
ttttagcgtgtacagtaccct

SEQ ID NO: 2939 - RNA, 21 nt, synthetic construct
  source 1..21: mol_type = other RNA
  modified_base 1: mod_base = OTHER; note = 2'-fluorouridine with phosphorothioate linkage
  modified_base 2: mod_base = OTHER; note = 2'-O-methyluridine with phosphorothioate linkage
  modified_base 3: mod_base = OTHER; note = 2'-fluorouridine
  modified_base 4: mod_base = OTHER; note = 2'-O-methyladenosine
  modified_base 5: mod_base = OTHER; note = 2'-fluoroguanosine
  modified_base 6: mod_base = OTHER; note = 2'-O-methylcytidine
  modified_base 7: mod_base = OTHER; note = 2'-fluoroguanosine
  modified_base 8: mod_base = OTHER; note = 2'-O-methyluridine
  modified_base 9: mod_base = OTHER; note = 2'-fluoroguanosine
  modified_base 10: mod_base = OTHER; note = 2'-O-methyluridine
  modified_base 11: mod_base = OTHER; note = 2'-fluoroadenosine
  modified_base 12: mod_base = OTHER; note = 2'-O-methylcytidine
  modified_base 13: mod_base = OTHER; note = 2'-fluoroadenosine
  modified_base 14: mod_base = OTHER; note = 2'-O-methylguanosine
  modified_base 15: mod_base = OTHER; note = 2'-fluorouridine
  modified_base 16: mod_base = OTHER; note = 2'-O-methyladenosine
  modified_base 17: mod_base = OTHER; note = 2'-fluorocytidine
  modified_base 18: mod_base = OTHER; note = 2'-O-methylcytidine
  modified_base 19: mod_base = OTHER; note = 2'-fluorocytidine with phosphorothioate linkage
  modified_base 20: mod_base = OTHER; note = 2'-O-methyluridine with phosphorothioate linkage
  modified_base 21: mod_base = OTHER; note = 2'-fluorouridine
tttagcgtgtacagtaccctt

SEQ ID NO: 2940 - RNA, 21 nt, synthetic construct
  source 1..21: mol_type = other RNA
  modified_base 1: mod_base = OTHER; note = 2'-fluorouridine with phosphorothioate linkage
  modified_base 2: mod_base = OTHER; note = 2'-O-methyluridine with phosphorothioate linkage
  modified_base 3: mod_base = OTHER; note = 2'-fluoroadenosine
  modified_base 4: mod_base = OTHER; note = 2'-O-methylguanosine
  modified_base 5: mod_base = OTHER; note = 2'-fluorocytidine
  modified_base 6: mod_base = OTHER; note = 2'-O-methylguanosine
  modified_base 7: mod_base = OTHER; note = 2'-fluorouridine
  modified_base 8: mod_base = OTHER; note = 2'-O-methylguanosine
  modified_base 9: mod_base = OTHER; note = 2'-fluorouridine
  modified_base 10: mod_base = OTHER; note = 2'-O-methyladenosine
  modified_base 11: mod_base = OTHER; note = 2'-fluorocytidine
  modified_base 12: mod_base = OTHER; note = 2'-O-methyladenosine
  modified_base 13: mod_base = OTHER; note = 2'-fluoroguanosine
  modified_base 14: mod_base = OTHER; note = 2'-O-methyluridine
  modified_base 15: mod_base = OTHER; note = 2'-fluoroadenosine
  modified_base 16: mod_base = OTHER; note = 2'-O-methylcytidine
  modified_base 17: mod_base = OTHER; note = 2'-fluorocytidine
  modified_base 18: mod_base = OTHER; note = 2'-O-methylcytidine
  modified_base 19: mod_base = OTHER; note = 2'-fluorouridine with phosphorothioate linkage
  modified_base 20: mod_base = OTHER; note = 2'-O-methylguanosine with phosphorothioate linkage
  modified_base 21: mod_base = OTHER; note = 2'-fluorouridine
ttagcgtgtacagtaccctgt

SEQ ID NO: 2941 - RNA, 21 nt, synthetic construct
  source 1..21: mol_type = other RNA
  modified_base 1: mod_base = OTHER; note = 2'-fluorouridine with phosphorothioate linkage
  modified_base 2: mod_base = OTHER; note = 2'-O-methyladenosine with phosphorothioate linkage
  modified_base 3: mod_base = OTHER; note = 2'-fluoroguanosine
  modified_base 4: mod_base = OTHER; note = 2'-O-methylcytidine
  modified_base 5: mod_base = OTHER; note = 2'-fluoroguanosine
  modified_base 6: mod_base = OTHER; note = 2'-O-methyluridine
  modified_base 7: mod_base = OTHER; note = 2'-fluoroguanosine
  modified_base 8: mod_base = OTHER; note = 2'-O-methyluridine
  modified_base 9: mod_base = OTHER; note = 2'-fluoroadenosine
  modified_base 10: mod_base = OTHER; note = 2'-O-methylcytidine
  modified_base 11: mod_base = OTHER; note = 2'-fluoroadenosine
  modified_base 12: mod_base = OTHER; note = 2'-O-methylguanosine
  modified_base 13: mod_base = OTHER; note = 2'-fluorouridine
  modified_base 14: mod_base = OTHER; note = 2'-O-methyladenosine
  modified_base 15: mod_base = OTHER; note = 2'-fluorocytidine
  modified_base 16: mod_base = OTHER; note = 2'-O-methylcytidine
  modified_base 17: mod_base = OTHER; note = 2'-fluorocytidine
  modified_base 18: mod_base = OTHER; note = 2'-O-methyluridine
  modified_base 19: mod_base = OTHER; note = 2'-fluoroguanosine with phosphorothioate linkage
  modified_base 20: mod_base = OTHER; note = 2'-O-methylguanosine with phosphorothioate linkage
  modified_base 21: mod_base = OTHER; note = 2'-fluoroadenosine
tagcgtgtacagtaccctgga

SEQ ID NO: 2942 - RNA, 21 nt, synthetic construct
  source 1..21: mol_type = other RNA
  modified_base 1: mod_base = OTHER; note = 2'-fluoroadenosine with phosphorothioate linkage
  modified_base 2: mod_base = OTHER; note = 2'-O-methylguanosine with phosphorothioate linkage
  modified_base 3: mod_base = OTHER; note = 2'-fluorocytidine
  modified_base 4: mod_base = OTHER; note = 2'-O-methylguanosine
  modified_base 5: mod_base = OTHER; note = 2'-fluorouridine
  modified_base 6: mod_base = OTHER; note = 2'-O-methylguanosine
  modified_base 7: mod_base = OTHER; note = 2'-fluorouridine
  modified_base 8: mod_base = OTHER; note = 2'-O-methyladenosine
  modified_base 9: mod_base = OTHER; note = 2'-fluorocytidine
  modified_base 10: mod_base = OTHER; note = 2'-O-methyladenosine
  modified_base 11: mod_base = OTHER; note = 2'-fluoroguanosine
  modified_base 12: mod_base = OTHER; note = 2'-O-methyluridine
  modified_base 13: mod_base = OTHER; note = 2'-fluoroadenosine
  modified_base 14: mod_base = OTHER; note = 2'-O-methylcytidine
  modified_base 15: mod_base = OTHER; note = 2'-fluorocytidine
  modified_base 16: mod_base = OTHER; note = 2'-O-methylcytidine
  modified_base 17: mod_base = OTHER; note = 2'-fluorouridine
  modified_base 18: mod_base = OTHER; note = 2'-O-methylguanosine
  modified_base 19: mod_base = OTHER; note = 2'-fluoroguanosine with phosphorothioate linkage
  modified_base 20: mod_base = OTHER; note = 2'-O-methyladenosine with phosphorothioate linkage
  modified_base 21: mod_base = OTHER; note = 2'-fluorouridine
agcgtgtacagtaccctggat

SEQ ID NO: 2943 - RNA, 21 nt, synthetic construct
  source 1..21: mol_type = other RNA
  modified_base 1: mod_base = OTHER; note = 2'-fluoroguanosine with phosphorothioate linkage
  modified_base 2: mod_base = OTHER; note = 2'-O-methyluridine with phosphorothioate linkage
  modified_base 3: mod_base = OTHER; note = 2'-fluoroguanosine
  modified_base 4: mod_base = OTHER; note = 2'-O-methyluridine
  modified_base 5: mod_base = OTHER; note = 2'-fluoroadenosine
  modified_base 6: mod_base = OTHER; note = 2'-O-methylcytidine
  modified_base 7: mod_base = OTHER; note = 2'-fluoroadenosine
  modified_base 8: mod_base = OTHER; note = 2'-O-methylguanosine
  modified_base 9: mod_base = OTHER; note = 2'-fluorouridine
  modified_base 10: mod_base = OTHER; note = 2'-O-methyladenosine
  modified_base 11: mod_base = OTHER; note = 2'-fluorocytidine
  modified_base 12: mod_base = OTHER; note = 2'-O-methylcytidine
  modified_base 13: mod_base = OTHER; note = 2'-fluorocytidine
  modified_base 14: mod_base = OTHER; note = 2'-O-methyluridine
  modified_base 15: mod_base = OTHER; note = 2'-fluoroguanosine
  modified_base 16: mod_base = OTHER; note = 2'-O-methylguanosine
  modified_base 17: mod_base = OTHER; note = 2'-fluoroadenosine
  modified_base 18: mod_base = OTHER; note = 2'-O-methylguanosine
  modified_base 19: mod_base = OTHER; note = 2'-fluoroadenosine with phosphorothioate linkage
  modified_base 20: mod_base = OTHER; note = 2'-O-methyladenosine with phosphorothioate linkage
  modified_base 21: mod_base = OTHER; note = 2'-fluoroadenosine
gtgtacagtaccctggagaaa

SEQ ID NO: 2944 - RNA, 21 nt, synthetic construct
  source 1..21: mol_type = other RNA
  modified_base 1: mod_base = OTHER; note = 2'-fluorouridine with phosphorothioate linkage
  modified_base 2: mod_base = OTHER; note = 2'-O-methylguanosine with phosphorothioate linkage
  modified_base 3: mod_base = OTHER; note = 2'-fluorouridine
  modified_base 4: mod_base = OTHER; note = 2'-O-methyladenosine
  modified_base 5: mod_base = OTHER; note = 2'-fluorocytidine
  modified_base 6: mod_base = OTHER; note = 2'-O-methyladenosine
  modified_base 7: mod_base = OTHER; note = 2'-fluoroguanosine
  modified_base 8: mod_base = OTHER; note = 2'-O-methyluridine
  modified_base 9: mod_base = OTHER; note = 2'-fluoroadenosine
  modified_base 10: mod_base = OTHER; note = 2'-O-methylcytidine
  modified_base 11: mod_base = OTHER; note = 2'-fluorocytidine
  modified_base 12: mod_base = OTHER; note = 2'-O-methylcytidine
  modified_base 13: mod_base = OTHER; note = 2'-fluorouridine
  modified_base 14: mod_base = OTHER; note = 2'-O-methylguanosine
  modified_base 15: mod_base = OTHER; note = 2'-fluoroguanosine
  modified_base 16: mod_base = OTHER; note = 2'-O-methyladenosine
  modified_base 17: mod_base = OTHER; note = 2'-fluoroguanosine
  modified_base 18: mod_base = OTHER; note = 2'-O-methyladenosine
  modified_base 19: mod_base = OTHER; note = 2'-fluoroadenosine with phosphorothioate linkage
  modified_base 20: mod_base = OTHER; note = 2'-O-methyladenosine with phosphorothioate linkage
  modified_base 21: mod_base = OTHER; note = 2'-fluorocytidine
tgtacagtaccctggagaaac

SEQ ID NO: 2945 - RNA, 21 nt, synthetic construct
  source 1..21: mol_type = other RNA
  modified_base 1: mod_base = OTHER; note = 2'-fluoroadenosine with phosphorothioate linkage
  modified_base 2: mod_base = OTHER; note = 2'-O-methyluridine with phosphorothioate linkage
  modified_base 3: mod_base = OTHER; note = 2'-fluoroguanosine
  modified_base 4: mod_base = OTHER; note = 2'-O-methylguanosine
  modified_base 5: mod_base = OTHER; note = 2'-fluorocytidine
  modified_base 6: mod_base = OTHER; note = 2'-O-methyladenosine
  modified_base 7: mod_base = OTHER; note = 2'-fluorocytidine
  modified_base 8: mod_base = OTHER; note = 2'-O-methyladenosine
  modified_base 9: mod_base = OTHER; note = 2'-fluoroguanosine
  modified_base 10: mod_base = OTHER; note = 2'-O-methyluridine
  modified_base 11: mod_base = OTHER; note = 2'-fluoroguanosine
  modified_base 12: mod_base = OTHER; note = 2'-O-methyladenosine
  modified_base 13: mod_base = OTHER; note = 2'-fluorouridine
  modified_base 14: mod_base = OTHER; note = 2'-O-methylcytidine
  modified_base 15: mod_base = OTHER; note = 2'-fluoroguanosine
  modified_base 16: mod_base = OTHER; note = 2'-O-methyladenosine
  modified_base 17: mod_base = OTHER; note = 2'-fluoroguanosine
  modified_base 18: mod_base = OTHER; note = 2'-O-methyluridine
  modified_base 19: mod_base = OTHER; note = 2'-fluoroguanosine with phosphorothioate linkage
  modified_base 20: mod_base = OTHER; note = 2'-O-methyluridine with phosphorothioate linkage
  modified_base 21: mod_base = OTHER; note = 2'-fluorouridine
atggcacagtgatcgagtgtt

SEQ ID NO: 2946 - RNA, 21 nt, synthetic construct
  source 1..21: mol_type = other RNA
  modified_base 1: mod_base = OTHER; note = 2'-fluorouridine with phosphorothioate linkage
  modified_base 2: mod_base = OTHER; note = 2'-O-methylguanosine with phosphorothioate linkage
  modified_base 3: mod_base = OTHER; note = 2'-fluoroguanosine
  modified_base 4: mod_base = OTHER; note = 2'-O-methylcytidine
  modified_base 5: mod_base = OTHER; note = 2'-fluoroadenosine
  modified_base 6: mod_base = OTHER; note = 2'-O-methylcytidine
  modified_base 7: mod_base = OTHER; note = 2'-fluoroadenosine
  modified_base 8: mod_base = OTHER; note = 2'-O-methylguanosine
  modified_base 9: mod_base = OTHER; note = 2'-fluorouridine
  modified_base 10: mod_base = OTHER; note = 2'-O-methylguanosine
  modified_base 11: mod_base = OTHER; note = 2'-fluoroadenosine
  modified_base 12: mod_base = OTHER; note = 2'-O-methyluridine
  modified_base 13: mod_base = OTHER; note = 2'-fluorocytidine
  modified_base 14: mod_base = OTHER; note = 2'-O-methylguanosine
  modified_base 15: mod_base = OTHER; note = 2'-fluoroadenosine
  modified_base 16: mod_base = OTHER; note = 2'-O-methylguanosine
  modified_base 17: mod_base = OTHER; note = 2'-fluorouridine
  modified_base 18: mod_base = OTHER; note = 2'-O-methylguanosine
  modified_base 19: mod_base = OTHER; note = 2'-fluorouridine with phosphorothioate linkage
  modified_base 20: mod_base = OTHER; note = 2'-O-methyluridine with phosphorothioate linkage
  modified_base 21: mod_base = OTHER; note = 2'-fluorouridine
tggcacagtgatcgagtgttt

SEQ ID NO: 2947 - RNA, 21 nt, synthetic construct
  source 1..21: mol_type = other RNA
  modified_base 1: mod_base = OTHER; note = 2'-fluorocytidine with phosphorothioate linkage
  modified_base 2: mod_base = OTHER; note = 2'-O-methyladenosine with phosphorothioate linkage
  modified_base 3: mod_base = OTHER; note = 2'-fluorocytidine
  modified_base 4: mod_base = OTHER; note = 2'-O-methyladenosine
  modified_base 5: mod_base = OTHER; note = 2'-fluoroguanosine
  modified_base 6: mod_base = OTHER; note = 2'-O-methyluridine
  modified_base 7: mod_base = OTHER; note = 2'-fluoroguanosine
  modified_base 8: mod_base = OTHER; note = 2'-O-methyladenosine
  modified_base 9: mod_base = OTHER; note = 2'-fluorouridine
  modified_base 10: mod_base = OTHER; note = 2'-O-methylcytidine
  modified_base 11: mod_base = OTHER; note = 2'-fluoroguanosine
  modified_base 12: mod_base = OTHER; note = 2'-O-methyladenosine
  modified_base 13: mod_base = OTHER; note = 2'-fluoroguanosine
  modified_base 14: mod_base = OTHER; note = 2'-O-methyluridine
  modified_base 15: mod_base = OTHER; note = 2'-fluoroguanosine
  modified_base 16: mod_base = OTHER; note = 2'-O-methyluridine
  modified_base 17: mod_base = OTHER; note = 2'-fluorouridine
  modified_base 18: mod_base = OTHER; note = 2'-O-methylguanosine
  modified_base 19: mod_base = OTHER; note = 2'-fluoroadenosine with phosphorothioate linkage
  modified_base 20: mod_base = OTHER; note = 2'-O-methyladenosine with phosphorothioate linkage
  modified_base 21: mod_base = OTHER; note = 2'-fluorouridine
cacagtgatcgagtgttgaat

SEQ ID NO: 2948 - RNA, 21 nt, synthetic construct
  source 1..21: mol_type = other RNA
  modified_base 1: mod_base = OTHER; note = 2'-fluoroadenosine with phosphorothioate linkage
  modified_base 2: mod_base = OTHER; note = 2'-O-methylcytidine with phosphorothioate linkage
  modified_base 3: mod_base = OTHER; note = 2'-fluoroadenosine
  modified_base 4: mod_base = OTHER; note = 2'-O-methylguanosine
  modified_base 5: mod_base = OTHER; note = 2'-fluorouridine
  modified_base 6: mod_base = OTHER; note = 2'-O-methylguanosine
  modified_base 7: mod_base = OTHER; note = 2'-fluoroadenosine
  modified_base 8: mod_base = OTHER; note = 2'-O-methyluridine
  modified_base 9: mod_base = OTHER; note = 2'-fluorocytidine
  modified_base 10: mod_base = OTHER; note = 2'-O-methylguanosine
  modified_base 11: mod_base = OTHER; note = 2'-fluoroadenosine
  modified_base 12: mod_base = OTHER; note = 2'-O-methylguanosine
  modified_base 13: mod_base = OTHER; note = 2'-fluorouridine
  modified_base 14: mod_base = OTHER; note = 2'-O-methylguanosine
  modified_base 15: mod_base = OTHER; note = 2'-fluorouridine
  modified_base 16: mod_base = OTHER; note = 2'-O-methyluridine
  modified_base 17: mod_base = OTHER; note = 2'-fluoroguanosine
  modified_base 18: mod_base = OTHER; note = 2'-O-methyladenosine
  modified_base 19: mod_base = OTHER; note = 2'-fluoroadenosine with phosphorothioate linkage
  modified_base 20: mod_base = OTHER; note = 2'-O-methyluridine with phosphorothioate linkage
  modified_base 21: mod_base = OTHER; note = 2'-fluoroadenosine
acagtgatcgagtgttgaata

SEQ ID NO: 2949 - RNA, 21 nt, synthetic construct
  source 1..21: mol_type = other RNA
  modified_base 1: mod_base = OTHER; note = 2'-fluorocytidine with phosphorothioate linkage
  modified_base 2: mod_base = OTHER; note = 2'-O-methyladenosine with phosphorothioate linkage
  modified_base 3: mod_base = OTHER; note = 2'-fluoroguanosine
  modified_base 4: mod_base = OTHER; note = 2'-O-methyluridine
  modified_base 5: mod_base = OTHER; note = 2'-fluoroguanosine
  modified_base 6: mod_base = OTHER; note = 2'-O-methyladenosine
  modified_base 7: mod_base = OTHER; note = 2'-fluorouridine
  modified_base 8: mod_base = OTHER; note = 2'-O-methylcytidine
  modified_base 9: mod_base = OTHER; note = 2'-fluoroguanosine
  modified_base 10: mod_base = OTHER; note = 2'-O-methyladenosine
  modified_base 11: mod_base = OTHER; note = 2'-fluoroguanosine
  modified_base 12: mod_base = OTHER; note = 2'-O-methyluridine
  modified_base 13: mod_base = OTHER; note = 2'-fluoroguanosine
  modified_base 14: mod_base = OTHER; note = 2'-O-methyluridine
  modified_base 15: mod_base = OTHER; note = 2'-fluorouridine
  modified_base 16: mod_base = OTHER; note = 2'-O-methylguanosine
  modified_base 17: mod_base = OTHER; note = 2'-fluoroadenosine
  modified_base 18: mod_base = OTHER; note = 2'-O-methyladenosine
  modified_base 19: mod_base = OTHER; note = 2'-fluorouridine with phosphorothioate linkage
  modified_base 20: mod_base = OTHER; note = 2'-O-methyladenosine with phosphorothioate linkage
  modified_base 21: mod_base = OTHER; note = 2'-fluoroadenosine
cagtgatcgagtgttgaataa

SEQ ID NO: 2950 - RNA, 21 nt, synthetic construct
  source 1..21: mol_type = other RNA
  modified_base 1: mod_base = OTHER; note = 2'-fluoroadenosine with phosphorothioate linkage
  modified_base 2: mod_base = OTHER; note = 2'-O-methylguanosine with phosphorothioate linkage
  modified_base 3: mod_base = OTHER; note = 2'-fluorouridine
  modified_base 4: mod_base = OTHER; note = 2'-O-methylguanosine
  modified_base 5: mod_base = OTHER; note = 2'-fluoroadenosine
  modified_base 6: mod_base = OTHER; note = 2'-O-methyluridine
  modified_base 7: mod_base = OTHER; note = 2'-fluorocytidine
  modified_base 8: mod_base = OTHER; note = 2'-O-methylguanosine
  modified_base 9: mod_base = OTHER; note = 2'-fluoroadenosine
  modified_base 10: mod_base = OTHER; note = 2'-O-methylguanosine
  modified_base 11: mod_base = OTHER; note = 2'-fluorouridine
  modified_base 12: mod_base = OTHER; note = 2'-O-methylguanosine
  modified_base 13: mod_base = OTHER; note = 2'-fluorouridine
  modified_base 14: mod_base = OTHER; note = 2'-O-methyluridine
  modified_base 15: mod_base = OTHER; note = 2'-fluoroguanosine
  modified_base 16: mod_base = OTHER; note = 2'-O-methyladenosine
  modified_base 17: mod_base = OTHER; note = 2'-fluoroadenosine
  modified_base 18: mod_base = OTHER; note = 2'-O-methyluridine
  modified_base 19: mod_base = OTHER; note = 2'-fluoroadenosine with phosphorothioate linkage
  modified_base 20: mod_base = OTHER; note = 2'-O-methyladenosine with phosphorothioate linkage
  modified_base 21: mod_base = OTHER; note = 2'-fluorouridine
agtgatcgagtgttgaataat

SEQ ID NO: 2951 - RNA, 21 nt, synthetic construct
  source 1..21: mol_type = other RNA
  modified_base 1: mod_base = OTHER; note = 2'-fluoroguanosine with phosphorothioate linkage
  modified_base 2: mod_base = OTHER; note = 2'-O-methyluridine with phosphorothioate linkage
  modified_base 3: mod_base = OTHER; note = 2'-fluoroguanosine
  modified_base 4: mod_base = OTHER; note = 2'-O-methyladenosine
  modified_base 5: mod_base = OTHER; note = 2'-fluorouridine
  modified_base 6: mod_base = OTHER; note = 2'-O-methylcytidine
  modified_base 7: mod_base = OTHER; note = 2'-fluoroguanosine
  modified_base 8: mod_base = OTHER; note = 2'-O-methyladenosine
  modified_base 9: mod_base = OTHER; note = 2'-fluoroguanosine
  modified_base 10: mod_base = OTHER; note = 2'-O-methyluridine
  modified_base 11: mod_base = OTHER; note = 2'-fluoroguanosine
  modified_base 12: mod_base = OTHER; note = 2'-O-methyluridine
  modified_base 13: mod_base = OTHER; note = 2'-fluorouridine
  modified_base 14: mod_base = OTHER; note = 2'-O-methylguanosine
  modified_base 15: mod_base = OTHER; note = 2'-fluoroadenosine
  modified_base 16: mod_base = OTHER; note = 2'-O-methyladenosine
  modified_base 17: mod_base = OTHER; note = 2'-fluorouridine
  modified_base 18: mod_base = OTHER; note = 2'-O-methyladenosine
  modified_base 19: mod_base = OTHER; note = 2'-fluoroadenosine with phosphorothioate linkage
  modified_base 20: mod_base = OTHER; note = 2'-O-methyluridine with phosphorothioate linkage
  modified_base 21: mod_base = OTHER; note = 2'-fluorouridine
gtgatcgagtgttgaataatt

SEQ ID NO: 2952 - RNA, 21 nt, synthetic construct
  source 1..21: mol_type = other RNA
  modified_base 1: mod_base = OTHER; note = 2'-fluoroguanosine with phosphorothioate linkage
  modified_base 2: mod_base = OTHER; note = 2'-O-methylcytidine with phosphorothioate linkage
  modified_base 3: mod_base = OTHER; note = 2'-fluoroadenosine
  modified_base 4: mod_base = OTHER; note = 2'-O-methylguanosine
  modified_base 5: mod_base = OTHER; note = 2'-fluoroguanosine
  modified_base 6: mod_base = OTHER; note = 2'-O-methylguanosine
  modified_base 7: mod_base = OTHER; note = 2'-fluoroadenosine
  modified_base 8: mod_base = OTHER; note = 2'-O-methyladenosine
  modified_base 9: mod_base = OTHER; note = 2'-fluorocytidine
  modified_base 10: mod_base = OTHER; note = 2'-O-methyladenosine
  modified_base 11: mod_base = OTHER; note = 2'-fluorocytidine
  modified_base 12: mod_base = OTHER; note = 2'-O-methylguanosine
  modified_base 13: mod_base = OTHER; note = 2'-fluorouridine
  modified_base 14: mod_base = OTHER; note = 2'-O-methylcytidine
  modified_base 15: mod_base = OTHER; note = 2'-fluorouridine
  modified_base 16: mod_base = OTHER; note = 2'-O-methyladenosine
  modified_base 17: mod_base = OTHER; note = 2'-fluoroguanosine
  modified_base 18: mod_base = OTHER; note = 2'-O-methylcytidine
  modified_base 19: mod_base = OTHER; note = 2'-fluorocytidine with phosphorothioate linkage
  modified_base 20: mod_base = OTHER; note = 2'-O-methylcytidine with phosphorothioate linkage
  modified_base 21: mod_base = OTHER; note = 2'-fluoroadenosine
gcagggaacacgtctagccca

SEQ ID NO: 2953 - RNA, 21 nt, synthetic construct
  source 1..21: mol_type = other RNA
  modified_base 1: mod_base = OTHER; note = 2'-fluorouridine with phosphorothioate linkage
  modified_base 2: mod_base = OTHER; note = 2'-O-methyluridine with phosphorothioate linkage
  modified_base 3: mod_base = OTHER; note = 2'-fluorocytidine
  modified_base 4: mod_base = OTHER; note = 2'-O-methyladenosine
  modified_base 5: mod_base = OTHER; note = 2'-fluoroguanosine
  modified_base 6: mod_base = OTHER; note = 2'-O-methyladenosine
  modified_base 7: mod_base = OTHER; note = 2'-fluoroguanosine
  modified_base 8: mod_base = OTHER; note = 2'-O-methylcytidine
  modified_base 9: mod_base = OTHER; note = 2'-fluoroadenosine
  modified_base 10: mod_base = OTHER; note = 2'-O-methyladenosine
  modified_base 11: mod_base = OTHER; note = 2'-fluorocytidine
  modified_base 12: mod_base = OTHER; note = 2'-O-methylcytidine
  modified_base 13: mod_base = OTHER; note = 2'-fluorouridine
  modified_base 14: mod_base = OTHER; note = 2'-O-methylguanosine
  modified_base 15: mod_base = OTHER; note = 2'-fluoroguanosine
  modified_base 16: mod_base = OTHER; note = 2'-O-methyluridine
  modified_base 17: mod_base = OTHER; note = 2'-fluoroguanosine
  modified_base 18: mod_base = OTHER; note = 2'-O-methylguanosine
  modified_base 19: mod_base = OTHER; note = 2'-fluorouridine with phosphorothioate linkage
  modified_base 20: mod_base = OTHER; note = 2'-O-methylguanosine with phosphorothioate linkage
  modified_base 21: mod_base = OTHER; note = 2'-fluorocytidine
ttcagagcaacctggtggtgc

SEQ ID NO: 2954 - RNA, 21 nt, synthetic construct
  source 1..21: mol_type = other RNA
  modified_base 1: mod_base = OTHER; note = 2'-fluoroadenosine with phosphorothioate linkage
  modified_base 2: mod_base = OTHER; note = 2'-O-methyluridine with phosphorothioate linkage
  modified_base 3: mod_base = OTHER; note = 2'-fluoroguanosine
  modified_base 4: mod_base = OTHER; note = 2'-O-methyladenosine
  modified_base 5: mod_base = OTHER; note = 2'-fluorocytidine
  modified_base 6: mod_base = OTHER; note = 2'-O-methylguanosine
  modified_base 7: mod_base = OTHER; note = 2'-fluoroguanosine
  modified_base 8: mod_base = OTHER; note = 2'-O-methyluridine
  modified_base 9: mod_base = OTHER; note = 2'-fluorocytidine
  modified_base 10: mod_base = OTHER; note = 2'-O-methyladenosine
  modified_base 11: mod_base = OTHER; note = 2'-fluoroadenosine
  modified_base 12: mod_base = OTHER; note = 2'-O-methylguanosine
  modified_base 13: mod_base = OTHER; note = 2'-fluorouridine
  modified_base 14: mod_base = OTHER; note = 2'-O-methylcytidine
  modified_base 15: mod_base = OTHER; note = 2'-fluorocytidine
  modified_base 16: mod_base = OTHER; note = 2'-O-methylguanosine
  modified_base 17: mod_base = OTHER; note = 2'-fluoroadenosine
  modified_base 18: mod_base = OTHER; note = 2'-O-methylcytidine
  modified_base 19: mod_base = OTHER; note = 2'-fluoroguanosine with phosphorothioate linkage
  modified_base 20: mod_base = OTHER; note = 2'-O-methyladenosine with phosphorothioate linkage
  modified_base 21: mod_base = OTHER; note = 2'-fluorocytidine
atgacggtcaagtccgacgac

SEQ ID NO: 2955 - RNA, 21 nt, synthetic construct
  source 1..21: mol_type = other RNA
  modified_base 1: mod_base = OTHER; note = 2'-fluorouridine with phosphorothioate linkage
  modified_base 2: mod_base = OTHER; note = 2'-O-methylguanosine with phosphorothioate linkage
  modified_base 3: mod_base = OTHER; note = 2'-fluoroadenosine
  modified_base 4: mod_base = OTHER; note = 2'-O-methylcytidine
  modified_base 5: mod_base = OTHER; note = 2'-fluoroguanosine
  modified_base 6: mod_base = OTHER; note = 2'-O-methylguanosine
  modified_base 7: mod_base = OTHER; note = 2'-fluorouridine
  modified_base 8: mod_base = OTHER; note = 2'-O-methylcytidine
  modified_base 9: mod_base = OTHER; note = 2'-fluoroadenosine
  modified_base 10: mod_base = OTHER; note = 2'-O-methyladenosine
  modified_base 11: mod_base = OTHER; note = 2'-fluoroguanosine
  modified_base 12: mod_base = OTHER; note = 2'-O-methyluridine
  modified_base 13: mod_base = OTHER; note = 2'-fluorocytidine
  modified_base 14: mod_base = OTHER; note = 2'-O-methylcytidine
  modified_base 15: mod_base = OTHER; note = 2'-fluoroguanosine
  modified_base 16: mod_base = OTHER; note = 2'-O-methyladenosine
  modified_base 17: mod_base = OTHER; note = 2'-fluorocytidine
  modified_base 18: mod_base = OTHER; note = 2'-O-methylguanosine
  modified_base 19: mod_base = OTHER; note = 2'-fluoroadenosine with phosphorothioate linkage
  modified_base 20: mod_base = OTHER; note = 2'-O-methylcytidine with phosphorothioate linkage
  modified_base 21: mod_base = OTHER; note = 2'-fluorouridine
tgacggtcaagtccgacgact

SEQ ID NO: 2956 - RNA, 21 nt, synthetic construct
  source 1..21: mol_type = other RNA
  modified_base 1: mod_base = OTHER; note = 2'-fluoroadenosine with phosphorothioate linkage
  modified_base 2: mod_base = OTHER; note = 2'-O-methylcytidine with phosphorothioate linkage
  modified_base 3: mod_base = OTHER; note = 2'-fluoroguanosine
  modified_base 4: mod_base = OTHER; note = 2'-O-methylguanosine
  modified_base 5: mod_base = OTHER; note = 2'-fluorouridine
  modified_base 6: mod_base = OTHER; note = 2'-O-methylcytidine
  modified_base 7: mod_base = OTHER; note = 2'-fluoroadenosine
  modified_base 8: mod_base = OTHER; note = 2'-O-methyladenosine
  modified_base 9: mod_base = OTHER; note = 2'-fluoroguanosine
  modified_base 10: mod_base = OTHER; note = 2'-O-methyluridine
  modified_base 11: mod_base = OTHER; note = 2'-fluorocytidine
  modified_base 12: mod_base = OTHER; note = 2'-O-methylcytidine
  modified_base 13: mod_base = OTHER; note = 2'-fluoroguanosine
  modified_base 14: mod_base = OTHER; note = 2'-O-methyladenosine
  modified_base 15: mod_base = OTHER; note = 2'-fluorocytidine
  modified_base 16: mod_base = OTHER; note = 2'-O-methylguanosine
  modified_base 17: mod_base = OTHER; note = 2'-fluoroadenosine
  modified_base 18: mod_base = OTHER; note = 2'-O-methylcytidine
  modified_base 19: mod_base = OTHER; note = 2'-fluoroguanosine with phosphorothioate linkage
  modified_base 20: mod_base = OTHER; note = 2'-O-methylguanosine with phosphorothioate linkage
  modified_base 21: mod_base = OTHER; note = 2'-fluorouridine
acggtcaagtccgacgacggt

SEQ ID NO: 2957 - RNA, 21 nt, synthetic construct
  source 1..21: mol_type = other RNA
  modified_base 1: mod_base = OTHER; note = 2'-fluorocytidine with phosphorothioate linkage
  modified_base 2: mod_base = OTHER; note = 2'-O-methyladenosine with phosphorothioate linkage
  modified_base 3: mod_base = OTHER; note = 2'-fluoroadenosine
  modified_base 4: mod_base = OTHER; note = 2'-O-methylguanosine
  modified_base 5: mod_base = OTHER; note = 2'-fluorouridine
  modified_base 6: mod_base = OTHER; note = 2'-O-methylcytidine
  modified_base 7: mod_base = OTHER; note = 2'-fluorocytidine
  modified_base 8: mod_base = OTHER; note = 2'-O-methylguanosine
  modified_base 9: mod_base = OTHER; note = 2'-fluoroadenosine
  modified_base 10: mod_base = OTHER; note = 2'-O-methylcytidine
  modified_base 11: mod_base = OTHER; note = 2'-fluoroguanosine
  modified_base 12: mod_base = OTHER; note = 2'-O-methyladenosine
  modified_base 13: mod_base = OTHER; note = 2'-fluorocytidine
  modified_base 14: mod_base = OTHER; note = 2'-O-methylguanosine
  modified_base 15: mod_base = OTHER; note = 2'-fluoroguanosine
  modified_base 16: mod_base = OTHER; note = 2'-O-methyluridine
  modified_base 17: mod_base = OTHER; note = 2'-fluorocytidine
  modified_base 18: mod_base = OTHER; note = 2'-O-methyluridine
  modified_base 19: mod_base = OTHER; note = 2'-fluorocytidine with phosphorothioate linkage
  modified_base 20: mod_base = OTHER; note = 2'-O-methyluridine with phosphorothioate linkage
  modified_base 21: mod_base = OTHER; note = 2'-fluorocytidine
caagtccgacgacggtctctc

SEQ ID NO: 2958 - RNA, 21 nt, synthetic construct
  source 1..21: mol_type = other RNA
  modified_base 1: mod_base = OTHER; note = 2'-fluorocytidine with phosphorothioate linkage
  modified_base 2: mod_base = OTHER; note = 2'-O-methylguanosine with phosphorothioate linkage
  modified_base 3: mod_base = OTHER; note = 2'-fluorocytidine
  modified_base 4: mod_base = OTHER; note = 2'-O-methyluridine
  modified_base 5: mod_base = OTHER; note = 2'-fluorocytidine
  modified_base 6: mod_base = OTHER; note = 2'-O-methyladenosine
  modified_base 7: mod_base = OTHER; note = 2'-fluoroadenosine
  modified_base 8: mod_base = OTHER; note = 2'-O-methylguanosine
  modified_base 9: mod_base = OTHER; note = 2'-fluorouridine
  modified_base 10: mod_base = OTHER; note = 2'-O-methylcytidine
  modified_base 11: mod_base = OTHER; note = 2'-fluorocytidine
  modified_base 12: mod_base = OTHER; note = 2'-O-methylguanosine
  modified_base 13: mod_base = OTHER; note = 2'-fluorouridine
  modified_base 14: mod_base = OTHER; note = 2'-O-methylguanosine
  modified_base 15: mod_base = OTHER; note = 2'-fluoroguanosine
  modified_base 16: mod_base = OTHER; note = 2'-O-methyluridine
  modified_base 17: mod_base = OTHER; note = 2'-fluoroguanosine
  modified_base 18: mod_base = OTHER; note = 2'-O-methylguanosine
  modified_base 19: mod_base = OTHER; note = 2'-fluorocytidine with phosphorothioate linkage
  modified_base 20: mod_base = OTHER; note = 2'-O-methylcytidine with phosphorothioate linkage
  modified_base 21: mod_base = OTHER; note = 2'-fluoroadenosine
cgctcaagtccgtggtggcca

SEQ ID NO: 2959 - RNA, 21 nt, synthetic construct
  source 1..21: mol_type = other RNA
  modified_base 1: mod_base = OTHER; note = 2'-fluorouridine with phosphorothioate linkage
  modified_base 2: mod_base = OTHER; note = 2'-O-methylcytidine with phosphorothioate linkage
  modified_base 3: mod_base = OTHER; note = 2'-fluoroadenosine
  modified_base 4: mod_base = OTHER; note = 2'-O-methyladenosine
  modified_base 5: mod_base = OTHER; note = 2'-fluoroguanosine
  modified_base 6: mod_base = OTHER; note = 2'-O-methyluridine
  modified_base 7: mod_base = OTHER; note = 2'-fluorocytidine
  modified_base 8: mod_base = OTHER; note = 2'-O-methylcytidine
  modified_base 9: mod_base = OTHER; note = 2'-fluoroguanosine
  modified_base 10: mod_base = OTHER; note = 2'-O-methyluridine
  modified_base 11: mod_base = OTHER; note = 2'-fluoroguanosine
  modified_base 12: mod_base = OTHER; note = 2'-O-methylguanosine
  modified_base 13: mod_base = OTHER; note = 2'-fluorouridine
  modified_base 14: mod_base = OTHER; note = 2'-O-methylguanosine
  modified_base 15: mod_base = OTHER; note = 2'-fluoroguanosine
  modified_base 16: mod_base = OTHER; note = 2'-O-methylcytidine
  modified_base 17: mod_base = OTHER; note = 2'-fluorocytidine
  modified_base 18: mod_base = OTHER; note = 2'-O-methyladenosine
  modified_base 19: mod_base = OTHER; note = 2'-fluoroadenosine with phosphorothioate linkage
  modified_base 20: mod_base = OTHER; note = 2'-O-methylguanosine with phosphorothioate linkage
  modified_base 21: mod_base = OTHER; note = 2'-fluorouridine
tcaagtccgtggtggccaagt

SEQ ID NO: 2960 - RNA, 21 nt, synthetic construct
  source 1..21: mol_type = other RNA
  modified_base 1: mod_base = OTHER; note = 2'-fluorouridine with phosphorothioate linkage
  modified_base 2: mod_base = OTHER; note = 2'-O-methylguanosine with phosphorothioate linkage
  modified_base 3: mod_base = OTHER; note = 2'-fluoroguanosine
  modified_base 4: mod_base = OTHER; note = 2'-O-methyluridine
  modified_base 5: mod_base = OTHER; note = 2'-fluoroguanosine
  modified_base 6: mod_base = OTHER; note = 2'-O-methylguanosine
  modified_base 7: mod_base = OTHER; note = 2'-fluorocytidine
  modified_base 8: mod_base = OTHER; note = 2'-O-methylcytidine
  modified_base 9: mod_base = OTHER; note = 2'-fluoroadenosine
  modified_base 10: mod_base = OTHER; note = 2'-O-methyladenosine
  modified_base 11: mod_base = OTHER; note = 2'-fluoroguanosine
  modified_base 12: mod_base = OTHER; note = 2'-O-methyluridine
  modified_base 13: mod_base = OTHER; note = 2'-fluorouridine
  modified_base 14: mod_base = OTHER; note = 2'-O-methylcytidine
  modified_base 15: mod_base = OTHER; note = 2'-fluoroadenosine
  modified_base 16: mod_base = OTHER; note = 2'-O-methyladenosine
  modified_base 17: mod_base = OTHER; note = 2'-fluoroguanosine
  modified_base 18: mod_base = OTHER; note = 2'-O-methyladenosine
  modified_base 19: mod_base = OTHER; note = 2'-fluoroguanosine with phosphorothioate linkage
  modified_base 20: mod_base = OTHER; note = 2'-O-methylcytidine with phosphorothioate linkage
  modified_base 21: mod_base = OTHER; note = 2'-fluorouridine
tggtggccaagttcaagagct

SEQ ID NO: 2961 - RNA, 21 nt, synthetic construct
  source 1..21: mol_type = other RNA
  modified_base 1: mod_base = OTHER; note = 2'-fluoroguanosine with phosphorothioate linkage
  modified_base 2: mod_base = OTHER; note = 2'-O-methylguanosine with phosphorothioate linkage
  modified_base 3: mod_base = OTHER; note = 2'-fluorouridine
  modified_base 4: mod_base = OTHER; note = 2'-O-methylguanosine
  modified_base 5: mod_base = OTHER; note = 2'-fluoroguanosine
  modified_base 6: mod_base = OTHER; note = 2'-O-methylcytidine
  modified_base 7: mod_base = OTHER; note = 2'-fluorocytidine
  modified_base 8: mod_base = OTHER; note = 2'-O-methyladenosine
  modified_base 9: mod_base = OTHER; note = 2'-fluoroadenosine
  modified_base 10: mod_base = OTHER; note = 2'-O-methylguanosine
  modified_base 11: mod_base = OTHER; note = 2'-fluorouridine
  modified_base 12: mod_base = OTHER; note = 2'-O-methyluridine
  modified_base 13: mod_base = OTHER; note = 2'-fluorocytidine
  modified_base 14: mod_base = OTHER; note = 2'-O-methyladenosine
  modified_base 15: mod_base = OTHER; note = 2'-fluoroadenosine
  modified_base 16: mod_base = OTHER; note = 2'-O-methylguanosine
  modified_base 17: mod_base = OTHER; note = 2'-fluoroadenosine
  modified_base 18: mod_base = OTHER; note = 2'-O-methylguanosine
  modified_base 19: mod_base = OTHER; note = 2'-fluorocytidine with phosphorothioate linkage
  modified_base 20: mod_base = OTHER; note = 2'-O-methylguanosine with phosphorothioate linkage
  modified_base 21: mod_base = OTHER; note = 2'-fluoroadenosine
ggtggccaagttcaagagcga

SEQ ID NO: 2962 - RNA, 21 nt, synthetic construct
  source 1..21: mol_type = other RNA
  modified_base 1: mod_base = OTHER; note = 2'-fluoroadenosine with phosphorothioate linkage
  modified_base 2: mod_base = OTHER; note = 2'-O-methylguanosine with phosphorothioate linkage
  modified_base 3: mod_base = OTHER; note = 2'-fluoroguanosine
  modified_base 4: mod_base = OTHER; note = 2'-O-methyladenosine
  modified_base 5: mod_base = OTHER; note = 2'-fluoroguanosine
  modified_base 6: mod_base = OTHER; note = 2'-O-methylguanosine
  modified_base 7: mod_base = OTHER; note = 2'-fluoroadenosine
  modified_base 8: mod_base = OTHER; note = 2'-O-methylcytidine
  modified_base 9: mod_base = OTHER; note = 2'-fluoroguanosine
  modified_base 10: mod_base = OTHER; note = 2'-O-methyladenosine
  modified_base 11: mod_base = OTHER; note = 2'-fluorocytidine
  modified_base 12: mod_base = OTHER; note = 2'-O-methylguanosine
  modified_base 13: mod_base = OTHER; note = 2'-fluoroadenosine
  modified_base 14: mod_base = OTHER; note = 2'-O-methylguanosine
  modified_base 15: mod_base = OTHER; note = 2'-fluoroguanosine
  modified_base 16: mod_base = OTHER; note = 2'-O-methyladenosine
  modified_base 17: mod_base = OTHER; note = 2'-fluoroadenosine
  modified_base 18: mod_base = OTHER; note = 2'-O-methylguanosine
  modified_base 19: mod_base = OTHER; note = 2'-fluoroadenosine with phosphorothioate linkage
  modified_base 20: mod_base = OTHER; note = 2'-O-methylguanosine with phosphorothioate linkage
  modified_base 21: mod_base = OTHER; note = 2'-fluorouridine
aggaggacgacgaggaagagt

SEQ ID NO: 2963 - RNA, 21 nt, synthetic construct
  source 1..21: mol_type = other RNA
  modified_base 1: mod_base = OTHER; note = 2'-fluoroguanosine with phosphorothioate linkage
  modified_base 2: mod_base = OTHER; note = 2'-O-methyladenosine with phosphorothioate linkage
  modified_base 3: mod_base = OTHER; note = 2'-fluoroguanosine
  modified_base 4: mod_base = OTHER; note = 2'-O-methylguanosine
  modified_base 5: mod_base = OTHER; note = 2'-fluoroadenosine
  modified_base 6: mod_base = OTHER; note = 2'-O-methylcytidine
  modified_base 7: mod_base = OTHER; note = 2'-fluoroguanosine
  modified_base 8: mod_base = OTHER; note = 2'-O-methyladenosine
  modified_base 9: mod_base = OTHER; note = 2'-fluorocytidine
  modified_base 10: mod_base = OTHER; note = 2'-O-methylguanosine
  modified_base 11: mod_base = OTHER; note = 2'-fluoroadenosine
  modified_base 12: mod_base = OTHER; note = 2'-O-methylguanosine
  modified_base 13: mod_base = OTHER; note = 2'-fluoroguanosine
  modified_base 14: mod_base = OTHER; note = 2'-O-methyladenosine
  modified_base 15: mod_base = OTHER; note = 2'-fluoroadenosine
  modified_base 16: mod_base = OTHER; note = 2'-O-methylguanosine
  modified_base 17: mod_base = OTHER; note = 2'-fluoroadenosine
  modified_base 18: mod_base = OTHER; note = 2'-O-methylguanosine
  modified_base 19: mod_base = OTHER; note = 2'-fluoroguanosine with phosphorothioate linkage
  modified_base 20: mod_base = OTHER; note = 2'-O-methyladenosine with phosphorothioate linkage
  modified_base 21: mod_base = OTHER; note = 2'-fluoroadenosine
gaggacgacgaggaagaggaa

SEQ ID NO: 2964 - RNA, 21 nt, synthetic construct
  source 1..21: mol_type = other RNA
  modified_base 1: mod_base = OTHER; note = 2'-fluorocytidine with phosphorothioate linkage
  modified_base 2: mod_base = OTHER; note = 2'-O-methyladenosine with phosphorothioate linkage
  modified_base 3: mod_base = OTHER; note = 2'-fluorouridine
  modified_base 4: mod_base = OTHER; note = 2'-O-methylcytidine
  modified_base 5: mod_base = OTHER; note = 2'-fluoroadenosine
  modified_base 6: mod_base = OTHER; note = 2'-O-methyladenosine
  modified_base 7: mod_base = OTHER; note = 2'-fluoroguanosine
  modified_base 8: mod_base = OTHER; note = 2'-O-methylcytidine
  modified_base 9: mod_base = OTHER; note = 2'-fluorouridine
  modified_base 10: mod_base = OTHER; note = 2'-O-methylcytidine
  modified_base 11: mod_base = OTHER; note = 2'-fluoroguanosine
  modified_base 12: mod_base = OTHER; note = 2'-O-methyladenosine
  modified_base 13: mod_base = OTHER; note = 2'-fluoroguanosine
  modified_base 14: mod_base = OTHER; note = 2'-O-methyladenosine
  modified_base 15: mod_base = OTHER; note = 2'-fluoroadenosine
  modified_base 16: mod_base = OTHER; note = 2'-O-methylguanosine
  modified_base 17: mod_base = OTHER; note = 2'-fluoroguanosine
  modified_base 18: mod_base = OTHER; note = 2'-O-methyladenosine
  modified_base 19: mod_base = OTHER; note = 2'-fluoroguanosine with phosphorothioate linkage
  modified_base 20: mod_base = OTHER; note = 2'-O-methyluridine with phosphorothioate linkage
  modified_base 21: mod_base = OTHER; note = 2'-fluorouridine
catcaagctcgagaaggagtt

SEQ ID NO: 2965 - RNA, 21 nt, synthetic construct
  source 1..21: mol_type = other RNA
  modified_base 1: mod_base = OTHER; note = 2'-fluoroadenosine with phosphorothioate linkage
  modified_base 2: mod_base = OTHER; note = 2'-O-methyluridine with phosphorothioate linkage
  modified_base 3: mod_base = OTHER; note = 2'-fluorocytidine
  modified_base 4: mod_base = OTHER; note = 2'-O-methyladenosine
  modified_base 5: mod_base = OTHER; note = 2'-fluoroadenosine
  modified_base 6: mod_base = OTHER; note = 2'-O-methylguanosine
  modified_base 7: mod_base = OTHER; note = 2'-fluorocytidine
  modified_base 8: mod_base = OTHER; note = 2'-O-methyluridine
  modified_base 9: mod_base = OTHER; note = 2'-fluorocytidine
  modified_base 10: mod_base = OTHER; note = 2'-O-methylguanosine
  modified_base 11: mod_base = OTHER; note = 2'-fluoroadenosine
  modified_base 12: mod_base = OTHER; note = 2'-O-methylguanosine
  modified_base 13: mod_base = OTHER; note = 2'-fluoroadenosine
  modified_base 14: mod_base = OTHER; note = 2'-O-methyladenosine
  modified_base 15: mod_base = OTHER; note = 2'-fluoroguanosine
  modified_base 16: mod_base = OTHER; note = 2'-O-methylguanosine
  modified_base 17: mod_base = OTHER; note = 2'-fluoroadenosine
  modified_base 18: mod_base = OTHER; note = 2'-O-methylguanosine
  modified_base 19: mod_base = OTHER; note = 2'-fluorouridine with phosphorothioate linkage
  modified_base 20: mod_base = OTHER; note = 2'-O-methyluridine with phosphorothioate linkage
  modified_base 21: mod_base = OTHER; note = 2'-fluorocytidine
atcaagctcgagaaggagttc

SEQ ID NO: 2966 - RNA, 21 nt, synthetic construct
  source 1..21: mol_type = other RNA
  modified_base 1: mod_base = OTHER; note = 2'-fluorocytidine with phosphorothioate linkage
  modified_base 2: mod_base = OTHER; note = 2'-O-methyladenosine with phosphorothioate linkage
  modified_base 3: mod_base = OTHER; note = 2'-fluoroadenosine
  modified_base 4: mod_base = OTHER; note = 2'-O-methylguanosine
  modified_base 5: mod_base = OTHER; note = 2'-fluorocytidine
  modified_base 6: mod_base = OTHER; note = 2'-O-methyluridine
  modified_base 7: mod_base = OTHER; note = 2'-fluorocytidine
  modified_base 8: mod_base = OTHER; note = 2'-O-methylguanosine
  modified_base 9: mod_base = OTHER; note = 2'-fluoroadenosine
  modified_base 10: mod_base = OTHER; note = 2'-O-methylguanosine
  modified_base 11: mod_base = OTHER; note = 2'-fluoroadenosine
  modified_base 12: mod_base = OTHER; note = 2'-O-methyladenosine
  modified_base 13: mod_base = OTHER; note = 2'-fluoroguanosine
  modified_base 14: mod_base = OTHER; note = 2'-O-methylguanosine
  modified_base 15: mod_base = OTHER; note = 2'-fluoroadenosine
  modified_base 16: mod_base = OTHER; note = 2'-O-methylguanosine
  modified_base 17: mod_base = OTHER; note = 2'-fluorouridine
  modified_base 18: mod_base = OTHER; note = 2'-O-methyluridine
  modified_base 19: mod_base = OTHER; note = 2'-fluorocytidine with phosphorothioate linkage
  modified_base 20: mod_base = OTHER; note = 2'-O-methylguanosine with phosphorothioate linkage
  modified_base 21: mod_base = OTHER; note = 2'-fluoroadenosine
caagctcgagaaggagttcga

SEQ ID NO: 2967 - RNA, 21 nt, synthetic construct
  source 1..21: mol_type = other RNA
  modified_base 1: mod_base = OTHER; note = 2'-fluorouridine with phosphorothioate linkage
  modified_base 2: mod_base = OTHER; note = 2'-O-methylcytidine with phosphorothioate linkage
  modified_base 3: mod_base = OTHER; note = 2'-fluorocytidine
  modified_base 4: mod_base = OTHER; note = 2'-O-methyluridine
  modified_base 5: mod_base = OTHER; note = 2'-fluorouridine
  modified_base 6: mod_base = OTHER; note = 2'-O-methyladenosine
  modified_base 7: mod_base = OTHER; note = 2'-fluoroguanosine
  modified_base 8: mod_base = OTHER; note = 2'-O-methylcytidine
  modified_base 9: mod_base = OTHER; note = 2'-fluorouridine
  modified_base 10: mod_base = OTHER; note = 2'-O-methyluridine
  modified_base 11: mod_base = OTHER; note = 2'-fluorocytidine
  modified_base 12: mod_base = OTHER; note = 2'-O-methylguanosine
  modified_base 13: mod_base = OTHER; note = 2'-fluoroguanosine
  modified_base 14: mod_base = OTHER; note = 2'-O-methyladenosine
  modified_base 15: mod_base = OTHER; note = 2'-fluoroguanosine
  modified_base 16: mod_base = OTHER; note = 2'-O-methyladenosine
  modified_base 17: mod_base = OTHER; note = 2'-fluorocytidine
  modified_base 18: mod_base = OTHER; note = 2'-O-methyluridine
  modified_base 19: mod_base = OTHER; note = 2'-fluorocytidine with phosphorothioate linkage
  modified_base 20: mod_base = OTHER; note = 2'-O-methylcytidine with phosphorothioate linkage
  modified_base 21: mod_base = OTHER; note = 2'-fluoroadenosine
tccttagcttcggagactcca

SEQ ID NO: 2968 - RNA, 21 nt, synthetic construct
  source 1..21: mol_type = other RNA
  modified_base 1: mod_base = OTHER; note = 2'-fluorocytidine with phosphorothioate linkage
  modified_base 2: mod_base = OTHER; note = 2'-O-methylcytidine with phosphorothioate linkage
  modified_base 3: mod_base = OTHER; note = 2'-fluorouridine
  modified_base 4: mod_base = OTHER; note = 2'-O-methyluridine
  modified_base 5: mod_base = OTHER; note = 2'-fluoroadenosine
  modified_base 6: mod_base = OTHER; note = 2'-O-methylguanosine
  modified_base 7: mod_base = OTHER; note = 2'-fluorocytidine
  modified_base 8: mod_base = OTHER; note = 2'-O-methyluridine
  modified_base 9: mod_base = OTHER; note = 2'-fluorouridine
  modified_base 10: mod_base = OTHER; note = 2'-O-methylcytidine
  modified_base 11: mod_base = OTHER; note = 2'-fluoroguanosine
  modified_base 12: mod_base = OTHER; note = 2'-O-methylguanosine
  modified_base 13: mod_base = OTHER; note = 2'-fluoroadenosine
  modified_base 14: mod_base = OTHER; note = 2'-O-methylguanosine
  modified_base 15: mod_base = OTHER; note = 2'-fluoroadenosine
  modified_base 16: mod_base = OTHER; note = 2'-O-methylcytidine
  modified_base 17: mod_base = OTHER; note = 2'-fluorouridine
  modified_base 18: mod_base = OTHER; note = 2'-O-methylcytidine
  modified_base 19: mod_base = OTHER; note = 2'-fluorocytidine with phosphorothioate linkage
  modified_base 20: mod_base = OTHER; note = 2'-O-methyladenosine with phosphorothioate linkage
  modified_base 21: mod_base = OTHER; note = 2'-fluorouridine
ccttagcttcggagactccat

SEQ ID NO: 2969 - RNA, 21 nt, synthetic construct
  source 1..21: mol_type = other RNA
  modified_base 1: mod_base = OTHER; note = 2'-fluorouridine with phosphorothioate linkage
  modified_base 2: mod_base = OTHER; note = 2'-O-methyladenosine with phosphorothioate linkage
  modified_base 3: mod_base = OTHER; note = 2'-fluoroguanosine
  modified_base 4: mod_base = OTHER; note = 2'-O-methylcytidine
  modified_base 5: mod_base = OTHER; note = 2'-fluorouridine
  modified_base 6: mod_base = OTHER; note = 2'-O-methyluridine
  modified_base 7: mod_base = OTHER; note = 2'-fluorocytidine
  modified_base 8: mod_base = OTHER; note = 2'-O-methylguanosine
  modified_base 9: mod_base = OTHER; note = 2'-fluoroguanosine
  modified_base 10: mod_base = OTHER; note = 2'-O-methyladenosine
  modified_base 11: mod_base = OTHER; note = 2'-fluoroguanosine
  modified_base 12: mod_base = OTHER; note = 2'-O-methyladenosine
  modified_base 13: mod_base = OTHER; note = 2'-fluorocytidine
  modified_base 14: mod_base = OTHER; note = 2'-O-methyluridine
  modified_base 15: mod_base = OTHER; note = 2'-fluorocytidine
  modified_base 16: mod_base = OTHER; note = 2'-O-methylcytidine
  modified_base 17: mod_base = OTHER; note = 2'-fluoroadenosine
  modified_base 18: mod_base = OTHER; note = 2'-O-methylguanosine
  modified_base 19: mod_base = OTHER; note = 2'-fluoroadenosine with phosphorothioate linkage
  modified_base 20: mod_base = OTHER; note = 2'-O-methylcytidine with phosphorothioate linkage
  modified_base 21: mod_base = OTHER; note = 2'-fluoroadenosine
tagcttcggagactccagaca

SEQ ID NO: 2970 - RNA, 21 nt, synthetic construct
  source 1..21: mol_type = other RNA
  modified_base 1: mod_base = OTHER; note = 2'-fluoroadenosine with phosphorothioate linkage
  modified_base 2: mod_base = OTHER; note = 2'-O-methylguanosine with phosphorothioate linkage
  modified_base 3: mod_base = OTHER; note = 2'-fluorocytidine
  modified_base 4: mod_base = OTHER; note = 2'-O-methyluridine
  modified_base 5: mod_base = OTHER; note = 2'-fluorouridine
  modified_base 6: mod_base = OTHER; note = 2'-O-methylcytidine
  modified_base 7: mod_base = OTHER; note = 2'-fluoroguanosine
  modified_base 8: mod_base = OTHER; note = 2'-O-methylguanosine
  modified_base 9: mod_base = OTHER; note = 2'-fluoroadenosine
  modified_base 10: mod_base = OTHER; note = 2'-O-methylguanosine
  modified_base 11: mod_base = OTHER; note = 2'-fluoroadenosine
  modified_base 12: mod_base = OTHER; note = 2'-O-methylcytidine
  modified_base 13: mod_base = OTHER; note = 2'-fluorouridine
  modified_base 14: mod_base = OTHER; note = 2'-O-methylcytidine
  modified_base 15: mod_base = OTHER; note = 2'-fluorocytidine
  modified_base 16: mod_base = OTHER; note = 2'-O-methyladenosine
  modified_base 17: mod_base = OTHER; note = 2'-fluoroguanosine
  modified_base 18: mod_base = OTHER; note = 2'-O-methyladenosine
  modified_base 19: mod_base = OTHER; note = 2'-fluorocytidine with phosphorothioate linkage
  modified_base 20: mod_base = OTHER; note = 2'-O-methyladenosine with phosphorothioate linkage
  modified_base 21: mod_base = OTHER; note = 2'-fluoroadenosine
agcttcggagactccagacaa

SEQ ID NO: 2971 - RNA, 21 nt, synthetic construct
  source 1..21: mol_type = other RNA
  modified_base 1: mod_base = OTHER; note = 2'-fluoroguanosine with phosphorothioate linkage
  modified_base 2: mod_base = OTHER; note = 2'-O-methylcytidine with phosphorothioate linkage
  modified_base 3: mod_base = OTHER; note = 2'-fluorouridine
  modified_base 4: mod_base = OTHER; note = 2'-O-methyluridine
  modified_base 5: mod_base = OTHER; note = 2'-fluorocytidine
  modified_base 6: mod_base = OTHER; note = 2'-O-methylguanosine
  modified_base 7: mod_base = OTHER; note = 2'-fluoroguanosine
  modified_base 8: mod_base = OTHER; note = 2'-O-methyladenosine
  modified_base 9: mod_base = OTHER; note = 2'-fluoroguanosine
  modified_base 10: mod_base = OTHER; note = 2'-O-methyladenosine
  modified_base 11: mod_base = OTHER; note = 2'-fluorocytidine
  modified_base 12: mod_base = OTHER; note = 2'-O-methyluridine
  modified_base 13: mod_base = OTHER; note = 2'-fluorocytidine
  modified_base 14: mod_base = OTHER; note = 2'-O-methylcytidine
  modified_base 15: mod_base = OTHER; note = 2'-fluoroadenosine
  modified_base 16: mod_base = OTHER; note = 2'-O-methylguanosine
  modified_base 17: mod_base = OTHER; note = 2'-fluoroadenosine
  modified_base 18: mod_base = OTHER; note = 2'-O-methylcytidine
  modified_base 19: mod_base = OTHER; note = 2'-fluoroadenosine with phosphorothioate linkage
  modified_base 20: mod_base = OTHER; note = 2'-O-methyladenosine with phosphorothioate linkage
  modified_base 21: mod_base = OTHER; note = 2'-fluorouridine
gcttcggagactccagacaat

SEQ ID NO: 2972 - RNA, 21 nt, synthetic construct
  source 1..21: mol_type = other RNA
  modified_base 1: mod_base = OTHER; note = 2'-fluorocytidine with phosphorothioate linkage
  modified_base 2: mod_base = OTHER; note = 2'-O-methyluridine with phosphorothioate linkage
  modified_base 3: mod_base = OTHER; note = 2'-fluorouridine
  modified_base 4: mod_base = OTHER; note = 2'-O-methylcytidine
  modified_base 5: mod_base = OTHER; note = 2'-fluoroguanosine
  modified_base 6: mod_base = OTHER; note = 2'-O-methylguanosine
  modified_base 7: mod_base = OTHER; note = 2'-fluoroadenosine
  modified_base 8: mod_base = OTHER; note = 2'-O-methylguanosine
  modified_base 9: mod_base = OTHER; note = 2'-fluoroadenosine
  modified_base 10: mod_base = OTHER; note = 2'-O-methylcytidine
  modified_base 11: mod_base = OTHER; note = 2'-fluorouridine
  modified_base 12: mod_base = OTHER; note = 2'-O-methylcytidine
  modified_base 13: mod_base = OTHER; note = 2'-fluorocytidine
  modified_base 14: mod_base = OTHER; note = 2'-O-methyladenosine
  modified_base 15: mod_base = OTHER; note = 2'-fluoroguanosine
  modified_base 16: mod_base = OTHER; note = 2'-O-methyladenosine
  modified_base 17: mod_base = OTHER; note = 2'-fluorocytidine
  modified_base 18: mod_base = OTHER; note = 2'-O-methyladenosine
  modified_base 19: mod_base = OTHER; note = 2'-fluoroadenosine with phosphorothioate linkage
  modified_base 20: mod_base = OTHER; note = 2'-O-methyluridine with phosphorothioate linkage
  modified_base 21: mod_base = OTHER; note = 2'-fluorocytidine
cttcggagactccagacaatc

SEQ ID NO: 2973 - RNA, 21 nt, synthetic construct
  source 1..21: mol_type = other RNA
  modified_base 1: mod_base = OTHER; note = 2'-fluorouridine with phosphorothioate linkage
  modified_base 2: mod_base = OTHER; note = 2'-O-methyluridine with phosphorothioate linkage
  modified_base 3: mod_base = OTHER; note = 2'-fluoroguanosine
  modified_base 4: mod_base = OTHER; note = 2'-O-methylcytidine
  modified_base 5: mod_base = OTHER; note = 2'-fluorocytidine
  modified_base 6: mod_base = OTHER; note = 2'-O-methyluridine
  modified_base 7: mod_base = OTHER; note = 2'-fluorocytidine
  modified_base 8: mod_base = OTHER; note = 2'-O-methylcytidine
  modified_base 9: mod_base = OTHER; note = 2'-fluorouridine
  modified_base 10: mod_base = OTHER; note = 2'-O-methylcytidine
  modified_base 11: mod_base = OTHER; note = 2'-fluoroguanosine
  modified_base 12: mod_base = OTHER; note = 2'-O-methyluridine
  modified_base 13: mod_base = OTHER; note = 2'-fluorocytidine
  modified_base 14: mod_base = OTHER; note = 2'-O-methylguanosine
  modified_base 15: mod_base = OTHER; note = 2'-fluoroguanosine
  modified_base 16: mod_base = OTHER; note = 2'-O-methyladenosine
  modified_base 17: mod_base = OTHER; note = 2'-fluoroguanosine
  modified_base 18: mod_base = OTHER; note = 2'-O-methylcytidine
  modified_base 19: mod_base = OTHER; note = 2'-fluoroadenosine with phosphorothioate linkage
  modified_base 20: mod_base = OTHER; note = 2'-O-methylcytidine with phosphorothioate linkage
  modified_base 21: mod_base = OTHER; note = 2'-fluorouridine
ttgcctcctcgtcggagcact

SEQ ID NO: 2974 - RNA, 21 nt, synthetic construct
  source 1..21: mol_type = other RNA
  modified_base 1: mod_base = OTHER; note = 2'-fluorouridine with phosphorothioate linkage
  modified_base 2: mod_base = OTHER; note = 2'-O-methylguanosine with phosphorothioate linkage
  modified_base 3: mod_base = OTHER; note = 2'-fluorocytidine
  modified_base 4: mod_base = OTHER; note = 2'-O-methylcytidine
  modified_base 5: mod_base = OTHER; note = 2'-fluorouridine
  modified_base 6: mod_base = OTHER; note = 2'-O-methylcytidine
  modified_base 7: mod_base = OTHER; note = 2'-fluorocytidine
  modified_base 8: mod_base = OTHER; note = 2'-O-methyluridine
  modified_base 9: mod_base = OTHER; note = 2'-fluorocytidine
  modified_base 10: mod_base = OTHER; note = 2'-O-methylguanosine
  modified_base 11: mod_base = OTHER; note = 2'-fluorouridine
  modified_base 12: mod_base = OTHER; note = 2'-O-methylcytidine
  modified_base 13: mod_base = OTHER; note = 2'-fluoroguanosine
  modified_base 14: mod_base = OTHER; note = 2'-O-methylguanosine
  modified_base 15: mod_base = OTHER; note = 2'-fluoroadenosine
  modified_base 16: mod_base = OTHER; note = 2'-O-methylguanosine
  modified_base 17: mod_base = OTHER; note = 2'-fluorocytidine
  modified_base 18: mod_base = OTHER; note = 2'-O-methyladenosine
  modified_base 19: mod_base = OTHER; note = 2'-fluorocytidine with phosphorothioate linkage
  modified_base 20: mod_base = OTHER; note = 2'-O-methyluridine with phosphorothioate linkage
  modified_base 21: mod_base = OTHER; note = 2'-fluorocytidine
tgcctcctcgtcggagcactc

SEQ ID NO: 2975 - RNA, 21 nt, synthetic construct
  source 1..21: mol_type = other RNA
  modified_base 1: mod_base = OTHER; note = 2'-O-methyladenosine with phosphorothioate linkage
  modified_base 2: mod_base = OTHER; note = 2'-O-methyladenosine with phosphorothioate linkage
  modified_base 3: mod_base = OTHER; note = 2'-O-methylcytidine
  modified_base 4: mod_base = OTHER; note = 2'-O-methylcytidine
  modified_base 5: mod_base = OTHER; note = 2'-O-methyladenosine
  modified_base 6: mod_base = OTHER; note = 2'-O-methylguanosine
  modified_base 7: mod_base = OTHER; note = 2'-fluoroadenosine
  modified_base 8: mod_base = OTHER; note = 2'-O-methylcytidine
  modified_base 9: mod_base = OTHER; note = 2'-fluorocytidine
  modified_base 10: mod_base = OTHER; note = 2'-fluoroadenosine
  modified_base 11: mod_base = OTHER; note = 2'-fluorocytidine
  modified_base 12: mod_base = OTHER; note = 2'-O-methylguanosine
  modified_base 13: mod_base = OTHER; note = 2'-O-methylguanosine
  modified_base 14: mod_base = OTHER; note = 2'-O-methylcytidine
  modified_base 15: mod_base = OTHER; note = 2'-O-methylcytidine
  modified_base 16: mod_base = OTHER; note = 2'-O-methylcytidine
  modified_base 17: mod_base = OTHER; note = 2'-O-methylguanosine
  modified_base 18: mod_base = OTHER; note = 2'-O-methyluridine
  modified_base 19: mod_base = OTHER; note = 2'-O-methyluridine with phosphorothioate linkage
  modified_base 20: mod_base = OTHER; note = 2'-O-methylguanosine with phosphorothioate linkage
  modified_base 21: mod_base = OTHER; note = 2'-O-methyladenosine
aaccagaccacggcccgttga

SEQ ID NO: 2976 - RNA, 21 nt, synthetic construct
  source 1..21: mol_type = other RNA
  modified_base 1: mod_base = OTHER; note = 2'-O-methyladenosine with phosphorothioate linkage
  modified_base 2: mod_base = OTHER; note = 2'-O-methylcytidine with phosphorothioate linkage
  modified_base 3: mod_base = OTHER; note = 2'-O-methylcytidine
  modified_base 4: mod_base = OTHER; note = 2'-O-methyladenosine
  modified_base 5: mod_base = OTHER; note = 2'-O-methylguanosine
  modified_base 6: mod_base = OTHER; note = 2'-O-methyladenosine
  modified_base 7: mod_base = OTHER; note = 2'-fluorocytidine
  modified_base 8: mod_base = OTHER; note = 2'-O-methylcytidine
  modified_base 9: mod_base = OTHER; note = 2'-fluoroadenosine
  modified_base 10: mod_base = OTHER; note = 2'-fluorocytidine
  modified_base 11: mod_base = OTHER; note = 2'-fluoroguanosine
  modified_base 12: mod_base = OTHER; note = 2'-O-methylguanosine
  modified_base 13: mod_base = OTHER; note = 2'-O-methylcytidine
  modified_base 14: mod_base = OTHER; note = 2'-O-methylcytidine
  modified_base 15: mod_base = OTHER; note = 2'-O-methylcytidine
  modified_base 16: mod_base = OTHER; note = 2'-O-methylguanosine
  modified_base 17: mod_base = OTHER; note = 2'-O-methyluridine
  modified_base 18: mod_base = OTHER; note = 2'-O-methyluridine
  modified_base 19: mod_base = OTHER; note = 2'-O-methylguanosine with phosphorothioate linkage
  modified_base 20: mod_base = OTHER; note = 2'-O-methylguanosine with phosphorothioate linkage
  modified_base 21: mod_base = OTHER; note = 2'-O-methyladenosine
accagaccacggcccgttgga

SEQ ID NO: 2977 - RNA, 21 nt, synthetic construct
  source 1..21: mol_type = other RNA
  modified_base 1: mod_base = OTHER; note = 2'-O-methylguanosine with phosphorothioate linkage
  modified_base 2: mod_base = OTHER; note = 2'-O-methylguanosine with phosphorothioate linkage
  modified_base 3: mod_base = OTHER; note = 2'-O-methyladenosine
  modified_base 4: mod_base = OTHER; note = 2'-O-methylcytidine
  modified_base 5: mod_base = OTHER; note = 2'-O-methyladenosine
  modified_base 6: mod_base = OTHER; note = 2'-O-methyluridine
  modified_base 7: mod_base = OTHER; note = 2'-fluorouridine
  modified_base 8: mod_base = OTHER; note = 2'-O-methylcytidine
  modified_base 9: mod_base = OTHER; note = 2'-fluorouridine
  modified_base 10: mod_base = OTHER; note = 2'-fluorouridine
  modified_base 11: mod_base = OTHER; note = 2'-fluoroadenosine
  modified_base 12: mod_base = OTHER; note = 2'-O-methyluridine
  modified_base 13: mod_base = OTHER; note = 2'-O-methyluridine
  modified_base 14: mod_base = OTHER; note = 2'-O-methyluridine
  modified_base 15: mod_base = OTHER; note = 2'-O-methyluridine
  modified_base 16: mod_base = OTHER; note = 2'-O-methyluridine
  modified_base 17: mod_base = OTHER; note = 2'-O-methyladenosine
  modified_base 18: mod_base = OTHER; note = 2'-O-methyluridine
  modified_base 19: mod_base = OTHER; note = 2'-O-methylcytidine with phosphorothioate linkage
  modified_base 20: mod_base = OTHER; note = 2'-O-methylguanosine with phosphorothioate linkage
  modified_base 21: mod_base = OTHER; note = 2'-O-methyladenosine
ggacattcttatttttatcga

SEQ ID NO: 2978 - RNA, 21 nt, synthetic construct
  source 1..21: mol_type = other RNA
  modified_base 1: mod_base = OTHER; note = 2'-O-methylguanosine with phosphorothioate linkage
  modified_base 2: mod_base = OTHER; note = 2'-O-methyladenosine with phosphorothioate linkage
  modified_base 3: mod_base = OTHER; note = 2'-O-methylcytidine
  modified_base 4: mod_base = OTHER; note = 2'-O-methyladenosine
  modified_base 5: mod_base = OTHER; note = 2'-O-methyluridine
  modified_base 6: mod_base = OTHER; note = 2'-O-methyluridine
  modified_base 7: mod_base = OTHER; note = 2'-fluorocytidine
  modified_base 8: mod_base = OTHER; note = 2'-O-methyluridine
  modified_base 9: mod_base = OTHER; note = 2'-fluorouridine
  modified_base 10: mod_base = OTHER; note = 2'-fluoroadenosine
  modified_base 11: mod_base = OTHER; note = 2'-fluorouridine
  modified_base 12: mod_base = OTHER; note = 2'-O-methyluridine
  modified_base 13: mod_base = OTHER; note = 2'-O-methyluridine
  modified_base 14: mod_base = OTHER; note = 2'-O-methyluridine
  modified_base 15: mod_base = OTHER; note = 2'-O-methyluridine
  modified_base 16: mod_base = OTHER; note = 2'-O-methyladenosine
  modified_base 17: mod_base = OTHER; note = 2'-O-methyluridine
  modified_base 18: mod_base = OTHER; note = 2'-O-methylcytidine
  modified_base 19: mod_base = OTHER; note = 2'-O-methylguanosine with phosphorothioate linkage
  modified_base 20: mod_base = OTHER; note = 2'-O-methyladenosine with phosphorothioate linkage
  modified_base 21: mod_base = OTHER; note = 2'-O-methyladenosine
gacattcttatttttatcgaa

SEQ ID NO: 2979 - RNA, 21 nt, synthetic construct
  source 1..21: mol_type = other RNA
  modified_base 1: mod_base = OTHER; note = 2'-O-methylcytidine with phosphorothioate linkage
  modified_base 2: mod_base = OTHER; note = 2'-O-methyladenosine with phosphorothioate linkage
  modified_base 3: mod_base = OTHER; note = 2'-O-methyluridine
  modified_base 4: mod_base = OTHER; note = 2'-O-methyluridine
  modified_base 5: mod_base = OTHER; note = 2'-O-methylcytidine
  modified_base 6: mod_base = OTHER; note = 2'-O-methyluridine
  modified_base 7: mod_base = OTHER; note = 2'-fluorouridine
  modified_base 8: mod_base = OTHER; note = 2'-O-methyladenosine
  modified_base 9: mod_base = OTHER; note = 2'-fluorouridine
  modified_base 10: mod_base = OTHER; note = 2'-fluorouridine
  modified_base 11: mod_base = OTHER; note = 2'-fluorouridine
  modified_base 12: mod_base = OTHER; note = 2'-O-methyluridine
  modified_base 13: mod_base = OTHER; note = 2'-O-methyluridine
  modified_base 14: mod_base = OTHER; note = 2'-O-methyladenosine
  modified_base 15: mod_base = OTHER; note = 2'-O-methyluridine
  modified_base 16: mod_base = OTHER; note = 2'-O-methylcytidine
  modified_base 17: mod_base = OTHER; note = 2'-O-methylguanosine
  modified_base 18: mod_base = OTHER; note = 2'-O-methyladenosine
  modified_base 19: mod_base = OTHER; note = 2'-O-methylguanosine with phosphorothioate linkage
  modified_base 20: mod_base = OTHER; note = 2'-O-methylcytidine with phosphorothioate linkage
  modified_base 21: mod_base = OTHER; note = 2'-O-methyladenosine
cattcttatttttatcgagca

SEQ ID NO: 2980 - RNA, 21 nt, synthetic construct
  source 1..21: mol_type = other RNA
  modified_base 1: mod_base = OTHER; note = 2'-O-methyluridine with phosphorothioate linkage
  modified_base 2: mod_base = OTHER; note = 2'-O-methyluridine with phosphorothioate linkage
  modified_base 3: mod_base = OTHER; note = 2'-O-methylcytidine
  modified_base 4: mod_base = OTHER; note = 2'-O-methyluridine
  modified_base 5: mod_base = OTHER; note = 2'-O-methyluridine
  modified_base 6: mod_base = OTHER; note = 2'-O-methyladenosine
  modified_base 7: mod_base = OTHER; note = 2'-fluorouridine
  modified_base 8: mod_base = OTHER; note = 2'-O-methyluridine
  modified_base 9: mod_base = OTHER; note = 2'-fluorouridine
  modified_base 10: mod_base = OTHER; note = 2'-fluorouridine
  modified_base 11: mod_base = OTHER; note = 2'-fluorouridine
  modified_base 12: mod_base = OTHER; note = 2'-O-methyladenosine
  modified_base 13: mod_base = OTHER; note = 2'-O-methyluridine
  modified_base 14: mod_base = OTHER; note = 2'-O-methylcytidine
  modified_base 15: mod_base = OTHER; note = 2'-O-methylguanosine
  modified_base 16: mod_base = OTHER; note = 2'-O-methyladenosine
  modified_base 17: mod_base = OTHER; note = 2'-O-methylguanosine
  modified_base 18: mod_base = OTHER; note = 2'-O-methylcytidine
  modified_base 19: mod_base = OTHER; note = 2'-O-methyladenosine with phosphorothioate linkage
  modified_base 20: mod_base = OTHER; note = 2'-O-methylcytidine with phosphorothioate linkage
  modified_base 21: mod_base = OTHER; note = 2'-O-methyladenosine
ttcttatttttatcgagcaca

SEQ ID NO: 2981 - RNA, 21 nt, synthetic construct
  source 1..21: mol_type = other RNA
  modified_base 1: mod_base = OTHER; note = 2'-O-methyluridine with phosphorothioate linkage
  modified_base 2: mod_base = OTHER; note = 2'-O-methylcytidine with phosphorothioate linkage
  modified_base 3: mod_base = OTHER; note = 2'-O-methyluridine
  modified_base 4: mod_base = OTHER; note = 2'-O-methyluridine
  modified_base 5: mod_base = OTHER; note = 2'-O-methyladenosine
  modified_base 6: mod_base = OTHER; note = 2'-O-methyluridine
  modified_base 7: mod_base = OTHER; note = 2'-fluorouridine
  modified_base 8: mod_base = OTHER; note = 2'-O-methyluridine
  modified_base 9: mod_base = OTHER; note = 2'-fluorouridine
  modified_base 10: mod_base = OTHER; note = 2'-fluorouridine
  modified_base 11: mod_base = OTHER; note = 2'-fluoroadenosine
  modified_base 12: mod_base = OTHER; note = 2'-O-methyluridine
  modified_base 13: mod_base = OTHER; note = 2'-O-methylcytidine
  modified_base 14: mod_base = OTHER; note = 2'-O-methylguanosine
  modified_base 15: mod_base = OTHER; note = 2'-O-methyladenosine
  modified_base 16: mod_base = OTHER; note = 2'-O-methylguanosine
  modified_base 17: mod_base = OTHER; note = 2'-O-methylcytidine
  modified_base 18: mod_base = OTHER; note = 2'-O-methyladenosine
  modified_base 19: mod_base = OTHER; note = 2'-O-methylcytidine with phosphorothioate linkage
  modified_base 20: mod_base = OTHER; note = 2'-O-methyladenosine with phosphorothioate linkage
  modified_base 21: mod_base = OTHER; note = 2'-O-methyladenosine
tcttatttttatcgagcacaa

SEQ ID NO: 2982 - RNA, 21 nt, synthetic construct
  source 1..21: mol_type = other RNA
  modified_base 1: mod_base = OTHER; note = 2'-O-methylcytidine with phosphorothioate linkage
  modified_base 2: mod_base = OTHER; note = 2'-O-methyluridine with phosphorothioate linkage
  modified_base 3: mod_base = OTHER; note = 2'-O-methyluridine
  modified_base 4: mod_base = OTHER; note = 2'-O-methyladenosine
  modified_base 5: mod_base = OTHER; note = 2'-O-methyluridine
  modified_base 6: mod_base = OTHER; note = 2'-O-methyluridine
  modified_base 7: mod_base = OTHER; note = 2'-fluorouridine
  modified_base 8: mod_base = OTHER; note = 2'-O-methyluridine
  modified_base 9: mod_base = OTHER; note = 2'-fluorouridine
  modified_base 10: mod_base = OTHER; note = 2'-fluoroadenosine
  modified_base 11: mod_base = OTHER; note = 2'-fluorouridine
  modified_base 12: mod_base = OTHER; note = 2'-O-methylcytidine
  modified_base 13: mod_base = OTHER; note = 2'-O-methylguanosine
  modified_base 14: mod_base = OTHER; note = 2'-O-methyladenosine
  modified_base 15: mod_base = OTHER; note = 2'-O-methylguanosine
  modified_base 16: mod_base = OTHER; note = 2'-O-methylcytidine
  modified_base 17: mod_base = OTHER; note = 2'-O-methyladenosine
  modified_base 18: mod_base = OTHER; note = 2'-O-methylcytidine
  modified_base 19: mod_base = OTHER; note = 2'-O-methyladenosine with phosphorothioate linkage
  modified_base 20: mod_base = OTHER; note = 2'-O-methyladenosine with phosphorothioate linkage
  modified_base 21: mod_base = OTHER; note = 2'-O-methyladenosine
cttatttttatcgagcacaaa

SEQ ID NO: 2983 - RNA, 21 nt, synthetic construct
  source 1..21: mol_type = other RNA
  modified_base 1: mod_base = OTHER; note = 2'-O-methyluridine with phosphorothioate linkage
  modified_base 2: mod_base = OTHER; note = 2'-O-methyluridine with phosphorothioate linkage
  modified_base 3: mod_base = OTHER; note = 2'-O-methyladenosine
  modified_base 4: mod_base = OTHER; note = 2'-O-methyluridine
  modified_base 5: mod_base = OTHER; note = 2'-O-methyluridine
  modified_base 6: mod_base = OTHER; note = 2'-O-methyluridine
  modified_base 7: mod_base = OTHER; note = 2'-fluorouridine
  modified_base 8: mod_base = OTHER; note = 2'-O-methyluridine
  modified_base 9: mod_base = OTHER; note = 2'-fluoroadenosine
  modified_base 10: mod_base = OTHER; note = 2'-fluorouridine
  modified_base 11: mod_base = OTHER; note = 2'-fluorocytidine
  modified_base 12: mod_base = OTHER; note = 2'-O-methylguanosine
  modified_base 13: mod_base = OTHER; note = 2'-O-methyladenosine
  modified_base 14: mod_base = OTHER; note = 2'-O-methylguanosine
  modified_base 15: mod_base = OTHER; note = 2'-O-methylcytidine
  modified_base 16: mod_base = OTHER; note = 2'-O-methyladenosine
  modified_base 17: mod_base = OTHER; note = 2'-O-methylcytidine
  modified_base 18: mod_base = OTHER; note = 2'-O-methyladenosine
  modified_base 19: mod_base = OTHER; note = 2'-O-methyladenosine with phosphorothioate linkage
  modified_base 20: mod_base = OTHER; note = 2'-O-methyladenosine with phosphorothioate linkage
  modified_base 21: mod_base = OTHER; note = 2'-O-methyladenosine
ttatttttatcgagcacaaaa

SEQ ID NO: 2984 - RNA, 21 nt, synthetic construct
  source 1..21: mol_type = other RNA
  modified_base 1: mod_base = OTHER; note = 2'-O-methyluridine with phosphorothioate linkage
  modified_base 2: mod_base = OTHER; note = 2'-O-methyladenosine with phosphorothioate linkage
  modified_base 3: mod_base = OTHER; note = 2'-O-methyluridine
  modified_base 4: mod_base = OTHER; note = 2'-O-methyluridine
  modified_base 5: mod_base = OTHER; note = 2'-O-methyluridine
  modified_base 6: mod_base = OTHER; note = 2'-O-methyluridine
  modified_base 7: mod_base = OTHER; note = 2'-fluorouridine
  modified_base 8: mod_base = OTHER; note = 2'-O-methyladenosine
  modified_base 9: mod_base = OTHER; note = 2'-fluorouridine
  modified_base 10: mod_base = OTHER; note = 2'-fluorocytidine
  modified_base 11: mod_base = OTHER; note = 2'-fluoroguanosine
  modified_base 12: mod_base = OTHER; note = 2'-O-methyladenosine
  modified_base 13: mod_base = OTHER; note = 2'-O-methylguanosine
  modified_base 14: mod_base = OTHER; note = 2'-O-methylcytidine
  modified_base 15: mod_base = OTHER; note = 2'-O-methyladenosine
  modified_base 16: mod_base = OTHER; note = 2'-O-methylcytidine
  modified_base 17: mod_base = OTHER; note = 2'-O-methyladenosine
  modified_base 18: mod_base = OTHER; note = 2'-O-methyladenosine
  modified_base 19: mod_base = OTHER; note = 2'-O-methyladenosine with phosphorothioate linkage
  modified_base 20: mod_base = OTHER; note = 2'-O-methylcytidine with phosphorothioate linkage
  modified_base 21: mod_base = OTHER; note = 2'-O-methyladenosine
tatttttatcgagcacaaaca

SEQ ID NO: 2985 - RNA, 21 nt, synthetic construct
  source 1..21: mol_type = other RNA
  modified_base 1: mod_base = OTHER; note = 2'-O-methyladenosine with phosphorothioate linkage
  modified_base 2: mod_base = OTHER; note = 2'-O-methyluridine with phosphorothioate linkage
  modified_base 3: mod_base = OTHER; note = 2'-O-methyluridine
  modified_base 4: mod_base = OTHER; note = 2'-O-methyluridine
  modified_base 5: mod_base = OTHER; note = 2'-O-methyluridine
  modified_base 6: mod_base = OTHER; note = 2'-O-methyluridine
  modified_base 7: mod_base = OTHER; note = 2'-fluoroadenosine
  modified_base 8: mod_base = OTHER; note = 2'-O-methyluridine
  modified_base 9: mod_base = OTHER; note = 2'-fluorocytidine
  modified_base 10: mod_base = OTHER; note = 2'-fluoroguanosine
  modified_base 11: mod_base = OTHER; note = 2'-fluoroadenosine
  modified_base 12: mod_base = OTHER; note = 2'-O-methylguanosine
  modified_base 13: mod_base = OTHER; note = 2'-O-methylcytidine
  modified_base 14: mod_base = OTHER; note = 2'-O-methyladenosine
  modified_base 15: mod_base = OTHER; note = 2'-O-methylcytidine
  modified_base 16: mod_base = OTHER; note = 2'-O-methyladenosine
  modified_base 17: mod_base = OTHER; note = 2'-O-methyladenosine
  modified_base 18: mod_base = OTHER; note = 2'-O-methyladenosine
  modified_base 19: mod_base = OTHER; note = 2'-O-methylcytidine with phosphorothioate linkage
  modified_base 20: mod_base = OTHER; note = 2'-O-methylguanosine with phosphorothioate linkage
  modified_base 21: mod_base = OTHER; note = 2'-O-methyladenosine
atttttatcgagcacaaacga

SEQ ID NO: 2986 - RNA, 21 nt, synthetic construct
  source 1..21: mol_type = other RNA
  modified_base 1: mod_base = OTHER; note = 2'-O-methyluridine with phosphorothioate linkage
  modified_base 2: mod_base = OTHER; note = 2'-O-methyluridine with phosphorothioate linkage
  modified_base 3: mod_base = OTHER; note = 2'-O-methyluridine
  modified_base 4: mod_base = OTHER; note = 2'-O-methyluridine
  modified_base 5: mod_base = OTHER; note = 2'-O-methyluridine
  modified_base 6: mod_base = OTHER; note = 2'-O-methyladenosine
  modified_base 7: mod_base = OTHER; note = 2'-fluorouridine
  modified_base 8: mod_base = OTHER; note = 2'-O-methylcytidine
  modified_base 9: mod_base = OTHER; note = 2'-fluoroguanosine
  modified_base 10: mod_base = OTHER; note = 2'-fluoroadenosine
  modified_base 11: mod_base = OTHER; note = 2'-fluoroguanosine
  modified_base 12: mod_base = OTHER; note = 2'-O-methylcytidine
  modified_base 13: mod_base = OTHER; note = 2'-O-methyladenosine
  modified_base 14: mod_base = OTHER; note = 2'-O-methylcytidine
  modified_base 15: mod_base = OTHER; note = 2'-O-methyladenosine
  modified_base 16: mod_base = OTHER; note = 2'-O-methyladenosine
  modified_base 17: mod_base = OTHER; note = 2'-O-methyladenosine
  modified_base 18: mod_base = OTHER; note = 2'-O-methylcytidine
  modified_base 19: mod_base = OTHER; note = 2'-O-methylguanosine with phosphorothioate linkage
  modified_base 20: mod_base = OTHER; note = 2'-O-methylguanosine with phosphorothioate linkage
  modified_base 21: mod_base = OTHER; note = 2'-O-methyladenosine
tttttatcgagcacaaacgga

SEQ ID NO: 2987 - RNA, 21 nt, synthetic construct
  source 1..21: mol_type = other RNA
  modified_base 1: mod_base = OTHER; note = 2'-O-methyluridine with phosphorothioate linkage
  modified_base 2: mod_base = OTHER; note = 2'-O-methyluridine with phosphorothioate linkage
  modified_base 3: mod_base = OTHER; note = 2'-O-methyluridine
  modified_base 4: mod_base = OTHER; note = 2'-O-methyluridine
  modified_base 5: mod_base = OTHER; note = 2'-O-methyladenosine
  modified_base 6: mod_base = OTHER; note = 2'-O-methyluridine
  modified_base 7: mod_base = OTHER; note = 2'-fluorocytidine
  modified_base 8: mod_base = OTHER; note = 2'-O-methylguanosine
  modified_base 9: mod_base = OTHER; note = 2'-fluoroadenosine
  modified_base 10: mod_base = OTHER; note = 2'-fluoroguanosine
  modified_base 11: mod_base = OTHER; note = 2'-fluorocytidine
  modified_base 12: mod_base = OTHER; note = 2'-O-methyladenosine
  modified_base 13: mod_base = OTHER; note = 2'-O-methylcytidine
  modified_base 14: mod_base = OTHER; note = 2'-O-methyladenosine
  modified_base 15: mod_base = OTHER; note = 2'-O-methyladenosine
  modified_base 16: mod_base = OTHER; note = 2'-O-methyladenosine
  modified_base 17: mod_base = OTHER; note = 2'-O-methylcytidine
  modified_base 18: mod_base = OTHER; note = 2'-O-methylguanosine
  modified_base 19: mod_base = OTHER; note = 2'-O-methylguanosine with phosphorothioate linkage
  modified_base 20: mod_base = OTHER; note = 2'-O-methyladenosine with phosphorothioate linkage
  modified_base 21: mod_base = OTHER; note = 2'-O-methyladenosine
ttttatcgagcacaaacggaa

SEQ ID NO: 2988 - RNA, 21 nt, synthetic construct
  source 1..21: mol_type = other RNA
  modified_base 1: mod_base = OTHER; note = 2'-O-methyluridine with phosphorothioate linkage
  modified_base 2: mod_base = OTHER; note = 2'-O-methyluridine with phosphorothioate linkage
  modified_base 3: mod_base = OTHER; note = 2'-O-methyluridine
  modified_base 4: mod_base = OTHER; note = 2'-O-methyladenosine
  modified_base 5: mod_base = OTHER; note = 2'-O-methyluridine
  modified_base 6: mod_base = OTHER; note = 2'-O-methylcytidine
  modified_base 7: mod_base = OTHER; note = 2'-fluoroguanosine
  modified_base 8: mod_base = OTHER; note = 2'-O-methyladenosine
  modified_base 9: mod_base = OTHER; note = 2'-fluoroguanosine
  modified_base 10: mod_base = OTHER; note = 2'-fluorocytidine
  modified_base 11: mod_base = OTHER; note = 2'-fluoroadenosine
  modified_base 12: mod_base = OTHER; note = 2'-O-methylcytidine
  modified_base 13: mod_base = OTHER; note = 2'-O-methyladenosine
  modified_base 14: mod_base = OTHER; note = 2'-O-methyladenosine
  modified_base 15: mod_base = OTHER; note = 2'-O-methyladenosine
  modified_base 16: mod_base = OTHER; note = 2'-O-methylcytidine
  modified_base 17: mod_base = OTHER; note = 2'-O-methylguanosine
  modified_base 18: mod_base = OTHER; note = 2'-O-methylguanosine
  modified_base 19: mod_base = OTHER; note = 2'-O-methyladenosine with phosphorothioate linkage
  modified_base 20: mod_base = OTHER; note = 2'-O-methyladenosine with phosphorothioate linkage
  modified_base 21: mod_base = OTHER; note = 2'-O-methyladenosine
tttatcgagcacaaacggaaa

SEQ ID NO: 2989 - RNA, 21 nt, synthetic construct
  source 1..21: mol_type = other RNA
  modified_base 1: mod_base = OTHER; note = 2'-O-methyluridine with phosphorothioate linkage
  modified_base 2: mod_base = OTHER; note = 2'-O-methyluridine with phosphorothioate linkage
  modified_base 3: mod_base = OTHER; note = 2'-O-methyladenosine
  modified_base 4: mod_base = OTHER; note = 2'-O-methyluridine
  modified_base 5: mod_base = OTHER; note = 2'-O-methylcytidine
  modified_base 6: mod_base = OTHER; note = 2'-O-methylguanosine
  modified_base 7: mod_base = OTHER; note = 2'-fluoroadenosine
  modified_base 8: mod_base = OTHER; note = 2'-O-methylguanosine
  modified_base 9: mod_base = OTHER; note = 2'-fluorocytidine
  modified_base 10: mod_base = OTHER; note = 2'-fluoroadenosine
  modified_base 11: mod_base = OTHER; note = 2'-fluorocytidine
  modified_base 12: mod_base = OTHER; note = 2'-O-methyladenosine
  modified_base 13: mod_base = OTHER; note = 2'-O-methyladenosine
  modified_base 14: mod_base = OTHER; note = 2'-O-methyladenosine
  modified_base 15: mod_base = OTHER; note = 2'-O-methylcytidine
  modified_base 16: mod_base = OTHER; note = 2'-O-methylguanosine
  modified_base 17: mod_base = OTHER; note = 2'-O-methylguanosine
  modified_base 18: mod_base = OTHER; note = 2'-O-methyladenosine
  modified_base 19: mod_base = OTHER; note = 2'-O-methyladenosine with phosphorothioate linkage
  modified_base 20: mod_base = OTHER; note = 2'-O-methyladenosine with phosphorothioate linkage
  modified_base 21: mod_base = OTHER; note = 2'-O-methyladenosine
ttatcgagcacaaacggaaaa

SEQ ID NO: 2990 - RNA, 21 nt, synthetic construct
  source 1..21: mol_type = other RNA
  modified_base 1: mod_base = OTHER; note = 2'-O-methylcytidine with phosphorothioate linkage
  modified_base 2: mod_base = OTHER; note = 2'-O-methylcytidine with phosphorothioate linkage
  modified_base 3: mod_base = OTHER; note = 2'-O-methyluridine
  modified_base 4: mod_base = OTHER; note = 2'-O-methyluridine
  modified_base 5: mod_base = OTHER; note = 2'-O-methylcytidine
  modified_base 6: mod_base = OTHER; note = 2'-O-methylcytidine
  modified_base 7: mod_base = OTHER; note = 2'-fluorocytidine
  modified_base 8: mod_base = OTHER; note = 2'-O-methylcytidine
  modified_base 9: mod_base = OTHER; note = 2'-fluorouridine
  modified_base 10: mod_base = OTHER; note = 2'-fluorouridine
  modified_base 11: mod_base = OTHER; note = 2'-fluorocytidine
  modified_base 12: mod_base = OTHER; note = 2'-O-methyladenosine
  modified_base 13: mod_base = OTHER; note = 2'-O-methylcytidine
  modified_base 14: mod_base = OTHER; note = 2'-O-methylcytidine
  modified_base 15: mod_base = OTHER; note = 2'-O-methyladenosine
  modified_base 16: mod_base = OTHER; note = 2'-O-methyladenosine
  modified_base 17: mod_base = OTHER; note = 2'-O-methyluridine
  modified_base 18: mod_base = OTHER; note = 2'-O-methylcytidine
  modified_base 19: mod_base = OTHER; note = 2'-O-methylguanosine with phosphorothioate linkage
  modified_base 20: mod_base = OTHER; note = 2'-O-methyladenosine with phosphorothioate linkage
  modified_base 21: mod_base = OTHER; note = 2'-O-methyladenosine
ccttccccttcaccaatcgaa

SEQ ID NO: 2991 - RNA, 21 nt, synthetic construct
  source 1..21: mol_type = other RNA
  modified_base 1: mod_base = OTHER; note = 2'-O-methylcytidine with phosphorothioate linkage
  modified_base 2: mod_base = OTHER; note = 2'-O-methyluridine with phosphorothioate linkage
  modified_base 3: mod_base = OTHER; note = 2'-O-methyluridine
  modified_base 4: mod_base = OTHER; note = 2'-O-methylcytidine
  modified_base 5: mod_base = OTHER; note = 2'-O-methyladenosine
  modified_base 6: mod_base = OTHER; note = 2'-O-methylcytidine
  modified_base 7: mod_base = OTHER; note = 2'-fluorocytidine
  modified_base 8: mod_base = OTHER; note = 2'-O-methyladenosine
  modified_base 9: mod_base = OTHER; note = 2'-fluoroadenosine
  modified_base 10: mod_base = OTHER; note = 2'-fluorouridine
  modified_base 11: mod_base = OTHER; note = 2'-fluorocytidine
  modified_base 12: mod_base = OTHER; note = 2'-O-methylguanosine
  modified_base 13: mod_base = OTHER; note = 2'-O-methyladenosine
  modified_base 14: mod_base = OTHER; note = 2'-O-methylguanosine
  modified_base 15: mod_base = OTHER; note = 2'-O-methyladenosine
  modified_base 16: mod_base = OTHER; note = 2'-O-methyluridine
  modified_base 17: mod_base = OTHER; note = 2'-O-methylguanosine
  modified_base 18: mod_base = OTHER; note = 2'-O-methyladenosine
  modified_base 19: mod_base = OTHER; note = 2'-O-methyladenosine with phosphorothioate linkage
  modified_base 20: mod_base = OTHER; note = 2'-O-methyladenosine with phosphorothioate linkage
  modified_base 21: mod_base = OTHER; note = 2'-O-methyladenosine
cttcaccaatcgagatgaaaa

SEQ ID NO: 2992 - RNA, 21 nt, synthetic construct
  source 1..21: mol_type = other RNA
  modified_base 1: mod_base = OTHER; note = 2'-O-methyladenosine with phosphorothioate linkage
  modified_base 2: mod_base = OTHER; note = 2'-O-methyladenosine with phosphorothioate linkage
  modified_base 3: mod_base = OTHER; note = 2'-O-methyladenosine
  modified_base 4: mod_base = OTHER; note = 2'-O-methylguanosine
  modified_base 5: mod_base = OTHER; note = 2'-O-methylcytidine
  modified_base 6: mod_base = OTHER; note = 2'-O-methyladenosine
  modified_base 7: mod_base = OTHER; note = 2'-fluorouridine
  modified_base 8: mod_base = OTHER; note = 2'-O-methylcytidine
  modified_base 9: mod_base = OTHER; note = 2'-fluorocytidine
  modified_base 10: mod_base = OTHER; note = 2'-fluoroadenosine
  modified_base 11: mod_base = OTHER; note = 2'-fluoroadenosine
  modified_base 12: mod_base = OTHER; note = 2'-O-methyluridine
  modified_base 13: mod_base = OTHER; note = 2'-O-methylcytidine
  modified_base 14: mod_base = OTHER; note = 2'-O-methylcytidine
  modified_base 15: mod_base = OTHER; note = 2'-O-methylcytidine
  modified_base 16: mod_base = OTHER; note = 2'-O-methylguanosine
  modified_base 17: mod_base = OTHER; note = 2'-O-methyluridine
  modified_base 18: mod_base = OTHER; note = 2'-O-methylguanosine
  modified_base 19: mod_base = OTHER; note = 2'-O-methylguanosine with phosphorothioate linkage
  modified_base 20: mod_base = OTHER; note = 2'-O-methyladenosine with phosphorothioate linkage
  modified_base 21: mod_base = OTHER; note = 2'-O-methyladenosine
aaagcatccaatcccgtggaa

SEQ ID NO: 2993 - RNA, 21 nt, synthetic construct
  source 1..21: mol_type = other RNA
  modified_base 1: mod_base = OTHER; note = 2'-O-methylguanosine with phosphorothioate linkage
  modified_base 2: mod_base = OTHER; note = 2'-O-methylcytidine with phosphorothioate linkage
  modified_base 3: mod_base = OTHER; note = 2'-O-methyladenosine
  modified_base 4: mod_base = OTHER; note = 2'-O-methyluridine
  modified_base 5: mod_base = OTHER; note = 2'-O-methylcytidine
  modified_base 6: mod_base = OTHER; note = 2'-O-methylcytidine
  modified_base 7: mod_base = OTHER; note = 2'-fluoroadenosine
  modified_base 8: mod_base = OTHER; note = 2'-O-methyladenosine
  modified_base 9: mod_base = OTHER; note = 2'-fluorouridine
  modified_base 10: mod_base = OTHER; note = 2'-fluorocytidine
  modified_base 11: mod_base = OTHER; note = 2'-fluorocytidine
  modified_base 12: mod_base = OTHER; note = 2'-O-methylcytidine
  modified_base 13: mod_base = OTHER; note = 2'-O-methylguanosine
  modified_base 14: mod_base = OTHER; note = 2'-O-methyluridine
  modified_base 15: mod_base = OTHER; note = 2'-O-methylguanosine
  modified_base 16: mod_base = OTHER; note = 2'-O-methylguanosine
  modified_base 17: mod_base = OTHER; note = 2'-O-methyladenosine
  modified_base 18: mod_base = OTHER; note = 2'-O-methylguanosine
  modified_base 19: mod_base = OTHER; note = 2'-O-methylguanosine with phosphorothioate linkage
  modified_base 20: mod_base = OTHER; note = 2'-O-methyluridine with phosphorothioate linkage
  modified_base 21: mod_base = OTHER; note = 2'-O-methyladenosine
gcatccaatcccgtggaggta

SEQ ID NO: 2994 - RNA, 21 nt, synthetic construct
  source 1..21: mol_type = other RNA
  modified_base 1: mod_base = OTHER; note = 2'-O-methyluridine with phosphorothioate linkage
  modified_base 2: mod_base = OTHER; note = 2'-O-methylcytidine with phosphorothioate linkage
  modified_base 3: mod_base = OTHER; note = 2'-O-methyladenosine
  modified_base 4: mod_base = OTHER; note = 2'-O-methylcytidine
  modified_base 5: mod_base = OTHER; note = 2'-O-methylguanosine
  modified_base 6: mod_base = OTHER; note = 2'-O-methylcytidine
  modified_base 7: mod_base = OTHER; note = 2'-fluorocytidine
  modified_base 8: mod_base = OTHER; note = 2'-O-methyladenosine
  modified_base 9: mod_base = OTHER; note = 2'-fluoroguanosine
  modified_base 10: mod_base = OTHER; note = 2'-fluoroadenosine
  modified_base 11: mod_base = OTHER; note = 2'-fluoroguanosine
  modified_base 12: mod_base = OTHER; note = 2'-O-methylguanosine
  modified_base 13: mod_base = OTHER; note = 2'-O-methyladenosine
  modified_base 14: mod_base = OTHER; note = 2'-O-methyluridine
  modified_base 15: mod_base = OTHER; note = 2'-O-methylguanosine
  modified_base 16: mod_base = OTHER; note = 2'-O-methyladenosine
  modified_base 17: mod_base = OTHER; note = 2'-O-methylcytidine
  modified_base 18: mod_base = OTHER; note = 2'-O-methylguanosine
  modified_base 19: mod_base = OTHER; note = 2'-O-methyladenosine with phosphorothioate linkage
  modified_base 20: mod_base = OTHER; note = 2'-O-methyluridine with phosphorothioate linkage
  modified_base 21: mod_base = OTHER; note = 2'-O-methyladenosine
tcacgccagaggatgacgata

SEQ ID NO: 2995 - RNA, 21 nt, synthetic construct
  source 1..21: mol_type = other RNA
  modified_base 1: mod_base = OTHER; note = 2'-O-methyladenosine with phosphorothioate linkage
  modified_base 2: mod_base = OTHER; note = 2'-O-methyluridine with phosphorothioate linkage
  modified_base 3: mod_base = OTHER; note = 2'-O-methylguanosine
  modified_base 4: mod_base = OTHER; note = 2'-O-methyladenosine
  modified_base 5: mod_base = OTHER; note = 2'-O-methylcytidine
  modified_base 6: mod_base = OTHER; note = 2'-O-methylguanosine
  modified_base 7: mod_base = OTHER; note = 2'-fluoroadenosine
  modified_base 8: mod_base = OTHER; note = 2'-O-methyluridine
  modified_base 9: mod_base = OTHER; note = 2'-fluorouridine
  modified_base 10: mod_base = OTHER; note = 2'-fluoroguanosine
  modified_base 11: mod_base = OTHER; note = 2'-fluorouridine
  modified_base 12: mod_base = OTHER; note = 2'-O-methyluridine
  modified_base 13: mod_base = OTHER; note = 2'-O-methyluridine
  modified_base 14: mod_base = OTHER; note = 2'-O-methyladenosine
  modified_base 15: mod_base = OTHER; note = 2'-O-methyluridine
  modified_base 16: mod_base = OTHER; note = 2'-O-methylcytidine
  modified_base 17: mod_base = OTHER; note = 2'-O-methyladenosine
  modified_base 18: mod_base = OTHER; note = 2'-O-methyladenosine
  modified_base 19: mod_base = OTHER; note = 2'-O-methylcytidine with phosphorothioate linkage
  modified_base 20: mod_base = OTHER; note = 2'-O-methylguanosine with phosphorothioate linkage
  modified_base 21: mod_base = OTHER; note = 2'-O-methyladenosine
atgacgattgtttatcaacga

SEQ ID NO: 2996 - RNA, 21 nt, synthetic construct
  source 1..21: mol_type = other RNA
  modified_base 1: mod_base = OTHER; note = 2'-O-methyluridine with phosphorothioate linkage
  modified_base 2: mod_base = OTHER; note = 2'-O-methylguanosine with phosphorothioate linkage
  modified_base 3: mod_base = OTHER; note = 2'-O-methyladenosine
  modified_base 4: mod_base = OTHER; note = 2'-O-methylcytidine
  modified_base 5: mod_base = OTHER; note = 2'-O-methylguanosine
  modified_base 6: mod_base = OTHER; note = 2'-O-methyladenosine
  modified_base 7: mod_base = OTHER; note = 2'-fluorouridine
  modified_base 8: mod_base = OTHER; note = 2'-O-methyluridine
  modified_base 9: mod_base = OTHER; note = 2'-fluoroguanosine
  modified_base 10: mod_base = OTHER; note = 2'-fluorouridine
  modified_base 11: mod_base = OTHER; note = 2'-fluorouridine
  modified_base 12: mod_base = OTHER; note = 2'-O-methyluridine
  modified_base 13: mod_base = OTHER; note = 2'-O-methyladenosine
  modified_base 14: mod_base = OTHER; note = 2'-O-methyluridine
  modified_base 15: mod_base = OTHER; note = 2'-O-methylcytidine
  modified_base 16: mod_base = OTHER; note = 2'-O-methyladenosine
  modified_base 17: mod_base = OTHER; note = 2'-O-methyladenosine
  modified_base 18: mod_base = OTHER; note = 2'-O-methylcytidine
  modified_base 19: mod_base = OTHER; note = 2'-O-methylguanosine with phosphorothioate linkage
  modified_base 20: mod_base = OTHER; note = 2'-O-methyluridine with phosphorothioate linkage
  modified_base 21: mod_base = OTHER; note = 2'-O-methyladenosine
tgacgattgtttatcaacgta

SEQ ID NO: 2997 - RNA, 21 nt, synthetic construct
  source 1..21: mol_type = other RNA
  modified_base 1: mod_base = OTHER; note = 2'-O-methyluridine with phosphorothioate linkage
  modified_base 2: mod_base = OTHER; note = 2'-O-methyluridine with phosphorothioate linkage
  modified_base 3: mod_base = OTHER; note = 2'-O-methylguanosine
  modified_base 4: mod_base = OTHER; note = 2'-O-methyluridine
  modified_base 5: mod_base = OTHER; note = 2'-O-methyluridine
  modified_base 6: mod_base = OTHER; note = 2'-O-methyluridine
  modified_base 7: mod_base = OTHER; note = 2'-fluoroadenosine
  modified_base 8: mod_base = OTHER; note = 2'-O-methyluridine
  modified_base 9: mod_base = OTHER; note = 2'-fluorocytidine
  modified_base 10: mod_base = OTHER; note = 2'-fluoroadenosine
  modified_base 11: mod_base = OTHER; note = 2'-fluoroadenosine
  modified_base 12: mod_base = OTHER; note = 2'-O-methylcytidine
  modified_base 13: mod_base = OTHER; note = 2'-O-methylguanosine
  modified_base 14: mod_base = OTHER; note = 2'-O-methyluridine
  modified_base 15: mod_base = OTHER; note = 2'-O-methylcytidine
  modified_base 16: mod_base = OTHER; note = 2'-O-methyladenosine
  modified_base 17: mod_base = OTHER; note = 2'-O-methyluridine
  modified_base 18: mod_base = OTHER; note = 2'-O-methylcytidine
  modified_base 19: mod_base = OTHER; note = 2'-O-methyluridine with phosphorothioate linkage
  modified_base 20: mod_base = OTHER; note = 2'-O-methyladenosine with phosphorothioate linkage
  modified_base 21: mod_base = OTHER; note = 2'-O-methyladenosine
ttgtttatcaacgtcatctaa

SEQ ID NO: 2998 - RNA, 21 nt, synthetic construct
  source 1..21: mol_type = other RNA
  modified_base 1: mod_base = OTHER; note = 2'-O-methyluridine with phosphorothioate linkage
  modified_base 2: mod_base = OTHER; note = 2'-O-methyladenosine with phosphorothioate linkage
  modified_base 3: mod_base = OTHER; note = 2'-O-methyluridine
  modified_base 4: mod_base = OTHER; note = 2'-O-methylguanosine
  modified_base 5: mod_base = OTHER; note = 2'-O-methylcytidine
  modified_base 6: mod_base = OTHER; note = 2'-O-methylcytidine
  modified_base 7: mod_base = OTHER; note = 2'-fluorocytidine
  modified_base 8: mod_base = OTHER; note = 2'-O-methylcytidine
  modified_base 9: mod_base = OTHER; note = 2'-fluoroguanosine
  modified_base 10: mod_base = OTHER; note = 2'-fluorocytidine
  modified_base 11: mod_base = OTHER; note = 2'-fluoroadenosine
  modified_base 12: mod_base = OTHER; note = 2'-O-methylguanosine
  modified_base 13: mod_base = OTHER; note = 2'-O-methylguanosine
  modified_base 14: mod_base = OTHER; note = 2'-O-methylguanosine
  modified_base 15: mod_base = OTHER; note = 2'-O-methyluridine
  modified_base 16: mod_base = OTHER; note = 2'-O-methyladenosine
  modified_base 17: mod_base = OTHER; note = 2'-O-methyluridine
  modified_base 18: mod_base = OTHER; note = 2'-O-methyluridine
  modified_base 19: mod_base = OTHER; note = 2'-O-methyluridine with phosphorothioate linkage
  modified_base 20: mod_base = OTHER; note = 2'-O-methylguanosine with phosphorothioate linkage
  modified_base 21: mod_base = OTHER; note = 2'-O-methyladenosine
tatgccccgcagggtatttga

SEQ ID NO: 2999 - RNA, 21 nt, synthetic construct
  source 1..21: mol_type = other RNA
  modified_base 1: mod_base = OTHER; note = 2'-O-methylcytidine with phosphorothioate linkage
  modified_base 2: mod_base = OTHER; note = 2'-O-methylguanosine with phosphorothioate linkage
  modified_base 3: mod_base = OTHER; note = 2'-O-methylcytidine
  modified_base 4: mod_base = OTHER; note = 2'-O-methyladenosine
  modified_base 5: mod_base = OTHER; note = 2'-O-methylguanosine
  modified_base 6: mod_base = OTHER; note = 2'-O-methylguanosine
  modified_base 7: mod_base = OTHER; note = 2'-fluoroguanosine
  modified_base 8: mod_base = OTHER; note = 2'-O-methyluridine
  modified_base 9: mod_base = OTHER; note = 2'-fluoroadenosine
  modified_base 10: mod_base = OTHER; note = 2'-fluorouridine
  modified_base 11: mod_base = OTHER; note = 2'-fluorouridine
  modified_base 12: mod_base = OTHER; note = 2'-O-methyluridine
  modified_base 13: mod_base = OTHER; note = 2'-O-methylguanosine
  modified_base 14: mod_base = OTHER; note = 2'-O-methyluridine
  modified_base 15: mod_base = OTHER; note = 2'-O-methyladenosine
  modified_base 16: mod_base = OTHER; note = 2'-O-methyladenosine
  modified_base 17: mod_base = OTHER; note = 2'-O-methyladenosine
  modified_base 18: mod_base = OTHER; note = 2'-O-methylguanosine
  modified_base 19: mod_base = OTHER; note = 2'-O-methyladenosine with phosphorothioate linkage
  modified_base 20: mod_base = OTHER; note = 2'-O-methyluridine with phosphorothioate linkage
  modified_base 21: mod_base = OTHER; note = 2'-O-methyladenosine
cgcagggtatttgtaaagata

SEQ ID NO: 3000 - RNA, 21 nt, synthetic construct
  source 1..21: mol_type = other RNA
  modified_base 1: mod_base = OTHER; note = 2'-O-methylguanosine with phosphorothioate linkage
  modified_base 2: mod_base = OTHER; note = 2'-O-methylcytidine with phosphorothioate linkage
  modified_base 3: mod_base = OTHER; note = 2'-O-methyladenosine
  modified_base 4: mod_base = OTHER; note = 2'-O-methylguanosine
  modified_base 5: mod_base = OTHER; note = 2'-O-methylguanosine
  modified_base 6: mod_base = OTHER; note = 2'-O-methylguanosine
  modified_base 7: mod_base = OTHER; note = 2'-fluorouridine
  modified_base 8: mod_base = OTHER; note = 2'-O-methyladenosine
  modified_base 9: mod_base = OTHER; note = 2'-fluorouridine
  modified_base 10: mod_base = OTHER; note = 2'-fluorouridine
  modified_base 11: mod_base = OTHER; note = 2'-fluorouridine
  modified_base 12: mod_base = OTHER; note = 2'-O-methylguanosine
  modified_base 13: mod_base = OTHER; note = 2'-O-methyluridine
  modified_base 14: mod_base = OTHER; note = 2'-O-methyladenosine
  modified_base 15: mod_base = OTHER; note = 2'-O-methyladenosine
  modified_base 16: mod_base = OTHER; note = 2'-O-methyladenosine
  modified_base 17: mod_base = OTHER; note = 2'-O-methylguanosine
  modified_base 18: mod_base = OTHER; note = 2'-O-methyladenosine
  modified_base 19: mod_base = OTHER; note = 2'-O-methyluridine with phosphorothioate linkage
  modified_base 20: mod_base = OTHER; note = 2'-O-methylguanosine with phosphorothioate linkage
  modified_base 21: mod_base = OTHER; note = 2'-O-methyladenosine
gcagggtatttgtaaagatga

SEQ ID NO: 3001 - RNA, 21 nt, synthetic construct
  source 1..21: mol_type = other RNA
  modified_base 1: mod_base = OTHER; note = 2'-O-methylcytidine with phosphorothioate linkage
  modified_base 2: mod_base = OTHER; note = 2'-O-methyladenosine with phosphorothioate linkage
  modified_base 3: mod_base = OTHER; note = 2'-O-methylguanosine
  modified_base 4: mod_base = OTHER; note = 2'-O-methylguanosine
  modified_base 5: mod_base = OTHER; note = 2'-O-methylguanosine
  modified_base 6: mod_base = OTHER; note = 2'-O-methyluridine
  modified_base 7: mod_base = OTHER; note = 2'-fluoroadenosine
  modified_base 8: mod_base = OTHER; note = 2'-O-methyluridine
  modified_base 9: mod_base = OTHER; note = 2'-fluorouridine
  modified_base 10: mod_base = OTHER; note = 2'-fluorouridine
  modified_base 11: mod_base = OTHER; note = 2'-fluoroguanosine
  modified_base 12: mod_base = OTHER; note = 2'-O-methyluridine
  modified_base 13: mod_base = OTHER; note = 2'-O-methyladenosine
  modified_base 14: mod_base = OTHER; note = 2'-O-methyladenosine
  modified_base 15: mod_base = OTHER; note = 2'-O-methyladenosine
  modified_base 16: mod_base = OTHER; note = 2'-O-methylguanosine
  modified_base 17: mod_base = OTHER; note = 2'-O-methyladenosine
  modified_base 18: mod_base = OTHER; note = 2'-O-methyluridine
  modified_base 19: mod_base = OTHER; note = 2'-O-methylguanosine with phosphorothioate linkage
  modified_base 20: mod_base = OTHER; note = 2'-O-methyladenosine with phosphorothioate linkage
  modified_base 21: mod_base = OTHER; note = 2'-O-methyladenosine
cagggtatttgtaaagatgaa

SEQ ID NO: 3002 - RNA, 21 nt, synthetic construct
  source 1..21: mol_type = other RNA
  modified_base 1: mod_base = OTHER; note = 2'-O-methyladenosine with phosphorothioate linkage
  modified_base 2: mod_base = OTHER; note = 2'-O-methylguanosine with phosphorothioate linkage
  modified_base 3: mod_base = OTHER; note = 2'-O-methylguanosine
  modified_base 4: mod_base = OTHER; note = 2'-O-methylguanosine
  modified_base 5: mod_base = OTHER; note = 2'-O-methyluridine
  modified_base 6: mod_base = OTHER; note = 2'-O-methyladenosine
  modified_base 7: mod_base = OTHER; note = 2'-fluorouridine
  modified_base 8: mod_base = OTHER; note = 2'-O-methyluridine
  modified_base 9: mod_base = OTHER; note = 2'-fluorouridine
  modified_base 10: mod_base = OTHER; note = 2'-fluoroguanosine
  modified_base 11: mod_base = OTHER; note = 2'-fluorouridine
  modified_base 12: mod_base = OTHER; note = 2'-O-methyladenosine
  modified_base 13: mod_base = OTHER; note = 2'-O-methyladenosine
  modified_base 14: mod_base = OTHER; note = 2'-O-methyladenosine
  modified_base 15: mod_base = OTHER; note = 2'-O-methylguanosine
  modified_base 16: mod_base = OTHER; note = 2'-O-methyladenosine
  modified_base 17: mod_base = OTHER; note = 2'-O-methyluridine
  modified_base 18: mod_base = OTHER; note = 2'-O-methylguanosine
  modified_base 19: mod_base = OTHER; note = 2'-O-methyladenosine with phosphorothioate linkage
  modified_base 20: mod_base = OTHER; note = 2'-O-methylguanosine with phosphorothioate linkage
  modified_base 21: mod_base = OTHER; note = 2'-O-methyladenosine
agggtatttgtaaagatgaga

SEQ ID NO: 3003 - RNA, 21 nt, synthetic construct
  source 1..21: mol_type = other RNA
  modified_base 1: mod_base = OTHER; note = 2'-O-methylguanosine with phosphorothioate linkage
  modified_base 2: mod_base = OTHER; note = 2'-O-methylguanosine with phosphorothioate linkage
  modified_base 3: mod_base = OTHER; note = 2'-O-methyluridine
  modified_base 4: mod_base = OTHER; note = 2'-O-methyladenosine
  modified_base 5: mod_base = OTHER; note = 2'-O-methyluridine
  modified_base 6: mod_base = OTHER; note = 2'-O-methyluridine
  modified_base 7: mod_base = OTHER; note = 2'-fluorouridine
  modified_base 8: mod_base = OTHER; note = 2'-O-methylguanosine
  modified_base 9: mod_base = OTHER; note = 2'-fluorouridine
  modified_base 10: mod_base = OTHER; note = 2'-fluoroadenosine
  modified_base 11: mod_base = OTHER; note = 2'-fluoroadenosine
  modified_base 12: mod_base = OTHER; note = 2'-O-methyladenosine
  modified_base 13: mod_base = OTHER; note = 2'-O-methylguanosine
  modified_base 14: mod_base = OTHER; note = 2'-O-methyladenosine
  modified_base 15: mod_base = OTHER; note = 2'-O-methyluridine
  modified_base 16: mod_base = OTHER; note = 2'-O-methylguanosine
  modified_base 17: mod_base = OTHER; note = 2'-O-methyladenosine
  modified_base 18: mod_base = OTHER; note = 2'-O-methylguanosine
  modified_base 19: mod_base = OTHER; note = 2'-O-methylcytidine with phosphorothioate linkage
  modified_base 20: mod_base = OTHER; note = 2'-O-methylcytidine with phosphorothioate linkage
  modified_base 21: mod_base = OTHER; note = 2'-O-methyladenosine
ggtatttgtaaagatgagcca

SEQ ID NO: 3004 - RNA, 21 nt, synthetic construct
  source 1..21: mol_type = other RNA
  modified_base 1: mod_base = OTHER; note = 2'-O-methylguanosine with phosphorothioate linkage
  modified_base 2: mod_base = OTHER; note = 2'-O-methyluridine with phosphorothioate linkage
  modified_base 3: mod_base = OTHER; note = 2'-O-methyladenosine
  modified_base 4: mod_base = OTHER; note = 2'-O-methyluridine
  modified_base 5: mod_base = OTHER; note = 2'-O-methyluridine
  modified_base 6: mod_base = OTHER; note = 2'-O-methyluridine
  modified_base 7: mod_base = OTHER; note = 2'-fluoroguanosine
  modified_base 8: mod_base = OTHER; note = 2'-O-methyluridine
  modified_base 9: mod_base = OTHER; note = 2'-fluoroadenosine
  modified_base 10: mod_base = OTHER; note = 2'-fluoroadenosine
  modified_base 11: mod_base = OTHER; note = 2'-fluoroadenosine
  modified_base 12: mod_base = OTHER; note = 2'-O-methylguanosine
  modified_base 13: mod_base = OTHER; note = 2'-O-methyladenosine
  modified_base 14: mod_base = OTHER; note = 2'-O-methyluridine
  modified_base 15: mod_base = OTHER; note = 2'-O-methylguanosine
  modified_base 16: mod_base = OTHER; note = 2'-O-methyladenosine
  modified_base 17: mod_base = OTHER; note = 2'-O-methylguanosine
  modified_base 18: mod_base = OTHER; note = 2'-O-methylcytidine
  modified_base 19: mod_base = OTHER; note = 2'-O-methylcytidine with phosphorothioate linkage
  modified_base 20: mod_base = OTHER; note = 2'-O-methylcytidine with phosphorothioate linkage
  modified_base 21: mod_base = OTHER; note = 2'-O-methyladenosine
gtatttgtaaagatgagccca

SEQ ID NO: 3005 - RNA, 21 nt, synthetic construct
  source 1..21: mol_type = other RNA
  modified_base 1: mod_base = OTHER; note = 2'-O-methyluridine with phosphorothioate linkage
  modified_base 2: mod_base = OTHER; note = 2'-O-methyladenosine with phosphorothioate linkage
  modified_base 3: mod_base = OTHER; note = 2'-O-methyluridine
  modified_base 4: mod_base = OTHER; note = 2'-O-methyluridine
  modified_base 5: mod_base = OTHER; note = 2'-O-methyluridine
  modified_base 6: mod_base = OTHER; note = 2'-O-methylguanosine
  modified_base 7: mod_base = OTHER; note = 2'-fluorouridine
  modified_base 8: mod_base = OTHER; note = 2'-O-methyladenosine
  modified_base 9: mod_base = OTHER; note = 2'-fluoroadenosine
  modified_base 10: mod_base = OTHER; note = 2'-fluoroadenosine
  modified_base 11: mod_base = OTHER; note = 2'-fluoroguanosine
  modified_base 12: mod_base = OTHER; note = 2'-O-methyladenosine
  modified_base 13: mod_base = OTHER; note = 2'-O-methyluridine
  modified_base 14: mod_base = OTHER; note = 2'-O-methylguanosine
  modified_base 15: mod_base = OTHER; note = 2'-O-methyladenosine
  modified_base 16: mod_base = OTHER; note = 2'-O-methylguanosine
  modified_base 17: mod_base = OTHER; note = 2'-O-methylcytidine
  modified_base 18: mod_base = OTHER; note = 2'-O-methylcytidine
  modified_base 19: mod_base = OTHER; note = 2'-O-methylcytidine with phosphorothioate linkage
  modified_base 20: mod_base = OTHER; note = 2'-O-methyladenosine with phosphorothioate linkage
  modified_base 21: mod_base = OTHER; note = 2'-O-methyladenosine
tatttgtaaagatgagcccaa

SEQ ID NO: 3006 - RNA, 21 nt, synthetic construct
  source 1..21: mol_type = other RNA
  modified_base 1: mod_base = OTHER; note = 2'-O-methyladenosine with phosphorothioate linkage
  modified_base 2: mod_base = OTHER; note = 2'-O-methyluridine with phosphorothioate linkage
  modified_base 3: mod_base = OTHER; note = 2'-O-methyluridine
  modified_base 4: mod_base = OTHER; note = 2'-O-methyluridine
  modified_base 5: mod_base = OTHER; note = 2'-O-methylguanosine
  modified_base 6: mod_base = OTHER; note = 2'-O-methyluridine
  modified_base 7: mod_base = OTHER; note = 2'-fluoroadenosine
  modified_base 8: mod_base = OTHER; note = 2'-O-methyladenosine
  modified_base 9: mod_base = OTHER; note = 2'-fluoroadenosine
  modified_base 10: mod_base = OTHER; note = 2'-fluoroguanosine
  modified_base 11: mod_base = OTHER; note = 2'-fluoroadenosine
  modified_base 12: mod_base = OTHER; note = 2'-O-methyluridine
  modified_base 13: mod_base = OTHER; note = 2'-O-methylguanosine
  modified_base 14: mod_base = OTHER; note = 2'-O-methyladenosine
  modified_base 15: mod_base = OTHER; note = 2'-O-methylguanosine
  modified_base 16: mod_base = OTHER; note = 2'-O-methylcytidine
  modified_base 17: mod_base = OTHER; note = 2'-O-methylcytidine
  modified_base 18: mod_base = OTHER; note = 2'-O-methylcytidine
  modified_base 19: mod_base = OTHER; note = 2'-O-methyladenosine with phosphorothioate linkage
  modified_base 20: mod_base = OTHER; note = 2'-O-methylguanosine with phosphorothioate linkage
  modified_base 21: mod_base = OTHER; note = 2'-O-methyladenosine
atttgtaaagatgagcccaga

SEQ ID NO: 3007 - RNA, 21 nt, synthetic construct
  source 1..21: mol_type = other RNA
  modified_base 1: mod_base = OTHER; note = 2'-O-methyluridine with phosphorothioate linkage
  modified_base 2: mod_base = OTHER; note = 2'-O-methyluridine with phosphorothioate linkage
  modified_base 3: mod_base = OTHER; note = 2'-O-methyluridine
  modified_base 4: mod_base = OTHER; note = 2'-O-methylguanosine
  modified_base 5: mod_base = OTHER; note = 2'-O-methyluridine
  modified_base 6: mod_base = OTHER; note = 2'-O-methyladenosine
  modified_base 7: mod_base = OTHER; note = 2'-fluoroadenosine
  modified_base 8: mod_base = OTHER; note = 2'-O-methyladenosine
  modified_base 9: mod_base = OTHER; note = 2'-fluoroguanosine
  modified_base 10: mod_base = OTHER; note = 2'-fluoroadenosine
  modified_base 11: mod_base = OTHER; note = 2'-fluorouridine
  modified_base 12: mod_base = OTHER; note = 2'-O-methylguanosine
  modified_base 13: mod_base = OTHER; note = 2'-O-methyladenosine
  modified_base 14: mod_base = OTHER; note = 2'-O-methylguanosine
  modified_base 15: mod_base = OTHER; note = 2'-O-methylcytidine
  modified_base 16: mod_base = OTHER; note = 2'-O-methylcytidine
  modified_base 17: mod_base = OTHER; note = 2'-O-methylcytidine
  modified_base 18: mod_base = OTHER; note = 2'-O-methyladenosine
  modified_base 19: mod_base = OTHER; note = 2'-O-methylguanosine with phosphorothioate linkage
  modified_base 20: mod_base = OTHER; note = 2'-O-methylcytidine with phosphorothioate linkage
  modified_base 21: mod_base = OTHER; note = 2'-O-methyladenosine
tttgtaaagatgagcccagca

SEQ ID NO: 3008 - RNA, 21 nt, synthetic construct
  source 1..21: mol_type = other RNA
  modified_base 1: mod_base = OTHER; note = 2'-O-methyluridine with phosphorothioate linkage
  modified_base 2: mod_base = OTHER; note = 2'-O-methyluridine with phosphorothioate linkage
  modified_base 3: mod_base = OTHER; note = 2'-O-methylguanosine
  modified_base 4: mod_base = OTHER; note = 2'-O-methyluridine
  modified_base 5: mod_base = OTHER; note = 2'-O-methyladenosine
  modified_base 6: mod_base = OTHER; note = 2'-O-methyladenosine
  modified_base 7: mod_base = OTHER; note = 2'-fluoroadenosine
  modified_base 8: mod_base = OTHER; note = 2'-O-methylguanosine
  modified_base 9: mod_base = OTHER; note = 2'-fluoroadenosine
  modified_base 10: mod_base = OTHER; note = 2'-fluorouridine
  modified_base 11: mod_base = OTHER; note = 2'-fluoroguanosine
  modified_base 12: mod_base = OTHER; note = 2'-O-methyladenosine
  modified_base 13: mod_base = OTHER; note = 2'-O-methylguanosine
  modified_base 14: mod_base = OTHER; note = 2'-O-methylcytidine
  modified_base 15: mod_base = OTHER; note = 2'-O-methylcytidine
  modified_base 16: mod_base = OTHER; note = 2'-O-methylcytidine
  modified_base 17: mod_base = OTHER; note = 2'-O-methyladenosine
  modified_base 18: mod_base = OTHER; note = 2'-O-methylguanosine
  modified_base 19: mod_base = OTHER; note = 2'-O-methylcytidine with phosphorothioate linkage
  modified_base 20: mod_base = OTHER; note = 2'-O-methyladenosine with phosphorothioate linkage
  modified_base 21: mod_base = OTHER; note = 2'-O-methyladenosine
ttgtaaagatgagcccagcaa

SEQ ID NO: 3009 - RNA, 21 nt, synthetic construct
  source 1..21: mol_type = other RNA
  modified_base 1: mod_base = OTHER; note = 2'-O-methyluridine with phosphorothioate linkage
  modified_base 2: mod_base = OTHER; note = 2'-O-methylguanosine with phosphorothioate linkage
  modified_base 3: mod_base = OTHER; note = 2'-O-methyluridine
  modified_base 4: mod_base = OTHER; note = 2'-O-methyladenosine
  modified_base 5: mod_base = OTHER; note = 2'-O-methyladenosine
  modified_base 6: mod_base = OTHER; note = 2'-O-methyladenosine
  modified_base 7: mod_base = OTHER; note = 2'-fluoroguanosine
  modified_base 8: mod_base = OTHER; note = 2'-O-methyladenosine
  modified_base 9: mod_base = OTHER; note = 2'-fluorouridine
  modified_base 10: mod_base = OTHER; note = 2'-fluoroguanosine
  modified_base 11: mod_base = OTHER; note = 2'-fluoroadenosine
  modified_base 12: mod_base = OTHER; note = 2'-O-methylguanosine
  modified_base 13: mod_base = OTHER; note = 2'-O-methylcytidine
  modified_base 14: mod_base = OTHER; note = 2'-O-methylcytidine
  modified_base 15: mod_base = OTHER; note = 2'-O-methylcytidine
  modified_base 16: mod_base = OTHER; note = 2'-O-methyladenosine
  modified_base 17: mod_base = OTHER; note = 2'-O-methylguanosine
  modified_base 18: mod_base = OTHER; note = 2'-O-methylcytidine
  modified_base 19: mod_base = OTHER; note = 2'-O-methyladenosine with phosphorothioate linkage
  modified_base 20: mod_base = OTHER; note = 2'-O-methylguanosine with phosphorothioate linkage
  modified_base 21: mod_base = OTHER; note = 2'-O-methyladenosine
tgtaaagatgagcccagcaga

(The sequence listing continues in the following parts.)

1. (canceled)

2. A double stranded RNA agent (dsRNA) agent for inhibiting expression of BCL11 transcription factor A (BCL11A),
wherein the dsRNA agent comprises a sense strand and an antisense strand forming a double stranded region,
wherein the nucleotide sequence of the antisense strand differs by no more than 5 nucleotides from the nucleotide sequence of any one of the antisense strands set forth in any one of Tables 2-5 or set forth in any one of SEQ ID NOS: 4-1576.

3. The dsRNA agent of claim 2, wherein the nucleotide sequence of the sense strand differs by no more than 5 nucleotides from the nucleotide sequence of the corresponding sense strand set forth in Tables 2-5 or the corresponding sense strand set forth in one of SEQ ID NOS: 1577-3166.

4.-44. (canceled)

45. An antisense oligonucleotide agent for inhibiting expression of BCL11), wherein the antisense oligonucleotide comprises at least 15 contiguous nucleotides of and differing by no more than 3 nucleotides from the nucleotide sequence of any one of the antisense oligonucleotides set forth in Table 7 or 9 or set forth in any one of SEQ ID NOS: 3167-3280.

46.-63. (canceled)

64. A conjugate comprising (i) the dsRNA agent of claim 2 and (ii) a heterologous moiety.

65.-112. (canceled)

113. A vector encoding the antisense strand of claim 2.

114. A carrier comprising the dsRNA agent of claim 2.

115.-116. (canceled)

117. A cell comprising the dsRNA agent of claim 2.

118. A pharmaceutical composition comprising the dsRNA agent of claim 2, and a pharmaceutically acceptable excipient.

119. A kit comprising the dsRNA agent of claim 2.

120. A method of delivering a dsRNA agent to a cell, the method comprising introducing into a cell the dsRNA agent of claim 2, to thereby deliver the dsRNA agent into the cell.

121.-122. (canceled)

123. A method of delivering a dsRNA agent to a subject, the method comprising administering to the subject the dsRNA agent of claim 2, to thereby deliver the dsRNA agent to the subject.

124. A method of reducing or inhibiting expression of BCL11A in a cell, the method comprising delivering into the cell the dsRNA agent of claim 2, to thereby reduce or inhibit expression of BCL11A in the cell.

125. A method of reducing or inhibiting expression of BCL11A in a cell in a subject, the method comprising administering to the subject the dsRNA agent of claim 2, to thereby reduce or inhibit expression of BCL11A in the cell in the subject.

126. A method of treating, ameliorating, or preventing a BCL11A associated disease in a subject, the method comprising administering to the subject the dsRNA agent of claim 2, to thereby treat, ameliorate, or prevent the BCL11A associated disease in the subject.

127.-131. (canceled)

132. A method of treating, ameliorating, or preventing an inherited blood disorder in a subject, the method comprising administering to the subject the dsRNA agent of claim 2, to thereby treat, ameliorate, or prevent the inherited blood disorder in the subject.

133.-134. (canceled)

135. A method of treating, ameliorating, or preventing a hemoglobinopathy in a subject, the method comprising administering to the subject the dsRNA agent of claim 2, to thereby treat, ameliorate, or prevent the hemoglobinopathy in the subject.

136. (canceled)

137. A method of treating, ameliorating, or preventing an inherited bone marrow failure syndrome in a subject, the method comprising administering to the subject the dsRNA agent of claim 2, to thereby treat, ameliorate, or prevent the inherited bone marrow failure syndrome in the subject.

138. (canceled)

139. A method of inducing expression of fetal hemoglobin in a subject, the method comprising administering to the subject the dsRNA agent of claim 2, to thereby induce expression of fetal hemoglobin the subject.

140. A method of increasing the level of fetal hemoglobin in a subject, the method comprising administering to the subject the dsRNA agent of claim 2, to thereby increase the level of fetal hemoglobin the subject.

141. A method of increasing the ratio of fetal hemoglobin to adult hemoglobin in a subject, the method comprising administering to the subject the dsRNA agent of claim 2, to thereby increase the ratio of fetal hemoglobin to adult hemoglobin in the subject.

142. (canceled)
